United States Patent Application Publication US 2007/0067865 A1 - sequence listing, part 62

SEQ ID NO: 396538 - DNA, 563 bp, Oryza sativa
gcccgaggagcggaggcggaccacaagtctaatccgcgtcgtctgcgcgttcgtgggcgaggaggagaaagaagaggaggaagagagggaagggggcttgatttgatttgggcgcgtctcgtggagtatccggttgccccttctagtgtgtaacttggagcaaatttggaccctgagacgcaaatcagtcatggctggttctcttgcggcgtctgcattcttccctgtcccagggtcttcccctgcagcttcggctagaagctctaagaacacaaccggtgaattgccagagaatttgagtgtccgcggaatcgtcgcgaacctgaatccgtctccaggggccatgcaagtcaaggcgcaggcgcaagccttcctaaggttaatggaaccaaggttaacctgaagactacaagcccagacaagggaggatataataccgtacactgctccgaagacattctataaccaattgccagactggagcatgcttctttgcagctgtcacgaccattttcctggcagctgagaagcagtggactctgcttgacttggaagccgaagaa

SEQ ID NO: 396539 - DNA, 441 bp, Oryza sativa
  unsure (1)..(441): unsure at all n locations
gacgcangttnnaatncttcggggccgcgacttcttgcttttccgccctcgccaccacatcgacacgccgagatccgccgttgcatcgcctccaatcgagcccgctcacctcctgcatcaccagcaccactctccgcctccctggccgccgtcgcgccgggtcgagtgccgctcgcgtgcgcgcctccttccccaccgccgattggattcttgtgcagaaatccatcaattcctcaatcctcactagacacatcaacgctccaactccaggctagagaagagcagaaggcttgcggagaagaatggcttctgccgagcgcagaagaagctgagggtcctgctcatgcccttcttcggcacaagccacatcggcccctgcaacgaccttggcgtccgctnggcgcgggccagaccggatgttcgttggagnccacttttggc

SEQ ID NO: 396540 - DNA, 548 bp, Oryza sativa
  unsure (1)..(548): unsure at all n locations
cacaagccaaacgcgaggtcaagctcgaacaaaagaaacgcatagggagcagcatgcctcgcaacagcggcggcggcgccagcgccaattctgctgccgctcttcttgtcggcactgctgcttcgatgcttcgtgtgttatgccgacggcggcggcggcggctcgctggacgccgacgtcgcggcgctgtcggacttccggctggccgccgaccggtcaggcgcgctggcgagctgggacctggcagccaacccagcgccgtgcgggacgtggcggggtgtcagctgcgcgggtgggcgggtgacgaggctggtgctcgagggtttcggcctgtccggcgacgccgcgctcccggcgctcgcgaggcttgacggcctccgcgtgcttagtctcaaggggaacggcctcaccggcgccattcccgacctcttcgncgctcgcggggctcaagctgctgttcctcgccggcaactcgcttgtccggnccgataccgncgttcgattgggggcgctgtaccggtgtatcgnctcgacctgtcgtttcaana

SEQ ID NO: 396541 - DNA, 394 bp, Oryza sativa
  unsure (1)..(394): unsure at all n locations
nnnnnnnnnnnnnnnnnnnttttttttttcatggaacgcaacagttgcatgaaccactcttatacatacttaaacaaaaacagggacaatgccaatctctgaaggcgacatggatctcaactctgaagtctgaacactagctcctaattgctcacctaatgagcttagctaccactctacaagaaccagaaaagggagcagattaattaagatgatctgacaaagaccaaatatctgaacatttgccatttggaattgaggagggagaggccttgagccacttccagtttcaggatcacgctgatcttcttctccaatttctgaaaattaacctggctcgattgtaatcagcaagttggagtttacaaaaatagaagantctggcgggtcgatc

SEQ ID NO: 396542 - DNA, 1384 bp, Oryza sativa
  unsure (1)..(1384): unsure at all n locations
cctccgctccttgcgccaagacgagtcgcggctgaacaggggaggggcgccgatctccatccggcgagcagagcagggcaggggaggggatcctgaattgtggaggacttagaggttgtggcacactacagctttgaaccatgtcatcgaagaaaatagagttggaccacaaggacatggtccatgattcagctatcgactactatggcaagcgccttgcaactgcctcctcagactccactgtcaagatctccagcataggcggcaaatctgccccatcccagctccttgcaacactcagcgggcactatggccctgtgtggcgtgtcgcatgggcccatcctaagtatggtactatcctcgcatcctgcagctatgatgggcgtgtgatcatttggaaggagggtgctggaggccactggtctcaagcccatgtatttactgaccacaagtcctctgtcaactccattgcttgggccccatatgaggttggtctttgtctcgcctgtgggtcttctgatggaaccatttctgtcatgactatgcgagctgatgggggatgggacactgcaaggattgagcgagctcaccctgttggtgtgacagcaatctcctggggctccagcaacagcacttggttctctgggctggttcaggagagcttgtttataagcttgtctctggtggttttgactcagttgttaaggtctggggatttgtcaatggtgcctggaaactggagagtcctcttccttcagatgttcacacagactgtntgagagatgttccatgggccccagtgttgggcttanctaagccgaccatcgccaccgcttctcaagatgggaaggttntcatttggagtagagggaaagttggtgataagtgggagggaaaggtcatgcacgacttcgggtccccttgtttggagggttncctggnccttgactggaaacatattatctgtagctgctggtgagaacaacataactctgtggaagcaagcatcagatgggcaatgggaagaggtgatgaaggttgagccaacaaancccgagtcatcggaagaggtgaagaaggctgagcagtaggaagattgtgtgacggcttcagttttttggcatattcacattttgataagattctgccatacctattcttttttttgcaagcaaaccaacagaacattcaatcacctattgtttagtacttagtatctttacatcagctgcatttctnctttggatgggttgtgatttagaatgcaacgcttttctgattgttgtacctatttgtttctgtatatctttgggctttgttttgatcattgtcgaacatcacagctattacaagtgttatcatgtactggaaaaaaaaaaaaaaa

SEQ ID NO: 396543 - DNA, 424 bp, Oryza sativa
  unsure (1)..(424): unsure at all n locations
gcccgctctcgtcgcagcgcaccccgtcgcgtgcgagactccatccccgtcacaacaatgtcgtcccgccgagacgtcctcgctgttgtcctcgtggccgcgctgctcccgccggcgttgtcccgtgggctttggctggggcaccacgggctggggcacgggcacgggcgatggcgcgcgccgcatgtcggcggacacggccagggacaggggccgcagcagcacgcgccgctcgggcggacgggtggtcgtcggcgcacgcacgttctacggcgggggtgacgcgtcgggcaccatgggaggggcgtgcgggtacgggaacctctacagccaggggtacgggacgaacacggcggcgttgagnacggcgntgttcaacaacggccttagttgcggcggttntttcgaggtncgttcgacgccg

SEQ ID NO: 396544 - DNA, 291 bp, Oryza sativa
  unsure (1)..(291): unsure at all n locations
gtcgcaaggnggccgaaggggagaggaggatccaaaccccaaaccccccccgatccccacgacgcgccgccgccccgcaccgagatggccgccggggacgccgccagggcgccaccggccggcggaggcgcagtcgctggtggagtccttctgcggcgtcacctccgcgacgccccaggaggccgccttcttcctcgagagccacaactgggccctcgagtccgccgtccgctccttctacgactccgccgacggcgaacgccttccgccgccgccgccgacgaggccgan

SEQ ID NO: 396545 - DNA, 432 bp, Oryza sativa
  unsure (1)..(432): unsure at all n locations
cgcgacagtgacgtgtgtgcgcggatggcgtgccacgaggtgggcgcgccgcggcggaggtggtgagacgggcgggctcgcgcgcgatggttgtgtgatcggcgcggcgcggctgctcctcggtggtcggtccgtgcgtctttctttttcttctttggctggcggcggcggcggcggcggcggacaggggtggtggtggtggccgccacggggaggcagggagggggcgcgaagatgagctgcttcccgtgcttcggcggcggaaagaagaagagcctgagtgccgacacggcgcggttcgacgacgcggatgcggcgccccgcgtcgcagatgacgccgcccggtcccgggcccgccaacngggtggagcttcaagtttttnttccctttaagttaagggttaaatttcgcgtttgggtaaataatggcaa

SEQ ID NO: 396546 - DNA, 478 bp, Oryza sativa
gctcgacatggagaggcagctcgccggcgcggacttcctctgcgacggcgtcggcggcggcggctcggagcgggaggctgcggctgcggctgcacgggcggcggccgtgtcggcaccgcgctgttcgaggacgggagggtgcgcccaccgcagccgcagcaacccgccgccgaagagcgtgggcggtggcgtctgcagagagcgacggagggctcctcctcctcctcctccgccggcgccgcgcctcctcgtcattggcgaggctgccggtgttgctcaccggcatctgcagcggcggcgcgggtagcgccggtcgggggtcattcttgtaattaagcagctgtcgaggggtgattatgtgaaagtggagtgaacgtttctttcttttttctcttcctcccatggattctttttgctcttgtcctcttctgttcctttcttgttttttaaaggaatgataatattttttgaccttaaa

SEQ ID NO: 396547 - DNA, 460 bp, Oryza sativa
  unsure (1)..(460): unsure at all n locations
ggggacgtgttcggccaccgcaagggccgcgtcgcgctggcgctgcaggagacgccgcgctgcctgcccaccctcgtcatcgagctcgcgatccagacgaacgcgctgctccgggagctcgccaaccccgccggcgcgcgcatcgtcctggagaccgagcgccgcgcgccatccacggacgccgccgccggcaagcaccggagggcgccgccgctgctggacgtggcggcgtggaccatgttctgcaacgggaggaagaccgggctcgcggtgcggcgggaggcgacggacgacgacctcgcggtcctggagacgctgcgccccgttttcatgggcgccggcgtgcttcccgcttcaacaggtcgtcgtcgtcgtcgtcttagtcgccgaagaaggggcggcggcggcggacgacgaggttggctaaatncgcgcttttttgaccattttgtcggtttgg

SEQ ID NO: 396548 - DNA, 321 bp, Oryza sativa
ctgacctcgccggcgagccgccgccgtcgctgcccgaggccagatccggcaagcccaggccggatctggcacctcgccgccactccgacgacgacgaccctgcggtgttctaccttcgcggccggtcggcgcggctcaacttccccgaggagatctccttgctggcttcgccgtcagagggtggcggcgcaggcgagccccgcgagccgacggcggcacgtgtccgcggcctcgatccggaagaaggccatcgaggtcggctcccatgtcgacgcgctccagaccggcatgatggtcgcgccgacccaccaccgtgagcag

SEQ ID NO: 396549 - DNA, 381 bp, Oryza sativa
  unsure (1)..(381): unsure at all n locations
tctagaacctggtttaactctagattttgggaactggctgtcactagtttactcttatctgttaactccagtgtagctttgctgacctcaaagcagcacagctgtgccgcagtagttagatgttgtcttatttgtcatacatagtacttatcttcagaaattgtgcctgatctggcttgtaatcaaggacgggtcaaatagtttgacatcatcatgccctgctgtctgctagaacatgtgatgatatcagatgaaacccgatatactcctacggataagagttgacagagtcaagcaatgcatgcttgcatagtcaagatttgtcggattttttgctgtgataaaaatatatggccaggacagagtagttctgcaaaanan

SEQ ID NO: 396550 - DNA, 466 bp, Oryza sativa
  unsure (1)..(466): unsure at all n locations
cgctgttgcaggttgctggagatctcctgaagcaataccaggaaaaatttaagggagggacactctcagccacctggaactacttgagggactccatgggcacctacctgtcccagccgaatcctgtcacttctcgatgggaaggggaagaccatctacgggatcccaactttcagctggatgcattcagataccgaacatctcgattactgcacagcgttgccgctcgactccagaagcatagcaagacgcttggaggatttggtgcatggaatagatgtttaaaccatctgctcacacttgcggaatcacacattgagtctgtcattcttgcgaagtttataggaagcggtcaaaagatgcccggatgaaaaacacggggattgttgaaattggtgtgcgacctttacggcgctttataaggancttggaagatataggggacctatcggaatgtggctatgtt

SEQ ID NO: 396551 - DNA, 463 bp, Oryza sativa
  unsure (1)..(463): unsure at all n locations
ttatgaagcagtgagacggcgaaactgaaaggtatctatccttagtttggaaccctgattacggatgatactttcatatttccttgagagttacgcatgcgtggatgcatgaaccaattaatgtcagtgacacaatccaaatcgaccgttagccttttgtcgaaatgtgtaaattgttagataggacatggcaagggacatgtatatgcatgcctgcatgcatgagtgagtgcatgggaggctagctactccgaaatagcggggtgcagccattggtgatcccttaattaattctcgatccactgatgattaattagcttgtaattctgtctttaaaccttttttttaatgacgaggggagagaaaaagaaaatgnaattttggtcaaaaaaaaaaaaaaaaaaagggcggccgcncccggtggagctccagcttttgttcccttagtgagggtaattgcgcg

SEQ ID NO: 396552 - DNA, 617 bp, Oryza sativa
  unsure (1)..(617): unsure at all n locations
atcgataacattcgatcacattcggctagtaaccaagcagttcttacgctagagctagctcgagcaatggtgaagtgggcagctgtgatggagatgcttctgctgacggcagcagcgacggcggtagcggtggtggcggcgcagtgtgaccctgagcagctatcggcgtgcgtgacccgatcttctacgggacggcgccatcagagtcgtgctgctccaacctacgcgcacagcagaaggaggggtgcctctgccagtacgcgaaagacccgacgtacgcgtcctacgtcaacaacaccaacgcacgcaagaccatcgccgcctgcggcatccccattcccagctgctaggctcgatctcccgccgccgccggccatgatgcgtacgtggcatatatacgcgtggtgtgtacgtgcgcttgaagaaaagggcgtgagtttgaattaataattatccagtacgcgatgtttgatcgatcgatgatgtgccttttttttttggtatttgaagtttgaactctgaatttcatcttgtgttaattggagtatgatagctgtgtgtacattcgttttggaggtagaggccggtttaattnnnnnnnnnnnnnnnnnnnnnnn

SEQ ID NO: 396553 - DNA, 523 bp, Oryza sativa
cgtatctaaaacgctggcagagaaggctgcctgggacttcgccgcaaaggaaggcttgtagctggtcgccctcaatccaggcttggtattgggcccaatgttgatgccatcccctacttctagtctccatatgctgcttcagattctcggaggccagaggtttgacatcgatgacttctacattggctgtgtcgatgtcagagatgtggcacagtccgcggtagtgatctatgagaacacatcggcacagggacgccacttatgcatcgagtccatagagcgtctgattgatttccatgataaacttgctgagctttaccctgaattcccgatccacagaatccaggaggataaacaagggtgggtggtgagatcaaaggctgcctcgaagaagctaattgatcttggtgtgcatttcattccgttcgaaaaaaccatcagggactctgtggattgcttgagaagcaaaggttatatataagcctgtgaacatatatttcgtacctgcccgggcggccgctcg

SEQ ID NO: 396554 - DNA, 690 bp, Oryza sativa
  unsure (1)..(690): unsure at all n locations
aaaagaaaaaggcagatgccccaattgttctgtcgactgcaccggaggatgcacctacccactggcagcagaccctattgtacttgtttgaacctatcgagctaaagaaagatcaaaatattgagggttctgttaccatatctcaaagccagcaacatgctcgcttcctcaacatctgcctgaaatattttactagagatcaatggtatgttaaagaatcggtgatgaaataagacgggggtagcttcaagagtggactgcaggatctcatatttgtttttcctgtgcacgttgaagcttacttgcaattttggagaatctttgacaagcgtcacgtactgacatcctgatgacaagcgtcttttggttcctatttggaaagctggattttttttttttaggaattgagtgcaactccgctagaattcgtacagaaatcctttttttcttgaaaagggcctgattagattaacagcctgatgatcatgtgcattcagctgatgaaaggagcagtgagaaactcataattacatgccgaccaagggtgggataggttttcctgttaagtttgtcttagctcatgtcatttggttacgctttgttattttttcctatagactaagatagcaatgttcttttctttgtaagaacaaattgtcnnnnnnnnnnnnnnnnnnnnnnnnnnnnnnn

SEQ ID NO: 396555 - DNA, 1212 bp, Oryza sativa
  unsure (1)..(1212): unsure at all n locations
gnggctgcgccgcagaggtggtgcagccagccaagggcggtagggaccttctgcggatatttaaggagctgaagcaatcagtcgtgtctgactggggcggcgtcaggccgcctttggtagaggaggataaggagttcctagacaaaaagcagaagctgcaggattgggagcagcagttgactagcgcatcacaacaggctgaagcacttgtgaaggctcagcaagatatgggtgaaacaatgggggcacttggattggcattcatcaaacttacaaaatttgagacggaggaagcaatgtatgactctcagaggataagagctgctgacagcaaacgtatagccactgcagctgtcaaagctagccgagcatgtcgagatttgaatacgcaaactgtcaaatatctggacactctccatgaacatctagggataatgctgtctgtccatactgcattttctgatcggtcaagtgcattattgactgtacaaacgctcatgtcagacctggcatcattgcaattgaggattgaaaaactcgaagcagctgcatcaaaaatatttggtggtgataaatctaggcttcgcaaagttgaagagttaagggaaacaataagggctactgaagatgctaaatgctgtgcactaagggaatatgagagatcaaggaaaataatagaagtgaactccacagcctagaccgagagaagaaggaggatatgcttgagatgataaaaggatatgttacaagccaagctgcatacgctgagaagatcgtggagggttgggagacagttgcagaggagacgagtggatacgcccgaagatctgataacaacatagcgtggtagcattcacaacttttgcccgtcttctcttggttggcacatgtgagtgtgtatgtacaatgtgtaacctaggatggtgaaggccaaaagtagaagaaagacctaattcaatttgtttttcatttatttaaagaatattggcgtagttcaactatcgggagtacagacgcacatcgtcacactactgccgtactgcgcatacgattggagctgcctgcctgcttggttaacttctgcaacgtttgttcagcttagtcagcatggttttgtttccctattaggatcggtttgcaagtaccttaaggtcgcttgctaaattatgaagcatcttaaaaggtcgcttgctaaaaaaaaaaaaaaaaaaa

SEQ ID NO: 396556 - DNA, 706 bp, Oryza sativa
  unsure (1)..(706): unsure at all n locations
aaattcgctnttncncnagctggcgaaagggggatttgctgcaagncgattaagttgggtaacnccagggttttcccagtcacgacgttgtaaaacgncggccngtgagcncgcgtaatacgactcnctntagggcgaattgggtnccgggccccccctcgnggtcgacccacgcgtccggagactacttcaatttggttaagacgtttcagaaaacaaagccgaatttacatgtctacactggtatctccgaagtgcctcgttttcaacgtcaagaatcgtcagatgctcaccaatctgaacggccatagcgttatgttccttagaggactactcgttaaggtgttcctacaagaactacctgttaaggtgtttgttagctttatggttcagtatttgtggcctagacgcaccaggcagccattcatgctattgtgcttcttttgtggattggaataggataagaagcttgcacatgggacttatagtggggcctgtactgtctgaatggggtcctaatacattatttttccccctctttgtgccttatgtntattggtgctntntgaaataatgtnccatgtanccgataaatcatcattgacatntcaaagtgcncctntgtntgcgctnnnnnnnnnnnnnnnnnnnnnnnnnnnnnnnnnnnnnnnnnnnnnnnnnnnnnnnnnnnnnnnnnnnnnnnnnn

SEQ ID NO: 396557 - DNA, 527 bp, Oryza sativa
  unsure (1)..(527): unsure at all n locations
gagaaccnccttcatgatcaacaggaagcaatgttgaagactgagctccgcaatatggagagatcacaaaaacgagaaggaatagatatgacatatctaaaaaatgttatcctaaagcttctggaaacaggggaagtgggagcattgctgcctgtggttgcaacattactgcaatttagccccgaagagctaacgaaatgtcagcatggcgtcctttcagctgtggcttcatcgccagcaactgccggtaccagacggtggatccacgccaaattcattcttctcaagattcacattctagcagaggtacatagatttgacattctagctgggggtagccggagaggatgctgtttgcacgaaatcccagcggtttttctggccatagatgattctatttgtttattatttctaggtcgccacttcctctcgtcacattttgtaaaactagtgtatataaaattatgaacattataagcaattttatgcctaaagtggaagggataatgaaaaaaaaaaaaaaaaan

SEQ ID NO: 396558 - DNA, 462 bp, Oryza sativa
  unsure (1)..(462): unsure at all n locations
cgtncgacgagcggacaggcaggcggactgcttccaaccgcgggcgccgggagcggcaagatctcttgcatgccggccatgtcggcgtcgtcggtgccggcgtacccggtggtgtccacctcgggcaccccgccgccgtacgcgacggcgtacgccacgccgagcttctcgccggcgcantgtccgagcccatccaacatcgggagggcactgctggtcgaccggcggtncaacgacggccgagcgttcgacggcagcatggagttcatggggatggcggtcagcaacgccgtgttcgacctaccgggcctgtgaatcgatcgatcacagggcccgtgtctagtgttacttaccctcgctgtgtnagtagttgtatgttgatgcgtattctttcggaggcggctgtttgcgttcgcgttgcgcctcagttatatgtgttgaatcttttaatncatgtgaaaa

SEQ ID NO: 396559 - DNA, 410 bp, Oryza sativa
  unsure (1)..(410): unsure at all n locations
ggcaagggtagacaaaaaagaatacattcttacggcagagcagagcagagcagccggccgaccgagtcgatcgtcgacgagagatggtcaccggcgtcgagcagatggtgtgcgtgaccggcgccggtggcttcatcgggtcatggctggtgaaggagctcctccaccgcggatacgccgtgagggcagccgtgagagaccctgagggcagaaagaatgctcatttgcatgctctggagagagctaaaagaaggttgtccctccacagagctgatgtgttggactgcaacagccttcgtgctgcgttcaacttatgcgatgtgtttccacgtggcatcaccagtctcaatgacctgacttctgcactgctatgaggacaaagatgtcanaatgctgtgcgacatggatca

SEQ ID NO: 396560 - DNA, 431 bp, Oryza sativa
cagatcaaaacagtgacagctcatccttccatagtcaatcagctcacgtgtgaagttattgatcgatcaaaggttgtgattgatggaaatttgattaccgggatggggcttgggacggtcattgatttttcgctggctattattaaaaaattctttggccatggacgagccaaaggcgtaggcaaatggcatggtttttgagtatcccaagagctgaaacacctaaaatatatctggcactctgtaatacgcagacgtgagacatttagttgtgctacaagtatattgcagtagctacgcttgaagaccaaggtcaccggtgctcttcgtcttgctgtttatgggcttcactctcttgagcacacatatccctgtgcgcatggcactggcggaatcatccctatattgtgggaggccattacatggaaatc

SEQ ID NO: 396561 - DNA, 403 bp, Oryza sativa
caaatgctggacacaccatttacaattctgaaggaaagaaatttgctcttcatcttgttccatctggtattctccatgaaggaacgctgtgtgttgttggcaatggagcggtgatccatgttccaggattttttaatgaaattgatggtcttgaatccaatggagtcaattgcaatggaagaatattggtctctgaccgggcacatttactctttgatctgcatcaggctgtagatggacttagggaagcagacttgctaattcctttatagggacgactaagagaggcattggaccatgttattccagcaaggcactcgaacggactgcgagctgtgatctaaggacatggacactttgggatagctgatgcttgttaaaatgcactcaaggttaaggcttt

SEQ ID NO: 396562 - DNA, 354 bp, Oryza sativa
  unsure (1)..(354): unsure at all n locations
ctcagccagtttaccactcacactagctgagctagaactcaccactcactgcagttgcagcatggcgcctttgctgttcaaggacatgaagagcctctcgtgctcgtcgccggcgtccacggcgatatgcccgagcttggagcggcaccgatggtccggccacacaagggcggcgccattgctgcgagccctctctgccaggtccccggtgagccaagaacggttcacaggcaagactgcaggagagggcagcagcatcagcacaaggcggctgccgcgaatggcggcgagctcgtcagccccgccggctcatccaggtactgctcanaccgcgcgcgcgccgaggagatcaga

SEQ ID NO: 396563 - DNA, 830 bp, Oryza sativa
  unsure (1)..(830): unsure at all n locations
ctcaatgggagggcacggtgcactaacaatctacttaaagaacactgataaatacaagtcggtgtctgcattctctccggttgtcaatccaatcaactgcccttggggtcagaaagcattctcaaactatttgggcccagctaaatcagattggaaggaatatgatgcaacctgcctgatcaagaagtgcaacaaaatttcaactcctattctgattgaccagggagaggatgacaaatttctggcaaagcagcttctacctcgcaactttgaggaggcgtgcaaggctgtgggagctcctttgactctccgcatgcaacctggatacgaccactcctacttttttattgctacattcattgatgatcacattgctcaccactctcaatttctgaagagtgcctgactcccaagccacatgtaattggaagccatggagagacaggggaggctttcaatctttctacttactatgccctagcattatttctcagcccggacaatgtcaggtncctttgatagcctgagtcgaacagtatctccagctggatataagatgaatgatttggttttgcaggctattcaagtacagtataattggatcttgataccgccttcgctgtcttttactctgtagatttgttgnccctggtgaacgatttgttaagcttagaaatgtggatcaactcgtctagacttctacaggtaagcaaatcatatgattggtaggctcgtagcccagacgaagatctagtaggcctaatatgtcgatgtcttcccacgtcagaatcaatttgctgctcccttttgaaaccaaaaaaaaaaaaaaa

SEQ ID NO: 396564 - DNA, 401 bp, Oryza sativa
aattgccagtattttttggtggaaaatgcaagtgcgaggcatttggaggttgcaaaaaatcagataaaggtccttggaaggatcctaacataataaagagggtcctgaatggcgaacaaattatgggaggcaaattgtgaccatatcaagcactgatggaaaaataattcgttatgctgggccacaatacccaacaagaaaaggaagtgatggctcagcggagtctgggtctgaagtggaagatggcgcgtcacctatggcatcaaggaacctgataacaaatccccttttgacccctgttcatgaggagtcaaaattggcagcacatggatttacatctgcttccccttccatttattgaaagaaagcattcctgttgttgacaaggttgtggatgatgt

SEQ ID NO: 396565 - DNA, 789 bp, Oryza sativa
gttcctgatcatgccgctgatgaaggaagaggccatcgacgtcgacttcatccagaagaggagcgagccggagctgatgctgagcagcgacagccatgcccgcgtctacacctgcggcaacgtgcagtgcccgcacagcaactacgcgctcggcttcctcgaccgcaacgaacgcaacgcccatcagtacgcctgcaagcacaacgccgccgccgccgccgccgagagcaagccgccgccgccgcacatcttcgagccactcggcagcttcgacttcgacctccccgtcgacggccagagatgcctcgccgggctgatgaccatgtacgacaacgacgtcgccgccgccacgcagatgcaccaccaccaccatcagcagcagcaggctaatttcttcatccgcgacgacgcgccgttcggaggcgacgtcgccgccacggcggcggcggcgccggagttcaggttcagttcaaatttcaacgtgacaggagggggcgccgtggactacggcggcgccatgcagcaaccgccggcgaagtacgccggatccaactggttctactgaaacgaattcgaatcgaatgggaaccaaaagaatcaccacccctagttcgattcgatcagtagcttgtagctgtaggggattagaggagctcataagcctgattaattttcagtgtgcttgtaagaattattggttaataatttttcagtgtagatccatgctatgcaagcttgcaaaacacagttggctctgcaaaacggttcacgccaaaaaaaaaaaaaaaa

SEQ ID NO: 396566 - DNA, 970 bp, Oryza sativa
  unsure (1)..(970): unsure at all n locations
attgtttcagactattattggcaatggttacccaattgcgttgttggatgaggaaaagatacttcctgttggaaaggagattacagcaataggctatattcgacctcataaagcaagtgttgagatcagctcatgctcagaaataccttttttcttgtctgaccttaccaaggatgagatggaagccgagttgtcttctcgtgctaaaacactcttttgggctagtgttgttcttggaacaatgtcagtttgcttgctgggctttgcgacttacaggagctggaagaagatcaaagagcggagggaggcaaggcaagcccaagaggtatttcgacaaactactgatgaagttacagacgatcagtctagcgatgaagaggctggtgaaatgggagacgggcaactatgtgttatatgcttaaggaaaagaaggaaggcagcttttattccttgtggtcaccttgtctgctgctgcaaatgtgcactgattgtggaacgtcagttcgacccattgtgccctatgtgtcggcaagacatccgatacatgataaggatctacgacaattgaggcttcttgatgttttgctgataacccttcgacactgtatggtcacccagattgtctgcgagcctgaagacctccaactgatcatcctgcgtgcactagtctaagctacttggctaacaaaactatgttaccctgaaattttgtgtatatatatgacgtgttagtcactccccaggagaactcatatgggcagagatcaccggatacttttcatagtcgcatagaatcctgtagctagccaaactgccagagtcatgagtgacgcctatagttgcaattacagtactaccaagtttttgttggctctcccttctcatgtctgtgcattctgtaaagatggttttgccgctagcaaaagtatgatggttcggatttttnnnnnnnnnnnnnnnnnnnnnnnnn

SEQ ID NO: 396567 - DNA, 477 bp, Oryza sativa
  unsure (1)..(477): unsure at all n locations
ggcaaatgaaaatgcacaatgcacagagggaacaagcaatggcagctcctcagccttggggcccacctcaaccttggggccctcctccaagccacctccctcctggtggtccaggttatggtggacatccacagttcatgcccccaaggccgcaagacaattattatcctccccctgatgtcccctctatggaaaagcagccacactacggtatttctgcctatggacgagaagcaccaactggtgtttctgcttctgggaatcaaccaccatcacatgtgggcttctcaggtcagttttttgttgcactttgagctaaacacgatagtacttttatctttaaaatgctaattcangaggcagctactgatatgtgcatccgtcaaaaggttacacacaacatgcaaattcctctctcctatgctgatgctgtgattggagcagctggtgctantattagctanattcgtagggcac

SEQ ID NO: 396568 - DNA, 530 bp, Oryza sativa
cgcgtaatacgactcacttatagggccgaattgggtaccgggcccccctccttcagcacagtagtccccatccagaaggggtcctcacaaacatggtctggaccattggttgatccagcagctctagggcaatcgaggcggaagaagcaaactgccctagatgcgaaggctgcagcttattcaaagcagctccagaaggacaagggcggaacaagagcacgataagaggaactcaatacagtttcttttacatgtttttcatcgagtttaaggggaagtttttagaatggtcagtctgtagatgaattatttccttctgttttgttcctttcgtgcggaaagaaagcggtagtgcttcagtaggaagaaattcatccagctttatgtatatgtggtagtgttttctgttcatctcaggtgcttctgaacaaattggtgtccggaaccaaaggtatttaagctcaacgtgacaattcggttgcccttgtgtatatatggagtattctttcttctgtaaaaaaaaaaaaaaa

SEQ ID NO: 396569 - DNA, 730 bp, Oryza sativa
gaacgtgagaacacaagctttgattcagtaccctgatgtaactacagcttcagttgcgaaggaagcattggaagggcattgcatctacgatggtggctactgtaagctccacctgtcatattctcgtcatactgatctcaatgtaaaggcacacagtgacaagagcagggattacacaatccctcaaggtgcgatgcaagcagtaccacaaccgcctggtgtaccaacaacatctgctgggtggcaaggtaatccacaagccggtggtgcatatgcaccactgggagctgctgctccaaaccacggcacaacagggcaagtgccaaattggaatcccgggaactctgggtatgctccagctccaggagcatatccaggtcaaatgtactcgtcaccaatggcagtatggcgcatcagggggcttctctgctcctcgctgccccaccacaagagttggcatactctcgcagcagatgccgccgcctcaatatgggaaatcagcctggaaccagcaggtgcaccaggaaccggggcaaccacatccatcattatcgcttaattttagattcctattcacaactggtactatgccctttctaattagtaactttgtgtacctttgcaatagggcaaaaccagttccttttccctgtctttcttctcatggaaccttttttataaataaactcttcatccagttgttctaaaaaaaaaaaaaaagaaaaaaagg

SEQ ID NO: 396570 - DNA, 622 bp, Oryza sativa
  unsure (1)..(622): unsure at all n locations
accagtacaccgccgcgcagaggtccccggcgtgctcgtgctccgcgtcgactcccccatctacttcaccaacgccagctacctgcgtgacaggttcgcgcggtggatcgacgacgaggaggacccgtgccaaggagaaggcgcgagatgggcattcagtacgtcgtcctcgacatgggtgcggtcggaagcatcgacaccagcgggacgagcatgctggatgaactcaggaagaccctggacaggaggggccttcagattgtgttggcgaacccggggagcgagatcatgaagaagttggacagctccaaggtgcttgaggcgatcggccatgagtggatcttccccacggtgggcgaggcggtggcggagtgcgacttcgtgatgcactcgcagaagccgggaatggtcatgggcagtggagcaccccatgagaacctggtctgattggagaagaacttactgtagtatggttgagtttgatcaacctgaggttgtcaacaagcaaagccgagataaatataagcatctcgagtattgtagtactaagttgtcaaggaagttcaaaggaaaaaaaatcacctttttttttgcaaggcgaaaaaaaaaaaaaaannnnnnn

SEQ ID NO: 396571 - DNA, 576 bp, Oryza sativa
  unsure (1)..(576): unsure at all n locations
caaaccaagcacctctggcggctcccaagttcagataccaagaaagaaaattttcaggtcaagtctggcatatgggctgactcattgagccgtggactgattgatctgaacataactggaccaaagaaggtgaacttagccgacgttgggattgtcggtggcctcgatgacgggtctgatgataaagctctgccctcatggaccatgggtgcaggaggttccagcctaggaatgtccggaattccttcatctacacaaagtggtggcattgagagcttagctaactacaacaagtaccagtttggctttaaatgagctttcatgtgaggctttctagtatatgccggttattgtcggaatgtcggcttgtgccttatttattttttgttgattctattctcccctcttttgatgcttacattcctttacaatcgcctccaaggatcgtgatcttggttcgtcttgtcgcgcttgtattgtatttattggatttgcggatgagagactcctacctatatcacaccctgattcaatttaactgtactgttatttcnnnnnnnnnnnnnnnnnnnnnnn

SEQ ID NO: 396572 - DNA, 334 bp, Oryza sativa
aattcggcacgagtcaggatgggagaatagatagaacagagtgggagaattttgtctcaaggaatccctctttattgaagataatgactcttccgtacctcaaggacataacaaccacatttcccagttttgtattcaattctgaggttgatgatctcgtcacatgatcgtgtttctgttaccggtgtacagttaaccaaaaacaaaaggagttgatttatgagtgaaagaggcagaacattcgcaggtgctattatcatacaaggaatataattgcgccagcttggaagcgtataacttcattgatgatgctcgtcgcacaggatattagcgt

SEQ ID NO: 396573 - DNA, 757 bp, Oryza sativa
  unsure (1)..(757): unsure at all n locations
ctcagcgtgttgaaaggttggatgataaattggatcagcaaaaggcgctttctggacaaataagagatgatgttactgatgcacgactgaagcttgagaatattggttcagaaattaagaacatcaaacaattggtttggggtctggatgaaaaaatggattcgatggaagccaancagaacttttcatgtgctggtgtgatgtacctctgccaatttattgagcaaaatggtggaaagctgccagaacgcctggaaggctcaaaaatggctgggaagcgttttggaagccaaaatctcatacaggggttgcaactggccatagaaacagggaattttgacaaggaaacgttcaatgccacttaagaacaactctgattcaagataaacaggtccaacgtctgccaaagtaatttttgtcagggcggtatccgagggcatctcatctttccagaccacgccctccattgaaatgctgtaaaggataatttcttactagtttaacatgtaaaaagttccagccttttcaagttttctgcttgcagaaggtgctgctacattttaaagcttgtgcaatacttagtggttagggtttttttaccgtgctatgctggcaccgcttgtggtttcagaatttcaggcaacactttgccgtaaataaaaggacaacacgtgtggttcgtgtgatgttttcaaacccatttcatgttttatttgtaatatatgctacaagcttacgtagaaaaaaaaaaaaaaaa

SEQ ID NO: 396574 - DNA, 679 bp, Oryza sativa
  unsure (1)..(679): unsure at all n locations
ttacgaaggctaagctaggactgattcgtctggacttatgtttcttagatatgtgctataaccagagtatttggtttgttcattactatgtttcattcgtttagttgtttagggttcctgtccttgcaggggtcatgtttctccaaattcattaattttgttttcttcttcactgtgctaaccatgccagttacttggaggagatcattagagtggcagactcccaaaggtggttggcttcgagctgttctcctcactggtcatggctttcatcagctggcagctgttctcagcttgtcagagaccaatgtaaggaatgagtttgcaaattgccggagattcacgctcctgagatggctcctgttgtacttccacagaattaggatgcgccttttcagccttgacactatcttttctgggggttcgatcatagaacttattatttagaatcctttttctgtaagttttagtggagaaacacatgctccagtgagttgccattgttaacagctcttataggcattgaactaaaagtatattttgcccctgctgtgcttcttctgtcaaccgcatggcatcatctaaaatgaaagcctataacattcagttttgtcatcagtttatgggaaagtgagtacactaaanatgattcnnnnnnnnnnnnnnnnnnnnnnnnnnn

SEQ ID NO: 396575 - DNA, 373 bp, Oryza sativa
gagaaaggaagagctctaaagttgaacaaggaccgccgtttagcccaggagaggaagaatgccgttatgttggacttggacgagtagcctagtgaaactgcagccgctcgtcctcttctccgtttagctggacttatctgtaacgagtgtttggaagtcgcgatttgttatcacgacgctatgcaaagcaatactgcagaaatactactactatactagatccaaaccagttcgtgtttatcaactcagcagtgcctttacatgtaaaggtctaaaccagtttctgttgtccggtcgctcagagtgcctttacatgtggaaacaaacgtgctgaaatgaaatctgattcctattggggtctattaaaaaaaaa

SEQ ID NO: 396576 - DNA, 296 bp, Oryza sativa
  unsure (1)..(296): unsure at all n locations
gaacatcaagcttgccgcacatgctgccatctgaaaaggcattttttgctgctgtatcttcgcttggaatatacaacaaagatgggatagtagtttatnatggaaagggactatttagcgctgctcgtttttggtggatgtttcgtgttttcggacatgataaagtttgggtgttggatggtggtttgccccaatggcgtgcttctgggtatgatgttgaatcaagtgcctctagtgatgccatcttaaaagccagtgctgctcgtgaagcaattgagaaagtttatcanggncng

SEQ ID NO: 396577 - DNA, 622 bp, Oryza sativa
  unsure (1)..(622): unsure at all n locations
aatntctccaatgnggtaatggngtaattaaaccngatgtattntcacaccatttgggangtaatgntcatagtttgagtatgtgattcaaggngtgntcaagtcaagtgtcagtaaccttggaaagactgtgttcgatgtnttctttcgtccagaacaantattgattattccacaaaantatgttgtcttaaagaaagcacaacatgaaggatgccaatatattgcaatcaacacaaacgctaatgcctttgtgagccaccttgcaggggtagactcagtattccgtgccttaccagttgatgttgttgctaatgcgtatcgcagctcaagggaagaggctcgaagactacaagaacaacaggggagacgagtatggtccattccctcccagattacaacaacaaatctacccagaattctcgaatgaatctaaaggcgagacttcagagtaatgtaactaagatctaatattaggaaagcaaaataaaggggtaattggatccatgtcattgcgaaaaatgtcgattaagataattgtcattacaaaaaaaaaaaaaaaaaaaactcgagggggggcccggtacccaattcgccctatagtgagtcgtattacaatttc

SEQ ID NO: 396578 - DNA, 348 bp, Oryza sativa
  unsure (1)..(348): unsure at all n locations
aagaataaagtgggtgacaagtgttgggaagcgggaacatagtgttggagaggtctttgagtccaaagcacaatggtgaggataatgacgnacaatataatcagactgttgcttatatttgtttttttgtacttgttatgatgctcccaagaatgatggggtcatgtccatcattttcccttgttatttgcataattacagggagactgttccttgatttgctaacaaaaataactgttgttacagtttatttggcaggctaatcgtgatacatgtttaacttttatgacgaagacaggaaataaagtagtacaaaaactttcatnnnnnnnnnnnnnnnnnnnnnnn

SEQ ID NO: 396579 - DNA, 399 bp, Oryza sativa
  unsure (1)..(399): unsure at all n locations
gttgcctgatnaaagacctaaacaacccacgtcncaaagaccccttaaactttcccctaagtaaataccattgaggcccctccggcctccatcattttatgacttcctgctacgagaaaatttgtaatgcaaaacatttcctattgttgtctgtagggaaattaagacttcaaatatatatatattttgcataggtctgtcctgtggggaaattgtcttgtttctattgacccactatcgggaagtcgggggcgccccgctgttgtagattagaatattcttatatgttatgctaagtgtaaaataattcaatgtagggctgacatgctggtgtgtggggtctcaacccagattacaatgagcatattatggtcatgttgagaaaaaaaaaaaaaaaaa

SEQ ID NO: 396580 - DNA, 478 bp, Oryza sativa
  unsure (1)..(478): unsure at all n locations
gttgatactggaggttatctgcacagtcacaacaagaagtacaacaggcttggtggtgggcagcaagaggtatgtggcattagagagaagaggctnaaatatttggttggcaacagagggcgtctaccttcccgttaacaaaagcaagtgaactcaacattcccatggttcgtccaaggttaacatagcaccagaattttactgacattttgttctgctaatgcttttaaatttaaagaagggacctaaaccctgagtcccgagtattttgttggttatagatgacgatgtgcagaaaatgagaaatatacaaacgtttcatgtagccaatttactttttaatattcagaacgacaagctgttgtataatttgtatttgctcttcatgctgacgctagcaagcacacctatcaactatgtctgtttactattaaaaaaaaaaaaaaaaaaaaaaaaacctgcccgggcggccgctcga

SEQ ID NO: 396581 - DNA, 1008 bp, Oryza sativa
  unsure (1)..(1008): unsure at all n locations
gctccgggtgcaggattcggcacgaggctgttactgtcatgggttctaaatttcgttgttactccccttggagctaagcttgattgtccctttcttgcgtttcgggagaaagttatcacagggcagtggaacacttcccttttggacttcagaatggcattccaagaaaggtttatcactgggccaaggcctccaaaagggatgttggatgcctccagccatttgttgccattgccgaatgcctccggggttgggcttgaatccgcttgccacccgtttccgccactttggcttgccgcctgttacaattgggtttttccacccccctttgttttccaaagccttaattgggtccgaacaagggttttgggcgggcgtttcccggtccgaagttccaaagggaacggcccgaatcaaaatttaagttggttagcccgttgaatggttgggaaaaagttgaatcctggtccccaaataacaaaccgcctttccttgaaaagcctggtttattaatatattccaaattttaattacaattttttggttccattggttcccttcccaggaattttggaagaaattttggggtccccccttggccccaaaaccaattttttttggccttgggggggcccaattccccttggggaaanggccccntggtttnttttaaaaacaaaaaaaaattcctttattcctttcccnggaaangggcgattnatttatttgnaatngaaatttcccncnccggtttattttgggcnattttccaanngggccgnttcttnggccccttgggggggtttttnaaaacnananccancntctnntnactanatnttccntnaactccccaaaaaggggggggggggggcccccgggtttaancccccaaattttccccccccccctcaaaaaagattgggnaanttncnctnaatttnanaaaaatnttccccttgggggcccggtcccttttttttantaaaaaacgatccngttgggaaa

SEQ ID NO: 396582 - DNA, 631 bp, Oryza sativa
tctcgaatgctcttggagctccaccgcggtggcggccgtttagaaataggacccccgggcgcaggaattcggcacgaggctgttactgtcatggttctaaatttcgttgttactccccttgagctaagcttgattgtccctttcttgcgtttcggagaagttatcacaggcagtggacacttccctttgacttcagatgcattcaagaaggttatcactggccaggcctcaaaggatgtgatgctcagcattgtgcatgcgatgctcgggtggctgatcgctgcaccgttcgcacttgctgcgctgtacatggttttcaccccttgtttcaagcttatggtcgacaggtttggcggcgttccgtcgagtccaaggacgccgatcaaattagtgtagccgtgatgtggagagtgatctgtccaatacaacgcttctgaagctgtatatatcaattataatttgtcatgtcctcagattgagattggtccctgccaacattttgctgggccatcctggacgcctgtatgaacaaaatctatcttcagaggcatatatgatgattcagcgtattgcattcaggcgtctgcctgggttaaaaaaaaaaaaaaaaaaaaatcgagggggggcccgg

SEQ ID NO: 396583 - DNA, 573 bp, Oryza sativa
  unsure (1)..(573): unsure at all n locations
tccacgngggggccgttagcaataggaatccccgggcgcaggattgcagggtgtacttcaggttataaattgggtatcccctggagtaagtggattgtcctttctgcgtttggggagtttatcacaggcagggaacattcccttgaattcagagcattcaagaaggttatcactggccaggccttcaaaggatgtgatgttcagcattgtgcatgcgatgctcgggtggctgatcgctgcaccgttcgcaacttgctgcgctgtaacatggttttcaccccttgtttcaagcttatggtcgacaggtttggcggcgttccgtcgagtccaaggacgccgatcaaattagtgtagccgtgatgtggagagtgatctgtccaatacaacgcttctgaagctgtatatatcaattataatttgtcatgtcctcagattgagattggtccctgccaacattttgctgggccatcctggacgcctgtatgaacaaaatctatcttcagaggcatatatgatgattcagcgtattgcattcaggcgtctgcctgggttnnnnnnnnnnnnnnnnnnnnn

SEQ ID NO: 396584 - DNA, 460 bp, Oryza sativa
  unsure (1)..(460): unsure at all n locations
tgtcggtgaataccgcatgtctatcaatggaatctcagagaaattttctcatgaatttcgtgagggtgtcagagcacgtcttgtggagaaggacctagctccaaagtgggatccacctgcccttgagtatgtatcagcggacatggtcgattcttactttgctcccctgggtgaatttgagcctgagttgacactgcctactgaatcgcgagaggcatttgtatgatgactctgcatgacaattccaagtagcgcttttgtttgaanccttatagatttttgagcccacactgtcgaccgttggcagcacataataacagataggattctcaatctattcttgtaccatatatgccttggtgtattgaaaggaactgatctccaaggtgaactcctaccattctnactttcataaattaatgccttcgcttnatttcatttatactaaaaaaaaaaaaaa

SEQ ID NO: 396585 - DNA, 220 bp, Oryza sativa
aggcgcagagtgcaccgtgttgttgcagttggtaaagagcgatattctgcgcctttttttcttgacccaaaccctgatttagtggttcagtgtttgaaaagctgttgcagccggtcatgcccaccgaggttcttacctataaagagtggcgactatttgaaagagcgattgagtgttacatacaaatagtcctatagcttttacatgtgtaaggaggcaa

SEQ ID NO: 396586 - DNA, 298 bp, Oryza sativa
aattcggcacgagaccttcatttcatgtttgaacttcccttttctttcttcaatatttaaagataaataaattgaagaaacctcattttcatccaattaagttcaatgttttgcattgcttgcaagaattctattgattctgattgcaagggtgacccttaaatctctaggggtcttttggttattattattgtgtagggctgattattattgagaattcaagtgtgattggttagtcctatatcgactaagaataagctaaatgaaggatatataagaaagatgacccatatactct

SEQ ID NO: 396587 - DNA, 243 bp, Oryza sativa
ggcacgagaccattataaaatgagaggaaatatattgagttataaccttggtggtatgggttgtagtgctgggattattgctgttgatttggctagagatatacttcaatctaatcctggtaattatgctgttgttgttagtactgagatggttggatttaattggtatcatgggaaagaaagatctatgcttattcctaattgtttctttcgtatgggttgttctgctcttttgatttctaa

SEQ ID NO: 396588 - DNA, 1114 bp, Oryza sativa
  unsure (1)..(1114): unsure at all n locations
gttccagccatgcggatccggaggaacgcctccagggtgctcgggtcagcctacttcaccacacagtcggaagcatcacgcgcatatatgagcaacctcccaccgacatcgtccgcgcctgcgcctgttgcatatngcggcggcggcggcgatcttggtggtcctatggtcactccagacgatgcttgccagctaagcctgtcgccatgggatctgccatatgagctcgaagatcctgatcccctggaggctccgttcgacaggtacatggcgtgcatcccttttagggcaagctttgtgtccgacagcgacaacaacgatgttgatcagatggagttggacgaagacaagatttggaattcaggtggagattgaggaggtgaatgatcagcagcaaccagttgaccacaagttggaccaaattggtgatccggcagccagaaagatgaaggggaagatgaacgagagcagcatggtggtgatggagatgcaagatgctgacaagcaggctggtgtttggtactgcaacaagaatgatggcaagaaatggcactgccgaaacatcgtcgacgggcccaagaccctgtgtgactaccacctagcaaagagccgctcttactacacccgcactggtgaggcaggtgctgcagctagttccaagtcaggccgagcaaaggcaccagctattgccaagccaaagtccagttccaaacgaactccagcaggtgagtcaagtgctcaaaacaactctattgcagcagcagcagcagcagcagtgagtgtgctgccaaccatctcctcccagccatccaagaggaaggcaagcaatggcttattaggtggtgatgcctactatttctatgatatgttcgtcccataccgcaagaaggatcgtggtggtagcagcagcaaacagcaagccggtgctgaggagaaggagatcctgccacaagataatgccgtcgccatggaagagaaaatggacggcaagaaactgtacgatggtgtttacaactcgtctgattactcctcggacactgctagcgacgacgagagcgacgaagactataccgttggtggtgccagcaagcgccgtaccaaaaaaaaaaaaaaa

SEQ ID NO: 396589 - DNA, 479 bp, Oryza sativa
  unsure (1)..(479): unsure at all n locations
tttttgatgccaacatttgggatgcattccctaaggacactttnattctcgttatgacgntatcgagagatactgccttcctccccttcttcctgccacccaaaatcctgccacccaaaatggtagtgtaagaataaacaagccattgcagtaggttctccgtgttgaagattagagtttcatggcttggatcaattgttggtattattaagggtatgcatgctggttctggggatcggagctcctgcgatggccggcgtttgtggtagctgcgaaataccgcggttcataattcgttggctgcaatcagttaaacccatttttaagttttgaaacaaagttgaaccccgttttaattatgtttcggtcttgtgatgactgaatgttttgaatgtttaaacctgtttttacctgtaccgtaccagatatgtcgtttaaacttatcaggcaccgacattttggatcttgaaaaaaaaaaa

SEQ ID NO: 396590 - DNA, 447 bp, Oryza sativa
  unsure (1)..(447): unsure at all n locations
gatgaggggggtggggggagccattggacataatgaatgaaagacgatggtgcgctaagttaaaaggcactcgacgtgcttaatattgcaactgctgaatggcctttgggctgtgcgtgactatgggcctgaagtgtgctgtgaaccatgtcggttttctccccctgtttggatgtaaccctccaatttttaaaggaggatctgaactttctcgctcagagagtcaggaagttgacaattcgacaaggatnttttgcaactcaactcgttgaagtagcgtttgaatgttacaagttttgctagaactatgcatgatgtttccttgggtgattgtgaaagccaagcctattgggaatttgtgataagatggcgatcccccatattgaaacgattttctgtagctcaaataatttattgcctnnnnnnnnnnnnnnnnnnnnnnnnnnn

SEQ ID NO: 396591 - DNA, 208 bp, Oryza sativa
ggcacgagctttctcttctgcctacttcccacgccacccccaccctcgccgccgattccgattccgattgcgctcgcccatggccgccgccgctctccgcgaccagctcaccgctctcctctcctccatgttctcccagggtttggtggacgagcagttccagcagctgcagatgctgcaggacgaggggggcacccgggcttcgtat

SEQ ID NO: 396592 - DNA, 346 bp, Oryza sativa
  unsure (1)..(346): unsure at all n locations
ccgaggcgaggnaggagaaacgccgcgccgccgcccgccgccgccgcgtcgccggagaagaagaaggagacggcggccccccaggaagggcggggaggagtgcagggaggggagcatcttcttcatctgcgccgacgacctgtgaagaatgtgatggatatgatgcatcatgcgtgcattgcatggcggatgataatcggagcttggctgtaataataatcgatctccaccataatataatacaatagtaatatacttagtgtactgtaatgaggatgaataaaggggatcaaatcaaggccaccatgcatggctagtcnttaaaaaaaaaaaaaannnnnnnnnn

SEQ ID NO: 396593 - DNA, 243 bp, Oryza sativa
ggcacgagaatgtgccgaggaagctgctggtgatgaaggtggcacgcaagtcagcaccgacgatggcagggctgaagaagccacaccgcttcaagccagggaccgtcgcactccgagagatccgcacataccagaagagcacagagctgctaatccgcaagctccccttccagcggctggtgcaggagatcgcgcaggacgttaggtcctatgttcgcttccagagctctgccgtggttgcgc

SEQ ID NO: 396594 - DNA, 520 bp, Oryza sativa
  unsure (1)..(520): unsure at all n locations
tcagtggaagatagcgagaagaacactgatagagtgcaaacaattgtcaccccaactgtcaaacatggagagtgtggtggaaagtgcatttaacggggcaacgaactaagatagttgttaaggtgcacatgccatgcggaaattcccgagcaaaagccatggcgctggttgcgtcagtgaacggtaaatctgcgcaaatatattcttccggttgtgcagtcctgatcagtactcctactattttatgcctttatgcttgcaggggtggagagcatgcagagcatgcagataacgggggaggacaaagaccggctggaggtggtcggccgtggttttgaccctgttcgcctggtggctctcctgcgcgagaaatgtggcctcgccgagctcttgatggtggagttagttgagaaagagaagacacagctggctggaggaaagaaaggtgcatacaagaagcaccctacctacaatttatcgccgtttgactatgtanagtatccaccttccagcaccaatn

SEQ ID NO: 396595 - DNA, 710 bp, Oryza sativa
  unsure (1)..(710): unsure at all n locations
ggnacgntggnantncatactgaagagagacctaatcaattaagtgaagaaaatggcagtgatgatgacattggaccatcagagtctgaagatgagttttacaaggatgttaaaaggcggaggactgaaaagctctcgagtaaagaacagaaatactcgccgaaccctgttattgaatcactggagcgaagaaactgaaggagatggcaagaggaagatctcataccagatggagaagaaccgggggttgactcgctcgagaaataagaagcttaagaatccacggaagaaatacagggttaagcatcaaacaaaacttgttaagcggggaggtcaagtgcgtggcgtgaagaagccctcaggaccatacggaggtgaaatgtctggtattaatccaaatgtgagccgtagtgttaggttcaagggctgatgtatcgaattgattacgcccaacatggaaatttttgtttgatggtaggaagtttcatggttgtaatttgccagtaacagttttgcctagagagagagagagagcatgcatggattgtctttcgattttgtaccaactagagtgtagagccctcccagtcccaggggtgagttgccggaagcatgtagaggcgcctggagcacgtcgtgcaggggaatccggatcggaggatccggttgcagagaatgagatggaccatttggataaaaaaaaaaaaaaa

SEQ ID NO: 396596 - DNA, 945 bp, Oryza sativa
  unsure (1)..(945): unsure at all n locations
ggcacgaggcagaaggactttttattagctggtaacaaccagagagggcaacaaatatttgaacattccatctttcaacactctagacaaaatatatttagtgggttcaatactgaggtacttagcgaggcccttggaataaacacggaggctgccaagaggctccaaagtcaaaatgaccaaaggggagatatcattcgagtgaagcacgggcttcaattgttgaaacccacattaacacaacgacaggaagaaccgcgtcaatatcaacaagtccagtatcgtgaaggacaatacaatggattggacgagaatttctgcacaataaaggcaagggtaaacattgaaaatcctaaccgccctgactactacaaccctcgtgctggaaggataactcttcttaacaaccaaaagtcccccttctcaaccttattggaatgggtgctgcaagagtaaacttataccagaatgctcttctctcgcccttctggaacattaatgcccacagtgtagtgtatatcatccaaggaagtgcgcaagtacaggttgccaataatcaaggaagaactgtgtttagtggtgtacttcatcaggggcaactattaatcataccacaaaaccatgccgtcattaagaaagccgagcacaatgggtgccagtatgtcgcaataaagacaatcccgaaccctatggtgagtcgggttgctgggaanaactccatattacgtgcattgcctgtagatgttattgccaatgcttatcgtatctcgagggggggcccggtacccaattcgccctatagtgagtcgtattacaattcactggccgtcgttttacaacgtcgtgactgggaaaaccctggcgttacccaacttaatcgccttgcagcacatccccctttcgccagctggcgtaataacgaaaaaggccgcaccgatcgccctt

SEQ ID NO: 396597 - DNA, 453 bp, Oryza sativa
  unsure (1)..(453): unsure at all n locations
agcccngaaattaacccntcactaaagggaacaaaagctggagctccaccgcggtggcggccgctctagaactagtggatcccccgggctgcaggaattcggcacgagcttctggaacattaatgcccacagtgtagtgtatatcatccaaggaagtgcgcaagtacaggttgccaataatcaaggaagaactgtgtttagtggtgtacttcatcaggggcaactattaatcataccacaaaaccatgccgtcattaagaaagccgagcacaatgggtgccagtatgtcgcaataaagacaatcccgaaccctatggtgagtcgggttgctggggaagaactccatattacgtggcattgcctgtagatgttattgccaatgcttatcgtatctcgagggatgaagcccgacgttctaaagaataagggcagtagagtatggaatttcctctt

SEQ ID NO: 396598 - DNA, 262 bp, Oryza sativa
ctcgactgtctgggcacgataggaatataagtgtcaaagctaattatgagatttttttacaataaagctgattacatgttaaaatcagatgaatacgaaaaacgaaaacctctattatttccggggatataaaatataattacgccattaaactatatcaaatggttagagctttttgatatgtgagattaaatattatttatttattgatatatatatatatatatatatatatatatatatatatatatatatatatata

SEQ ID NO: 396599 - DNA, 264 bp, Oryza sativa
ctatatcatcatcttccatagctgtacacatcctatattttcattcatggcaatgacaccgcagcgagctagcattttctcgcatgcctccagggtttcggttccagccgacggacgagcagcttgtcgtcgactacttgcagaggcgtaccgctgcgtcacccatcgcttactcccgacatcaccgatatcgtcgtttacaacggacccgtggcacgttcagcatggcatgtatggatcgatcctgtccggtacttcttagga

SEQ ID NO: 396600 - DNA, 317 bp, Oryza sativa
gttaccacatgtgacaaggctgttaccaaatgagttccttttcttttctgaaatcctagagacgatactgccatatcatatccgtcagaaaatgacagagaatgtgtctgaatcttctgacaggacggtcctgttcggggagtacaactccaaagggccaggcgcgagcacgaagcagagggtgccgtggtcgcggacctcacctacgacgagccgcggcgttcatcggccttcatcaaggcggcgctagcagtggctccggctgtagatcatcgcgattcttaccagttcagaagtcagactgctgctgtctctca

SEQ ID NO: 396601 - DNA, 220 bp, Oryza sativa
  unsure (1)..(220): unsure at all n locations
ctcccaagtctctgccggcggcgcaggtcctgccggccaagggcggcgtggccgggcaggatcatcgccncgtcgaaggaggtgcaggtggattactacgcgacgacccagccgaagaagccggagagccgccgacgtcgcgcgtccaaaaggacaattgcgtccgccggcnccaagccagctgttcgcgcntcgagctctctctcgatagagtatgtcg

SEQ ID NO: 396602 - DNA, 769 bp, Oryza sativa
ggaggtcttattggtgttggaacaaccatggatccaactttgacacgtgccgatagactggttgggcaggttctgggtgaagttggatcccttcctgatgtctatgtggagcttgagatcaacttcttccttcttcggaggctattaggtgtgaggacaaaaggcacagagaaggctgggaaggtctccaagctcaccaagggtgaaatcctcatgcttaacatcggatctatgtcgactggtgctcgcgtggttgctgtcaagaacgatctcgccaagcttcagctcactgcccctgtctgcacaagcaaaggtgagaaggttgccctcagccgccgtgtcgagaagcattggcgcctcatcggatggggccagatccaggctggcacgacgctcgaagttccaccatgcccgctctgaattgtgtttctccaggcagaaatcctaatctttgagagaagatagaagagatgtggaagggcagagagctcctaggcactatttttgtgaggtggatgagaaaacatgaatttgatttggaagccatgtcattgcgtgctatcgaattcagctatgctacaaaagttttgcttacatctgcattctgaattatggagaatcgttttttcaccatgttataatgaatttgaagtggggggaggaacctactaattgatcagaattgcattattgcattttctcactgaatccaatccgtgatgtattattgcattgaacatgtgcaagaaggagcatatccatctgattt

SEQ ID NO: 396603 - DNA, 264 bp, Oryza sativa
  unsure (1)..(264): unsure at all n locations
ttccttgaaaccagctataaatcacacccattcatctctctcanctctctgcagcccattcactgcaccagtgtagtagcagtgctgcagttgctttgaacactcatctccttaccgtgttttgttaagagctcaaaaggactcaagagaagatgaggggttcttcctcttcgcgccaacaacggctttcctggccaccctccttggtcgccgcctcgttccaggatctcaccgtcgctgcagacggcggcggnngcgtggttc

SEQ ID NO: 396604 - DNA, 277 bp, Oryza sativa
caacatcaagaatgacttcacccccgaggaagaagaggaggtgaggagggagaaccagtgggccttcgaatgaaggccccccccccccccccaaaaaaaaaagcaacaaccatctcatgcgaatgaccagcaaggaaggggaagtcgcgtcatgtcgagaagttgatcctggagcagcctatgaactctctgcttgaactgtctttaagaaagttgtaattagggtaagttcgtcgttagttggttgggagagcagactatttagctgactccgtct

SEQ ID NO: 396605 - DNA, 561 bp, Oryza sativa
taagacgcaaacaaatctatgggatggttattctgcatatgaacactgggccaaaattgaggttcctaaggataaggatgaactcgctgaactccaggctaggttgaggaaacgtttcccagtagatgcatataacaaagcacgcatggagcttgaccctaacaaggttctttccaatgcaaagttagagaagctcttcccagtaacagaggtccaacatgaaaagtaaggttgtgctgattgttgacatgtttgaagacatgtcggggatacttaaatcaatagccaaaactacaattctggtggtttctcgttacataaccggatatgaagagttaaattctttgtagaacgtggtctgttgctggagaagggttttagtgctcctcctcttggatcagtgcttagtactgaactgacgcgtttgttgctggaggcttttatacttgggaacatccatgcctattatgagactaaatggtctgttttatcaagagaaatggcatgtaaccttttgcagcagaaataaagtgcgtgaaataacaaaaaaaaaaaaaaaaa

SEQ ID NO: 396606 - DNA, 243 bp, Oryza sativa
cttgccgttatggaacttgaactgcaggctctggttgccctagctgaagagattgctaattttgatgttccatctgggtctaggaagataaatggaaaatatatccagtcacatcttctcaccagattagaagctgttcatgataaggttatggaacaaattaaggatgtagactctttaaagcaccaagaaatttctgtcttctgggttggcattgctgagaatgtacaaattatgggctcc

SEQ ID NO: 396607 - DNA, 339 bp, Oryza sativa
ggcagcagacgcataacaacaccagtccatcattagatgtgcaagtattccccttgttagcttgcagggggataggtaggaagatatagatgtcctcttgtcacctcaccaccgttgacgatgacacgcggtgcgtcgcatagtggaggcaccgccatgggcgttggtggttcctatgggccggtgatcgtggctctggcgatcatcgctaccctcacggttgcttctgttgccgttggtcagctttgcgtgggacgtggcacacccatcaagcctgggcaaggtatgggagcctttgtgaagaagagcataggagggaacaaagctgcctatgatgat

SEQ ID NO: 396608 - DNA, 364 bp, Oryza sativa
  unsure (1)..(364): unsure at all n locations
gggagctgagctgggtatgcgatgaatcaaagcgccacgatgagaaggttccagacgacctcgtggagcaggcgaaggcagccgcccaggcagcgctcgaggagatggacgcagactagaaaccgccgatcatgatgctctagaatcatatctccattactcgatgctagaccgatcgatcatctataaccatatcactacattgtgtaacagacttgaggcagctcgtcagtttcatttcaacgtagaaccacctcaagaaaagaatgttgtactatgcagctcgatcgctgtcacatattgtttgctcctgatttatgacgaaccacactccttgctgtttgntcaaaaaaaaaaaaaaaaa

SEQ ID NO: 396609 - DNA, 601 bp, Oryza sativa
ctctggacgcagcaggcatcaatggacgatggaagggtctcacgtactgatatacttcctcctgcggataatgagaaaggcatccttggtcctggacctgcagatatgaggctttaacgttcactgaacaactggatataggctcactgctggagttggagcaacgatgctcctgcaaagctgcaattggtggtttatggatgcatacatatgcatgatggctcacgtagtttctaaatttatttaggctctacctgtaaaaagaaaacctttcagttattcttgagaagatagaattagcaccaatgtcatatgtcacggtagaagatattgatagagtagttcactaattttgtagtggatcctttaaatattactccctttgtcctataatatagcaacctaatactagatgagacattgaaatgttacaatgaatctagataacctcctgtccagattcggtgtatcatgaaatgtccaatccggtattagattattatattatgggatggagggagtacatcattacccgtttacgactgactcagtaccgactgtcttttcttttgcatgatgtggtaacaaaaaaaaaaaaaaa

SEQ ID NO: 396610 - DNA, 249 bp, Oryza sativa
caaaagttttgtaaagtaataagtaataaacaaaactagtgatagagcaacgtacgttgtgtcgttgccacactaggatgatcgatactccgttcggtcgattcggatcatgaccggccgccttctacgacgtgacgaccccgagttgggccgtgtagctgccgtcgacgcggcgcatgacggagcgggaccagtcggagtgcgcccagtaggggccgacgacgacgagcggcatcatcgggaggaggc

SEQ ID NO: 396611 - DNA, 243 bp, Oryza sativa
ttcttcaaacattggaaataaatcatgactatagcttatcttagtggtggttcacagtatgaacaccacaaaataaaatgagatgcggctatgatcaagagttaatgtaatgagactccagagcgaaagcctgagtaagctattaggacccatcataacaacaactttagatcctcacttgcgtggcacgagaagaggggacaccaagaactccgaagcccgaacagggaactctacgctatg

SEQ ID NO: 396612 - DNA, 648 bp, Oryza sativa
  unsure (1)..(648): unsure at all n locations
tttttttttttttttttttgaaacaaaaatcttgtatacatgtataatttggagtatatatgacgaagccacatccaaatggcataaatttgtactactatattgtactaatacgtatacccggaaagaacattaatttttcccctcattttgttatatcatcatgagtttactcttacctagctacatgtgtatatgtatcaaagtgtatgatgaaatgtcagtagtagtggcctggcaggttggtgctacnccggcggcgcgaggttgagcaccatgtcggggcccttgtcgccggcgacggagaactcgtcgggcaccggcacgcccagctcctcgcacaccagccggaccacgcgccgcgtcacgccgcccagcgacatcttgttcaccgtcacggccatggccagcccgtgctccacgtcgcagaaccccgtcgacccgcccatcccggagtgcccgaacgtcgtcgtcgccaccttctcgccagcgccggcgccatagccgtacctcctgaacccgagcccgaacttgccgttcggggtggatcatgccggagaagtcgccgangcccatgaacgcgtcgagcatcttggtgccggcggtcgaagaaacatgcttgctgccggtgccantgccgtttcccga

SEQ ID NO: 396613 - DNA, 589 bp, Oryza sativa
gggattaaggttcccaaaagggtttgggaatttcaggcggtggcccaaaaagatttcaagattaaaaccagggtggaaggtttttgagccggaccaaaaattgcaggcaaacaggatagggagtagtttacccaaacttaccattagttcaacctaaaaattttattagcccgggaattatggggacaaaaacttgctaggaaacaactttatctaaaccaaagcaaaagaacaaaacaaaaaaactctagcactgaaaatgacaggagcaagtacttctgtcaaaggagcaccagactgcgatcaaatcttgccttcctacacaatagtaatcgtgaaagctaacttctcactttggatggaagcaacattggttcattatttcagcgggaacagaagttcgtattcaagttgaatccagaaacatcaacggttcacacaacatgcataggtgcttcaggattgtatgcctgcaaatgaggtaaacagcccacgtcaatgatgtattatgcgtcgtgccgaattcgtgcagcccgggggatccactagttctagagcgccgccaccgcggtggaatcgcgtgggtaaa

SEQ ID NO: 396614 - DNA, 205 bp, Oryza sativa
  unsure (1)..(205): unsure at all n locations
gttaattttctcttcacttttgtcagtttcttcctcattcttcacatcctccttagtttccacgnctttctcacctacttgtaattcttctctnggcttttactccacttgagtagacagaggttcttgtttctctgcttttacaagcaatgatcctgactctgaggngccagcctcttcaccagctcagtatctaagtctttgg

SEQ ID NO: 396615 - DNA, 299 bp, Oryza sativa
  unsure (1)..(299): unsure at all n locations
aggatgcaaatatggcgattcacataacagaacagtgtgcaatgcacaaagttttttaacaaaatggagctactaaaccataattactactttactttagtggcagtgatccactctccagagtttacaccaaaaaaatcttaagacctggcagcgtcacaaacaagtcaagcatagctgttctaaggactctcaggtatttcacggcttcggttcaccggcagnttncnaacgntncctttgcgcgctnggggccnttggctctttggttttttcnaangngccatcctgcagccaaa

SEQ ID NO: 396616 - DNA, 578 bp, Oryza sativa
  unsure (1)..(578): unsure at all n locations
ttttttttttttttttgaatccaaaacagtctgatagataaactttttgccagaatcaaaacagtgctggaggttctaatacataatagatataactgtgccagagcattcactaaacattcagccatgcgaaactgcaagcgttaaaccgcaaatacataacttgattctgcgaaaggcttcactggaagcgatcatcaaagcgtcctcctctgctagggcggtcatacggcccagatctgtccctgtagcttcctccatcataacgagcaggccctccaccaccgtaacggtcaacaccaccgccacgtgggccatccctgtcatagccaccacttataccaccccttgggccatccctgtcatagcttccancaccccttgggccactcctatcatagccgccattgccacgnactccatccctctcgtagcttctttctcgttcccggncataactactaggctgatagcgntcgggacctccatatctgtctggaacatagcggncaccanctgatgggtatcggtcttagcatatcggtcagggcttcaccatacctgtctctggacatcaa

SEQ ID NO: 396617 - DNA, 627 bp, Oryza sativa
aactgacaaggttgatctctcaaccttcttgaaaaattgagcaaacatgaagtagacaattggtcaaaggaaagcataatttataatttgatcgattttacactaaatgtcatacaaaattcactgaatcgacttatgtccattgtattaaaagaaacaatttacttccgagaagcctgtccttttaaacctgaattgagcatagtctcgaagccagcctcaaatccagcggtgtatgctgcattcttcagactcgtcgttacactctccaaatcaatagtggcttgttctttaaagccatcaaatatagaagaaagttcttcctgcttaacattcagtttctttgatacctcagaaaggaacaacggggacatgatgtcaaatacatcatttacaaatttctcaacattagctccgtttgtaggtatcttgctctgcgtgcttttctgcacccttgttctgaaactttagggcttagccttcacttcaggaagacatgttttctctttgggcacatcattttgacgaggaacatttgtaggtgtgaccttctcaattgggtctgcagaatttgggacacctgatgggaccaaaatctgctagatcaggaggaattatccttgccta

SEQ ID NO: 396618 - DNA, 347 bp, Oryza sativa
  unsure (1)..(347): unsure at all n locations
nnnnatcaggaattcatcagaatttaccctaaaatcaaacatctcctagcaattacacttaacgagagttctgctggaaacttgcagtttcgttatacttagctcatacagtggagagtgattccagagagtaagcacttgcattacagacagagacaggttaccttgtataactaacaaaaaggcttttccngctaattattcatatcaaatttctatgctacaccnctgttaagatcgccactnggtctggagcagaagacatcaggggagaaaccaaaaagaatcgatatgngcaacaaagaaacgacngcaattgccgaaaaacccncgctatttcgatcacg

SEQ ID NO: 396619 - DNA, 712 bp, Oryza sativa
  unsure (1)..(712): unsure at all n locations
ttttttttttttttttgttttaggtaatattggcacaaaattggaattgatctgccaaaatacatattcgtattataactgtctccggcagattcgaaacttagaacaagcccaaattaattggcacaaacaacacacgcgagatgcagtaattcagagctaacacacgcttgccggaagcaataattatccacagctaagagcctgagagcagcataatctgctcgaaagagcataaaaatcacactgaaaatggaggttcaggaagctctgtacagaatctcaatgttcctgaggttgtcctgggacgaaccgtgagagagatcaaaggccaggaagccatcatctgtgtgtttgaactctacttcatgctcatcaacactgcaaatttccggcctggttgctgaatacgccccaaaccgacctggccctcggcattggatctgaattgtgatctctgaacaatcacctgtgctcgtgacgttttcgagcgcaccacctgagttgtacatgttaaccagtccaagaggagcaaactgaacaaagccaccaaaaacctttatcagcgctatggtatatatcttacatgtcatagtagacaagggaacctccatagtctgatgcntctgaagccttgagagagaacatgaattaaaagcaaatactgcagtctctccggtccaatcaatccccagtatctcctcaagtaact

SEQ ID NO: 396620 - DNA, 253 bp, Oryza sativa
ggtcagctgacctccgtgccaattcggcacgacttgggaattaagtgtcgtctgcatgagttggcaaataaaaggagaatttcagtaacaggggcatccaagttactggcacatatttcatactcttatcgtggaatggggttatctgttggtaccatgattgctggatgggacgaaacgggccctggtttatattatgttgatagtgaaggaggaagacttaaaggcactagattctctgtgatctggtcac

SEQ ID NO: 396621 - DNA, 243 bp, Oryza sativa
ggcacgagtggttattgaagttgaggaaaataaaaaagaaccagaaaagccttcagcagaacagaatgaagaggagcagccaaacacatcaattattcctgaacactctccagaaaccagtgatgtcattgctgtagaagagaaaacaagagaaccagaaattgaggcagaggtattgaaagagactaacgactatgaatcgaggcttacagaaacagagaaagcagagccagtggttgctga

SEQ ID NO: 396622 - DNA, 499 bp, Oryza sativa
  unsure (1)..(499): unsure at all n locations
ggatcccccggnctgcaggaattcggcacgaggagcaatgtgttgaccattggcagcatcaggngcacgctgatgaagcatgaggacaccatcatcttcggccttctggagaggtcacagttctgctacaacccggacacctacgaccccaacgcttccaggatcgtcgggttcaatggctccctggtcgagttcatggttaaaaagaccgagaagatgcatgctagaatggggaggtacaagagcccggatgagcatcctttcttccctgagaatttgctggaggtggtggagccatctgttgagtatgagaatgttctgcatccagctgctgctaacatcaacataaacaaaaggntctgggatgtgtactttggtgaccttctgccaaggcttgtgaaggaaggnngtgacggtaactgtggatcgagcgcatgctgggacatgttaattctgcaggcactctccaagaggattcactntggcaagtatgtggcag

SEQ ID NO: 396623 - DNA, 250 bp, Oryza sativa
ggcaccagcgttttttttttttttttttttttaagacaaatcatatcacattcatatatcatcagaataatgtacagtatacatatgatggggctactgccagcacaagttggctgcaaataaatcaatggcttcaagtaaattacattaaacagatttctaaggttcaaagcaggcttgacaagcaaccaaagaatcgaacagacagcagaaccgcgcgcgtggtctattctactctgctctagctcat

SEQ ID NO: 396624 - DNA, 692 bp, Oryza sativa
  unsure (1)..(692): unsure at all n locations
cggaagaggatnccagagattactgctnccattctttgttccaaagtgncaagctgaaattaaaaacccctggattgncacccctttaggtttgtccttggttgatgggccaggagaagggaatttancgagggatgatgcccaacttccaaggntttaaaagaagagccatggcgaagacatataccagattggtgagggacgcgctgtgtgaaattaatgagtacaaccctagcggcagattccccagtaggagagctgtggaacttccaaggataaacggaaggccactctgaaggaaacggtcccagttcgtccctgagacagtggcgagcgaacaggaggaagcgctaagcccacctgttcgatgccattgcgtgtagcgctgctgtttgcgttccacctgatctggacatcatgctacttaagcattagctcattcgagatctgtagtaactatgtagtggggttagaccatggctgtttcattccttgttggacacaaaataagttggtactattgcagtatctgcattggtggccacctatggtccacctgtacaagtagatctgttttcacctgttttaggtatgctatgtacagccatgaaccgaggtactttattcatctgcttggtatgcagatgcagcggaatatgtagtagtatgactgtaaaaaaaaaaaaaaaaaa

SEQ ID NO: 396625 - DNA, 400 bp, Oryza sativa
  unsure (1)..(400): unsure at all n locations
ggcacgagtctccaccggttcttatcagtcctcttgatttaggtcccaaatatgcagataaactgggaccaggcttccaggagtactgtaagacatacccagaaaattattgcttaggtcaactcatttattggtatagccagaatgcggagctgaatctagattgacaagagctagaaagggttgtatgtcatggccagatgtatcctccttctatgtgaagtcagtaaaaccaacacaagagcgagtctatggcagcagaactgtgagattcatgttagcgcgcatggagaaccaggcacaaaggccatggcccaaggaccggatatggggtttcaagagtgaccaagatcttttgtactccaatgatggatgcgtattgataatnccccctggcaag

SEQ ID NO: 396626 - DNA, 359 bp, Oryza sativa
  unsure (1)..(359): unsure at all n locations
cttatattccgtgagatattagagtatcatcctcagcttctgaaggattacatgaatggctccgaaaacacgagctttctatatccaagtgctgttgataatttccggaggcaatttgccatcttagaggaaaacggaggaaagagtggtgcactagataggaagcatgtttctcttccaagggctacaacagttcactctacatcaattcctccaaatgaaggcctagatgcaacatcccaagttactcaaaggatcccaacagctagaccaggaagaacggttggtccggtattaccantcgaggatccaggcgccgcagatncgcacagcgcacggagggtggtgaggaatccgat

SEQ ID NO: 396627 - DNA, 598 bp, Oryza sativa
  unsure (1)..(598): unsure at all n locations
ggcacgagctcaagttccctactctctcaaggatggcccgggatatcttggccattccgatgtcgatggtgagcagcggcaactctattttctctgctggaacaggaactcgcatgcttgatgactaccagaagctcattgcgtccagaaattgtggaggcgctcgtctgcgccaaagactggcttcagtattcaccagctaccccggaggcgccgagtaccgcgctggtcaaggtggatgcaccataggatcgccgtgattcccccccttttgtgaagcaacagcatgtaccaatggtacctatttgtgaagttaactgctaggcgtattttaggcagggactatgaactgattgtgatctgagcttatcctcctagggtgtaatttgttgtatcgaactctgttaactcgttcatgttgttatgtacgctttgtctgtagtatgccatcagagttgtacctgatattgcatgtagtgtgcgcgctggctgcataatatttatcagctggtgccttatgtttgtacttcccctcattataatccattgtagcatgtgattgttntgtgcnnnnnnnnnnnnnnnnnnnnnnnnnnnn

SEQ ID NO: 396628 - DNA, 243 bp, Oryza sativa
ggcacgaggaaatgttagacacaaaacacagtcaaggcaccgaatctatcagaagcatgacagccaaatgtcttgaaagggattataaggcgaatagtccagttcggcgtcgtccaggggagctaatgactaatgcgtacagtttagaatcaatcgagcaattgagaacccctgtaccagatttggtggtgaaattcagatcagagaacaatttggatgaagtggacaaaggaaagcgatatg

SEQ ID NO: 396629 - DNA, 730 bp, Oryza sativa
  unsure (1)..(730): unsure at all n locations
aaattaacccagatcatccccttcatccagatggctgaccgggcttcaggctgagcttgctgtactgtatttaaagggagcaatgctatncggaaagaagcttgaagtgaactactccaagtacccaaccgttactgctgatccagatgcgcgtgactactcaacttctcacctcaaccagatttaacagcaatgtggtgaagaactaccgccactgttgcgccccaaccaagatgatccacatctcagcgcttccacaggacataactgaagataccatccattcccttgttggtgagcatgggactatcgccaactcaagactgttcgagacgaacggcaaaacgcaggcccttgtgctgtttgaaagcgtggaagaggcaacagaggcgctcgtggagaagcacgcaagcaagctggaccgaaccaacatcaggatttccttctcacagatgcagaatatatagttctttcctgggaattgtgaggagccaaagctataagcttaccttaacttttggatttcgtgcacttagcttgcatgaaccgatatatgtttcacctttgcccaaaaagtggtgtgaactgtctttcatgtatggatggatggatcagttaaacccgtgttctctgttatgtgatgccccctcttatgcaattcagcatggatatgttaaacctgtgctcatatgccctaaaaaaaaaaaaaaaaaaaactccagggggggnc

SEQ ID NO: 396630 - DNA, 381 bp, Oryza sativa
ggcacgagctcatgatgagatttatctatacaggttcagtggaagtaactagcggtatctctcaggatcttcttagagctgctgttcagtatctattagaaggcctcaaacgtctgtgtgaatatacaattgcgcaggatgtgaatgtagacaacgtttctgacatgtatgacctatctgacgcttttcatgcaatgtcactcagacatacatgtgtcctatttatcttggagcagtttgaaaagatttgcgtcaaatctgggtcaagccagctgatccagcgtgtcatcccagagctccgcaacttcttcggtaaggcgctaaggccaagccacaggaatgcgagcatgagtccgtgcccttcacaatccttgacacacc

SEQ ID NO: 396631 - DNA, 512 bp, Oryza sativa
  unsure (1)..(512): unsure at all n locations
aaaggngngtcacnngnggcgccgtttagaatatgancccgggcgcaggattcggcaggagtgaantgatttggtggagaggagcaattcaattgaaattgantgggagtgatcatgaatgtgaaagcacaaccagcctatcattttgaacttaagggggaagntcaagaaacccactgtctaaactggatgaagccattgaagaagaggaagatgacattgaggaggaagaaagcaatgcagaaaagttaggttaccctaaagctatcaacaagtggcttcctaacatttccaagctatcaacctcactgaatggagtgcgtctcggcgacaaaatccagtgtcagctccccgctgctccaaagataatggatcctgtgaaaattttcgagggcaacagcaaccacagtggctcccaggttggcaactggaggagtgcaaatgagcaacttccgacaagtgcgagcttcgtcaagctggccgacatgggatcggagacatgggcgctattc

SEQ ID NO: 396632 - DNA, 678 bp, Oryza sativa
  unsure (1)..(678): unsure at all n locations
tcatgcaaaacccgccggaatcactccatcacttccctgctgttgaagcatactacaagggtttgaaggaacgtgaaattccttctgatgatccncggctcatgaatgttagccgtgtcttggacaatctgagcattcgttttggaccaaggagaaacagtnacgcncaggcataatgtcgtcgtcactaatcccaatgcgagttagattttgtgttaataaaactgctggatacatcatcaatatgttagcacttgagaagatcaacgaactgaaattaggatagcacaaagcgaatatgaaaccatcaagagatgaaaccatcaagcatgatgacaaggatcagggtacccaagtccaacctgaaggattttcatcccgcatcgcggaaaatctgattctcaagtttcttttaacttttgtaaacttactgttgtcggaatgttacttatcacactggtttagagagtttattctgctgagtaatttgacattagatgtccattccattgctactttcaggcttcagctgcgagtgtatctgaatggtcatttctcagtttgacaaataattgttgtgagtttaacttcaaagaatcactggaagaattttatgcaaaggaatattatgactccctggttcnnnnnnnnnnnnnnnnnnnnnnnnnnnnnnnnnnn

SEQ ID NO: 396633 - DNA, 244 bp, Oryza sativa
ggcagagcattttgctgcaacaaaatatggcttccaacaggtagtgttctcagtgttgcttctcgccgtcgtctccgtgctcgcggcgacggcgacaatggcgggtaccaccaccaagaccaggtggtctacacccgggcccttctgtcaccaggatgggtacccgatgtacccgtcccggttgccgggcgttggtgaagcgccatacgtcggcgtggaggcgcagcgccgagcagttagcgga

SEQ ID NO: 396634 - DNA, 521 bp, Oryza sativa
  unsure (1)..(521): unsure at all n locations
tgggaaacttgaactttggttatttccaggtggaaacccccgaattttattttgcccaggaaaggaccagcnaggggattccntgcccctaagttgggncccctcacattgggcataatccccataacccaaactttggcttccagataaattagtgtttctatctagcatggcattgggtttattccagaattctgccagatacttacaatttcaaccacattatatccttgactcaattcctgatgtttctgtatgtccttcctactcttaagagttgaaacctgtatgaaatccgtatagtgatagcctgatggggcagaccgtcacttgccagcaagtttccaccgatctcaagaccacagacattggacagaaacttccatgtgattacagtattctgattggtcacatctcctgtaccaactattctgtctgcaaaagattgtaacctgaagaatttattcgattattttggaacaatcttctctatacaagatttgcacaaaaaaaaaaaaaaa

SEQ ID NO: 396635 - DNA, 437 bp, Oryza sativa
  unsure (1)..(437): unsure at all n locations
cccccggaaaggcccccttntggaaagtttagggacaaggccctccgggntctcttaaccttggggatcccaccaagntgaagaggagggccggcttggtctccaagattcagagggacagggagaagcagaagcagaaggagaaagaagcaacctcatcgggaaacattcatgctagtagtggagatgggatgaaagagcctgatggtcctattcaagcactgaaaagatctagaggtcctgagccagaaccagaaattatagcgcttcttcattgaaaaactacagatagaggctagaagaatggattacagtagacttccccaacttaagagggaattgaagccaataatcgcatcttgacaacattgccgcgttgcttcaaaatgaaaaaaaaaatccagttcgtcttnnnnnnnnnnnnnnnnnnnnnnnnn

SEQ ID NO: 396636 - DNA, 350 bp, Oryza sativa
  unsure (1)..(350): unsure at all n locations
gggcctgaacatgaagcttactagaacatgctaatcaaaatttggttattgagaggtagccaaattagcccctgtgtagaagcaccatcatctgagcacgtggaattgcacacaagtaacatggacagaggcaatggcacatgtagatctgtatatcattgcatgagttccagttggcctctgctcgttgctaatcatgattctagattttagtaaatatcactaattttcctgtgaaagagtaggtttaggtgtacttcgaacttgtgcaggatttatggtgaatatccgctgcttcatttatacatcagtngggtngnnnnnnnnnnnnnnnnnnnnnnnnnnnnnnn

SEQ ID NO: 396637 - DNA, 290 bp, Oryza sativa
  unsure (1)..(290): unsure at all n locations
ctcgntttggcaccgcaaagctcaaaatgaggacaagtttcactcatttcacccagttgctaccatcctcagttacctcaccaaggctcctcttgttccaccgggtacaccggtgtgaatccattgtcaaagcagagagctatgctggaaaacatcatgagggcttgtgttggattggctcctgagaacaacatgatcctcgagtacaagtgaatgaagaactagtgggcgggaatattactgctctttctttcttatgcatttatttatttcttatgcncaanngaatc

SEQ ID NO: 396638 - DNA, 401 bp, Oryza sativa
  unsure (1)..(401): unsure at all n locations
aggaagatccacgacgccgccgcgcggggcccgccggcgccgcgcgcgggtggcggatgcgcgcgctggaggggctcaccgtgacgctggcgttcacgcagctcctctacgtgctgctgctgcacgacccgtcgccggcgagcgctgcggcctcgcctgcgccgccgacgcatgatcatctcgatcgagctctctggatcaatttcattaatttccaaataataataaccgggcgtgtttgtgttatgtcaccgggaaatgtgttttgctgatgtgtacgcgttggggttctcgcgacgtcgattgtagtattgcaaatttgctgctttttaataatggaataaatatccccaacgctgcactttaaggatgcaaaaaaaaaaaaaaaannnnnnnnnnnn

SEQ ID NO: 396639 - DNA, 205 bp, Oryza sativa
cacgaggttagaagatgctgaagttgctgaaattttgaatgagatttcaagacgaattgttcgggaaaaaggaccagtagtcatggacttagctgggtttacagaacaaggttttaagcgtaacgttgctgtgcaaacgtttgttcggaaaaatcctgtacttatcagagctcccagagttctgctcacgcgatggctcactcgt

SEQ ID NO: 396640 - DNA, 199 bp, Oryza sativa
aaatgttgttgttttaagctttaatgagttttgttgtatcatcacaatcgaaataaataaaagatgttctggaacatcatttttggtaccttatggtttgcaataattttatgtaagatcaaagaatccttgcaagtttattattaatgagtgcaattcaaaatgaaatagttcatttgcattcttctattaaaaaaaa

SEQ ID NO: 396641 - DNA, 449 bp, Oryza sativa
  unsure (1)..(449): unsure at all n locations
tggggacgttcattgccatcaaaggatttgnccagtatccaggntgctcatcaaccgggtggagttggagatcagctcgatgatcgactgcntagagttcgctgagcgagatgaggaggcggtcaagtttggggttgaggagatcaagaagaagctggaggtcttcatgaagagtgtagaggatctaggagagcaggcagatcggtgtagccgggatattcgtcgggcaaggaccgtcgtgctacagagaatcatccggcatcctagctgaaaaaaaaaaggaaaaagagagaggaaggatgcaaggtatggatgtgttagctacaaatcatgttctctttgatgatattgtaatgcaatgtacataaaaatacaccccatgtagaaagtgtgaatgagtcatttggtatgaattattatctgcttcattttaaaaaaaaaaaaaaaaa

SEQ ID NO: 396642 - DNA, 491 bp, Oryza sativa
  unsure (1)..(491): unsure at all n locations
gcaccgggtgccnccggagatacaaccgtctcgccttccatcacaacagggagctnaagcagcagcttgatgagcttcnaaagaagtacccagagacaaaaatcatgtattggtgactacttcaaggcggcaatcgcaagtttgtcgtcagccctggaaattttggtttcagctcgactattgcaggcttgctcgtggtgctggaggccagggcaactacaacttcaacctgaagaagaagtgtggtgaggagggtgctagcgtgtgctccaacccgtcgtcgtacgtgagctgggacggcatccacatgaccgaagccgcctaccgctatgtcgccaatggctggctgaatgggccatatgctgagcccccaatcctcaagtgagaatttgaggggttttgactgtatgtaacacagctgttggtgcaaaaatatatatgaatgaagaaggtttcagtcactgaaaaaaaaaaaaaaannnnnnnnnnnn

SEQ ID NO: 396643 - DNA, 554 bp, Oryza sativa
  unsure (1)..(554): unsure at all n locations
gactgattggatggagcaaattggacgttttgtnctttcaagatagtatggacttgatggtgtgccttacttcntggcttatgtatccaggtcctagcttattgctgagtggtggaaaaggcaggtgaactttgtacagtgtgctaacatactgtgactggtcttcagggcaacctgtcagaataagcaaagatctgcttatctactggggtctgtacttatttagagtaggacccatccattgtgtgcctctaatcaacagtaacgtggcattagtgcttcatacagaactatggtgctcgactccaaacaaattgaggagccataacacagaattctctgtaagtggactgcaatgatacatgcttttcaattgttacatttctagcatagatagcagagtagatgatgatttatttccaatcagttttgctttagtgttagcaaaagtagggattatttataaggaatatgcgcatagaaaaatgtaatgttcttttgagaaatgaatattccttcccttcnnnnnnnnnnnnnnnnnnnnnnnnnnnnnn

SEQ ID NO: 396644 - DNA, 413 bp, Oryza sativa
ccatgcttgtatttgccaggaagaatatgccgaaggtgaggacatgggcagcctagactgtgggcatgacttccacaccgcatgcatcaaacaatggctggttataaaaaatctgtgccctatctgtaaaaagacaggactgggcacttaattttgcgtgcttccgcctgcgaggaaagcggataagcctctttagaccgagtggttggttataaggcatgttacaccttccaagatccaacatacaggtggaatttatactatagggtggtacatggtactttaccagaaaggcgatggttgtagacctggagtttctttttcccttttgtttaaacctagatttgaagtttaaaatttattcaataacattcaattgcaattgggcatttcctaaaaaaaaaaaaaaaaaa

SEQ ID NO: 396645 - DNA, 231 bp, Oryza sativa
ccttcgggttccggggagttcctcccgagcagctctgtatgttcaccatacagctcttacagtagagacgcttcttcatcgcgacactactactaacgtgtacaacaagagttatagaagactcatagaagaccgcgaaattcaaccataatgtcagttatcaaaagtacaacaagaccgatgatctgagtatgttaatagtcaatattcgagaggtgttctctcagcata

SEQ ID NO: 396646 - DNA, 581 bp, Oryza sativa
  unsure (1)..(581): unsure at all n locations
ngcattcagactacngggacaggggaatcaancatcagttaaanagggcccttcattgngattttagggaaaggagaagcacattctaatgttctngtggtatggtttggctgtnggcaaaatcatcatgcaaattttaaagccattgatgtgtgaaaaggtggaaagatggatagtctggacatgttacaagtaagaaatatggatctgctggaaatttgtagccaaggtctaatatcagtggcgcattgtccgtacttgtcttgttgctactcatgtcgacaatgtggtgcagggcaattgaattgaggcatgaattgcttggcactgcagattggaaactgttgtctctgaagaaacatttgaattgtgtatgattcgtgtaaaggtcaaaggttcgtagtttcgaacttgctgctcaaatcaagcgagtggtagtttttttttcttctatattctggttatggtgctgagtttcctcagattagcggtttctatctgggattcgtcttcttcatacctgcgtgtaagatcatgtcttgaaattaagggtttgaaccccaaaaaaaaaaaaaaaaaaa

SEQ ID NO: 396647 - DNA, 550 bp, Oryza sativa
  unsure (1)..(550): unsure at all n locations
tncacaattattncacgagtctttgatgttggtgacatctttganccctaaaattggctatgacaatnctgcagctgttgctaagaaancacacaaagaaggaancacattgaaggaagctgctctagacctcggagtattgacagaatcagaattccatgagcttgttgttccagagaaaatgattggtccttctgattgatagcgactaatgtattcctgtcctgtggatttcctagctctagctcacccgtaaataaagcaagccagacatttacatcttcagttccttatcgtattgaagagtttgtttttccactgcaaatcggtccccggagaaaacaagattccattcctgttactgaaatagtaaacagtatattttgattcattgaagtagatgctttttatttctagggcatgccatccttttcccaatggcgaatctgcatgtaataagttaatgtagcaaccatgcccgtggaaatattatcacatttgacttgagaacaaatgaatgaaatatatttggattaaaaaaaaaaaaaaa

SEQ ID NO: 396648 - DNA, 468 bp, Oryza sativa
  unsure (1)..(468): unsure at all n locations
cttcgatcggccggggtacgccgagagcgacccaaacctggcaagtacagagaagagcatcgccctggacatcgaggagctcgccgacaacctgcagctgggccccaagttctacctcatgggcttctccatgggcggcgagatcatgtggagctgcctcaaacacatctcacacaggctcgcccgggtggccattcttgcccccgtggcaactattggtggtccggcttgccgtcgaacatgtcgtggcacgtctggaaccagcagctcccgcagattaagtgggcggtctgggtctcacaaccacctgccatggctncanctactggtggaacttccagaaggttttttcctgccttcagcgtcattggctacaaacccgncttttcttctctgnagggagacaaaggtncttcctgtccaaagttnggcttttcgaaccttcaatcccnaagataanggcagnag

SEQ ID NO: 396649 - DNA, 713 bp, Oryza sativa
  unsure (1)..(713): unsure at all n locations
ccaaacttttctattggatcaatgctggggatctatgccaattcagntaatattatggatggttctatggtggaacccagtncgagttatgatcatcttgtcgaagatgttctttgcaggtgtatcactgtttgcggcttttgggtttcttctctacggtgggaggttattcctgatgttgcaacgtttcccagttgaatcgaaaggacggcgcaagaaattgcaggaggttggctatgtgactacaatctgctttacttgtttcttgatcagatgtgtcatgatgtgtctcaacacatttgataaagcagctgaccttgatgttctgaaccatccgattctgaatttcttttattacttgctggttgagatcgtaccttcagctttggtgctattcatcctaaggaaactgccaccgaaacgggggatcacacaatatcatccaattcattagagcagccctggcagggacagaagaggttttcttatgagtagtctatacagcgtggtaaatacagaaaaggcaatgtgaaagataccacacttgctttcgagcttgccccagcttttgtaagaggaagcctttagaatctcagggtaccatcgtgtgtaaaaatgcaatctggtgttgttacagatttagaaagtgttaacttatatatatatatatacctttgttcttcttcacnnnnnnnnnnnnnnnnnnnnnnnnn

SEQ ID NO: 396650 - DNA, 591 bp, Oryza sativa
  unsure (1)..(591): unsure at all n locations
agttttcatgcttatcccttggagggaggatgnagcctaaaaagggtgccaagttngcccttggtaatatgcggaataaaacaggaatctttcccaggtgccacttggatggatgctgccnataacggaaatccattagnaactcccaccaagattaagagcccgtcaatgggcgatttttcaatacatctgccgtaaaaggagagggcctttttgaaggtttggactggctcagtaatgcactgaaatccaaaagcagctaatttaggagcctctgttccatggatcattgcttgatggtaaagaacagggacactgctcccttttcctcacaagtctgcgtgagaacccccattctctttgttttaactccagaagttttataccatcgattatctgtaaagtgcttgttaaagttttcggatacgactttagatgtacctccatattgagatcaagaatagatttgtagaaaatgacgagcaaactgtcaggactcttggtcactggtggctttacccgtaaatcccttctattgtgacatttttttccgatgattgaacacgcctaatttccaaaaaaaaaaaaaaa

SEQ ID NO: 396651 - DNA, 379 bp, Oryza sativa
  unsure (1)..(379): unsure at all n locations
ttgtatatataaaaaaggtgtacttgatccattatttgtaggatttagacaccatagagtttataaacagttcccaagctaactgaagagatgtgattttgttgttgttcctcctcctcttgttgtcggtcctatgtactttgcctctagatgttgacctgggcaaggcaggcattgactgtgaaacttgtactacctgattggataacacaagtgctaacttggctgatggttttcatccctcatcattaacccaatgcaatgctgataccaccgagttgtgacnnnnnnnnnnnnnnnnnnnnnnnnnnnnnnnnnnnnnnnnnnnnnnnnnnnnnnnnnnnnnnnnnnnnnnnnnnnnnnnnnnnnnnnnnnnnnn

SEQ ID NO: 396652 - DNA, 487 bp, Oryza sativa
  unsure (1)..(487): unsure at all n locations
gaagagaaggcgaaaatgggcaagggcacggggagcttcgggaagctccggaacaagacgcacacgctctggccgctgcggccgccggtcttccacctgcagaagagcacctgctcctcctgcggctaccccgcggcccgcatccgcaagtacaactggagtgtgaaggccatcaggaggaagaccactggaactgggaggattgaggtaccttcgccacgtgccccaagaggttcaagagtaacttcagagaggggactgaggctgcaccaaggaagaagggggctgctgctagcaactagactgcacttgttgcgctaagctgggagaccagtgtctttttgttgcttaatttatcgtaactctatgttcctaaatgaggcaaacgatgtctggttttctgttattttgcatcctggatgttaatccttgagttttgaatgttagancgttttatccgttnnnnnnnnnnnnnnnnnnnnnnnnn

SEQ ID NO: 396653 - DNA, 765 bp, Oryza sativa
  unsure (1)..(765): unsure at all n locations
ccttattcaccattggatcgtgtatctcttaaaccaaaaggtgggtagatgcccccagaaattttggccagtgatttggccaaagtaccctcatcctatctgagtttctgaaccccttttaccattgcccgtaccaagtccttttttgttncattctctggcatnacggtgcagattaagttggatcgctatcttcagcctcatttccgctactatatgagggaagtgcggaccgttgtctattcacagtttttggagtcatacaagagtgtgacaatggaagcgatggccgcagcatttggtgtgactgttgatttcatagaccaggaattgtcgcggttccattgccagctgggaagcttcatgcaagatcgataaggttgctggtgttctggagacaaaccgactgacgctaggaatgccttctaccaagcgaccatcaagcaaggggacttcttgctgaaccgcatccagaaactgtcacgagtcattgacttgtaaattcaatggtctacgttggacgttggaggtgtgatccttctagatccctgcaaagctccccatggacataaaccgtactgaagttgctgttctacttgtactcctaggctcatgagaacatgatctttatctcggtttgattttattgcggacaccaaaaaggttttaaagagaacctccgtgtgcaatttcagtaagtgtgctttagatttgtagaacgagaagagtcgatgtctttctgagatgaatctgttcgttcatttc

SEQ ID NO: 396654 - DNA, 449 bp, Oryza sativa
  unsure (1)..(449): unsure at all n locations
cggggatagcgtgctctttttcgacaagcacgggcacgggttctcgctggagcccaatggcgccgcggacctgaagcgggattgcgtctacttcatgcacgagaagcggacatggctggacgccggggagtacaggttcctttgtcggtataacatggagaccggagaggtcgatagagttgtgtcgctgcccgacacgttcggggacacctgggttgtccccggattgtgcccctctgaataagatgtgtcccggcgatgttgttggtttttcggtgtttcttgtagttttttctccttgaatttncattgaaaaattaaatagatgcntttagttgctctgggtgaatgattggtctttgaaaaatgagaaangtcttgggttgtgtgtgtcacacaatcacatgcattttccattatgtttaataaaatttaatttgtgtgtctna

SEQ ID NO: 396655 - DNA, 593 bp, Oryza sativa
  unsure (1)..(593): unsure at all n locations
ggctgcaggaatttggtacgagaaggagaagaaaaagaagaagagtcgagatacagaggaggcataataggtagaattatagtacgcattggctgaatgtatccttttgctgcggttgtagggagtttgagatgcctatctttccttgctgtgatcccttttcaaccattaatggtttcaaaggcctaatgcccatccttgaattactaccattttactgctgtgaagtactgtggtaagtagcgatatttccattgaacttgttgaacaatgagccatgtattgctgttcctgttttcagttaatcccaatgagtttttcttaaaaaaaaaaaaaaaaaaaaaactcgagggggggcccggtacccaattngccctatagtgagtcgtattanaattnactggccgtcgttttanaacgtcgtgactgggaaaaccctggngttacccaacttantcgncttgnagcanatccccctttcgccagntggcggaatagcganaggcccgaaccgttnggccttccnaanagttgngcgcctgaattggcgnatnggaaattgtaagngntaaatattttggtnaaattgtttn

SEQ ID NO: 396656 - DNA, 497 bp, Oryza sativa
  unsure (1)..(497): unsure at all n locations
cggccgcccgggcaggtcttcccggactccgacccccgttggaagggcgccgattcgtcggtgttcatgagggaagctgtgaaactgatgcatgaagctggctatgagctggggaacctagacgctacattgaccttgcagaaacccaaaattagcccattcaaggagacaatacggtctaacttgtgtgacttgctgggggcggatccatccgtcgtcaatctgaaggccaagacgcacgagaaagtcgacggtcttggtgaaaacaggagcatagctgctcacactgtagttcttctgatgcggaaataggaaaatggaagtgtactacatattacaggaattgaattgtaacatagtgaacaaattgtccttatgtaagtggtttatcactgaaattttagggcaaaaacaataaaaccgagtgcaatgtaaaattttatgtatccagattgtgtcttgactgtttcacaatgaacattanaattttatggcna

SEQ ID NO: 396657 - DNA, 675 bp, Oryza sativa
  unsure (1)..(675): unsure at all n locations
gggaattgggagaagtttgacaatttgggagngggtnggaactggtgtaacctttcaccgggggacctgaacggtttttcccggggggagggccctggccttcttgaagtcctaaaccnccctaatnggaggccgcttccgccggtgcacnttttacngngattaccccttccaattccacngcaatnacaggttcgcccgcaanttgagcgcccaggagaagagccagtttgcatgggctgggaccgatcaacgccagcgcgccgccggaccttcggatcgtccccttgacgtacagtggcccgccggtcgtctaggccggccggctcgccggcgggctggccggccgccgccggccgccgatcgaatgaacggtggccaccgcgcgcgcgctagctcgatcgtgtgtcgcttactgttgacgaacgaataaattggtgtgatatgatcgatggtttgcgacgatgattattagtattggagcgagtactccatccgcttgttatcttagcagtactttgcgttgcagcaacttgctctcttcctgtgcagcaataataaacaataatgaccatccccagatgttttaattaaaaaaaaaaaaaaaaaaaactcgagggggggcccggtacccaattcgccctatagtgagtcgtantacaattcngnnnnnnn

SEQ ID NO: 396658 - DNA, 481 bp, Oryza sativa
  unsure (1)..(481): unsure at all n locations
cggacgagtggaagccgacagggtgctcaccgtgagcccncanctnctgtagcagtccagctggaagatgatgatccagaggaaccaccaggatttggtttcagtgatcatcagcgcagcaacatcatggcaactcagcagcagcagtcgtcaaatactgagaatcataaccaagtgaaaccaaatgaaggtgagccccaacgccgttagctgccctggggatgatgatgaggaggatcctgatgtgcctcctgggtttggttaacatcctgcaatcttctattgtggtgtgatctgtgatgtttcttgtcaacactaagaaaaatgatttagtttacatttgctgctcgaggggttcatttgaatattgaatcatgaaaccgatatgattgggatgagttcatgttgctcctagcttcagcctcttatttatgagggaacaaatgggcatttaagcgatcnnnnnnnnnnnnnnnnnnnn

SEQ ID NO: 396659 - DNA, 793 bp, Oryza sativa
cgagcagcgccgccgccaccatcctccgcagagcccccgaggcaggacgactgggccgtgtgcaggatcttccacaagagctccggcatcaagaagccggtgcaggtgcccatgcagatgccgatgcagatgcagatgccggttgctcatcaggtgcccgccgccaactaccagcagcagatggccatggcctccgccagcatcatccaagtccccatgcagatgcagatgccctccatgtctgaccagctgcagatgttggacgacttctccaccggttcactcatggcgccgcctccgcctccgccttcctactccactctacctggcttcccgcttcagatcaacggcggcgcccagcagtttgttgggaacccgtcgatgtactaccagcagcagcagcagcagcagcagcagcagatggacatggccgccggaggcttcgtggtgagcgagccgtcgtcgctggtggtgtcgccgcaggatgctgccgaccagaacaacgccgccgacatctcgtcggtggcatgcaacatggacgctaccatctggaagtactgatacatacatacatacatacatacatacatagatacatacatgcatgcgccgatgcgcgagtgtgatgacagagggtggtgggttaattagctatactccatttttatgcatatgcatcatggcttttgcattgcctttggcttcttgtgtgatcgatgtgagtgagatttgctgagagattattagttattatagattggctagctatattatcaaaaaaaaaaaaaaaaaa

SEQ ID NO: 396660 - DNA, 562 bp, Oryza sativa
  unsure (1)..(562): unsure at all n locations
aattcggcacgagcgacgangaaaccctagccttgcggatcgatcggcggcggcggccatggagagctgggcaagctgggtgggcgccagcgtcacctccgccttcttcgcctccctcgagcgctgctcctgcatcaacctctccaccgacgacgacgacgacctcgccgacgcccacgaatccaaggaccgccccctcgtgctctccgacgccaacgcccacgcccacaccgacgcccatcccgatccccccgccgccgccgccgacgccgacaagcacaaggacgacaagctcccgcccgtatgactacgctactgttacttgagacgccgcctgctagtatgtgtcttggtcttctccatgtcttccaattccatctgctagtgaatgctatctttagccattgtgacaaaccaaacaataaaccatctgtctttcctatcgtgatttcctcctcccgctgtgaatatccgccttgccttttgtactgggattgcgttatttctaatccatcaaatcatcgtatctattattttannnnnnnnnnnnnnnnnnnnnnnn

SEQ ID NO: 396661 - DNA, 401 bp, Oryza sativa
  unsure (1)..(401): unsure at all n locations
ccgcctgaagtcacataggnctagaagatttcctagatatgataggggaaaataaacatggagaagatccattagactagaagattttcaaccatctggcacaggaagaaaataaacaggaaggcggtgtatgcatgttatctagggccttggctaatctaactagcatttcactgacacatccgttgcacacgtctcatggtttcatgaacataatcggacagattagcaaggaacagtgagatgtaaagatatcaggttaattgttggctcatagcttaggttaggctgtccaaccgaagtgtatactggcaggcaaaagattgttgattttgtaacatatactcttaaaagtaaattaaaagagggtggcaaagttctttttctgaaaaaaaaaaaaa

SEQ ID NO: 396662 - DNA, 661 bp, Oryza sativa
  unsure (1)..(661): unsure at all n locations
aggttgacctccntttnttgggaaccggggatttaganatnttttgaagtanccagacaaagccgggttgatttttngccttgaaccaaatggttcagtttggatggagctgactgtaatggtgggataacgcctgaacagagcaatctcttcttggtttgaagcccgcggttggttccactccctctgcaaaagggtcatggagcaagactggtcctggaaccggcctgccctgggactacattgaactgtaccattcagctcacaaattttgaggcccccatccaacggtggcaagagaaagcaagcattggcagatactacaaattaaatgaaacatggctcaaagttaaaatattttatctgagctgcagatacaaattaactcaaacatggttcaaagttaagatcttttatctgagctacacatatatatgcagaataaagactctttacagcatgcataaacaattgtgggagtatgtatcagctatgtttcctattctcagttttaattatgaatacttgatttagtaccagaaccgtgtacatatgtttgcaaaattgcaagtaaaatgaaggtgtagaactataatgttgtaaaaaaactcgagggggggcccggtacccaattcgccctatagtgagtcgtattacaatt

SEQ ID NO: 396663 - DNA, 455 bp, Oryza sativa
  unsure (1)..(455): unsure at all n locations
actacaaccagtcagcacgaatgncgactgcaactgtacaaaaacgcacgctctgtcctgtgctatgattgtgattcttgcaaanctggggttgctcaatacatgaaaacagagtggagggtggtagccatctttaacgtcatactgtttgtcancttgtctttcgtctacttcgtcgcgtgctgtgcgcgccgaaacaccggagagagcgactccaaggttcctacaagatggcatgcatgattggcagatgaagcatcggtgagttagcttttgctattgcttgtagtggcattgttcagtcaagtctcgttggtgaaatggaatgcaagggcttttcctttctggtgtgggatgatgatgttctttgttgcagttggcttgtgaacattttaggaataagttcattttaggtcccttaactttacaccgaanaaaannnnnnnnnnnnnnnn

SEQ ID NO: 396664 - DNA, 767 bp, Oryza sativa
  unsure (1)..(767): unsure at all n locations
ttgctacatgggaattgggnctatgagaagatccacngtgtccaccatgagttcacggcacccattgnattcgccgcgccatatgcacactgggctgaggtgctcatcctcggcatcccctcctttgtcgggccagcgcttgcacctggtcacatgatcaccttctggctctggattgtactccgccagatggaggccatagagacacacagcggctttgatttcccgttcaacctgacaaagtatattccattctatggaggcgcagaatnccatgattatcatcactatgttggacgccagagtcagagcaatttcgcttctgttttcacgtattgtgattatctatatggaaccgacaaaggttacagataccataaggcgtaccaagcaaagatgaaggctctggggcaaacggaaggcgagaaagcagatagcaatggattgantacgcgaagttggattaaactgtcctatatatagccaaaatctggaatgcctccctggtcattttgttcgttacgggcttgtgtagtgttttgatatttgtttcgatattctgtagtagatgttcgtgctgactgtgccttttgtttttgtggctgtgacattgtgagcatcccatggaaacttggtttacgcctgaaccaataacattgtgactcggggtagtctctatgtggtttgcgctcaacttgaaagagtcagaacccaattgctgtatatgttttttttttttgggtgaaatatgcgctgtagaagccaaa

SEQ ID NO: 396665 - DNA, 475 bp, Oryza sativa
  unsure (1)..(475): unsure at all n locations
ttcagaaagaaaggccaganttgaacctcgagaaagcagaaagagccccatgatcgtgatccgggataggcgccacgatagggaccgccgccatgatcgcgatcgggatagagattatgaccgttcgcgtggccatgattcaaggagaagggaacgttctcgatccagggagcgcagttgttattttcaggcgccacgatagatactgaatctggtgctccatgatggctgattttggagtattctggtttttctacatgatacttgtggtcctccgagatattgtgtttgttgagcttttactgaagaactctggagcatggatatatgccgtcagactgtgctgtatgcatttgtttctgacctactatggttggccagcatatactactttatatcatacttatggtgtaccaaagacgattttgtgttaatcaaaactagtttttcccaaaaaaaaaaaaaaannnnnnnn

SEQ ID NO: 396666 - DNA, 349 bp, Oryza sativa
agattttgaagggtgaggttccaggtagattacaacgagtagtgcctgaaattttgaaacgccataggcactggtcagcctcacagaaggttgaaattgcgcacggttgctgacgagtagtttgcaagcctgcaatttggttccagggaatcgtgtccaaaactattcataactgtaaatcatctgcaccaaagcgtctggaaccagaccacatccacgatggaatttgtagaattagatattgcagctagcatagtaggatctttcttcaatagtttaggcttggtaatggaacagatctgtaatgtgatataccttttgagctgatcttgttgacttattgaacgaa

SEQ ID NO: 396667 - DNA, 710 bp, Oryza sativa
  unsure (1)..(710): unsure at all n locations
gagatcatggnaaatgatacaaaggggagagcggccagatgatatacaggtatatctgagtttatgcttgtcaagttgactttgtgaccttatcgtttctgtttcaatataggacattaatgatgaccctccaaaccttatcaaccaatctcggaatcccgcatggcaccaaagcccacagccatgggaaaagcagggtcaagaaagttccatctgggagttgaaatctcagtcaatggacaccatcgattcgagatcagaaattcaacttgacagcgccaaccaatttactgaaacggagaatagatcaaatcaaggggactcactattgctggaagaaacggttgcaggttctgaagctcacacagatgatgctgcctcgacaaagtcgtaaatgcaaaagcacgtgatgatggaattgaacatgctgggaaactatttcaacatatacttagccaaaaagctcgaatttctagtgcaacagttttctgaaattctctgaacctgctttctctgagctcactgatctgcgtacttccctattgttggaatcagatttagcaggcacaaaagacctcccnattttcgttagctggaacagttatacaatctgtataatgtaatcatgaaaaatatacaaacaacaacatgaaatgttgtnacttgtgaggctcatgtcnnnnnnnnnnnnnnnnnnnnnnnnnnnnnnn

SEQ ID NO: 396668 - DNA, 487 bp, Oryza sativa
tagcgtggtcgcggccgaggtggccgcttcctccaggagagcaagtgtcggctggtggcgcggcacgagcggttcacctctggcctccgcgaggtcgggatcggctgcctgcgcggcaacgccgggctgttcccgtggatggacctgcccgggcggccgctcgacgtggtcgcggccgaggttgtggtgccaagggagcagcccaagctgagtgagccattcctagggtccaccaagactgcagaggtttggagctctagggcctgcatgattggtctcattggggttttcattgtggagctggtgctgagcaagggtgttcttcagacaattggactggaagtggggaaaggactcgatcttccactgtagttcttcaggaatttgtggttgatgttcagggactagagtgacctgtttttctcttcagaaagattggatatgtcaattaatgctatgcactaaatatgtacctgcccggcggccg

SEQ ID NO: 396669 - DNA, 629 bp, Oryza sativa
  unsure (1)..(629): unsure at all n locations
tncgaattaagtcggatatccacccctcgcgtttctcgtcctggggaaagggaaagttcagtgccccagcgatttgaggagccaattgttctacggatggtttcggcccatgttaatggattttggttggcttcaaagatgctccaaagggttagatatgagaatgttggaggagaatctcgggcaagcgcttctcactcttccactccagcagcaacagagcctatttgaagaatggttccaatgcttcgcatccaggggcacagagtgcccgaatcttagtagagctttccaggtatggtggagaagatcatttgtcagatcatccctagagtcacgtcgttgagagttgagttcacttgtctgctgatatataatcttgtgtgtatcaatgtaaaattagagttcttgtattagcttgtagaatattcttcttaataaatctagcttagctgcttccattatatgcaacaatgttagcataaaactggccnagaaaaaaaaactagaaaatatgtttcaatttggatatcctttgccttgaaaatggcatcnctgttcatgatcttattcccggggaaaaatattccaactgcnccagggatntntttcccctcccntgtttccaa

SEQ ID NO: 396670 - DNA, 440 bp, Oryza sativa
  unsure (1)..(440): unsure at all n locations
ttttttttttttttttaataataaagcccttgaagatgacttcaatataccctagcttaatgtacacgtccataactttttgttattctgtattcactagtagtagatcgacatacaacccaactatgtaaaaccatttgtaaaacgtagtactaagcacctactaccgccacgtctcccaccgntaaccaagcaaagctttaatcaagcacatccagtatacagtagtactccgtacttcacataacacatcggtaacgtgagatcgccggcgggccgatcgatatcgatcaatcgatcacgggcggcggcggggcgacacgctgggcggagaccatggtgtcgacggcgcagacgttgcggccgccancgcgtggagctccaggtttttttcctttagtgagggttaattcgggtttgggtaatcaggncataggtgt

SEQ ID NO: 396671 - DNA, 299 bp, Oryza sativa
agaggagggattttgaaagtgaagtcctgatggtctcctccagcaaagctcaactgtagctgattcagcgttgtttacttttgctgatggaatcactgaatccattccacgttcctatattgaatttgctgaacgcctggtactcccacagttcaaagatttgccaaatgatgaggtcaacgaacaccacaggcgcgatggttttgaggtagggaatgcggacaaaatatttgagagcacatcaaatgatcagcttacacggagatctgcataaacgttgaagtctcaactatctggag

SEQ ID NO: 396672 - DNA, 330 bp, Oryza sativa
  unsure (1)..(330): unsure at all n locations
ggcacgagtaaggatgttaaatatgtcattaactatgactttccgggatcattggaggattatgttcatcgcattggtcgaactggcagagctggagcaaaaggaacagcttacacgtttttcactgctgctaatgccagatttgccaaggatctgatcaacatactagaagaagctggacaaaaggtcagccctgaattagctaatatgggtcgtggtgcaccacccccttcttcaggccaccgtgatagatatagagggtatggagttggccggtcatggagctgattttcatatgtggttattngcagagagaatgttttggccttc

SEQ ID NO: 396673 - DNA, 259 bp, Oryza sativa
ggcacgaggcaaaaccaagacatactttgctacggctgtttcattgtgggatgcagacttttatgtgaaggttgatgatgacgtgcatgtaaacatagcaacacttggacagattttatccaaccatgcattgaagcccagagtatatattggatgcatgaaatctggacctgtcctaactgagaagggtgtgagatactatgaacctgagcattggaaattttggcgatccaggaaacaaatattttcggcaatgcta

SEQ ID NO: 396674 - DNA, 267 bp, Oryza sativa
ctgtcactctctgatccctagggtttactttcccctcctcctcgaactctagggtttttccgctcgctctccgccaccatgacggccgccgagacgcaggaggagctgctccgcaagcacctcgaggagcaaaagatcgagggagatgagcctatccttgaggatgacgatgatgacgaggatgatgatgatgacgaggatgacaaagatgatgatgtagaaggagcaggaggtgatgctagtggaaggtctaagcagagtaggagc

SEQ ID NO: 396675 - DNA, 502 bp, Oryza sativa
  unsure (1)..(502): unsure at all n locations
aattcggcacgagagcaagttagaaattacaaagcaaagaaataaaaaagaaagtcgtaattttttaagaagcaatggcgagcaagaagtttgcatgtgtggttgttgtgatgtgcattggtggtgttgggtgcattcgtgtcagaggcccgcaatctcatgcggagagatttcaactagacttgctccatgcctcccatttttgctgggtggtgtaggtccatcgggtctctgctgtgatggagtgaagacagttaacgacactggccagcaaccacccctgaacctccaggctacatgcaactgtttgaaagacttagctgctggcgtttctnggcttnaacccntggtaacnccgaagcactccccagcaaatgcngtgtcnatgtccnttaccaagattngcccntccnccgattgttccnccataacncgctgaagagcgtctatgtngggaagaagccgatattgcatggaccncttttctactgcaggaatgtat

SEQ ID NO: 396676 - DNA, 707 bp, Oryza sativa
  unsure (1)..(707): unsure at all n locations
ttcaacatgatccatgtccttcctcattgctctggttcttgaacttttcccatgaagctaccccacgctgcctggctggctgcctccccctttcttccccgatctacatcccacaacatcccacaggantaagccacgggagtgactctgggacctacgataacgagggccggttcatgccggtgaacttcgagaacatcttcagcaagtacgcgcgcacgtcccctgacaggctcacctacagggaggtgtggcagatgaccgaggggaaccgcgaagtgctcgatctcttcggatggttcgcggcgaagctggaagtggacgatcctgtacgtgctggcgagggacgaggaagggtacctggcgagggaggccatccggcgcatgtacgacgggagcctgttcgagtacgtggcgatgcagcgcggagcagcacgcgtaagagtgtcctagagctagccttagcttagctactggatcgggtctgtgggtgtgagatcgagcctgtgacgcaggggacatgcaacggtgctctgcctgccggcttaggtctggtgttctctctggactctgggtgataacaaaagaacacccagatgcgtgtcgtgtctgcttgtaattaactttgtatcttgatgcaagagaaataagaataacgtgtggaggatgcgatatgcgcgaataatgtttaaaaaaaaaaaaaaaaa

SEQ ID NO: 396677 - DNA, 621 bp, Oryza sativa
  unsure (1)..(621): unsure at all n locations
ctgagataaagnatgggacatatcctcaaggatcattcttgnatatagatataccaactgatgctgcacnccacaagggatncaaaattacaaagcaaggaaggtatatggccagaattggttgggagcaaacagtttataagaagcctgcggtagaaagttaccagacagcaaacatggatgttgacagtgaaaaggacagtgaagtagatacttcatccagagaatgacctattgtttaaaagagtgcttgtgaggcgaagttatgatgaagaggaaggggatgatatcgaccacaagtgccttgtagatggatatattactgttacccctttgggagctctatcccgcgcagaagctgatgtcataccatactacaaagcttgcttgtcacgtctgtgatcaggatacttttgtggcccactaaactgaaaaagttggtgtcatggttgcaagttgcaaataaagttgcatgaatttcagttattctagatgattgttactgatgtattgccatattatgtacttccgtgattattcagagcatatgtatcacatagctcttactatttataactacagttccacaataattctttggtattaaaaaaaaaaaaaaaa

SEQ ID NO: 396678 - DNA, 726 bp, Oryza sativa
  unsure (1)..(726): unsure at all n locations
gaaaagaacaagctggcactggaaaaggaaagaagaagcaggctgagaaacaagcaatgaaacggccgctcgagcagaaaaagaagctgagaagaagcttaaggagaaggagaagaaggcccggaagaggagtgcaacagctggaggtgccgagtccgaggaggcagctgaatccgatgccaagtctgatgaagccgaagcccaggaggaagagccagcagctcctgtcacaattaaaaagaatgcccggcacagaagtacggtgacgaaaacgaagacccctcttccgaaggcggtcctgaagaggaagaaatctcaggctttctggtcatggggtgcacccatggcagcattggcagctgcgctcgtggcccttcttggagccctggtctactaccagtactactaccttccagctagcaccagcaactgatgaacatgtcacaagtgctctggctgtgatacaagtgcctgcctgatcaattttttgcatttgactagaggcatatgatctctgaatgaggatcccctacatggttcctgttcttgtagttcctttactaagtgaattctagagaaggattataccgttataattttggctggagaatggttttcgctctactatactgtatgttgggtatctgttgtagatggatggacggcttgccgtatgaaataaacaaataatgcttgtgttgatacatatgtatgtttcggctnnnn

SEQ ID NO: 396679 - DNA, 609 bp, Oryza sativa
cccctcttactgctcttagtccaccgcggctggcggccgctctagaactagtggatcccccgggctgcaggaattcggcacgagctcgtgccgaattcggcacgagaaaaccagcacaaggcacatcaagtgacgccatgcattccaacatttgacttgagtggagctgcatcaactaagggatcacaacgtggaattactctgttgccacatgcaaaattgtcagtgtttacagccgtgcagcttaactctaagctggatggagagcacaaccttagcggtggtaaagacactgggaaacatttttgataacacatctgtggatgacagttaccatgagcaggagcttctcaatgacctttctgctccaaaatctctactacaaccttgcagtgcctgtatggattcatgcaatgggcagccgattctagaagatatgcctggacccaaatctcctgaagattaccaccatgccccccgttcccgatcagtacgtgacatgtttgaaccttcccaactgaaagaccgaacaggaaactacgctggtgtctcctgcagaaatgttggtatttaaattccgggcagcataataaccctaacctggtgagc

SEQ ID NO: 396680 - DNA, 409 bp, Oryza sativa
  unsure (1)..(409): unsure at all n locations
gattcggcacgagggaacgtggagggggcgaaaaacgcggtggcggtgacgctgaagctgtcggtgttcctggcggcggcgttcgtgctgctcctcggcttcggccacggcctctgggcggggctcttcagcggcagcgccatcatcgcggcggagttcgccgccgtggcgccgctgatgatggcctccatcctgctcgactccgcgcagggggtcctctccggcgtcgccaggggctgcggctggcagcacctcgccgccgtgaccaacctcgtcgccttctacgtcatcggcatgccgctctccatcttcttcgccttcaagctcaagtggtacaccaagggattatggatgggtttgatctgcgggctgacatgccagacctgcacgctgatggtgatcaccgnac

SEQ ID NO: 396681 - DNA, 580 bp, Oryza sativa
  unsure (1)..(580): unsure at all n locations
ttcngggtggaggattcggnacgagggtgttactgtcntgggtccaaatttcnttgttacnccccctgaactaancttgaatgtccccttcntgngtttcngaaaaattntcccagggngtgganacttccccttganttccnannccttccaaaaagntatccctgggcnngcccccaangannttatgcnccacnttgtncntnccaagcnccggtnggtganncctgcnccngtcccncttgctgcncngttcatngntttccccccntgtttccaacttatgggccaaaggtttgggggggttccctccaatcccaaggaccccaatcaaattagtgtttcccctgaagttggaaaaattgatctggttccaatacaacgcttctgaaacctgtatatatcaattaataatttgtccatgtcctcccaattgaacattggtccccgccaacatttttgctggggccatcccggaacccctgttttgaaacaaaatctatcttccgaagcctntttnatgaatccacgttttgcattccaggggtttgcctggggtttnnnnnnnnnnnnnnnnnnn

SEQ ID NO: 396682 - DNA, 1411 bp, Oryza sativa
  unsure (1)..(1411): unsure at all n locations
nnnnnnnnnntcnnnnnnnnnnnnnnnnttttnntttttnnnntnnnnggggggctttttggcgggggncccccccccttttttttcgggagaaaaaaaccgggaaaagggggccttngggtttttnaaaccttggggcttccccactttggggggtttcttaccataaaaaaaaaaattnttnttncctgggttttttngggtttnttnaaaccctttcccccccccccccttttttnggnnaagggnccctttnaaaaaagggcccctttnttngggnaaattttttcggggtttnccccccccnttntttntttcccctttttttgggggcccgggttttnttatttccccgggnggggaaaggnnaaaaaaagggtttttttnaaatttccccaaaccccaaaaggggggggccccaaagggttttgggnggggaaaacccaaacccttttntttccccccccccccttttttttttttggggaaaacccttttttttcccccaaagggnaaaatttgggggccccaaaatttttttccccnaaaaaaagggnaaaaaaaaagggggggggtttttttnaaaatttccccaaaacccctttttggggggggggccccccccaaaagggnggggccccccccttttccccaaaaaaaaaaaaaggggggggggaaaattttggggttttttggggaaaaatttnggggcccccttttccccccaaaaagggnccccaaaatttttttttcgggggtttttggggcccccnaaaattttggggcccccgggnaaaaaaattttgggggcccctttttcccccggggcggggggggggtttttggggggggggccccctttttgggggaaaaaatttttccccgggggccccctttttgggggccccaaaaacccccccccggggggtttttttttcccccggggnccccaaaaaccccttttttttttcgggggccccctttttggggggcccccggggnccccctttttggggggttttttaaaaacccccaaaaatttttggggggggggggtttttttttttttttttttttccccccaaaaanccccccccccccccccccccctttttttttttggggggtttttttttttttttcccccnaaaaaaaaanggggccccccttttttttttaaaaaaattttggggggggggggtttttccccccggggaaaaaaaccccaaaaaggggggggggggctttttttttttttttngggggggggggggcccccggggggggggggccccgggggttttttttttttccccccccccccggggggcttttttccccccgggnaaaaaaaaggggntttttttcccccccccccaaaaaaaaaaaagggggggggggggaaaaaacc

SEQ ID NO: 396683 - DNA, 1099 bp, Oryza sativa
  unsure (1)..(1099): unsure at all n locations
gcagccggtcaccgcgcgcctctggcgcacntnnggggcgangcgccgcaacggcctgcgggctccccatccgacccgtcttgtaacacggaccaaggagtctgacatgcgtgcgagtcgacgggttctgaaacctgggatgcgcaaggaagctgacgagcgggaggccctcacgggccgcaccgctggccgaccctgatcttctgtgaagggttcgagttggagcacgcctgtcgggacccgaaagatggtgaactatgcctgagcggggcgaacagaggaaactctggtggaggctcgaagcgatactgacgtgcaaatcgttcgtctgacttgggtataggggcgaaagactaatcgaaccatctagtagctggttccctccgaagtttccctcaggatagctggagcccattacgagttctatcgggtaaagccaatgattagaggcatcgggggcgcaacgccctcgacctattctcaaactttaaataggtaggacggcgcggctgctccggtgagccgcgccacggaatcgggagctccaagtgggccatttttggtaagcagaactggcgatgcgggatgaaccggaagcctggttacggtgccgaactgcgcgctaacctagaacccacaaagggtgttggtcgattaagacagcaggacggtggtcatggaagtcgaaatccgctaaggagtgtgtaacaactcacctgccgaatcaactagccccgaaaatggatggcgctgaagcgcgcgacccacaccaggccatctgggcgagcgccatgccccgatgagtaggagggcgcggcggccgccgcaaaacccggggcgcgagcccgggcggagcggccgtccgtgcagatcttggtggtagtagcaaatattccaatgagaacttaagangcgaangaagagancgaccatgacatgggtttcngcttgttccactaancantccacanatgttncccntccgcctatgctttgcaagactatcttancttgtgtcctttaagttcacttaaaagttcctcnagttttgagttttgatntnagtttatccacaanccgtttccnttggacagatcta

SEQ ID NO: 396684 - DNA, 538 bp, Oryza sativa
  unsure (1)..(538): unsure at all n locations
cgtgcaaatccgttcgtctgacttgggtataggggcgaaagactaatcgacccatctagtagctggttccctccgagctggtcctgcggcgggaacggagcatcacagcgccatttcagctagacagagatacagagagcatagcgtggtaacgggtaactatctctgttacctctgttccatattacatgtcgtttttagttatattctaagttgaacttgtatagttttgatcgagttacatataaaagtaaatactactccactataagagcaggtacaatagcaaattataagctagctatacacatattttaagaagataaaataggggagagaaaagcagtcggctacatatttgtagccagctatagtatggactctgagacacattgtgtgtgtatgatagatgagaccagatttaatagggtagtatgtaactgttgtatgaattagctattaaattaactatagatgatttaaagctattagttggctatactattaannnnnnnnnnnnnnnnnnnnnnnnnnnnnn

SEQ ID NO: 396685 - DNA, 593 bp, Oryza sativa
  unsure (1)..(593): unsure at all n locations
gnnnnntnnnnnnnnttcngggtgnnggattcggcacgagaacaagcactaatggggattttagcgcagttgtgtttggaggcatccagccagcatatgcatatgccatgggaancatgatctcantctacttcttgacagatcatgcgganatcaaggacaaaacaaggaactacgcactcntcttcntnggtctagcantgctcncatttttganaaatattggtcnncattacnactttggtgcnatgggggaatacctcccccanaaaatccnggagcanatacttgccaanatccnccccctccaaattnggtggtttgaacntganaaaaaantccnctggtgccntatgctcncacctagcttangaacccccttgtgangtctctccngggtgatccaatagctctcgtgatccncanaatttccccantgcttattgctgcccntnggtctngtcnttnncngncgtttgggccctgttnttataacaatgcccccccnatcattgtttgcttttatgctccccccgttttnctccnnaaaatntnnnnnaaatcaattacntnnncnnccnganaaattttnn

SEQ ID NO: 396686 - DNA, 569 bp, Oryza sativa
ggccctcttgcacaagctcgtgccgaattccgctcgagggcgctagcttttctcaatctcgccacgaggaaataaagcctagcgcatattagccgttggttggtttagtatacgtacgtagggtagcttagcttagagcacgtacgtacgcatcgatggcgcagcggcggagaaggcggcggagctgcaggacccggagatccgggcggagctggaccggcgcgcccgcgacgacggcaagaccgtcatcaagagcggcaccggcggcaagagcctcgacgcccaggagcgcctcgccgaacggcgtaagaagggagggctgagccgcacgacggagtccggcaaggagcgcgccgacgacgacaccggcgccgtgctcatctagcccgacgacaagatgctcaaggaggccaaaaagaacctgggccgcaagtgagacctacgtgcactagcgtgctggtgtgttgtggttgctccatcatatagtagtgtactagtgtgtgcatttccttgggtgtttccatgtgcatgcatgcatggcaggcgtacgtattagtattactctacgt

SEQ ID NO: 396687 - DNA, 562 bp, Oryza sativa
aattcggcacgaggcaagagggatattcaagagcttttcagtctgcctgagcaaggttttgatgtttcgctgacacaaaagcaattgcaagaagagcatggacaacaacttgtgatggacgactccttgaggaagcatatacaattcctggagcaacaaggcatagcgggcgtgagccatcacagccttctgttttctaagacagcaatcttacctacactgaatgataatgatggtttggacagtcgtcgagctatgccaatggccaagcactactacaagggagcctcatctgactatgttgcctttggtgctgcctatgcgatgaagccaaaagagttcattgctcgaacatactccccgaacagcacaagcacagaaagtcctgaggaaatcaaggccaaaatcaaccggtctttcgcaaacccttgcaaacacggtgcttgtggcgaagctaccagatcgtggagacaagataaggaggcagataaatgagctggacgaaaagctgaccgtgatcgaatcttctccggagccattggagaggaagggtccaacggga

SEQ ID NO: 396688 - DNA, 636 bp, Oryza sativa
  unsure (1)..(636): unsure at all n locations
acacgccaaagaacacacacgagtagacaaccactagtccagtctccagtgtcactcgaccagagcactcagctgggtagtatttgaaggtaattttacttcctctcgtggctatggagaagcaggagaacggaggggaggcgccggagctgaagctgttcgggtcgtgggcgagctcgtacacgcaccgggtgcagctggcgctgcggctcaaggcgctggagttcgtgtacgccgaggaggacctcggcaacaagagcgaggcgctgctgcgcctcaacccggtgcacaagaaggtccccgtgctcgtccaccgcggccgcccgctcgccgagtccgtcatcatcctccagtacctcgacgacgcctggccggagagccgccccctcctcccctccgaccccttcttancctgcgccctcgctcgcttctggtgccacttcgccgacgataagcttgggccggccggttgggggcggtgntcgcgtgacggggaggacagagccggcggtgcatcaggtgcacgacaaccttggccgcttgctggagcggancttccgggagggcgtcaagggcggagttcttcgcggngaccaggtgggccctcctcgacagtcgtgctcgggggggtttgcc

SEQ ID NO: 396689 - DNA, 486 bp, Oryza sativa
  unsure (1)..(486): unsure at all n locations
ttggctgcaggattcggccgatctatattctagnacatcttcnganntcagagtcnnncaacctgttgantgancttagtgcgttggtggagaaggccgaacgtgaggatgcccttgccaccgaggncgcagagatgacattcgangagctgctggctcaggagaagagcgacgccgccttctggcagcgtcacaggaagctgacctcaatcttacccaagtagagtttgataactgaccgcgcgatttcaccatcgtcaatagtagcccgaacccgtaaccagaatttgttcctggtggagcttttaatgttgctagttgcaaccgtggtgtaatgcgcttgccaagctcttgggcgcctgaaagtccagagtccttgaccataaaacctgagagattcaggtggttggctgacgaccagcaaatgctctcatatatcctatctggtacttcggccatgaannnnnnnnnnnnnnnnnnnnnnnn

SEQ ID NO: 396690 - DNA, 826 bp, Oryza sativa
  unsure (1)..(826): unsure at all n locations
ccgaggatgacttctcanggacaaatcggtcgcggcgtccgtcctccacgggggcacattggacgccaagaacctgtgcatcgagcccacgattctgctgaatcccccactcgactccgcgatcatgacagaggagattttcggccctctcctgcccatcatcacggtgaagaagatagaggacngcatcgccttcgtgagagcgcggccgaagccgctcgccgtctacgcgttcaccaaaaacgccgcactgaggcgccgaatcgtcnaggagacgtcgtcggggagcgttacgttcaacgacgcagttgtncaatacgggatcgattcgctgccgttcggcggcgtcngcgaaagcggattcgggcagtaccacggcaagtactccttcgagatgttcagccacaagaagccggttctgacgagaggataccttatcgagctgacggccaggttcccgccgtgggatgacagcaagatctccatgatgcgacagctctaccgttacaattacgtcggattcgtcttaaccttcctcggtctaaagaagtgaaaatttggtgggaaggaattggtgatcgcttttgtggagttcaaagtgagtgcatttagcccaagagactactgatgagaataaatatagacttatatcgcttagtgaataagaacaagatttgcagttgctagtataaagcagcaaaaatgtactgcctgcattatataagaaaaatgcgctacctgtaatttacgtttcgtcaagaaaccaccttttaagtaaggtaaatgtaaggtactaaggtgcaatttcaaaaaaaaaaaaaaaaaa

SEQ ID NO: 396691 - DNA, 800 bp, Oryza sativa
  unsure (1)..(800): unsure at all n locations
tccngggctgcaggattcggcacgagctcgtgccgaagacggtggaactgncanacctctacttcagtnanngaatcatacggatgtgcctgttagaaaagccgctgtttatgcattggaaaaactaagtgtcagttccatagtctgtgagcagatcaaaacagatggtggtctaaaactgcttgcagacatagtgaaggatcccaataccccagttgagcaactggagaagataatcatcatgctttctcgaatattcaacacgggtatcagcatggtagctgtgcctgatagctcagctattaatgggtctgaggatacaatgcattctgagaagagtaatggtagctgtggtgatattgatggtggaaccaatggaacttccttcgcatatttgaaacaagaggagacatctagtgtgtcaatcatcgatttcgacgtcatttcacgcttaactagagttctgagggaagcatctccaagtttgcaagaacaagtcgcttctgtactggagcatttagcagcttttgatcagcatgcaacggcgatgactgctgctcgcattgagtcagtgattgaagctgttctggaaatgggagttattcatggtaccatgggcgatcctgaaaactttgatgagcttcctactggttgtgatccagcaagttaagtcgggctgttttctgccactgttaggttactcacaaaattactcgactttgatatttttgttcgcagcataaatacccgagaaatgtattgctctgttaagaaaaatgttcaagtccaagtattcctct

SEQ ID NO: 396692 - DNA, 519 bp, Oryza sativa
  unsure (1)..(519): unsure at all n locations
nnnnnnnnnnnnnnnnnnnnnnnnnnnnnnnnnnnnnnnnnnnnnnnnnnnttttttttttttttttaaataatttcagactgtaattatttatactgcttgaatgattcagtggttcagagcacaaactgaaaaacgtatcccagatttgctggtcacatcaatgctcaactacggtacaaaattcagaaagaaacataattttcctttttgtgtaatcaaaagaaaaaagataaatgattaattctccaggttacttcgcgactcatggagcgattcttcagcacccagtgacacccgttcttcagccacttcaagcattatcatgtcagctttcttattacctgtgctatgtaatctttaatatatttttttagcacgctaatgctactacaaaagttcacttttgtttttttatattccctggaactatttaccggcctgctccaaattgccttttgttcttcacggacgcgtggggcgacctcgagggggggcccgggacccaattcggcctat

SEQ ID NO: 396693 - DNA, 794 bp, Oryza sativa
  unsure (1)..(794): unsure at all n locations
ccttgggttgcggattcngcnngagtgctgcnatagctgaagcagttgctcttcatgtcctcattggtgaggactccgatgaacctgccatttgatgctaaacaagcacagaagatgcaaccattgggatcactcagctggttttgatttcgccgtggatgcacaaggcgctgatatttatcctcctgatggactgatacagtgcgctgatcatgtttatgctcccaaagggaggtgtattgattgggggattggccagccattgccatcttggggagaggtgaaggacttgcagttgccggcaccgtgctaccaaggaatgttccaccagtcagttgcatgcccaggtttcatagcagctcaagcggtctcctccttgcaggtcggaggagattcgtcagatatttcctctccaagccaaggagcgactgtcgttaataggatgcttgggtgccaccaacaggctcggcctttacagagagatatgaaaacatacacttcacgatattattattgtatatagtcatcaaacttgtgttgactactttgcctgcagtatatctcataaccaaagaagaattggatagaacaccttgtttactgtttctgtgagtctaaaaggatatcttatatcagtcaaattggtattgtaatgaacatattgttttgattccctgttgattttcttggaatgtatcctgtgtcgacttgatgttctgtacagtgctcttgtgctttcttttacaactattactatatctaacttgagatgtcnnnnnnnnnnnnnnnnnnnn

SEQ ID NO: 396694 - DNA, 582 bp, Oryza sativa
  unsure (1)..(582): unsure at all n locations
cccgctttagctgagacaacattggcatnccttcggcatccagattgctgnntctcagcttactcatcagttgatgtgaaaagaagtntnnatgatggggagaaacgttttaatcnactatcaattgaggaaagaggcnaatttgatgaacagacacttgtgaatgtgaacagcatcaagaggcagaaagcaggcagccaaagatcgagcggttttagcaacgagtacattgtgataaccatattggttgctgctgagggtgttcataagctacccagtataaatggcagcggtgacttgaagacagctctacagaagcttggtgccataccatcttgtaaaaatactggcagttgaggtactatggactccacaaaatgagaatgacacattgtcagaacgagagctgctcgaagattacccgcttttaagacccctatgaaggatgcattttagattcatttttgccgtatttcagcttattaactatagctcaggttgtgttgtaaagataggtaacgtaaaaaaaattggcctacatcattctcgcaacacaattgtacctcggccgcgaccacgcta

SEQ ID NO: 396695 - DNA, 483 bp, Oryza sativa
  unsure (1)..(483): unsure at all n locations
ctgggctgagatccggttcgaggaggactcactcctanccgagttgttgagatcgtctagatgctgaaaagaggagaaacccctcctcgcggcacacaacacccagagcggaaaaactgtggccctgctggagggaataccaccttgcacggtgagccnaaacctcctccgtgcagggatctagatgcttgctaggtttgctttgaattacaggcacacaaataagttgggccacactatgattatatggtgtggaaactggaacaaagcaaggcgatgtgttgtttgtattttgatcttgttttgtttacctctgcccgcatcttttttctctccttttgcaccatcagagaaatggtacattgataatgacgatatgttattttgtcagctgacatgaggcggcagtggtaaaaagatttgtattcgtctttcggcaaagataaaactcttggacattctctttttaaaaaaaaaaaaaaa

SEQ ID NO: 396696 - DNA, 668 bp, Oryza sativa
  unsure (1)..(668): unsure at all n locations
aattgtaatacgactcactatagggcgaattgggtnccgggccccccctcgagttttttttttttttttttcagtaaacatttctgtagccatctcataaattattacttttatcaaggccacaaagtctgacagggtgttgcattacaaagctattattttttctgtactccctactagctcctgcaatgcccacaatgaacaacggcttgccagcttaatctgactcagaacaacatcatcaaggggataactgtgatgcagatgatggccaaggttgcaattattgatccctgatcaaatgctttccctaaacccccaaccctggtgaagtgctgaaaagcganatacccanccaatgccnaagacagtgctgcnccnccttgaattcccctcanattcatcaactgggttanggacaacnctcccaancaccttatttgacaattngaagctccntctccccttgnaatgnntaanaacnnnccccccnnaactataaaatccccattngacctntcctnctcnatcctnaaattanncttcnngtgttncntccacttnggcccntggaannatngttttgctgntccttcncnacaaanatcgngggnccggggaancntcttctccncctcngntcccnnattanncgggcccccnncncn

SEQ ID NO: 396697 - DNA, 424 bp, Oryza sativa
  unsure (1)..(424): unsure at all n locations
ccgcatgagcccgtttaaaaaccgcgggcagcggccccggcgtcagtgaaagtntttgacggcggatccgtcnccggcaaccacgggggcgaccgcggcgcgcctcggctagggtggcggtgccggcggcggcggctggattagggttagggtttgttttttctttttttttgtttcgattttttattttcccgtgcgggcggcttaagcccccgcacgcgaaaatcgattttcgcgtgcgggtgcgtcactcgcacaaaaaaatcgtgcattttcgcagacgatttctcccagacggtcgaatcttccgcacgcgaaaatcgatttcatcctctcggaaaaatcctcgtagtagtagggtgtgaatagtttgttcctacttatataagttaaattagacttgcnnnnnnnnnnnnnnnnnnnn

SEQ ID NO: 396698 - DNA, 518 bp, Oryza sativa
  unsure (1)..(518): unsure at all n locations
gattcagngggccntcgccggancgttttggattcttatattaggaattcagggtctcatccatccaggaggcaaaagaactctgggagaaaattcaacaacgacaagggctgaacaagtggcgcccagacctagaagaagagtacgaagatcaggagggaaatatctacaacaaggagacctacactgatctgcagcgccagggcctgatttagaatccctgatgcgatcctaacattttggcccctatgggctgctgctgaagtggttggccatttgttctattgaacttcgttgacctctgggtagttgtagcactcgatacttgtagcaccatgggtactccattgctcaaatgtttcttttctactacatggtatattgcactatatccctgtaccctgtttgaccatctggtatactgtttgcacaatccagggttnnnnnnnnnnnnnnnnnnnnnnnnnnnnnnnnnnnnnnnnnnnnnnnnnnnnnnnnnnnnnnnnnnnnnnnnnnnn

SEQ ID NO: 396699 - DNA, 522 bp, Oryza sativa
  unsure (1)..(522): unsure at all n locations
atcctgtaggaagggaggcattggttganattatcaagttgcaaccacccactggctggaggggggtgagcccttgctgatttccttggggggccaagatcatggaggtttggttggttgcatgcacgacccaaccagtctgtaggttctgataatagccctttactggttgaaacagataacaggacaggcgagaaaaggaggatactttatgggtacctagcaatttcatctgatatggatgaattagactctgattcaaggaaaagggcttccctcaagagcaagagagaatttgacccatctgattagcctcttctcacaaaagcacatctccttgtcagtttatttaattcaagcgacgcttctgtaccttctcttaaatgctggtttacaaaatatgctgctgtgcactagaaatattacctttgaaaatagtacctgcacttaggatgattgtcatcgttattgctcgaagctacatatctcagcaagtgttttcnnnnnnnnnnnnnnnnnnnn

SEQ ID NO: 396700 - DNA, 692 bp, Oryza sativa
  unsure (1)..(692): unsure at all n locations
cccctttttgcaantccaagtcatcgtccagtacatcgacgaggccttnccccgaacgcccgncgttcttctncttcccatccgacccttacgacccttcccgtcgctcgctttctggcccccttacatcgacgacaagctgttgaagtcatggctgcaggcgtcgatttgcaagacggagcaggagaaggcggcggcgatgaaggagacgttcgcggcggtggcgaacctggaggcggcgttcaaggagtgctccaaggggaagcccttcttcggcggcgacgccgtcgggtacgtggacgtcacgctcggcgccgtgatcgggtttgtgcgcgtcggtgaagccgtgcacgggatgaggctgttcgatgcgagccggagcccgctccttgacgcgtggctggaccccttcgccgcgctggacgctgccaaggcggtgttgccggacaccggtaggctggccgagtacgccaagatgaagcaggcagagtgggcagcagctgccaccaactgagccagcatggccacgtctggtactctcgtggggagatgaagttggtgttggtgtgccacccgtaccgtacgtagctagtcctgtcacacgatgtgacgactgtgtgaactttgctactatacgcaataaaattgtgaagtcgttaagttttcgtaagtaaaaaaaaaaaaaaaaaaaa

SEQ ID NO: 396701 - DNA, 664 bp, Oryza sativa
  unsure (1)..(664): unsure at all n locations
nnnnanncgnnngaattgtatacgactcactatagggcgaattgggtaccgggccccccctcgagtttttttttttttttttttgcgcaactagggattttccatagagcacctgcttagaatgcggccattgcctctctttacaattcttcaaattgaaaagtgatatatagatgttctacagcttctacacagtaaaaaattctgcggtgctgccaaacgacaaaattctgcagcaacttataagtaatactaactagaagctgatcttattacacaaacaagcagaagctgtcttccaacaggttctccaacaaactagtagcagcttctgcacagctatgcagaagaatggtcccaaaggacacatcatatacaagctccaatagtatcactggtaacctcacgcagcacctgtggtataaaaggcggtgttagggataaaaagttgcagaatacatcagcttccaaacacctttttgaactgcagtgacttgacctggacagcaaagaaaccaactgcgtccatataaaaaacaaatcacctcctccccaaaactattcctgactggagcctctaaccaatgattacctcacggtcaaaggccttccacggaggatgccccatcatggctgccaccctccntanccccgaatacccatc

SEQ ID NO: 396702 - DNA, 595 bp, Oryza sativa
  unsure (1)..(595): unsure at all n locations
ttttttttttttttttgacgaaaattcgatgatatgatgtcctgctgcttgaagtcaccactcagctgatgctctacaaacatgtcaggtatgaaaaatcaaagcttaagcagtaacacacttcaaacaacattcttaatctattacacccattcgatgtaatttatttgtaactgccacagaatgttttagcacctcacagcaaactctctccttgcagttttcagggctcggatgccttctttgaccctgaagccttcttcttcttcaccagaacgtagttctggcgggtgactgggttcatggagaccggcttccctgcaacgcgaggccatgcgtcgagcttctcctcggtcactttcccccattccttgtctgccaccgtgcgaggagttgtgcctcctaaaacctttttgtcggcgaagtaaacgccgcaaacataagcaaaggcaaaggatgccgtcactgatccgacgatgtacttggtcgccatgtcttggttgatggctctgcaaaaatggtaccgcatgcttccttacgttagaacaattctggagtaatagatgtactcatacacgagtgtatttgacangac

SEQ ID NO: 396703 - DNA, 603 bp, Oryza sativa
  unsure (1)..(603): unsure at all n locations
aaaccancttccagtntggtatgaaaagaggagcgggccccgggcctcaagcccggaganccgtttccccccgcaccgtcccccccttcgggggagactcaggaatgggacccgattgcttcaagttgaccagcccacctttttggacttaatcttggccgggaatacttcaacatcaaggggttgctggaccttacttgccagactgttgctgacatgatcaaggggaaagactcctgaggagatccgcaagaccttcaacatcaagaacgacttcacccctgaggaggaagaggagatccgcagggagaaccagtgggcttttgagtagaaggcatcaaggcctctgatgtcttggtgcttagatccttactccgtatctacgtatgctctgcttttatatgtcgtgctggttgtaagtattttggagtccgatgggggttcatgtgcacgtttagttggttaaatggttaagttctatccaggaaaaaaagaactgatgtggtcagaactactgaacctgttatctgcattaattaatactatcaatctgcagtgaaatgctttgctaaaaaaaaaaaaaaannnnnnnnnnnnnnnnnn

SEQ ID NO: 396704 - DNA, 578 bp, Oryza sativa
  unsure (1)..(578): unsure at all n locations
aangaaagttggncngntaacccaagttggaataaccntcaatanggaanaaaggggntttcnccggggggggccgttttggtagtatatgaacccccnggccccgggattcgcacgggggttgggggaaatgtccaacagtaaaggggaaaaggtgtttttcttcccgggagccattccattccttggggaataattgggggaggggaggtccctgttaagattttaccccaggagattgtgaaagagatggaaaccctnagcggggagagcctccgtcagtacctgtgaggcatttgangtttttnatttgcaacagtgaagngaatatttatgcanttccgggtaaatcanttaagaaaaanatgggagttttatgcaaagttaacactaactggaacattttggnanatattcattttgctgtgtagaacaatggtggccanattcatggtgtatgncctttttttatgacagtaactgtattgtttgcggttttttnnnnnnnnnnnnnnnnnnnnnnnnnnnnnnnnnnnnnnnnnnnnnnnnnnnnnnnnnnnnnnnnnnnnnnnnnnnnn

SEQ ID NO: 396705 - DNA, 1059 bp, Oryza sativa
  unsure (1)..(1059): unsure at all n locations
nggattncgantaggtnnttgnccggattttcatgttttanagaaggacattntattttgattgntgggtanggantcttcacattcaaggggtgtgatatagtttcgnntcccnaagcagatcaaagntgcaaaatccnttgttgagcaacnattngtgaatggaaaaccaaatatccaacatccaaaatcgatgattgcgcggttgtttgcttatatttggatggaaaatggaccatgagcgtgantcaactgcctcattggacaacatcagtattgaagagggttcagttgcagatcctaatgaacctcaggagcaggagcccaccttaactcggaatttcacagttaggacagttgcaggcagcacgcaagagaagaccttagcaggggtggatgcgagggattgctggtgtagcgaacgaccaaaattggtccaggtctcgatggagtgacacgggtaaactcacttgttcagcttcctaggttttctgaagagagggcaattggctgagctgcccatcttatatttacccccgttattttcacctattgttctgaattttagcgtagttgttctagagaaaggtagatttgggacgatcttgtgatttggtgcggtacttggcaagcgtttcagccactatgcatagaagtcgagttgcacgttttagcccaacaaaactgcacattgcataggacagaggctctcttttcacccatcttgaggcatgtcaactccatacctcgaagatgaagcacaaaagagcaggccattgctccaaatctgcaattttgctgggttaaaactaacaaaagacgacgccaaacacagtggctaaacgcacgccaggccccagtcacccctgggatgatattgtcgggtgacctgtaaattctccaccggcgcttgctttgcttttgtagagaggtgatgtccagaccattttctccgctgcatgcttagcttttgttgacacagggcggtgcgctctgtcgatgtcggnttgccnnnctttgcnncnnnnnnnnnnnnnnnnnnnnnnnnnnnnnnnnnnn

SEQ ID NO: 396706 - DNA, 899 bp, Oryza sativa
ggggcgctgtattatccgaccacaaggctgatctgcctggagaatacccatgcaaactgtggtggaaagtgtctgtctgctgaatatactgacgaggttggtgaagttgccaagagtcatggtctgaagcttcacatagatggagctcgcatttttaatgcttctgtggcccttggagttcctgttcatcgacttgtgaaagctgcggattcagtctcggtgtgcatatctaaagggttaggcgcccctgttggatcagttattgttggttcgacggccttcatagaaaaggctaaaattcttaggaagacactaggtggtggaatgaggcaagtgggaattctttgtgcggctgcctatgttgccgttcgcgacactgtaggaaaacttgctgatgaccatagaagggctaaagttttagcagatggtctgaagaaaatcaagcattttagagttgatacaacttcagtggagaccaatatggtattctttgatattgtggattcacgcatatcacctgacaaactgtgtcaagtccttgaacaacgcaatgtgcttgccatgccagcaggctcgaagagcatgaggcttgtcatccactaccaaatttctgatagtgatgttcagtatgcactgacatgcgtggagaaagctgctgaagaaatactgacaggcagtaagaagtttgaacatctgacaaacggtactaccaggaattcatacgggcactagtagatcactcctttcgtgcccactgatgcatcagtccagcgtccagcttgcttgtcatctcatgactgatgtactcacaacttggcttaataataactgatgttcactctgttggaatgagctgttactatgtgcgcggtggttcaccttcaaaaaaaaaaaaaaaa

SEQ ID NO: 396707 - DNA, 579 bp, Oryza sativa
  unsure (1)..(579): unsure at all n locations
tcatgaactgttgggggcagnagagcaattcccggtaatcatcagtcatcattnccatgacggtgcagcaggggaaaaaacgagcccccaaaggcatgcagcagagcatttgcaccggcagtttttttaagtttcgttccttctttggcggaggaattcgttgttctatctggtaaattgaaacatggagggcattggattttgggagcagtggcatgcattcttcagagttcaacaaagatgatgggttggggtcccacatggtagtggtagactactgtagctgcaaagcttgattaattaattagcctgttcttttgataatgaaggagaggagagtaactcacaagtgtatagatggttgtctcatctctgtttgtcatagtacacaccaagtgcaagttgcagctgtgtctgcttgcaagaatgcatgcccatgtacattgcatccccctttgcttgacaaatgacacatccagacagcctccatatcctgtttcctctcgttgctacaccctgtttttgtgaagtacatgcatcgcaacaatgttcacgnnnnnnnnnnnnnnnnnnnnnnnn

SEQ ID NO: 396708 - DNA, 1203 bp, Oryza sativa
  unsure (1)..(1203): unsure at all n locations
angattcattaaannangnggcagaaangtttcccgaattggaaaggggncagngagnnnaaacccatttaatgggagttagntnantcattaggcacccccaggcttaacaattttatgctttccgggttggtatgttggtgtggaattgtgaggggataacaatttcacacaggaaacagctatgaccatgattacgccaagctcgaaattaaccctcactaaagggaacaaaagctggagcttccaccgcggtggcggccgctctagaactagtggatcccccgggctgcaggaattcggcacgagcggacgaggcggagctgcaggccgcggtggagcgcgcgtccgcgctgactgtccccctacggcgccagcatcgtggagtacacgagccaggcggacgcgaccaccatcccggggcactacgtggtgtactgggagctgatggtgcgggagggcggcgcgtggccgccgccggcggcaggaggagggccgcggcgtgttcgaacggtgctgcctcgagatggaggaggcgctcaacgccgtgtacaggcagggacgcaacggcgaggccatcgggccgctcgagatccgggtggtgcgcgccggcacgttcgaggaggtgatggactacgccatctcccgcggcgcctccatcaaccagtacaaggcgccgcgctgcgtctccttcggccccatcatcgagctgctcaactcgcgcgtcatctccaagcacttcagcccggcttgccccaaatacagcccgcacaagaagtgatcactcactacactacacggtccagttgagctagacgacacaacgatatatagccttctactacaactactactaccagcactcagtcccagtgcttatacagtcggtgtcagtgtcagtgcgtgtgtaatttctcgtgtttaaggcagagggcatcagggccatactcctggatgcctgcttctttgatcttagatcatgctgtccagtggtagttaccatgtaatcatgtgtgagatgttatttctgaagtggaaatggcgagtgtttgtgatggggtaagctggtaacgtcattcttggccgaatancataataggccttgttggagtatctaccaactactnctgttgacccatatgtacttttttctgcttgtgcaaaaatgggagtgaactagtgacactgaaaaaaaanaaaaaa

SEQ ID NO: 396709 - DNA, 600 bp, Oryza sativa
  unsure (1)..(600): unsure at all n locations
atggnggggaatnaancattttgttatggccannttggcttttttttttggggccccantaaanaattgggggnattctgggaanaagtcccgtgggggcaattccctcctggaaaagcaagttctggcccggaaaagtcctgttgtgcacaaagttttggggaggcggcaggacgggaacaggaagtatcaggggattttcagttgggttcagcccctgtgggtcagctacaacagaagcttggaaatcaaccttaaggctatcctggaaatcaaccttcaggctaagttacttattcaggtgcaaaaaaaaattccccaacttgacggcttggtccgctctctcctaacctaagcgacgacccatgttggtgtgaagttgtcgatgctacctacctgataaggacgaatataagcctaattatcgccattaatactcgaggcttatgaaaaaattctccctctttctttcttttttgccgtttgagttaagtgcacttgggctaggtgtgtttctgcttgaacgacattgtaagtttgtaaaccgtttgttttgttagtttttcctactcgttnnnnnnnnnnnnnnnnnnnnnnnnn

SEQ ID NO: 396710 - DNA, 714 bp, Oryza sativa
  unsure (1)..(714): unsure at all n locations
gcaattccntcacggaaactccccgcattcccngcaatgacatggnatggatntggttgcatgaaaacctacaacagtgcagtgacctactacaaatgaactgctgaacaatagcttggcccgaggttaggaagaagctgcaggatgcatctattgtgtatcttgacaaacacgctgtgacgctcgagctgtttcgccatcctaaagctcatgggctgaagtatgggactaaggcttgctgcggatatggtgatggggcttacaatttcaacccagatgtgtactgtggaagcagcaaattgctgaatggccaaacggtaaccgcaaaagcttgtgctgatccacagaactacgtgagctgggatggaatccatgcgacagaagctgcaaacaagatcatagcatcttccttgatgagcggctcatattcatatccaccttttgatctttccaaactttgccacctacagcccatagcataatcacagcaccaatctagtcatacttagttgctgaaaccagaatatgacaggaaagcacatcttctggaaaagagatgttgtaaatagtatgaaagtctcagtagtcagtagtacataaagaggtttgatattcaaaccttcaactaagaataaaatcatgtttattgtatatcctactaatacacagtactacggtaccgagacttgaattgcaaaaaaaaaaaaaaaaaaa

SEQ ID NO: 396711 - DNA, 581 bp, Oryza sativa
  unsure (1)..(581): unsure at all n locations
gggggggggggaccggcccatgggccacagccaagttcgatttcagggggaagcggctcacgagcccacgggatccatcagccggaaaacccggtggccgatgctctccacaagagcgcggcaccgtacatncccaccctggaggagcagaattcgttcggcaagcacaagccagacgagccctcgtcggcgccagcagctggccacggagtagatcagacggtccaacacgcactacacctctcgtcagaactagtagctagctagacacgattagaagagcacgcgcacccacggttcgcatcgtcattagggagtttcagagattacgtgtacagatgtaattgtgttttgtatgtcgtgtactaccatctgagggaggctgagcagatcagacaaactctaggttggcatcctcctgtcgcctctaatcgtgtgttttaacttgcatcactgtcaatgcatttcagtgctgtggacgcagccggtactcctgtacatcgtgagggtgtcaatggatcgtttttggctactgctcatgttttgtgtgtgtaaaaaaaaaaaaaaaaaaannnnnnnnn

SEQ ID NO: 396712 - DNA, 1070 bp, Oryza sativa
  unsure (1)..(1070): unsure at all n locations
aaaaatggcgnngcgcggngtggnaaaacccggggnnggaaaagaanntcttatgnggggcccncccccgcantttaaagagaagtttnaacggtttcgcaagntttggnccccaaacntcaccaaagtnaagggagagaggagtagaggtnttnntccatggcggggacggngaaaatngctgnatgattgttgtcggtggttgggcgcaagatggacaaggcttcaatcatcaaggangcgatcgagtacatccagcgcctgcaggcggaggagcagcagatgctccgggaggtcgccgcgctcgagtcccgccgccgcggcgagcgccgccccggccgcggcgaacccgttcgccggcctcggcgccgacgaggaacacgagtacggccaccaccacccctcgtcgtcgtcggagcggacgaagaaggtgaagcgggcgctgtccgtgtcgtccatcagcgacgccctgctcgccgcggcggcgccggcgccgccggtggagatccaggagctgcgcgtgtcggaggtgggcgacagggtgctggtggtgagcgtgacgtgcagcaagcgccgcgacgccatggcccgggtgtgccgcgccctcgaggactccgcctccgcgtcatcaccgccaacatcacctccgtcgccggctgcctcatgcacaccctcttcgtcgaggtagatcacatggatagtgtccaaatgaagcagatggtggaggctgctctctcccagcttgtggcgaccggcagtccgttgagctccatgagctattagttatgagctggatagatatatggagtcatgcgttttggccacctactttacctagtctcattcgcaataaagcgcatttttatgtatgcttggtgatgttgttgttgtcatttttgcgacacnncnctacgtgatggaggtggttgttttcttgcgaggcaacgatttagtggctggatgatagatttaagtattttggaaatcttgagtacgctgacttgtttatgtagctattaatattgatgaataataaggtggtccagcttaatgaaaaaaaaaaaaaaaaa

SEQ ID NO: 396713 - DNA, 973 bp, Oryza sativa
  unsure (1)..(973): unsure at all n locations
tttttttttttttttttgagttttcaactgattattgatacgtataatcttgagttttcaactgatcaatacaagacccataattgtaagtatcatctttagcactagaaaccgaaaaacaagcccaaaattttaagacttccagttccatacactctacagctaacttcagtcaggcctacaacagataccttctcctcgaagtaacttatcagtacatccacgagtctctgaaactaagcaagaaatgcatcagctctagtatacgacagcacagttcaatgcttggtaattaagcaggcttcaccatataaattaagacatacttatggtaaccatctcgcaggacgtcagagaatcacaaggaagaaaccagtgctgttgtcaataacccctccagataaattatagcaggcaggcaactatctttacacagaggatatgcctttgatcacgcctaatgcgtgcctcaaaccagtcattcaattattattttcatctnacacattgacatgatttatcactggcctaaangcctagagagagagagaaaganagagagagagagagagagaaagggtattaggcatgttgctgcacccgggaactagacccgggcttatttagtgagccgagcagctcatgggattgaattgtccaaaacttcatcggccaggctgactccataatgctgagctaggctcttcatgtttccgttctgtacgacattctccagcatgtcgtacttcttgtaatttccatcgagtaattcctgctgctgctttgccagctccttctcctcttccctcgtgccgaattcggcanagccccacctcctccccttttctcgcgnagagaacgncgcacgcagncgtcnccgtcggnagcggcggcggcgcacgntggacgccgcgtgcntanaagacagagtgcgtgagnacggagctaagctagcttctcactagaaggtgat

SEQ ID NO: 396714 - DNA, 690 bp, Oryza sativa
  unsure (1)..(690): unsure at all n locations
cgttgaagttcggcacgaaccggcaccatcggctcgctgatgacgagggagctggagccatcaaggccgcgccgccgcacgccancagcgcggcgacgacgccgcggcggctgaggctgcagagcagcccggtgtcggtgccatgcggagccagcccgaggaagatcgccgcgctgaggaagagctcgtccagcctctccaccaccagcagcggcggcggcagcgggcggcgcactgaccgcgtgagcgccgaggagtcgtcggcgtgcaagacggcggcgtgcaggaggagctctagtaccacgccggccagctccccgatgctcgcggcggacgtcgaccggagcggcggcggcggcaaggcgaagaaggcggcggcgagggggcgccgcggcgtcggcggcgtggaggtggtggacgtgaggtgcgggaacccgatgagcagccggctgaggaggctgggattctccaagctgtcggagacgttcgcgtgagcagaatcagatcgtcttcagtcctgacggcgagctgtgtcgcgaattgcaattcggaattgcattatgtttgctatagtaattatattgttgttattaaaattttcttttgctggtttctctcgtgtatgggtatgaccaaattaagttaatttatgagaagcgttttgccatcgtcgcaaaaaaaaaaaaaaaa

SEQ ID NO: 396715 - DNA, 569 bp, Oryza sativa
  unsure (1)..(569): unsure at all n locations
aattcggcacgagctttcttncaagctgagctcccagctcacttcttcccatcaaatctcctccaaacacttgagatccatccctgcatgtcacaccacaacaatctcaagtatccaagcctcccatccatccaaatatcttgcacatgcatggattcgtgagggagatcgggaagaaaataggtggagcttgctgctggttgcagcagcataacaaccatgtttttcctccacttggtcattgatgcaagattttagagcaaagaacagctgcaactcgtctctctccactccgacgattacaacccctatctccctcggtttactcagattcggagaattcggagtacgtggagcaagactctgaggttgagtgtgtttccacgcagcagcaaggagaggattccggttatgagttatgtttcttgtgtggtcattgctttgccaagggcggcgagggcaataaggtgatctattgcagcttggctcttgcccggttcggtttgccctagttggggttgtggcaccaccggttttatcttttncttatgaactctaattgagactnc

SEQ ID NO: 396716 - DNA, 741 bp, Oryza sativa
  unsure (1)..(741): unsure at all n locations
tattggtgcggagcccgtttgagacgaagacatctttggcccctcaacgtcctctgccttttcgtcttctacaccgcggtggacgagaacttggagaaccccagttggaaggcaatcgggtacagcgtcccggcggccgaggaagagccacagaaagaagaacctacagaagcaacgccgacgccggcgccggcgacggcgccgccgtgccggctctggacaatggcgtcgtggagaccaagcagctggacgacaacgccttgctcatgtcgctcgcggagaanggcctcgcgctgaagacgggcgcgtcgtcgccgagcgcgcaccaccactatctggtgtgctgtgcccgacgccgtcgtcntccggtccggctgcggcggcggcgtggccgccgccgtgctcgcgtccgccgggttcaangtcgtcgtcctccagaaaggggactacttcgccgccagggactacagctcgctggaaggcccgaccatggagcgcctctacnagaatggcggcgtgttcagcacggcgaacgtnncaccaccatgttcgccggcgcnacngtcngcngcggctccgcngtgaactggtcngcctgcntcccncgccggcgaacgtgttgcnngantggtcnaacnancatgggctcctctgtttcngggggncaggnttcntncangccatggaanccttgtgcgctccgctcngggttnccngcccggtgccnggaaggaagggttc

SEQ ID NO: 396717 - DNA, 693 bp, Oryza sativa
  unsure (1)..(693): unsure at all n locations
gtgaaaacngaccttgtgctctgtcgcttggacccgggcacgaatcctgctgtggagaatgagcagaaggaaagttgtgaaggactaacggctctacaaaaggccaagattgctggaatttctgatattgaatccttcaagaggctcctcaaggggcttacagagaaggtcagctggcagtcagatgccgcttcagccattgctgctgttgtaatacaatgcagatctggcagcgggaagcggcggaacgttgggacaaggggtgacatgtggctcctgtttgttggccctgatcaagctggtaagaggaagatggtgaacgcattgtctgagctgatggcaaacaccagaccagtcgtcgtgaactttggtggtgactcccggttgggcagggtcggcaatgatggtcctaacatgggtttctggggaaaaactgcactcgaccgggtctctgaggcagttcggcagaacccattctcggtgattgttctggagggcatcgatcaagtggacgttgttgtgcatggaaagattcaaacgggcaatggagaccggtcgcctaccagactcccgtgggcgtgaggtcagccttggtaaatgtcatatttgtgctcaccacaaactgggggccccaagagctcaagggatcaaacgtganacctgctaccaagtgaaaaaagatgttggantcac

SEQ ID NO: 396718 - DNA, 452 bp, Oryza sativa
  unsure (1)..(452): unsure at all n locations
atagctcttccttggggcagcagatctgggatttcagncnttctgatttatcagcagatttgacaaatctgggagacctggcagcccttgaaaactattcaggcaacccattcctgccttcagactctgatatttttgaatccccggatgatgacatagttgagtattttgctgatgccactcaatgggccttccgcagtcagccgaagagaaatagtcgtagattcaaagacaagagtctcgagaaactcaggtcaggctgctacttgtaatgntcttcgcaatgatgtatgcaatctaaacttatttgttggctttcttatttaaactgccttctttaggcagtaagcagccttacatcaagtagaactaaaattttgtgctgactaatcttattttttataataaacacttgaggtgacttttatctgttccaagtagcaaaattgtga

SEQ ID NO: 396719 - DNA, 398 bp, Oryza sativa
  unsure (1)..(398): unsure at all n locations
tggagctgacgggcccntggaggcatnctcatnttccttggcgaagtttcagaaaactgaaggcatgcaattgctgttcacaacactgctcgctgtagcatcggtccaccagtcggagttggggatgtgctggatagccctgaggagaaacctgcagaagctagtccccggtagatttgttctgttacagtgcgtctcgctctccattgctatatctgctcattttttttacctcgatagatcttactgtaaccaactcaggagaatattcagttttcctggataggggtggccaggcaacgggcctgcatcagatgttgtaagcattactgtttaatttttttgagaaagaaaaatcgtgtttttnnnnnnnnnnnnnnnnnnnnnnnnnnnnnnnn

SEQ ID NO: 396720 - DNA, 481 bp, Oryza sativa
  unsure (1)..(481): unsure at all n locations
acntgccnaattcngccccangcggnanccangctttcaagttcctcgccaaggtctacctcggcatcgacgccccaccacctgttcgaccccgtgcgggcgctcctgcgcgacgtcgacatgacccccgccgacgtcgccgagaacctcacgcccaaggccgccggcgacaacgccgacacctgcctcgccgagttggtcaaggagctcgagaaggccaaggccgacaaggctcaggcgaaagggaaggcggcggcgacggcggcggcggaagaggaggtcgacggcgatgacgacgaggagtagactaatgttgacttatttgatgtttacttggattacttgctcacttcgcttgtgctagattgtcacagatatttgactattcttacatgattaactagtgtattagttttagttttaattnnnnnnnnnnnnnnnnnnnnnnnnnnnnnnnnnnnnnnnnnnnnnnnnnnnnnnn

SEQ ID NO: 396721 - DNA, 403 bp, Oryza sativa
  unsure (1)..(403): unsure at all n locations
ttcctatcaagatttgccccagaagacctggagattgcactgaggtttacgcttccactgacaaggccaagaaggagctcggatggagtgctcggtttggaatngaggacatgtgcagggaccagtggaattgggccaagaagaatccgtacggatacagcgccaatgctgagcagaattagggcgatcatattaccacctctatagtcctagtatcaaaattgtccatggtcttatgaactgtgtgactagaaaatgttaataagacatgcgtgcctcttaagtggagtataccaattcttatttagtccaatccgttgtgattttanatactggcaaatgttnatcaggtttatttaaatactatactagtagcnagatcaaattgaacaatanttcnccc

SEQ ID NO: 396722 - DNA, 830 bp, Oryza sativa
ccagcagcatcaccagccaggatagtaagattggtgacggaaggagcaacattgatggcattgccaacagagatgccaagaccgctgatgtgaagcataacattcgaagcgttgttaacacttatttgaggaattttgatgtgaagcacaacactggaaacattgttgatggtggtgtcaagcactcagatttgaaaccaggcactgtaagtctggccaatgtcgattccaagagtataagtgcaaagcccagcactggaagttttgagaacagtgatgccaagagtattagtgcaaagaccagcactggaagttttgacaacagtgatgccagaaatattatgaaggcaaacactggaattgttgctaacaatgatatcaaggatactgatgtacagactaataccgaaagtgttaccagcggcgacgacctaaacgacattgatagaaagccaaacattggacgtgttgctgcaagtatacagaggctggagagcagcataggcaaagtgcaaagtggaaaatatcggtgagaaaaataatccatgctagtgctgatccagttacctattttgatcggcttgggatctgttttctttttgtggagaggcatattcaatttcattagatttgtgtcattgatttgattgctgaaggttaataactaccctttgtgatggagcccatcttccagaatttgaggatttggcaaaagccccccgctgaatgctttttacatatcttaatatgttcctgctaactgtaaaaaagttttgtatttgcacacagaatacacatggaggtacatatttcttaaaaaaaaaaaaaaa

SEQ ID NO: 396723 - DNA, 624 bp, Oryza sativa
  unsure (1)..(624): unsure at all n locations
gagcaaatgatgaatcaggccaggacaaagtacttaagaagccagataagattctcccttgccctcggtgcaacagtatggacacaaagttttgttattacaacaactacaatgttaatcaacccaggcacttctgtaagaactgccaaaggtattggactgccgggggaaccatgagaaatgtacctgttggtgctgggaggcgcaaaagcaagagctcatcgttgcactaccgtcacttactgatggcccctgattgcatgatggggtctagagtggaaatatccaagtcaatgaaccctgaagctttcgcatctgcgcattcgacccctatacaaccaattgggcagaaacgaaacagttctcaaatttgggcctgaggtgccactctgtgaatcgatggcatcagtgctgaacattcaggagcagaatgggaccaatgctgcagcggtaccaacgggtgaaaatcaggaagataactcttgcatctcttcaatcacatcacacaacgtgttacctgaaaatgcagcccaagttgacaagaacagcacgccggtgtattgcaacggggtcggcccagtgcccgcagtactancttgggagctccttacatgtaccccatgg

SEQ ID NO: 396724 - DNA, 429 bp, Oryza sativa
cagaaaatggcagtagtaccaatgtttgctgttgtcaatcagacacatttcccttaggtgaaaagaaatactgctgtagatcgtccaagatcaatgatccagctggaggtgctcttcgttatgctttgcacctacgatttctgagcccatttgccaagaaaccgtcaagatctatgcagcgtagaaatctgatgtatcatcagaaccatacaaccatagttcagggcctgaggaacacagacgattctatctctacaatgatgttagagttgtctttcctcaaagacactcagatgcagatgaaggcgagctgcgggtcgagcacgactttccctgctgatcccaagtacttcggacataagcaactgataatttactcgcgcacttcacatgaaatctgtattatatcataccctcattaacccgtcc

SEQ ID NO: 396725 - DNA, 554 bp, Oryza sativa
gggccgcatgtgtttgggaggaggaggaggatgggtagtagcacaagcgccttcgtcatcaggtggatcaacttcttcaccatgatactggcactactggtggtggggttcgggttctggatgagcacccacaacgacgaatgcaggcggtccttgacgatccctgtcatgggtcttggaggagtaattttcctcatatcgctcgtggggtttcttggtgcttggaagaaaattgcttgcttgctatggacatatctggtaatgctgttcgtggttttggtggcaatcatggtgttcacagtgcttgcgtttattatcacaaataccggaactggccattctgtctctggggtgagatacaaagagtatcgtctgcaggattatagctcttggtttatcaaacagctgaatgacactgaaaaatggactcacctgagaagctgtcttgtgaaatcagatgattgtaatggcttgtcaagaagatacaagactctgaaacaatacaagcttgcagatcttactcctatggagtctggttgctgccgtccaccggg

SEQ ID NO: 396726 - DNA, 466 bp, Oryza sativa
  unsure (1)..(466): unsure at all n locations
ggcagaggaggaggaggaggaggaggaggagaagcttctagaaggggagcggggcggcatgggggactcgagccggtcggtgtccatcgacgtggagcggatctccttcggcggcaaggaacaccgagtgcgaaccagatatggctctgtatctgtttctgtatttggagatgaagacaagccggcgctcataacatacccggatgtagctctaaattatatgtcttgctttcaaggattgttcttctgcccagaggccgcgtcgctgttgcttcacaatttttgtatttaccacatcactcctcaaggtcaatgagttggggagcggctccaatttttcaatcccggaattggttgccccgtggccatcttgtttgaatgagctttgtgggatcaaagtcggcggaatgttctttgaatttctttcggattaagggatcctgtngaatggtngttttttgggggt

SEQ ID NO: 396727 - DNA, 410 bp, Oryza sativa
  unsure (1)..(410): unsure at all n locations
gaccgaaacacctcgcctcgtctcgagccgacctaaccgcgacacccccaactccgacgagaacgacatggacgccggcggnacggaggcgaacaggcagcgccacctggtgctggcccacaagctcttcctcctctcccaccccgacctcgacgacctcgccaaggtcgccctccgctccgacgccctcgacgccgtcaagtccgatggcatggcgccgctgttcgagtcgctggcccgccgcggggttcctggagccggacgacgcgctgctcgccgagatgcgcgcgcggatcgacgaggaggtccgcaagctcgacgagaaaattgctgatgctgaagagaatttgggtgagagcgaatgcgtgaggcccatctggcgaaatccttgtacttcatgaggttggaga

SEQ ID NO: 396728 - DNA, 370 bp, Oryza sativa
  unsure (1)..(370): unsure at all n locations
cggacctggnnntcctgccgttgccactcgcactcacaatgtcgccggcgccgcgggtgttggtgttggtggtggccacagtggtggcgctgcaggtgtcgccggcggggaggcggatcccgggggcgtacgggggcggggagtggcagagcgcgcacgcaacgttctacgggggcagcgacgcgtcagggacgatgggcggggcgtgcgggtacgggaacctgtacagccaggggtacggggtgaacaacgcggcgctgagcacggcgctgttcaactccgggcaaaactgcggcgcgtgctttgagatcaagtgcgttaaccagcccgggttgganttgttncacccggggaaccccttcatcctcat

SEQ ID NO: 396729 - DNA, 620 bp, Oryza sativa
  unsure (1)..(620): unsure at all n locations
atatgttccattttcactgcatctcatctaatgtgaaacatgggaattatttctgcccaatttgtcgggcaaagtggaaagagatacccttcaatcgatcgctatcttctaacattccgcatggaagaattggagttagccgagctcgattgacccaacaagatgccaatatggctcttctccaccaagttccaaaccatcatcagcgagttcgtcgcccacatacttctgagccagcagacttcaatgatgatgaacctttgcagcagccagaagtttttgacaatcttaatgttcgatctactaagactgcagagataaacacatatccagaattctcaaccataccgcagtcctcatctaaagatgattttgctattctgatccatctgaaggctcctagtgctaacccagaccagggcacaggtaaattggcgaatganagctcagctggatcttcaagaaaccgtgctccggttgatcncgttactggtgcttgatgttagtggcagctggcaggnaccaaactagcgctcctaaagcgagcatggggttttgttggtcagcaccttggaccaagcgatcgtcttttctggtaatngcttctcacctagtgccaa

SEQ ID NO: 396730 - DNA, 371 bp, Oryza sativa
  unsure (1)..(371): unsure at all n locations
caaacaccaactgcaactggagtcgatagcgctacctctctccgggctgaaagctactggccattatcattgttcttccagccatggatcagctgctggccctggcggtggcagtcccgctgtttgctcttgccagtgcacttgctgctgcctctgctacgccggtcaacaagtcctgcctcaatggtagcaccggcgccgccgtcagcatagggtacggtggtgccagcgctacgcttggcgccggcgccggcgtgtctcttggcaccgacgcgtactggttggcctgcccacttgccgaggagatcgttcgcgacgtcgtggagaagggctgtcgccgccgatcccgnattggggcgtccctcctccgt

SEQ ID NO: 396731 - DNA, 426 bp, Oryza sativa
  unsure (1)..(426): unsure at all n locations
cntccgtgggcgtcaagtgccagctgccgcggttcagcgggatgatactgtacgacgagcgtggccgaccggtgtgcagcggcgtccgggacagggcgcgcgacaaggaaaagcacgcggcggcgatcatggtgctgagggacatgctctagcctcttggcccctagcttcgccggccggccggccggccactcgccgtccccggtggcgatagatcttcttcatccctctgctttcctgtttcagttaaccggtcgatatgtgtgttcatctttttgtttcatgggttgtccatttggccgactacgtcgtctgtctcagtagtgatcagtagctacttagccaggagcccaggagtttgtatcggggaggtagtgaggcaccgagaggcaataaaagggttgtctatgcaaaaaaaaaaaaaaa

SEQ ID NO: 396732 - DNA, 422 bp, Oryza sativa
  unsure (1)..(422): unsure at all n locations
aattccccaactctgctcaccctcaccgttgccgacgacttcgtgcggcggcgaagaggagaggcgatgggagggggagacgccagcggggcgaccgggccggagcaggagctgaagcgggctgctgcggcggcgtacaactacgagggcgacgcgcgctgggcggagtactcggtccaacatcctcgtcccccctcacctcgnctcccgccccgacgtcntcgnccactacaagcgcaagttctaccagcgatacatcgatcgtgatttggtggttgagccgatgtcatccactggttccanccagccaagnggaccagaagtaaggtcttcgtccttctcatncagtgagaatgtcagggcccgtagttcaggatcaagttccagatcagctncaacaacggccccaccggcacaaacag

SEQ ID NO: 396733 - DNA, 987 bp, Oryza sativa
  unsure (1)..(987): unsure at all n locations
gctggatcgtattctacattgatgagactccaatccgggaggttcagaggaccaaatccatgggagttcagttcccttccaaaccgatgtcgctgtacgccacaatctgggatggctccagctgggctacctccggtggccggtacaaggtgaactacaagtacgcccctttcgtcgcagagttttcggaactcatgctccatggctgcgctatggacaccttgacccgtgcaccgatgtgcacaccggacattgccaacatccacaatgccgtggccatgtctggtaggcagcgatcggcgatggagaggttcaggacgaagtacatgacttacggctactgctatgatcgtcttcggtatcctacacctccatcagagtgcaatgtcggccctgaggccgggctattcctccccacgggcgaggccgaggtccatcgaccgccatggacgagctaggcgccaccgtcgtggtccagctgattcagcattctgatcttagctacttgtgttgatgtggcaggctagcattctgatcatcacaattggctcagtgtgtgctcacctcccttaattttgtgtggcttatgtgatgattttgctgaatttatgtgggtagtgttgtgcatgaattggtaggcaacttagattgatttgcattttggtgatggtagaattgaatagagttaggttattaattatattgattaagattagcatttcatttaggcttgttgattgtagtctgctgattttgtagaacgtttgtatgacaataatgcatggtgcccatgatatgaaatgcatatatatgtagtagcagtaactgtgtccttggaacactgattggattattcatttctagcatccactaaacgcgtgcagctaggctatgctgcagnccnagctaatatcatgatttttttactaaagttcattctctaccaatatgagtaactttttatttgattaaaaaaaaaaaaaaaaa

SEQ ID NO: 396734 - DNA, 363 bp, Oryza sativa
ttttttctctttttttttcccgaattcccagaccaaatctcctcgctttttgcttcgttctccgctccggtgacccggaggaggcggaggttggagaaagtttgcgcctgtgcggtgagtggtggtgtcggtgatgggatcaagaacggtggggtggtggctactggcggcggccgtcgtgctcgccgcggcggcgagtattccggggaggcggacgcgcggcagaacagcacagcgagcgcatctcagggagtgccggcgatgtgctcgaagacaatcctgtggggaggttgaaggtcttcatctatgacctccaagaaagtacaacaagaagatggtaacaaggatcccggtgcctaataa

SEQ ID NO: 396735 - DNA, 423 bp, Oryza sativa
  unsure (1)..(423): unsure at all n locations
ccactctctccgttgcccacttccttcgcatctcctctccctctccactcctccgccgcggcggcgccggaagctgtgcccgccgccgtcggaagcgtacagccaggggatggcaatgcccccccgggtcaccgatccccggcggtgaatttcagcgggcggggagccgcgccgccgccgtcgacgacgactctggtccgacctcctcactggtcaagctactgcatttgtacagttcgctgaagatcggtagttcgtacaagctgggatgaagtcaaagactaacaggagcatacagaaggcgagaaaaacagagaatgtccaaggaggaccaaactgggttcttgttgcgggaggagttttgctgagcacactctcagttaaacttgggtgcaaattgaaacaactatttgatgcgaanaa

SEQ ID NO: 396736 - DNA, 404 bp, Oryza sativa
gggccaccagatttggaatataatctgatagagaaatcctacgctatatttgtttttatgctgttggtaacctgttctccactagtttgatgaaaaaaagggagaaaactggagaacagtaattttggatattgatgctgcttagcgctgctgttttgtcaatatttcaacctgcatttctgtttctccagtgctgatttgtcataattttctatttgagccatgccaatcgcttctttgttatgcttcattccttttcacacctttgacctttgattgttgaacgtttgcagaactacactggtgatagactcaattttggactagctgctgagcaggcaaaatctgaacggctataaggatggaggatggttatttgttggaggacggattgtgcccctccc

SEQ ID NO: 396737 - DNA, 455 bp, Oryza sativa
  unsure (1)..(455): unsure at all n locations
ccaccaccaccaccaccaccacgagaggaggaagccgcgggtctcctcgtcttctcctctctctctctcctcaaccagctgtctcgcggtcgccggcgggggggaggggaggaagcggggctgcctcgcgcggcgggaggtctccggagagggaggggtgtcgtgctgatttggggggctgcggcggtgtcggcggcgatggggtgggcttcctgctgcaagggggtggacggggttctacctggccggaggaagaagaagaaggagacgacatggcggatcttctcgctgaaggagctacagtcagcgacgaacaatttcaactatgacaacaagctttggtgagggtgggtttggcagcgtctacttggggccagctctgggatggatcacaagattgcggttnaaaaggctcaagagtttggagcaacaaagctgaaactnaattttcaatt

SEQ ID NO: 396738 - DNA, 470 bp, Oryza sativa
  unsure (1)..(470): unsure at all n locations
gtgagggggaagaagtgcttgacttcaccaccaatggcggctgctgcggcggcgctcttggccttcgtcgccgtcgccggccgcttggttgcgcaggccaccgacccctacgtcttcttcgactgggacgtctccttcatcaccgcttccccgctaggccttccccagaaggttatcgcaatcaacaagcagttccctggccccgtcatgaacctcaccaccaactacaatgtggtcgtcaatgtgctcaacagcttggatgagccattactcatcacttgggatgggatccagcaaagaaagaattgctcggcaggatggtgttcttggcacaaccttgccccatacctccaggttggaacttggacctacaatttccaagtcaaggaccagattggggcttcttttacttccaacccttagcctgcagcgttctttgggtggtttcggaggnattattgtaacaaccg

SEQ ID NO: 396739 - DNA, 612 bp, Oryza sativa
  unsure (1)..(612): unsure at all n locations
cgctccggtcggccaccagctcaaccccgtccacctctccttgtggcggcggccccctttgccggcagcggcgacgacctcctctccatccccctcttccagtgttgggccggcacaggagcatgcggcggttggagcgggtgctgcagcggcgaacacgacggcgacgagagctgtcgtgggtggcggtggtgggctcgctgaggctcctccatccccctcctttttttgtgcagttttttctcctttttgattttgattttcccctttgttgtgattgaatctgtgatgaatcggttgcccgacaaggcgagtctgtgatgaataggctgcgaatctgtgggttgtttattgggttgatcttttttttcctctttttaatttactcttttcttgtgattgaatttgtgatgaattggctgcccgatgaggtgaatttaagacgaatcggctgggaatccatgcgtgttttattggatttcaattttaattttgttgtttactttaggctttttccccttcaatttcgtttatttttttctctagttttactgtttccaatcttaaatattgaagtgcctcatctatcttnnnnnnnnnnnnnnnnnnnnn

SEQ ID NO: 396740 - DNA, 214 bp, Oryza sativa
gtgtcaatttttcccaagcaatgagatcaaagactcaaagctaccaagacggcaccgagcactggtgtcatctaaggactccagagtcgacagcccgcctccaggagagcagtttttgggttataaccttatgccaccaactcaggactggccaagcatagaatcccgcatagttccaggatgatagcccaaaaccccgagaaccccgaaaaaa

SEQ ID NO: 396741 - DNA, 696 bp, Oryza sativa
  unsure (1)..(696): unsure at all n locations
aggctatggtatgagtattgctttatccggtacgacaactataactttctggggaggtggacacgagggaggatgcaagcgtgacaatgagacaatggccggacatggacaaccccaaggctttccagaaagcagcggggaaggcaatgggaaaagcaacagcgcaagccgttgcggtgggcagcagcgggctaggtagggcgaaggagcaatacaccccattcgtgagtgtctacgcattggcgcagtgcacacgagacttatcgccgccgtcgtgccgcgcaatgcctgtcggcagcagtgtccaagtttgataaggcctgtggtagcggaccagggtgccagatcgactatagcagctgctgggcgcgttacgagatctaccccttctacttcccccttgctgctgccggtcgcgccaccatcgatatgaccaaatacactaaggtcaccgtgcattgataagaatataagatcattgtgagacctcctcaaataagtacttgtgttgacgtttaatttcagtaatatgataaatttgtatcgatccttagcatgctagcttcagctagcttggaataaataaacaaataaagatgtgtactgagggcacgttgtatgagcaagtgaattgaatagtattgaaatcctttgttactnnnnnnnnnnnnnnnnnnnnnnnnnnnnnnnnnnnnn

SEQ ID NO: 396742 - DNA, 500 bp, Oryza sativa
tttttttttttttttgtgaaaagaaacctggtaagcattcagatgccacggcattccagggcatcagaacaagataggttaacccatcgtcaattccaaagttacaaacatttcacactatcctgatgtacaagattgtaaatgtattcgtgacaccgtcctgctttccaaatcacaaggaccagtggcatttcatctgcacagggagatgggatcaaaactccatcgtattaaaaatccaagtcctaggaactgaaggagagtaagcatagatctgacgactgacgagcaccatcgaagtcaaccatcctgaatcctatctgatcatagagcctccgagctggtagattatccttatgcacatgaatataaacttcttcagcaccattgagtcttgcagcatctatggccagtaacaacatattgctggcgatcccttgacgccgtgcatatttagcaacacaaacatttgtcagatacccaaactttggctgatctgg

SEQ ID NO: 396743 - DNA, 486 bp, Oryza sativa
  unsure (1)..(486): unsure at all n locations
nnnnnnnnnnnnnnnnnnnnnnnnnnnnnnnnnnnnnnnnngatctaaatgtagagatgccattgttgcattctaaatgaatgcttaatgcgtcttaagtagtttggagaaagaatgacattacacagccgtgtctgcagaacgaaaacctgtacaacaccttgagtatcaagatctccattaattcatctaccctaggactagcagctggggaaaaaagatatcctttttgataccaaagtgacaaaaactggaaaggaagcaaatcaacctaacattacgatgaccgaaaagaaagacggcaatcaacctaacattctgaaaatatcctaggaaaatgttcagcatctgtgcctgacagttcttctcctggaaactccccggtcaatggagcagagatgatccaccttctggcttctgctcgttgcagcaacgtgacattatgtttagatcctacaggatgttgggcacttgacttgagaattt

SEQ ID NO: 396744 - DNA, 366 bp, Oryza sativa
tttttttttttttttttcattaccagcaagagcgatattatagcttagtgtaaactgctgcaactagaatatggcaaaatatagtacaccattatagtttgtttgtgccgggcatttctctcatgccgaggacgccaaaagcttattattattcactgtcatctagcaatacctgaagcgaagcctatttcaagttcaaaggtagcagacgactgactttgcattcttacaaacttacaccaaggtccgaacaagaccaccgcaaaaggctagggaaattgcgtcatatgcttgccaccagtcttatgcgtcattaagagcaaggactcctgggagggtcttgccttccaacagttccaagctcgc

SEQ ID NO: 396745 - DNA, 713 bp, Oryza sativa
  unsure (1)..(713): unsure at all n locations
tttaacaatcacaggacgcatcatactcgtgaattatgaacaagttattatctcaatatgtataggtgtgaaataaacaactgaacctcagacttcgtttgttacagcaaacgggcacaagtcggagataacagcaaaaatactacaaacaattaaacaccaattagcaacgggcactctctcgagtaaacaatgcctggaggattgccttatttcatatgtgcatcaatcaacccatgtcaccttcacatgtgtgacattttctccgggacaatatacagttaagctgatgccttcagatgctgataacccgggcatctntncaggtggggaagtcatgctcccaccaatggggcctgtnggaagagggnacacccaggaatccatctngcccctggacantatcccaggtccaantgtccacttatactnagcccctctttccaaataatggnaaaatnntttctncccaattnccnaanggggcnccacaaaggggggccttggaaanccttgtcaagacaggcctaaccaaggcatggatnccaaatnccttnnggncttccnttcnggncaaaatnaannaaagactttggnngncgnancgnnagggcnccggaantgtanaaacgggtnccgggnncnnngaaggaacggttggatncaaanncaaacananggggaaantttcaattctnangnggccccccttt

SEQ ID NO: 396746 - DNA, 525 bp, Oryza sativa
  unsure (1)..(525): unsure at all n locations
nnnnnnnnnnnnnnnnnnnnnnaccacgagaagatcagcaagatagtgaaatcacagctgaaaggatttaactgcttacactgaagatagtaaaatcacagctgaaattacagcctcgggggaagaaaaactaggcattttcagtttgttgatttaactgttaatccgaactaatatacccccaaaaataccgagtcatttctccttcctcagatagttttacactggggtctgcaggattcagaactcaggagtataaaaacactaggagaaacaacaatctggcaatgctagaattacttacccaagaactaatcgtactacaatgctatcccaatttgatacaaaacactggcgtgcaaaatcagaaggatgggaagaacttgttgaggttgaaaggcagagagtagaactcctcgctgcgtgggtctgtcctgaacgacctgaatctgtcccagaaatggtgcccccggtccttcctggcagtgctgtcatgcctctggagggtattgtccaacaaatatg

SEQ ID NO: 396747 - DNA, 556 bp, Oryza sativa
tcgtcggccctgctgcccccgattccgccgctcgcgatgcggccgagcctgccaatcctgggaagctgacgacacggcaaatcgtggtgaagcgactgggcgggtgtagaaaggtgacttgccaactgcttggtgttgtctttgaggagataactcctcaggagcttcagacacatgccactgttagaccttcagtggtggaactactactcgaaatagccaaatactgtgatttgtatctgatggaaactgtacttgatgataagagtgaggagaatgctctattggccctggagagtgctggacttttcaagactggtggcttgatgaaagaaaaggtactctcctgcagctctgaagttgggcgaacttcatttgtccgacagttagaggcagattttcacattgacacaagcctcgatataatttcccaactatctcggttcattcggtgccaactctttgtttcctcaatagaaggaggacaacttgcgggtaatgtatttaactctccaagccttgagcagttcttctcatgaaaccagagcataatggg

SEQ ID NO: 396748 - DNA, 610 bp, Oryza sativa
ctgaacatagacatgtcttcgactgctttcattgaacctggtcgggtgctgaattttgtagaaaaagctattggacgtcgaatcactaatgctattactgtgggatattttttgaacaattatgggaatgaattgatgaggacccttaagggtgttaaggttgaagtcactcaccgaggaaatctacgcacgaagtaccgcattgctggcttcaccgagcagtctgcagatgttcagacgttcacatcatctgatggtatcaagactgtcaaggagtatttaacaaaaaatacaatctgaagttagcttttggttatcttccatgcctgcaagttggcagcaaggagagaccgaattacctgcccatggagctttcaatatagttcctggacaacgatacaagaccggctcagtcgacacaggtttcaatctgattacataaccaacgacgccttgtgccgtgagactcatcgcagactgtacacaccagtatacagacggacgccagatgagttgcatagagttgcttatctctacttaaagctaggtttaaagctcaatctgagtccatgtttggaagggtagagttccccgcagagatggggctgac

SEQ ID NO: 396749 - DNA, 442 bp, Oryza sativa
  unsure (1)..(442): unsure at all n locations
ttttttttttttttttaaaagaacattacaacgaaagcttaggtttattacattacccaacttaattcngttttttttccaattttttttgttcacccacgaaatatccacaaaaccaaaagaaacgagaccaccacgtaactccactccctaatcccagccgtccgtacaccgagcccaagccattttggtccatcgatcgatcgcatcagagggtttgtactagtactactacacgagagtagagcactgcgaggtcttggggtcccacatcgccggcaggaggaaccccggccggcgaccccgacggcgttgtagctgngcccggtggcggcgtccaccggcagctggccggggtaccccgggtaggcgccggcgccgaacatccccgtgcaggccgtcaacgcctccagcggcgcctcggtggggccctggaagtacc

SEQ ID NO: 396750 - DNA, 452 bp, Oryza sativa
  unsure (1)..(452): unsure at all n locations
nnnnnnnnnnnnnnnnnnnnnnnnnnnnnnnnnnnnnntttttttttaaacatttgtagcttctttttttcaaccaattcccattctccagacaaacaagaattaggaccatgtctcttacattcgtactgccaaaattgctcatagaaaaagaaattacaaattcaaaaattagaaagtaatgatgccatatcagaaaagagctcttttgagttttcaaatatagagacatgctaccaggccaacatcatcaagttcgagaattaatataaaactcaaagaacacaatggcttgcacttagaaaagcagagtcattcaattatctgctatgtcagcaactccatagtctatggagcacctatttaccttatgggagaagaggacttgcagcaaaattgattttctgtattcctgcngcatctcttgggagagggncttgatctctgatctc

SEQ ID NO: 396751 - DNA, 560 bp, Oryza sativa
tcctctcctccgaggtttggggaagctacttctgaccatggcaggcaccctgctccagccggttgccctcggaacaacttttgcgggccgtgtaagtggtcagcgatggaagtctcatggcacaaggaggcctccctcaatgttggcgatgtccttgagccgcccagttaagatggccgcatttgtcggtctgagatcggtgcatagcttctcagtcacgcctgtcaccaacttcagatcgacggttgcatcttacagatcaagacggggaaggcgtgctcgctttgtaaccagatcgatgtttgagaggttcactgagaaagctattaaggttataatgcttggcgcaagaagaggcaaggcggttgggccacaactttgtcggtactggagcaaattctcttgggtctgattggagaagggactggtattgctgctaaggtgctcaagtcaatgggcataaatctcaaggatgcacgtgtggaagtggagaagatcattgggaggggcaatggttttcgttgctgtcgaaataccattcacaccacgtggcaaaacgt

SEQ ID NO: 396752 - DNA, 732 bp, Oryza sativa
tttttttttttttttggaagaaatccatgaaaatatgggtttctgctagtataagataatttggcttacttgatatgttaagaaatatggtgcatacaaacaatatcaccattgtttctatagacattgccaaatacccgtgcgttgcaacggattatttcagataagctactgattatacctgatcttggcaacttgctagggatcaatacaaaatactaataattttgaaaaaagaaaaaaaattagctacctatctatctatttataccacaaattcaagtcaccatgacgatggcatggcgatggcgatgacggtgccgatgacaatccatgacgatcaacagttctgatgagctaagctaattcatggtttccttgtcatggggcagcagcttgagggcctggaggaaggtgttcttgaggcggccgagatgcggccggacattctgcttgtcgaggtaagtggtcttgagagcttcccagccttgcttgtggatggccatagggtctcgcagcactgggtgatcggcggggtactgctcgctcagcgttgtctcgtcaagctgcacggcgtactccaggtagtggatctccatggcggacgacggctcaacgaaggtgttccgggccagccactccagcttgccgtatggcaccacctgcaccagcacggcgcccggcgggtaggaacaccatgttggtgaagccccggcgccgtgcacttccacc

SEQ ID NO: 396753 - DNA, 298 bp, Oryza sativa
  unsure (1)..(298): unsure at all n locations
nnnnnnnnnnnnnnnnnnnnnnnnnnnnnnnnnncagcaacgaacctgcacccaacatcattcataccaacataattgctggattgaccatacttaaaatctcatgctaaagcattagtacaaaatctcgttgcgcaatgtaaaaactagtaagctgcactgtaacatgggtatcacagataacaaaaggatttgtttggtaaggcgatcttcagttgtctaggccgggcacctgcatgcggcggttggcgtccgacttcttgccgccgaggaactcgncggggacgccttgagctgc

SEQ ID NO: 396754 - DNA, 257 bp, Oryza sativa
  unsure (1)..(257): unsure at all n locations
tggatgtctgttggtngtggtgttagggattggagccggatgaatcttgagtttgatcttggctgtatgatgttagacataaagaggatggtgaaatggtatatggatgtacgatgtttgtgtttcggtccttgctctaataatcagttgttcttagtgttttgttttttttttgaccctctttgttaacttgtaacccccctacatatatgtactagtatcaccactaaagtgatgaatttgatattagtaaaaaa

SEQ ID NO: 396755 - DNA, 353 bp, Oryza sativa
  unsure (1)..(353): unsure at all n locations
cgctgggggccttgctccccctggttgcacgggacaaaggagctgtgtggcgccaagatcttggacgccgccaagaccccgctcctgtcggcgtgggcgcggcgcttcggcgagatggacgccgccaaggtgctttgccggacgtctgcaagctggtcgagtttgccaagatgaagcgtgttcagctggaggctgcaatggccagctacaacagtttcccgcaactgaatgtgttgtcaggttgttgtgttgatgtgttcctacaagtgaataaaccgtactttaaaatttaaataactaaatatttgactaataatattttattatnnnnnnnnnnnnnnnnnnnnnnnnnn

SEQ ID NO: 396756 - DNA, 692 bp, Oryza sativa
  unsure (1)..(692): unsure at all n locations
caatggttcnccatccaaaacttcatctcaaaaccgagctggtgaagcctcttctggtaacagaggttggaaccaaaagagataaggccactctggatgntncaacaaaccagnctcaacaagttactattcaagattanatctatacggatntgtggctcgttggccttgaacatgtgtggagttncctgtggtaggcttgatttgtgttatgagattggatttggtggcccctgggatgtggccgctggagctctgattcttcgggaagctggtggttttgtttttgatccgagtggtggggagtttgatctgatggcacgaagaatggcaggatcaaacagctatctgaaggatcaattcatcaaagaattgggagatacaagttgaacaacatattcctcaacatgaagtagaataagaatataagatcgccctgccaattttattggggcaaattttctttctagtggttctgcataaacagcatgcctgttgcggaaaagttttggacgcagtatggcattgtattgtttgaaactttttttttttggcactactatccggtgttacttcggaaactagtgcatcgaagattcgaagtagcttaatcagaattttgaaccgaatgttcagatggattgtgcaatgtgnntttcccccnnnnnnnnnnnnnnnnnnnnnnnnnnnnn

SEQ ID NO: 396757 - DNA, 460 bp, Oryza sativa
  unsure (1)..(460): unsure at all n locations
tactnaaaaggctcgcagttgaaactctccacctggnatccgattgccgtnaaaagactcagatgaacgaaanccgacggttacaatgttgcagatgggagtaggcgagccactgccaacccccgactccatcttccaaccgtgagatgtcgcagcaggccggttacagtgctgcagttggaagcagcgagccatgccacctcgactgcatctttcttcagatgttgcagcagccataccagcttcgtcaactgcctctcccactgcatccagggaataggcgatcatcttgcctaagctcgcggatcatccggtggtcgttcggtggcaatctgaaccttgcatcctttgctttggcatcacttgtagcgttgttccttgcgatgaaacagcatctgtaccccccaagtaattaatttatgaagattgtnttacgcgcttatttttaaaaaaaaaaaaa

SEQ ID NO: 396758 - DNA, 721 bp, Oryza sativa
  unsure (1)..(721): unsure at all n locations
ccgggggntctctcaaccagttctctcccaaaaacctcgggaccgtcagaactcctctcgctgctgataacgttacgttcagagcgcatggggactagagttcctggaacaggtcccactgatgttagtaaccaaaaagctttgccatgacaaggctaatgtgtttggcacgtcatggattgcgggtaaagcgtacatctactgcagtatgaatattctcaaaactattcgaatagccgtgctcgcggttatcgggcattgggactcacaatggcatcttggttagaaacttaattccaaactttattaaatattgttgcatttaaaacattacaggctttctccctctatattctttgctttctgcaagtaaacctagctctacacaaatattaccatttcatctattcattgttgattaatataatagcttgctgagtacgttgtactcacccttgcttcaacctcctttttcagagtccatttgatgttcttgccgaagtcaggagttcaatcacataagttaattcccttttaacttaatcttcaagtttaggttatttagatggtttaagtctatagtaaaacagcagagttaggtcattctaaagcttctgttgtaatagttagccacaatctcgtaaacaccctattactttatgtaataatatctccttcaaagctatgtctaaacgtatgcnnnnnnnnnnnnnnnnnnnnn

SEQ ID NO: 396759 - DNA, 734 bp, Oryza sativa
  unsure (1)..(734): unsure at all n locations
gtgcaaggcgtgcagtactaaagacgggtggtgatttccccttcctgtcacgtcctgatgaggttaatttgtaccttcagctacatttgagacgagttggagtagaacctagaccagatctggtccaaggtttcacacgtaatggcagtgctgggagctcaaaggaccaaaaagatggtggaaacaattttgacaatcatcctggagataatggtggccctggttcagggggtcatgatcatgagacacagaattctggatcagaatcacatgattctgatgaatcaataccaacgagcacaatgcttgccaataccattctaggtacggttagctcaaccctgcaagcttcactatgtgtgctcttgatacatcattactatgagtctgctttgtatatttcgtcgagacagccattggatgtatgaagtagggaatcaccccttttgcccccatgtagagctcgctttgtagaatatcaccgtggtacgaagtgtcatagcttctttggagtgggttcttacttcgttgctgccaacgggaaaggcacatcaacaaccaggaaaacaacttctgtatgtttgtatattagctcttgtttctttatcaatccttctttttgtgtttctaggcctgtaaattgaatttgatctgcctgagacatgaatatgattgcttaattttcttgtagttgcaccataaaaagttgcgtacnnnnnnnnnnnnnnnnnnnn

SEQ ID NO: 396760 - DNA, 679 bp, Oryza sativa
  unsure (1)..(679): unsure at all n locations
gcatatccatctttncagctttgttctccctgtaacatggtcncatgggaaaaaatncggtatcagtttgaatcaccctggcatcatggtggagcgaaaggcctggctatgcttccaggtttaaagaaaaagggtgctgttctnccgggataccgtgctgatattgtggtctggaaacctgaggctcaattccatcttgatgacagccatcctgtctaccataagcntcggaatatttcggcatatttgggaaagcagctttcagggaagatactgtccacctttgtgggtgggaatcttgtgttcgctgaagacaaacatgcaaaggctgcatgtggtgctccaatcctcgccaaataaaattcaggtggatccagtgcttacagttgttgatttgtagtgtatatgatcgtatgcgctacacattttgatttgcggcaaaactgcaaatggcaatgtccctgtgtgtataatttagcccggctcttccattgttatataccactctccatttcgattgtgctacattgtacttcatgtggacagcgtatagtgattgtattttctcatattattcagatactcctgtaatctagtttacgtggaagtgtaattcagttactttaacagctgtttatgtagatgaactggnnnnnnnnnnnnnnnnnnnnnnnnnnnn

SEQ ID NO: 396761 - DNA, 563 bp, Oryza sativa
  unsure (1)..(563): unsure at all n locations
atgcacagggactgggtgagagatgttgcctgggctccaaatctaggcctcccaaagtcaacaattgcaagtgcctcccaggatggaacggttgtaatctggacagcaccgaaagaaggcgagcagtgggaaggcagggttctctatgatttcccagacacctgtgtggaggttatcctggtcattgactgggaatattctggcagtgtctgatggtaatgataatgtgaccctatggaaagaagccgtcgatggcgaatggcagcaagtgaccactgttgaggcttaggtgtttttgagttgttcttcccctggctggccaattataacatatgtgtaggccttcaggctggccaatggctctctgcttacaatgtggctctaggtattttgacttctgctcagcatttagcaaggcgcaagtaatttgcttggatagagtagaaaaccctttgtgtcgcaactctttcatgtattatgtgttcccttgtgtgccttctgtttaccattatttatggcacttctgagtgcagatttttcgctnnnnnnnnnnnnnnnnnnnn

SEQ ID NO: 396762 - DNA, 445 bp, Oryza sativa
  unsure (1)..(445): unsure at all n locations
aggggccaaaaaaaacaaaaaagtgaggcctgacctgcatcccaagattttgtgaaaagcggagttgctgccatgcctcaattgaggaccttggagtgcaagcaccgttgagtttcccaacaagcctccgatgcttgacccatgcctctacttgtcctggagtgccaagtgagttgatgtagcacagctgctgtggacatcttaatcctgaactggcgcagggttgtctaaaggatgtacttgtagttctttttttagattgtgatgacctaggtttctccaattagatgtgttgatataattgcctaaacctcgatgtatcaaaagctgaaatagagggtgcacggtttgtactaaacaaaaagaagcgtatgcttcttttctcggtatgagtatccacagctgatttattcgtcnnnnnnnnnnnnnnnnnnnnnnnnnnnnn

SEQ ID NO: 396763 - DNA, 316 bp, Oryza sativa
  unsure (1)..(316): unsure at all n locations
accccgctcgcgccagatccccccaaacccaatcgatccccatcgatcaccgcgctccccccggcgccgccgcggcgagaggtagggtttgctcgacgacgcgagggggagcgaccaccgcccgcaacccgataggagggatggcggcggccgagggcgagaagaagatgaccagttttatcgcgaagagctccggcgccgaggagttcgaggcgggggccatccgccgcgcgatcnaggacgactgcaacgacgacgacagcgggcatcctgncccccgacgtcctctccggcgagggcctcgataaccgcgacg

SEQ ID NO: 396764 - DNA, 617 bp, Oryza sativa
  unsure (1)..(617): unsure at all n locations
taaagaccaaagntgaaaccaaatatgcgttctcaggtggccgggactcaattgagctccatagaaaacttggagctaaccttgatgtggatgttccaatcaagtacctgaacttcttccttgaagatgacaatgagctcgagcacataaagaaggagtacaaggaaggaaggatgctgacgggtgaagtgaagcagcgccttgttgcagttctatccgaactggttgcgagacatcaaagagctagagcactagtgaccgaggagatggtcgatgtatttatggcggcgagacctcttcccaatatgtttggctgagtctgatgtcaaaaactgcctggagatatttgctactagctggataagatgtccgaagtgatctctaggaattttggaagcagcattcgtgtgtttcacgacttatatttgtaggcgggccactcgtaataatttgtggtaggcacgcttgattttgcaaatcagttgagggataaatttatttatcttaaagcctgctccatcaatatagaaccaacgtctttttgtattgaatcagaaatgttacaacagttttgagcttaatcagaacaatcaagaaacaaaaaaaaaaaaaaaaaa

SEQ ID NO: 396765 - DNA, 355 bp, Oryza sativa
  unsure (1)..(355): unsure at all n locations
tttttttttttttttagtgaaaataaaaggctgagatcaatacgatattgcgtttgacaaccagataacctttttacatttgttttcaactcttctgatggagcatgaacaacacaagttacttacagctgggactttctatttctttcgggaattggattacaaagtgatacctaaccacacggtggggtacgccctgtttgcaaacttggtttgggcagcttggtgggtacacccatcaacaaggtttacacatccttttacgccatcagcaggtaaccgcttctaacctgcttcttacctcaatgttccanttttangataggtgggacttcttctntcaaagaagganggg

SEQ ID NO: 396766 - DNA, 464 bp, Oryza sativa
  unsure (1)..(464): unsure at all n locations
ttttttttttttttttggcagcatatgcgtagtgcaagaaataatgtaaggntccaaaggcttcccagaacaaaaattctttcaatattgggagttagattcatactagtattgccttggatctcagtcgatatttttatcgccagtcttctacaatttcaggtaaggctggagtctgtacccgctagggagctagtttatgtgtgtgtatatatttacagtaataacccagttgtgtggctgtggattacaacanataaagggatacttttattangcccatctttcaacctactgtcagctaaaaaaaaattggttcaccacgaacatatnttgtagcataatttganaaactccatcacataagattgtcgtggattagaatgtgaacctgagtccgattggcctaatgntcccctttggcaccattgctgcccgtctgatggntagcttggccattnggc

SEQ ID NO: 396767 - DNA, 470 bp, Oryza sativa
  unsure (1)..(470): unsure at all n locations
gaatcaggcaaaacagctcaatggaaacggtgaactatttagacagaagtatccaaaattaggagttcgaattgtcgacggaagtggcttagctactgcagtggtgctaaaaagtattccttcagatgcaaagaaagtttttcttcgtacaggcacttctaaggtagctcgtgccattgccattgcactatgtgacagaggtgtccaggggatcatgactggaaatggaggtataccacatgctcaagtcacaaatacccgtggncaggggcaagctattttgaaactcttcgngcggcaaacgttccctcatgctttggattaggttccacnantttttttaccggcaatcgggcnaaaatgnttggtggccnanangggcccaatttttttatttcccctttctaccaaggtcccccctttnatggaaccttntgaatggcctttncctttcattgggggcccccagt

SEQ ID NO: 396768 - DNA, 344 bp, Oryza sativa
tgggcactgcgaagatattgaagcttaactgtagctgatgaggacagtacatatccttacattgatagatggcttgaggttgctgtatcaccagggattgaagagctcactcttacgctacataaaaagtacatctttgcatggtcacttttatcctgatggtgttcgagactcaattcgactgtcttcagcttaccttctgtgccttccatcccatggctgaacttgggcccttgagaagcctaacaaaactgcatctggtgtcggtggtgcatattacaaggtgacgcgttagagtcccttcttttgaactcccttcttttttggagcagtttagactttaa

SEQ ID NO: 396769 - DNA, 427 bp, Oryza sativa
tctatagagagcaacttcggcctgttctatccggatgggacgaaggtgtacgatgttgactttcatggtggtggtacatgtcccacaaaggagagctggtgtgtggcaaatgcagctattgggaatgcacggctacagggagcactggactgggcgtgtagtaacggcgcggactgcagtgctatccaacagggaaaagtgtgctatgagccaaacaccatggttgcacatgcatcttatgcattcaatgactactaccagcgtaatggcaaggcaagtagcgcgtgcaactttgccggtgctgcttacatcgtctacaagccatcaccaagcatctgtgacccgaacccgagttggtgcgtggcgaacgcagaggtcggggacatgcgggttacaggcagcactaggctatgcatgcagtagctgc

SEQ ID NO: 396770 - DNA, 399 bp, Oryza sativa
  unsure (1)..(399): unsure at all n locations
aaccgaaacctacataaacatggttgggtcccatatatcatttccaacatggtaatttgacaatgaaagctaaactagttacagatcctcaacatcctgcttggatgatgtagggcgaccttgatactccaagttttgtacctaaacttgctgtgataaccctgaatttcagtcttatcttctccattatatctggaacttgctcgtcttctgggttcgacaacggataagcttctcaacagtgcagctagttgctcaatgtttttcctgacccgagctgagaatgcatcttgatcaattgaaaccaacgacgtccaaacatccagacatccctgataaaaacctagttcttcacctacctgaaaaccattctttaaaccaacnctngnccacgtnccg

SEQ ID NO: 396771 - DNA, 773 bp, Oryza sativa
  unsure (1)..(773): unsure at all n locations
tttttttttttttttttatagcaaaatgaccaaagtaaaaattatagatattaataagttatacaactttgttgttgatgactttttcattcgaaatgtcgggtcccaaaactaatgattcggaaaccgacatgtttagactgtatcaagccctggatcagtagattgatacaggttcaacaatctggctcttcattgcatacgtttgaacagggctccagaggcgttgttattacaaaatatatgggtatttacaaacttgtggctaactaatacagcagaagctatagactgactcaaccctaatgtttggctatagacttaaaccatctatctaatctagacttgagaactaggttgaaatgaaactaacttatatgactgaactcccggcttcggcacgaactccaaatggactctgaaaatgggggggttgaagcaacgggtgagtacaacgtcctcagcaagttattatattcaagtatgaatgtatgaaataatagtatttgagtagagctagatctaattgcagaaagctgagaaagtagaaggngaaagtctataatgttttgaaatgccacaatatttaataaaatctggggttatatttctaacccagatgccatagtgagtcccgatgctcaatatccgtgagcatggctattcgnatagtttcagagatactcatactggtagtagatgtacacttttacccgcnatccatgacatgctaatattccaccagcntagtccatggccaagccttttccagt

SEQ ID NO: 396772 - DNA, 383 bp, Oryza sativa
gcttaagtctgatgtgatcaaattttgcgaggagaacaattttcattctggattttttgatggcaatgagaataacatggtagctgatgcatatgaattgaaggtgcgtctagaacacatcattgaaaggatagccttggtctctgacgctgcaaataccgagcgaccttctcttgttatcaacaacttgttcataggtggggctctggctgcaagatctatgtacacccttcagcatctgggcattacccatataactatgtttgtgttcaaatgagattggtcaatctcgattcccaatttcccgatctttttgaatacaagaacttttcaattagtgatgatgatgatgcaaatatcagtgatccttttttgaagaagcc

SEQ ID NO: 396773 - DNA, 559 bp, Oryza sativa
  unsure (1)..(559): unsure at all n locations
ggttgttgaaagtggaggnataatcaatatgatgggcacttatcagatngctctcgtcgctcacagtatgaacaaacctgtttatgtggctgctgaaagttacaagtttgcacgcctatatccgttggaccagaaggacatgacaccagctcaccgacccattgattttggagttccaattccggctggtgtggaggttgagacttcagcgagagactacactcctccccagtatcttacgctgcttctgactgatctcggtgttctgacaccatctgttgtgagcgatgagcttatccaactatacctatgatcactggtacggagatatgatgtaccgatgtaccgccgtggaatctaaggttttccctgtcagttttttgctatgttgtatttgccctttacggtggatgcaatgtttggaggattcacaaaagggttatgcaacagaagataaccccagttttgtctaaagcatctatctggtgttaatagttttggtgttggttgcgaagatggtctggattgcattttgcnnnnnnnnnnnnnnnnnnnnnnn

SEQ ID NO: 396774 - DNA, 314 bp, Oryza sativa
  unsure (1)..(314): unsure at all n locations
tttctctctcttgccatgtccggccgtcgccgtcgtcggccgatctccctcaccggagcttcgaaagccaaacccttgcgccaccaactccgcctcgccgaggtgattccattttttcctatttcccctctcctttagccactgccacaagcactaccggcaccaccatagccggccagagctgagctcttgctgccgccgttccggccattctatttactccctatgccttccaccgaccttcccggatgcatagcgagcgggaacaaggttgtccggccggtcgttcgagggcatttaaaancaaccgnaag

SEQ ID NO: 396775 - DNA, 599 bp, Oryza sativa
  unsure (1)..(599): unsure at all n locations
ctctgcatctgaacaatcatggtgataccttgattgcatcctactaccacctggtaaagcaccattcgaacactgccgtaggagctgagctgtcccacagcttctcaaggaatgagagcacactgatctttgggtcccagcactcattggaccctcacacgacagtgaaggctcgcttcaacaactatggcatggccagcgcgctcgtccagcatgaatggcgtcccaaatcgctaatcaccatctctggtgaggttgacaccaaggcaattgagaagagcacgaaagttggcttgtccttggtgctcaagcattgagtatgttttgcatcctaggaatttttcttcagttcttgtggattggaataacatggaaaaaacatggccacagctaccattgtggcttcattttgatcttgagttctttccccaccattaccctaggcaaacattagcattggctatatatttttatcctcggcgcctgttgttaataattttgggtgatttgagacctattgctgaatactgtcaaatatgatggagatatctctgtgttccaaaannnnnnnnnnnnnnnnnnnnnnnnnnnnnnnnnnn

SEQ ID NO: 396776 - DNA, 468 bp, Oryza sativa
  unsure (1)..(468): unsure at all n locations
nnnnnnnnnnnnnnnnnnnnnnnnnnnnnnnnnnncagtactgtataaatcaacatttatgctccacattcttctgaaaaatgtatacccacttcttcaatattatgtccaaacaaagggaaaagaaaaggaccggcttattctcagtctatcctgctgtcaattccttcatcagatgcatgttatgttctcacttccttccaatcttgcccttgcccattgtgatctactgatctgtaaggctgtgagaacctttcaagagacagctattgcctgcacaacatacatatgaaccaatttttcattagttcctgggcccgtgaaaactgagtccatctggtcagaaagaggtgctccaaattgcatcatcccccttccttcatcttgagtgcgcataagctttgctagactggattacaaaccactccacactgcacctctaattgttttccaccgaccgcatggttg

SEQ ID NO: 396777 - DNA, 295 bp, Oryza sativa
caggagcaagagaagatgaaatgcagcaaactggcagcataaaaccaacagatattgcttcatgcgaaacttacgtgataaccgagagatcgcagggaacttcaccactctgaagtctgaaccaagaaaccagatgaagacgagcattaaaattcttcaggacatgttgttggccatgtgaagagatgctaggacctgagctgtgcttccttttggcaacgatgacggaaggaatcagaagcctttcttgcacaagcctcgagttgtcatgtgtctcattaacttccagtttaca

SEQ ID NO: 396778 - DNA, 241 bp, Oryza sativa
gcagtttagagggactgtgtgagtgccaagcaggtgaaaatgtggattctattgaaggctatgtcagtttcatactgtcatgtgtagcaggggcaacattatgacagtgtatgaaccaaatgagtgtcagtcatttccttgctggccttgtatggttgcatactttgacatctaccacactgaaatgccagtcagttttctcattttcagattgtgcctgggtcggcttctttcacattga

SEQ ID NO: 396779 - DNA, 284 bp, Oryza sativa
  unsure (1)..(284): unsure at all n locations
gacggccacactgacgagtagtagacggtgaacagcctacagggaggaggcatgggggtagccgtgacaatggcgagctacgccgccgtcctgcgcccgcacgcctcgtcgacgaggactccgcgcgggcctcgtcgtcccgcgggcgcggtgccacctacgccgcgccgggcagcgctgcgagctactacgcggtctcctccggctgtcgctgccactccacctccgcgggaggggtgcagcagcagcagcagccgggtgacggccagacgacgacgcggntc

SEQ ID NO: 396780 - DNA, 460 bp, Oryza sativa
  unsure (1)..(460): unsure at all n locations
ggcacgacggcggcgacggcggaggataacggagggggagggggaggggacgccggggcggcggcgaggcggcggtgggatctgcccccgttggcggccgacagcactccaagcggcaaaggggttgtagaaacgtccacggatgatgaatcagattgtgtggttatatgccccccaaatgggaaagctggtcatacagaagctatgagtggcaggcatgatgaagattcttcaagagggcaagaaaccccttctactatagactcacatatgaatgggaatgtccaggatggagtgcctgcagatcaagatgtgctgaagcttggttgatcagcagaagtcttctctttcccagttcacccattaaaccatggtatagcttgaacaaggaagagtcaaaccacactgttcctcagccattttntcctgcaactnaaagggagggattcttggngaagga

SEQ ID NO: 396781 - DNA, 395 bp, Oryza sativa
gacggatcaacatgcaaggacaacccattcgatcaccacattcacaaggtacaaccggctgtcgctgatgaattcccgttctacgacgatccgagctacatgcagctgggttaccacctcgatcagggcaactcgtacgagaacatccacgcgctcttcggcggcgaggccgtcaacattggtggactctggagcttccacgacatgccaatggagttcacagcttattgagcatttgattctacttaggagggagtgaattatttgggacgaacaaccgatgttgtaacttgtccaatctctgatggtgatctctgcatcatatgatcaatttgagtgcagttttgtttttgtcccaaaccccaaaaaaaaaaaaagcacctgcccgggcggcc

SEQ ID NO: 396782 - DNA, 975 bp, Oryza sativa
  unsure (1)..(975): unsure at all n locations
caaaaaatatattaaaaaaaaatccacataaaccctcgcttccgaaaaaacccgcatcgccgcgcggagcaaagcagagagggggaggaatcggcacgagccgccgccgccgccgccgcacggcgggatggagtcgacgccggagccggaggacgggagggagctctacgcgctgctccacctctcgccggacgcctccggggaggaaatccgccgggcttaccgccagtacgcgcaaatctaccaccccgacaagtaccaggacccccagatgaaggatgtggcaactgaaaacttccaacgaatacgtgatgcatatgagatactatcagatgagaacaagaggcagatatatgacatctatggtatggaaggtttaaattctggcctggaacttggccccaagctaaacaaaccagaggaaatcaaagaacaattggaacggctgaagcggcgcaagggaagaagagaaatttttagcccatgctcgacccactggctcaataattgctaatttttccgtgccacagtatttagatggctatggaatcatgagaggcatgggaatgtccagtgaagttcagttgccagtgtccaagaaaaatactgttgttgttggtggaaatttggttgtcaatggcacagatggaactggtgcagcaagcgctgtgctgcgtcaccanttgtcttctgttggcatcagtaaantttatggctacagctggactacttccttattaacgttacaaacatttcgtcaaatttcaccacattcnaaagcaacatctggaattgctctttctttgaaaanatggntctatcaatctatccaatgcctggactcnccactatctganaatattgttgggaatntacacttgccttngttcaaatcaatttttctgttggatggcaaaaaaaggatnaaaaaaatctcnccnggggatgtaaacctggttctaattatttgggtgc

SEQ ID NO: 396783 - DNA, 741 bp, Oryza sativa
  unsure (1)..(741): unsure at all n locations
gagcctcatcgatcgagctcgcagccgccgtgttccccgccgggggaaggtcgtccttgccgttgggtggtgttcccggcgctggattgacgccatgaggaagaagctggacacccgcttccccgcgcctcggattaagaaaatcatgcaagcagatgaagatgttggcaagattgctttagctgtacctgttctagtgtcaaaagcattggaattatttctgcaacgacttgtgtaataggacatatgacattacagtgcaaacgaggggtcaagactctgagttcttcccatttgaaacagtgcatacatacttataatgtttacgatttcttgagaggatgtcctcagtaaagttccagacatgggtacatctgatgctggtgttgatgataaacttggcaaaaggaggaaaactgctgaacatgacagtgaaagaggaatcaaagcggacaagaaatgaggcagcaagccagacaagcactggtacaaggcgtgggaagggtccgggaaaaagccgacgtggtgggcgtgtgtctgaaaagganattatttccgcttacgaaaaatttgaggagaaccatgantttcctccangtcaatttaacaagccttctcagctgaaggtngatntttcagttgatggtacanatgccattgaaacaaggagctacccattaagcaacgccaganctctctaaggaacattgacttaaacatanaacttactgactatgaaga

SEQ ID NO: 396784 - DNA, 727 bp, Oryza sativa
  unsure (1)..(727): unsure at all n locations
cacgagccgcccttctccgcccgcgcaccgcctcctacacgctctccttcctcttctccccattgctcgcctctccaatgcccgctcgcaccgcgcagccgcatccatcctccacgcttcatctgccgcacgcgccccattccgtccgctgagcttcacgcctccctacccctcagcagtcagcacctttatctctccccctcagccctaatttatctgatccacgaaggtctctcctccaatccagtcgaaagaggtaggaaccgaaccgccgccacctccagtttgctgtgccacgatctgccgcccagatgtcctctccgccccaggtgtcctcgccgtcaactccaccttttcgcaatcgcaccgcaactccacaactttttcttctttggtagcttttggttttgcagggtgaattgtagcaaattaatgaggttcttgatcatggcggccgtccggtgggtggttcttgcatacatcgtccgtcgtcagctgcgacgacagtgagcatgtgctgttgaggattgccatcgagaaggttgctgttgttgattcagctagcgttggtgttcactaatgtttctttggcttgaangttaatttgctcatttgtttacatacgtcataccatgaaagctgcttaattattagctatctccaagggatgattatatatcgtagtctcgatcaccttctgtaagattaagattaagtgaaatttatg

SEQ ID NO: 396785 - DNA, 1203 bp, Oryza sativa
  unsure (1)..(1203): unsure at all n locations
ccatgggactgccttatttatggtttttttttccttagtgnaaccattaagtcccccagggaacggcttattttatgttgggccaaactacttccatttaagggctgttcgtcctgcttagggcctgtttgtttgttttcttcagagtatccctcattgtgcattacttgaccaacctaactttgacattgaattctcccattaagctctagctatgtattgccatttaattgtgcaactaatgttctaatgttgccaggtgcaactgatggcttccatccaagaagttgctcgacccaattcaatcctgaacccctacaaggttctcccacagtccgtcctgtagctggaaacggttactacgagctacagaagacaaatcagtaaatacaatcctcgagagaataagatggtgattgcgaagaagttagtcattatggacagagagatcgcgggagagactgcctcactactcaactgatttacaataataaacagttagaacggcactggattgctagccaacccaggcaagttaataaatttgcaggtgctgtaacagtttgcggatgtgctgttgtcggatgtacatgtactcatctccagtatgtgaacctggcaactagaaataaattctaccatgatattctgcttttcttcattcagtttttcgggatgcatacttcactacttcaatgatgcatgcgtcaagctgnaagcttggcagtgtggcatttcatatgcttgaatgtacatgattctgtttgctccttctgatctcaacgaactgttctcatctaaaactggaagcagacatacattcctcactgattaccactgtcttaacaaaaataagggcctgataacaccatttctactcagcccataatatctatcagaaaagagcaaatctgatgtagtatggactacggaatgttgatggccaatgagcatttcagatnagacagtatgaatttcctttccagcagatgtaacaccatccaggtccagaancacatgngtcacagnaactccatggnaccngataaanttttaggnngcaacncggaccggtttancggggatnncgtccggnnggacganccnggcgggtaaggccaatcaaatgagcggcttgnccccggttaaaacggggggancccagggggtaatggggganggggcggcgggaatttttcgggt

SEQ ID NO: 396786 - DNA, 399 bp, Oryza sativa
  unsure (1)..(399): unsure at all n locations
ttnannnttttttttaantcaaaaaattgatctaacattttaggaaaatgataccaaacacgattgcaacagacagcagtactaagcttacatcttaacagctaaatggcagcagaaagagcaactaaaatgactcataatgtgaataaaccaattcattctattacatcgtgcaagctgctagcacatctctccataaaacccattgataaatcctagtaaagcttacaatagttattcagtcttttgtttaccaaaagatggacatgagcttaagattttggtgactacaaaacttttttggatgtccactattctcccccctcctcatatttgaattaattacactcctggcgttcggggaatgaagctttaattctggcttctcccccggggatg

SEQ ID NO: 396787 - DNA, 605 bp, Oryza sativa
  unsure (1)..(605): unsure at all n locations
cgaatttgggtaccgggncccccctcgaggtcgacccacgngtccggtacttgaaagtatacctcaagatattattgatacacatgagttacaaacaatcactcttgactacaggaagagagtgcccaacatgatgacatagtagattcacttacttatatcgaggaaggagaggagaagagttccaatggatccgcatttgctgcaccgcacccagaagagcagcgacagttcttgcactgcttaagatttgctgggaacgggaacgagatcaaccgtgggcgcaccgtgtggaggaagctagctagatgaattccctagttttgatcatacagtcatatgtattctgatccttccatttgttccatcattttgctcttggtgtctggcatagccctttcagagaatcggttgtaccccaaattttgtgttaatttgttacctttgtaatgtaccgtggtaacaattacagtttgtgacattcgtcttacctgaagttgtgcgttgctgtatactttgtactagtagaatcagtgtttatgaatcttcaaataattctatcggcaacagatangcaatggcatgccaagtttggttcaaaaaaa

SEQ ID NO: 396788 - DNA, 451 bp, Oryza sativa
  unsure (1)..(451): unsure at all n locations
attaaaggaacaaancttgagcttccaccnccgtgcggccnccgatccggaggcaggtttcgttgggggttgggtcgtcgtcgtggtctcaggaggccntntggagcgagatgaggcatggcggctgcgggagggtcggccatcgccggccgacgccctccgacgaggaggagagtccactccaaccccaaccccaaccccaagcaaaacaaaggagtcccagcaaaggaggttcgacagcgacagcggcggagagccgacggcgacgacagcagtgtaaaatgaatgtttggatgtgaatttaaatttgtaacagcgatgtttgatgtttggatgtttgctcttcaatgtttggatgttgaaaacgaagtgtaaaatcgattgatttttggatgtgaatttaaatttggatatgatatgaaaaaaaaaaaaaaannnnnnnnnnnnnnnn

SEQ ID NO: 396789 - DNA, 707 bp, Oryza sativa
  unsure (1)..(707): unsure at all n locations
tgaaaaggtctccacgaaaagcaattgacagtatctacctggcaacccgtggatcaatttccatggaagctaggctcgaggcagcaagaaaagcagaggaactggaatcacaacttgaccctgaatttccctccttcgtgaagccaatgctacattcacatgtggtccgaggattttggttgggcttaccgaggcatttctgcgagacttacctgccaaaacatgatgccattgtcactttgttggatgagaaagacgagcaatttgataccaattaccttgcctaccaagaatgggcctaagtggtggctgggctggctttgctttggaccatggattgttggatggagatgcgacagtatttncagttggtcaagcctacaaccttccaaggtgcatattatccgagctattgttgatgatggaaatgaggtaaccaagtgacatcaacaaagacggcactactaacacatcggcagacgaaaaattgcattttgggtaggtttaggcctcatctgttagtattaccattaggcacttaatctgttactctgctagtttgcagagcatctatcatgtagcccatatctatgttgggagaaggaacaatttgccactcttatgttgtttgtaattggtgtgtccacaattactgccaattcgacactcgggagtttattagctgacnnnnnnnnnnnnnnnnnnnn

SEQ ID NO: 396790 - DNA, 826 bp, Oryza sativa
  unsure (1)..(826): unsure at all n locations
atcgatcagcagcagcagcagcttgcacactcgagcttagcttagcttttgcaagagagatcgagctagagatggagaagtcgagcaagatgatggcggtggcggcggtgctggtgctcgcggtggtcggcgcggcggaggcgaggaacatcaaggcggcggcggcggcggcggcggagagcaaggacacggtggtgcagccgacgacgttcccgccgttcgaccgcttcgggagcgcggtgccggcgttcggcggcatgcccggcagcagcatcccggggttcagcctccccggcagcagcggctccacccccggcggcctcggcggcttcggcagcatgcccatgttcggcggcctcggcggcggctcacctggcctcggcggcggcatgcccggctcccccgccgccgccgacaagcaggccaagaagccatgagagacctcgccgtcgccggcggcgtcgccgctgctgcgcgggtaatgtgctctatgtagcgcacggcgttgcatgcaatatggatggctatatgacgcgcgcgcgttatatcttcatatgtgcagttagcttgcactgtgtctagctagcgttctattatgagtagtgtctcttctatctcttttctttacatgcatttggaggaggattattctatctgtttgttggttggttgtgtttgtttgttttaattaggtcccttcttatattttgtgttttaattaagttcgtgatcatgtagtagtactaccactgtttcgagctcgaggcatgaataatgctaaatgtgatcattattgtgttaaaaaaaaaaaaaaaaaaannnnnnn

SEQ ID NO: 396791 - DNA, 496 bp, Oryza sativa
  unsure (1)..(496): unsure at all n locations
agcagtgcaaanccgacggcgtacncccggctgttcaanacggcgtgccccaaggcctactcctacgcctacgacgacccgacctccatcctnacctgntccgccggtgcgtcctacatcgtcaccttctccccgccccgcccctaaaccccgtaccccaacccaagcaaagatttgctccccactcatcatgaacaatggcaaagacccctagctttagtcatggtgcatggcattgttgttgctgatgttcttggttcttcttgatgctgttgatgcgtcatgtattagtgccgtaataataataatactattattagcattaaaccagtgggttgtactgtagttttancggttggtttgggtataacgtgaggagatctggtggtctaccactggtaggccgggaaaggaggaggtatatgggtatatggaagaactgaaactagtaatatgtttgtttccgttcaatttcnnnnnnnnnnnnnnnnnnnnn

SEQ ID NO: 396792 - DNA, 625 bp, Oryza sativa
  unsure (1)..(625): unsure at all n locations
aggtgcgaaaanttttgggaagggcaatcggttccgggcttnttcgctattacgccagctggcgaaagggggaatgtgctgcaaggcgattaagttgggtaacgccaggtttttcccagtcacgacgttgtaaaacgacggccagtgagcncgcntaatacgactcactatagggcgaattgggtaccgggccccccctcgaggtcgacccacgcgtccgagcagccaaagtgaaagcgaaagagagctgaactcagtggaggctggagagtgagcttaccaatggagcttcctcggggtgccctgctgctggtgctgctcgccgtcgccgccgccgcctcctccgccggtgccacactcgccgtcaaagctccagttccagttccagttccagctcctgcccctgcccatgcacctcctcaacctaaagatgctgaaggcctcctcatcaatggcaacttcgagacggcgccgaggaaggtgaacaagacactcatcgtcggccgccactcgctgccggggtggacgctgcgggggcacgtcgagtacgtctccggcgggccgcagcccggcggcatgttcttcgcggtgccccccggcgtgcacgctctccccctgggcggcc

SEQ ID NO: 396793 - DNA, 556 bp, Oryza sativa
  unsure (1)..(556): unsure at all n locations
gaaccaaccccgaagnctgtccgaacccggaccantcccttgtaccnggattggacatttacctnagtctgggaaccttgctcaatgtgtgcgatggcacntgtacatcaaagatncaaacgtatcttctatgctttcccaaacccaattactggaagcactgggcagtgcctacagattgcacggggagaaaagtttaaatcatcgttaccctgtatttagggtaaaagtgccccgagtcatattcgaatagttcgggcgattgttctgacaaatgctgatacagcttggcgtgctctgcatgaagggtgcgccgttttccagttttgatttttgtgaacagcttggcatgttgtatcattatattatgtaattcaacctcaactgcatagtttgtactagctattttcctagcttttgttactgtcttatttccttcaggttcgggtcgcagatattttcttgacgtttgctgactaatttgcctgaggaacggaagttggtgatcgatattatcgtattcgttcnnnnnnnnnnnnnnnnnnnnnnnnnnnnn

SEQ ID NO: 396794 - DNA, 438 bp, Oryza sativa
  unsure (1)..(438): unsure at all n locations
atacgcttgtcggataagtacccgcgaagccaaccccaatctttaaccgaccccgatggccgtcaagtccaaaaggctggaaattcctctcaaggaagcctacctcgacaagcaggatgttcgtctcgacatgaagaggttccgaccaatcctcaagaaggccattgctcacctccgcaagaacagcggcaacaataacaccacacacaactagccatttcgaatttttcttcgatcgatcgccatggatgcatcaatgtacaccatcttcttgatcttttaatcttttcttcttcttttactatcttttcactagtaagtaaaagtagactgtagcagctagcagatcgaccaaatgtatgatatttcagaggaggagatcagcagcaatactatattcatctctttgttttttttnnnnnnnnnnnnnnnnnnnnn

SEQ ID NO: 396795 - DNA, 669 bp, Oryza sativa
  unsure (1)..(669): unsure at all n locations
accggcgacggcgccatcatcggagggaagatgcgttccactttggttcgaccccaccgcgaattccaccatacgccatcctttggaaccccgaccacatcgtcttcctcgtcgacgagtccccgtccgcccgttacccgcgcgccgccggcaacacattccccgaccgccagatgtggnctacggctccatctgggacgcctccgactgggccaccgacggcggccgctacaagtccgataccgctaccagccttcgtctcgcgctaccgagacctcaagatcgccggctgcgaggccgccgcgccggcgagctgccagcccgtggcngcgtcgccgtcgggcgccaccggcgagctcagcgcgcagcagaaggcggccatgaggtgggcgcagcagaggtccatggtctactactactgccaggactactccaggaatcacgccaactaccccgagtgctagtggttgagccatgcatcttcagtttcacatcgtttcatgtgttgtgtgcaccacgtagtacgagcaccaacacgtatctactattaccctcatcataattattgtgtacgattggattgaggtgtgcagctgtgtcacccaaaatttcacttcgacctgcaatgcaagcatgtgttccnnnnnnnnnnnnnnnnnnnnnnnnnnn

SEQ ID NO: 396796 - DNA, 708 bp, Oryza sativa
  unsure (1)..(708): unsure at all n locations
ganttgctggagaggatcaggcagctgcaggaaggagatcgaggagcagcagcagcaggagacgcccggggtgctcagcttcttcagggagctcaaccccaacgagatgctggccaggaacacacccaagttcgatgtggagaggaaggaggggggcgacacgcgggtggagatctactgcgcggccaagccagggctgctctgtccacggtgagcacgctggagacgctgggcctcgacatccagcagtgcgtcgtcagctgcttcaacgacttcggcatgcacgcctcctgctccgagatgcagagggagaggatgagcgcggacatgataaagcaggagctgttcaagaacgccggctatggaggaggatgcttgtagagagaggacaccgagagcagcagcaataaaagtagcagcagcaatggtaatagtggtggtagcagcagcagatcgagcagaaagaaagagagagggtttcagagttcagtgttgttgagtagtagggcaggagaggaaaaggcagattcgggaggcctttttgcaatccatctcccccatcgttcctcgtaaccatgcaacgcaatactactacattacattacatgtggttgtgcccgtctgtccatgaatcatcatcatcaatcagactctttctttctcttaacaacttttctcttttaatgnnnnnnnnnnnnnnnnnnnnnn

SEQ ID NO: 396797 - DNA, 735 bp, Oryza sativa
  unsure (1)..(735): unsure at all n locations
actgaagatgcccatttggncatcttgctgcaggggacaaggtattgtatgatgatatggcccctgcatttgatgtacttgggaaaaagtcgttctttttgggaagcagattggcaaatggagtcaaagatgcaaactggtggtcaacatgatcatgggaagtatgatgaatgctttgtctgagggactctctctggctgataacagtggtttgagcccccagacacttcttgatgtcctggaccttggcgccatcgcgaatccaatgttcaagctgaaagggccctcgatgctgcaaggcagctacaaccctgcatttcccctgaaacaccagcagaaggatatgaggttggcacttgccctaggagacgagaacgctgtctccatgccagtggcagctgcttccaacgaggcgttcaagaaagcaagaagcttgggactaggggacctggatttctcagcggtttacgaggtactgaagggcgcaggtggctcaggcaaggcgtgaaactctgaacgctagaatccattcttcagaatctgcccattgccgtgcaggtttgctacagtgatcggcatcgaaccacgcagcatatgtcatcgtattgatactactgggtaaccagtgtgaacgatgtagttgcaggttaagtactacagcttgcgtgaacttcatcccaataataaagatatatatagctctgttatgcgaagcaaaaaaaaaaaaaaaaaann

SEQ ID NO: 396798 - DNA, 756 bp, Oryza sativa
  unsure (1)..(756): unsure at all n locations
ccatcgccattccagctgcgcaactgttggnaaggccgatcggtgcgggcctcttcgctattacccagctggcgaaagggggatgtgctgcaaggcgattaagttgggtaacgccagggttttcccagtcacgacgttgtaaaacgacggccagtgagcgcgcgtaatacgactcactatagggcgaattgggtaccgggccccccctcgaggtcgacccacgcgtccgcgacgccgccgggatcctgttaggcagctgcctcgccttcgcgcccacagccagcgaccgcatgcccggcttcatcggcaacgtgcagcagaagacgctggaggtggtgtacgacgttcccgccaaggccatgcgattcaggaccgccgcctgctaagtgctaattcaaatttgcttgcttgccaaactagcgtattgttagcttattattcgaatataagctagctagttgatgaaataattagtcaaagtgattgttgtttatgttttgatgccatgtttatcctacatggcgtactagtagagcatctatctctatggaaagggattaaagtagctagcttaattgcagcattgtctgctaaagtttaggctagctactaaagctcttttatttatcttgtctgcaataatttgttatcttgatgtgatttcggtcgtgtgagattgtaatatcgagttatgcatctccatcttgcatgtcaagtgatgtactactttttccatatctaaaaaaaaaaaaaaaa

SEQ ID NO: 396799 - DNA, 355 bp, Oryza sativa
cggcgtccggctgcaccagcacggcgccctcctcgccgacgccgtcgaggccgtactccacgtggacgggccgctgccccttcagctccagctcgtagggcgccacctgctccatgtcgacgaacgtcaggttggcgccgccgtagacgacgacgtcgcccgggaacgcggcgaccgcgccggtctcgtcgacgaccttgtccccggccagcatcgccgccagctcggcgacgtcggtcttcgccggcgacgaggccgcctccacgtacccgaccctctgctcgttcgccagcgacttgccgctcctggcggccatgtccgtcctcaccacggtcaccgtggtcacctccttgga

SEQ ID NO: 396800 - DNA, 587 bp, Oryza sativa
  unsure (1)..(587): unsure at all n locations
gagtatgaacagaagcttttcggacccaatgttggcgcacctgctcaatcgtcggttccaactgaatcatttcgtcctcttggatttggtttcccaaaaccggcaggtgacatccaagcgcccgtattcaaccagcagcccgtgccgtccatcttcgagcgagtcaacccaagtaataattcctagtaattttacttttggagcaatggaggcccaacactcctatggacgacaatggcgcgcccgcaccaacttcaggtgataacccgatggacagctcataacaagtcataactcataagaggncctgacatgttcaatctcctctgtagtgattagtgaatggatattactgccaggcatatctgatatgcaaaatgggatgttatttagatggtctctagaattgatgaatggttctggcaaatgatggcaattgatcagggttatatgcactgactgccaatcatggcaaatggacctgtgggtttatatgcaatagactaagttaatcatgatggcacgctttttcagtcccnnnnnnnnnnnnnnnnnnnnnnnnnnnnnnnnnnnnnnnnnnnnnnnnn

SEQ ID NO: 396801 - DNA, 595 bp, Oryza sativa
  unsure (1)..(595): unsure at all n locations
gagaagcgcctcgccgacgccggcatcgagctcgccgacgaggagaccatcgccgtcggccactaatagtgaccgatcgatgcgtcacatgnacatacgcaagctagctaccagttagctgcacgcgtcgtgtatgtacgtcgtccttgtaataactttggttttttcttttcttgtattttgaatttttcttcttcttcttcttcttcttcttcttcttcttcttcttcttcttcgtgtattgtattcgacgtatttcgccgggtataatttgggtgtattctcatcgcacgtataattaattaattaaccaactacgtaataactacgtggagttaattaatgtgtacgtacgtggggtgtatgtagaaggaagatatatacgtacgtagggaagggggagatttatacgggcaatgtataatttgcccacaaagtgtattactgatgtatatgtttatacgtcttttatactgatagtgtgcaggggcaggaggaaatttcctgcatatgcgaaggtgcgggcgcacccctcaaatctgaatcaataaattaaacacaaaaaagtttttggttaaaaaaaaaaaaaaaaaaa

SEQ ID NO: 396802 - DNA, 653 bp, Oryza sativa
  unsure (1)..(653): unsure at all n locations
ttccagatgntgcagcgctccacagaaccatgcccnttcacctccggccntgaaggcccgcanctcccgacaaactgaggtccactccttggagaacccccatcccaaggtagaaggcagtttnccattgtctcttgcgaagcaagtgccaaagatgatggtgtagaaatttcattggtgtcattgcttagtaggtcagtagtgcagtagcttagcattcatcctttgttcttctgttcaagtcaaggatggccggtataccggaaatggggaggtgagcttggaggtaaatatgtttttgggggtatactggagaaagtgaatgggggcttggtggtaaatacattgtgaagggggcctgggaagaaatagtagagaactggagcagtggtgtaattgctacaaggagtaagattgtgtaggttggtaatttagattgtcaggatgtttctaattgatgaacctcttttcattttgccttttggtgatgtaaagggtctggtatgggggaggtataccatagaatcttggggaattttgatttggggtggcaatgtaattccatggatttcttgtttttattcaccagttattaattgctggtgttctgctgtnnnnnnnnnnnnnnnnnnnnnnnnnnnnnnnnnnnnnnn

SEQ ID NO: 396803 - DNA, 457 bp, Oryza sativa
  unsure (1)..(457): unsure at all n locations
acggcagccgcatggtcgcgcatttcaacacgagccacacgatcgcggatgtgcgggcgttcatcgacacatcaaggcccaggagcaagccggtgattacacgctaccaggtccgggttccccccaaagccgctcgatgacatgagcaagactatcgaggaagctggcgtcgccaactcggtaatcattcagacagcgtagcttcgacagaaaacagtttgttgaccccccctctcttcaacaaagcacactatcccatctgaagcgtgcaaatttcctcccctatcttttcatgccaagttttctttttctcttgaatctacccttttctgccttccatggcttcgaccaatagctgctccaggtatgaagagtgtaaaacagtgagatctgggtatctcgtccttattcatctatngtgctatacttttgctctnnnnnnnnnnnnnnnnnnnnn

SEQ ID NO: 396804 - DNA, 608 bp, Oryza sativa
  unsure (1)..(608): unsure at all n locations
tcgaggattgatcctcctgccgaagagagtcgcccgaagatgatcttggagtaggtatcagtnttcaaccgatgattctcctgcgagagagccacccaagaacaatcttnccggaggtagaaatgtgccaacgaaggatgatcctcctgctagggagctaccgaagaataatttggccggaggtagaaatgtgccaccgaaggatgatcctcctgcgagagaaccaccaaagaataatcttgtccggaggtagaaatgtggcacccaaggatgatcctcctgccaatgaggcaccaaggaataatcttgcaggaggtacaggtgtgccgacgaaggatcctcctagaaatgccaatgagccgccaaagaatcctcctggtacccgtgaagccaacctaggatgagcaaattaaccgtggtgggcatgtgagaataaagattagaatagattaaaccccatgagaggagagaagatatgtttatgtacatggttgtcatgctcagaggggcaattttcactgcacgcagttggttcactttaatttttatgaaataaagttatttgatcgatatgaaaaaaaaaaaaaaaannnnnnnnnnnnnnnnnn

SEQ ID NO: 396805 - DNA, 697 bp, Oryza sativa
  unsure (1)..(697): unsure at all n locations
ggccgcagccgtggtgcggctgacgagcagcggacgatgcgcgccggccgccgccaagcgggaggagtatgcggctgttcggatccaggccgcgttccgcgcttacctggcgagacgggcactgaaggcgttgcgagggttggtgaagctgcaggccctcgtccgcggcaacatcgtgcggcggcaggcggcggagacgctccggtgcatgcacgctctcgtccgagtccagaggcgggcgcgcgcgtgtcgccatatccgctcccagcatgtctcggcccatcccgggccaccgacgccgggagaagtacgaccaggcgactcacgagggcgtgcctaagcacggccgttctggttctctgaaggggagctcgtcgaagagccgggaagtgagagactgacccgggagaggtcagaatcttgcgggaggaactggcttgacaagtgggtggaggaacggtatttggatgacgagaagaacgccaagattctcgaggtggacaccggcaagcctgggcggcacgctncacggaggcgcanggcagccatcaccaccactcgtcatgctcgtccatgacatccgagcagaagagccggagctacgcnccatgccggagtctccgtccaaggactccacgaccgcgcanagtccgtgcccagcccgccgtcgtgggcatggccgaggcgctcagcccgt

SEQ ID NO: 396806 - DNA, 396 bp, Oryza sativa
  unsure (1)..(396): unsure at all n locations
cggaggacntggccggcctcatcgcagcctacgctttcgatgcgttgctcttcttcgacgacttcgcatcatctatgctacggatggggaggctggcgccgggagcgggccaccccgtccggcgagggtccgccgcaactgccgggtggtgaactagctagctaggttgctgcatgaaacaagaaggaagctgattatgctcccaaaattaattaggagtatctgtgcatcagataattgcgccagctatcatatgtatgtgtctgctaagtttctcaatctagtcatgtatcgttaattagctaaaaagatgatagcttggattatccattatcttaaaaaaaattaactaatggtgtctgatatttgatttgtttagttaatcagcttaaaaaa

SEQ ID NO: 396807 - DNA, 476 bp, Oryza sativa
  unsure (1)..(476): unsure at all n locations
ccgtgaggatgttaatttattncaagttgcaactcaaagtactacgcggcataaagaaatggngtagaagttcactggctncctgttttactccggcacacgccctacccagacatgctgcaagttcttatttaacgcactacttgtcttgagcatctgtcagcaaggacctgaacggaggctatacaaccgatgatgacgagaagccgaacatgcatcctagtttgttggaattgctgggctactcaatgttgagcttgttgtttgcctctttgaggaagcccgtacctctcccagacgttggtagcacggataatttgtgccatgccaagctgttaagtgctaatcctaatttatcttccagtactcaggagtcctgtaccgtactttttgcagaaaaagtttgtagtagtacatgcgaggttactctgtttctgtacatcaatattcaagggcnnnnnnnnnnnnnnnnnnnn

SEQ ID NO: 396808 - DNA, 407 bp, Oryza sativa
aaattgagtgtgcaaccccatgttcaggtattctctcaagattgatttggagatgatcattctttttctgaaatactgttatggccatttgctgccattgctgatagtcaaccagggtcacctgtactgaactgcatttacctgtacgtcgagctgtgggccttgcatttgttgtaatggtgtagaagtatttcccagagttcctttttaggagtacttgaggagatattgggaggagtacttgaggaggtattgggaggtataagatgccatacttcctgaaggacagtaaaaacgctcttgtttaacctgggcaagtgggcagggcatgttcgcatttcacgtctccatgccttgcgcaaaaaagaattcaaatatctatcttttttaaaaaaaaaaaaaaaaaa

SEQ ID NO: 396809 - DNA, 387 bp, Oryza sativa
  unsure (1)..(387): unsure at all n locations
tcaatggtcnattcaaggtctcttccaaccaagtaggaatcggcggtcggccgccactcctcggcgaaatctccggcggcatctccacctccaccagcgcgagcttgggctccaccctctgcgtgtaggccctccccttggagttcaccaccacccactgccgatcccaccggaacccagtggaggtgattggggcctggggcacggagattcccctgcatgacttgatggggtatatcaggatcgacctcaccgtcgccgccggctctggcggcacctcctcgccgccgccgaggagggaggagaggaatccagcggccttctccattgttcggctggcttagcttagctttgctttgcttgccgcaagcaagaaaacgaaaaaaa

SEQ ID NO: 396810 - DNA, 402 bp, Oryza sativa
  unsure (1)..(402): unsure at all n locations
ggaggctgccgccgccgaccgctgctnctcgggctgncggcgcgctgcttggtttcgtgccggcggtcgccatcagctccctcctccgcccctttgggttcgttccagactgaagacgagatacaaggtcacacataatacattttgctgccatttctgacgtgagatacagtgacggtaggaactaggaagaaatgctaatgtcatcgatcgaacttctcacttgcctttatcgctgtgatagtacacagaaggaacattgacatcgagctggaagttttgtcatttcgagaatacgcgtgtttgagtggctaatgtcaccgatcgaacttctcacttgccttcatcgttgttatagtacacagaaagaacattgacatcgatcaaaaaaaaaaaaaaaaa

SEQ ID NO: 396811 - DNA, 646 bp, Oryza sativa
  unsure (1)..(646): unsure at all n locations
actccaagagttgctgcttggtattgaaagctgatagtggtggcatattgggtgctacagccantgtgtgtcagactctgacagcagcctacactgtggctgtggaagatgtagttgatctgtcgtctccttctcctcctcttcggaagctctccaagtcccaaaagaagatgatggccgaggatgtcaatgtggctggtatgaacatgaacaagatggagtcagaaagtagttttagcacgcaatcaagtactagtgatgttgacaaccagctgattgatctgtcttcacccctggctggtggtgataatggtatgaaaggtggaagaagagccctggcagacataagcaatgttggttcacacagcactgagacagacggaggaggaggaggtggtggtggtgtggcatcggtcggccatggaaccaccatcgacctatcttctccgtcgccggccataggcgacagatcaagggttcatcacgatgatgatgatgtaatacacgagaggaaagcaagggacctgagaatgttcctggacagcatacggaacgagctgtattgagtgattatttatgaatgtttggctggcgttttttgagatgatagtgaaatggaattggaattacaaaaaaaaaaaaaaaa

SEQ ID NO: 396812 - DNA, 670 bp, Oryza sativa
  unsure (1)..(670): unsure at all n locations
ggcggtggacccgacgatggacgccgggtacgcgtcgcagctgcaggcggcgtgcccggccggcgtggacccgaanatcgcgctggagctggacccggtgacgccgcgcgcnttcgacaaccagtattcgtcaacctccagaaggggatgggcctcttcacctccgaccaggtgctctactccgacgaccgctcgcgccccaccgtcgacgcctgggcggccaacagctccgacttcgagctcgccttcgtcgccgccatgaccaacctcggccgcgtcggcgtcaagaccgacccgtcgcagggcaacatccgccgcgactgcgcgatgctcatctgaccccgccgcgggcggcatggtcgtcggcacgacgacggcggtcagcggcggccactgcggttctctcaattgttcataaatagttttagctgcagcctgcagcgctgaagttctgaaaaatatacaactagctttttagagcaaaagttttaatcagttaattatattggaaaccaggaattaagattattttgtgcatctgatagtggtgaatcaattaaattacctagctaggccaaatgtattgtgttttttaactatgggagcaagataaattatctgaacatgttgtcattttcatctgcaaaaaaaaaaaaaaaannnnnnnnnn

SEQ ID NO: 396813 - DNA, 496 bp, Oryza sativa
  unsure (1)..(496): unsure at all n locations
cacagatcaaagtgaaggctgatgatgggaccgctgcagaggcattttcaacgttgtttcagtcagctttgtccaaatttgggctttcttgatcctgagcattttatattggtgatgagcctgtcagtttctctgcttgtcctaccacatccttgaacgtcctaaagatttttggtacatctttaatgggaatgttgaagcatgagtttgaacatcctcaacagcatatacagcagggagagcacaggctggagttttttaaggatgtatttatggtggctcggtggagaaaaattagcattgtcgtatatttcatctggagaagtgagttgttgtggcttcttgtgtttctgaaggtgaatgtcacctgttttgtcgatgtagagacaatatagatacagcgctgcttctgtatgttagtactccgtatttcttacttgcacagagcaataaagctgttcattctaccnnnnnnnnnnnnnnnnnnnnnnnnnnn

SEQ ID NO: 396814 - DNA, 419 bp, Oryza sativa
  unsure (1)..(419): unsure at all n locations
agtcgttccggccnccatgaccgaaacccgttgcggacccggtggtcgccgagaacggatcgcttcagctggaagcagcgccgccgcctggtcccggcaaagcatggaagcgagctcgcgatcaaggtttgtagtaggaggaggagtacaagtaacaacggctcgtactctcgttgggctacccgaggtgacatcttggcgggtggcagctgaatgaatgactatattgtatgatgcttgaaactgatttttttttatacatgtagagctagagagagcctgttcagtactccaagcctgacttgtatgactgaattgtgatagtgtgatggtgacatactatatcaagtcaatgcaaatgcaaataatcaaaagatccgttggcatcgtnnnnnnnnnnnnnnnnnnnnnnnnnnnnn

SEQ ID NO: 396815 - DNA, 359 bp, Oryza sativa
  unsure (1)..(359): unsure at all n locations
aggaggagcgcatggtancgttcacctacctgcgcatggggcccgacctgttccagccggacaaactggcgcccttcgccgcgttcgtgaagcgcatgacggagtccggcgtgcgggacgtgtgccgcgagcaggtggagcgggaggcgcaggcgtcgcgcacgccaccgggtcgctcgtgcacgaggccgccgtcgcgctcagcaactgatcgatcagccgacctcgcgcgtagaagggtaaaaacgctttacatattttatactcccaagattatttgttgtaatcagcgttccgtacgcgtgcgacgacatcgatcgctcaagtgtgcaaccttgatctgcgaaaaaaaaaaaaaa

SEQ ID NO: 396816 - DNA, 371 bp, Oryza sativa
  unsure (1)..(371): unsure at all n locations
agtacaagtaccaagtacgcgnagccgccaacgccgccgcggnagccgggcttccctcgagggatgcctcgccgccctctgctgctgctgcttgctcgacgagtgctgctgcgacccctccgtcatattcgtcacctgaagacgacgacggcgacgaggaagaagaagatgggaggcttagctgatttcgtccatgttaatatgtctgcagtgtacaaggtcgattagttgatgcttggttgttcagttgcttgtagcttgcctatctttgttcagttgttttctcctctattttttttctttcttcttgcctactatctccgttctataaaaaactaaattctgaagtnnnnnnnnnnnnnnnnnnnnnn

SEQ ID NO: 396817 - DNA, 450 bp, Oryza sativa
  unsure (1)..(450): unsure at all n locations
tntgaccggattaacaatttncacacaggaaaacagcttntgccattgattacnccaaacgcgcaattaaccctcactaaagggaaacaaaagctggagctcccaccgcggtggcggccgcatgatcggcccaggtcgacagggacggcgacggccgcgtcgacttcctcgagttcaagcagatgattcccggcggcccgttcgccacgctccggtgatcggcggcgtcatccacgcgagcgtcgttgtatcgtctatatacccaacgtacggtcgattgtttgttttaacatagcttgtgcatgacagtttgtatgagtgtactacgatccacacacgcgatcgaatttcgcagaaaatgtattgtgatcataagctgataagtttcggaggtggtaaaagcataaagcagccgctataattaagaaatttaaaaaaaaaaaaaaaaaa

SEQ ID NO: 396818 - DNA, 461 bp, Oryza sativa
  unsure (1)..(461): unsure at all n locations
tggaaaacgggcaatgacccccaccgaattaatgtgagttagcccaccncattagncacccccaggctttacccctttatgcctcccggccccgtatgttgtgtggaattgtgagccggataacaatttcacacaggaaacagctatgacccatgattacgccaagcgcgcaattaaccctcactaaaggggacaaaagctggagctccaccgcggtggcggccgccatgggggaatatgtgtatctgttacagtaatttacgaagatgaagctgattattagcaaccgataagtgtttcatcagcaattatatatgttgttgatgtactgattatatgtacatcgatgtaactgtacctgtaacaccctcaagaaccttttaaaatctataaatctaaataaaatgttcaaatggatttgatgcaaattggctataagcaaagttcaaaaaaaaaaaaaa

SEQ ID NO: 396819 - DNA, 471 bp, Oryza sativa
tccgctgaaggcaaccagcatgcattggcaattggatatccaaagatgtcagcaaaggccattaagactatcaacaaaggaattggagttgacaatatgcactatctaaatgatggcctgtggaagatggaacggctcgaataagtaaaatccactagggaagcataatttgctgcgccatattgaaatgtaatgagggctggaattatgtatcaatgcatcttgtgtcatgtaaacacataaaatagccagcagctacatggtgctccaagcctgttcgagtttactgtgaccatcaagttttggagatgtttggccaaacttttgactgatagtgctgtgttcaacgcttcacttgggattatcaatccagaacactgtacaatgttggtaatcctatcactaatgatttgcacttattaccaataaaatttcagatgagctattttttgtttaaaaaaaaaaaaaaaa

SEQ ID NO: 396820 - DNA, 551 bp, Oryza sativa
gctttgtggaaaggatgatgcatggtggggagttagaggttatatgcgtgacaatttcaaccatagcaacaaagccatctcatataaagagcatttccagaacagcaagacttggtgaatccgtgttggaatttgtattgggagctacctccaaggtgctggtccatccttaaccccaccaaacaagatatgacccagcccgtgcatctgatcctatcatcgaagatgggtcgttttggcatgtttcaacgaattggtctagcgagattggatgcctcagttttcaatggctacactcagatgtcatatgttcagatatcaggctcaatgttgagcagagagggatgcttaaagattttattccgtagggttaatttttcttctgatactgactaaacaggttgacaggctttttctataatgtcgcaggttggcatacacacgactatattctcgtagtacagcttgtgtgactatgcaaatgttatcaaaccaatgatgagccttgctattctgaggcatatcagcaactcaaaaaaaaaaaaaaaaaa

SEQ ID NO: 396821 - DNA, 466 bp, Oryza sativa
  unsure (1)..(466): unsure at all n locations
cgacccacgcgtccggaactgatgattgacgatgatgcagggagagagatggcgagaccgtgcggtgctggtcgctgctgtgggatcggcggtggcgcaagtcgagccggggagatcacggcaacgagtccgccatccgggccgcgatcctcaaggcggcgaaacacaacgcttcttccccaaagaaaatctgaatgctgctgctagcgtccatcgttttggtcttagatagctagcgcagacttatctgcctgccaccactgggtgtatcaatactaatgtatggttttgtacatacttatgagtgtccattttgtgcttgtgaactgattgtgtgtgaaaaactgaagataggcatattggaaatgattccataattgcgtgcacatccagggtatcgttgtgaactcaagttcggtttnnnnnnnnnnnnnnnnnnnnnnnnnnnnnnnnnnnnnnnnnnnnn

SEQ ID NO: 396822 - DNA, 469 bp, Oryza sativa
  unsure (1)..(469): unsure at all n locations
ccccctcgagntcgacccacgcgtccggatgaactctacagcatgtccgaactcagcctgaaggccgaggctggtgtgaaaaacggcactccctaattctctgttgcctcccaagaccaattggtagaccagacaggcaatctgcttttcatggaaaaggaccttctgatgggctcttcaaatggactgattcctgcaaagtgattctgcagtaaaacatccattcatgtgtatctaatgcttagaagatagtaaatcataaaccccatgctgctgaaatggtgctgttgtacatgcaaaatgcttttactggtcattttagtttcatgtttggaggaagccatgtatgtcctgcgagtaaattgacttttagtttgacaaaaatgtagcatttctttgtcgttgtttctcaggcttcctcaaattgatttgaaaatctgaaggtttttctaaaaaaaaaaaaaaaaaa

SEQ ID NO: 396823 - DNA, 395 bp, Oryza sativa
cgtccagttaatgggatggccttgagggagagataaaccgcccaaattttggccatttctcctctcccgtgttttgggcaatcccgccactttttggcgcattggatggccgcttctcatgggacccttttttttctccctatacgcccaaaatgcccgatggaggtatcggatagatgagctcctgggggatgctgtaagtcagttgatgtatcccttcaccggttgtttgtagggtatcttataatgtgtccttgagaaaaatattgacagatccaactatgaacaagcagtggtttgaaagaacatctctatcaaatctcagggctccattgaaaaaaatatcatggaattaaaattgattatcatgttccaaagaaaaaaaaaaaaaaaaa

SEQ ID NO: 396824 - DNA, 469 bp, Oryza sativa
gaggaggagtggctaacagaagatgatgatgatgatgagtgctttgatgatctgtgtgagggggattgagcaagatgtctgtgttttgacgatgaggaggaaggaaggacaagaaaggctgggctgcctgccgtttcaggggaaagcaccaccaggttcatctacgacagcgacggcgagatggagaggggaggacgtggcgcatgtgcccggtggagaacttgcaccatggttctgaggggcctgccggtgccggaggggaagcatctccgcttccacgaggttggaggaggatgaggaatagattgacattgctaccagtgatacactttcgcattcccaagcaacaaaaacaacatttgctactatagtacctcctcctttttccttttcaatctggacagacacattgattcagtctactgcaatataatgccttctgtgtttcgcttcaaaaaaaaaaaaaaaa

SEQ ID NO: 396825 - DNA, 459 bp, Oryza sativa
  unsure (1)..(459): unsure at all n locations
accgcctctccctcgcnttccccggcgantacccgtacaagccgcccaaggtgaggttcgaaaccccctgcttccacccaaacgtggacgcccacggcaacatctgcctcgacatcctccaggacaagtggtcctccgcctacgacgtccgcaccatcctcctctccatccagagccttcctcggcgagcccaacaacgactcccccctcaacatccaggccgccgccctctggcctaaccaggacgagttcaggaagatggtcgagaagctctacaagcccaccgcgtagaagttggtggcgccttcgcccggcgatctgatctggccttctcaccttgaatcgatgatgattcgaatgcgattgttgtgcgagtcggattggaactgttcgatctgtaatttttttttgttggttgtttgaatgattcatttgtttcgatgtaaaaaaaaaaaaaaa

SEQ ID NO: 396826 - DNA, 502 bp, Oryza sativa
  unsure (1)..(502): unsure at all n locations
cggacntgncancggtggcatatgttgctgacatgttttcaacaccggcaatctttgtgaaagctgtgactgatattgttgatggggagaaaccaacagccgaggagtttctgcagaacctggttgctgtgacagcagctctggacaaggcagttacagaagtggttgatttcatcagtgggaaatgcatatcggatctttgaatgatgaagcttagaaacctgttcatcaaatccaagctctgctgcttcaatgcactatactatactacatcactgctgtatgatttttcatggggatgcgtatacaatttttaggttcccctgaggccctgatcccccgtatgtacaaaattcttggcaattacttggatcaatagcgtggaattttgtagaatattctgcaaaatgtgcagtgtaatgaaactaaataaggtgatattctgtcaaactaagataagtggtgggcggtggagttattttcttaataaaaaaaaaaaaaa

SEQ ID NO: 396827 - DNA, 633 bp, Oryza sativa
ggctgctcgcaatatggagctgcaaggaaatctagattttgcacttccacaaccgagaagcgtccacacatcagtgaaagtatccaatcctgctggaggtccaagcaacatcacgttcagtgaggagcctgtagtcaagacgtcaaagaaaatccataaccagaagttccaagagttgacaggcaacaacatcttcaaagaggacgctacccctgcatcagctgagaaatctctgagctcagcaaagctgaaggagatgagcggcagtgacatctttgctgatggagcggcagccccccgagactatctcggcggtgtccgcaagccccctggtggcgagagcagcattgcactgatctaatcgccgcaggctgccctaatctggactggctacttttaccctcatcgctgaagtccgtggcatgtgctcttcctggaccctggttcttgatcatggttgagagctgatatcttggccctgatatcatctagagtcagcagaatctgactcagcttatgtgttgtaaacttgacttaatctcatctgtcttatggtacttatgtattaatctccttggactgagactgaaataagttttattggttcatttttgtgaaaaaaaaaaaaaaaaa

SEQ ID NO: 396828 - DNA, 822 bp, Oryza sativa
  unsure (1)..(822): unsure at all n locations
aagactcgagacttctctacgcttctcctcgccgccgaaacgaagcaacccgtcgcctcgccgccgccgccatgtcggtgacgctgcacacgaatctcggggacatcaagtgcgaggtgttctgcgaccaggcgccgcggacggcggagaacttcctggcgctgtgcgcgagcggctactacgacggcaccatcttccaccgcaacatcaaggggttcatgatccagggcggcgacccgacgggcacggggaaggggggcacctcgatctgggggaagaagttcgccgacgagttcagggagtcgctcaagcacaacgcccgcggggtgatgtcgatggcgaacagcgggcccaacaccaacgggagccagttcttcatcacctacgccaagcagcctcacctcaacggccactacaccgtgttcgccaaggtcatccatggattcgaggtgctcgacctcatggagaaggcgcagacggggcccggcgaccgccccctcgccgagatcaggctcaaccgcgtcaccatccacgccaaccctctcgccaactaatcctatctactccatctagtttaaaatctttggaattctgattgcttttttctgtgtggatgtgttgtgttctgctgctatctgaatctttgttgcaagaacaccgtacaaactgagtctgtaactgatatcccaaaaagtgtttggcttcacgattgatgcatctgcagacttgggttttgtgattgtgttttcatgtttcaactggctgtgtgatctatggctaagtacatcaattaagctnnnnnnnnnnnnnnnnnnnnnnnnn

SEQ ID NO: 396829 - DNA, 454 bp, Oryza sativa
  unsure (1)..(454): unsure at all n locations
agacttctctacgcttctcctcgccgccgaaacgaagcaacccgtcgcctcgccgccgccgccatgtcggtgacgctgcacacgaatctcggggacatcaagtgcgaggtgttctgcgaccaggcgccgcggacggcggagaacttcctggcgctgtgcgcgagcggctactacgacgggcacggggaaggggggcacctcgatctgggggaagaagttcgccgacgagttcagggagtcgctcaagcacaacgcccgcggggtgatgtcgatggcgaacagcgggcccaacaccaacgggagccagttcttcatcacctacgccaagcagcctcacctcaacggccactacaccgtgttcgccaaggtcatccatggattcgaggttctcgacttcatggagaangcgcaacggggnccggcgaccgccccttcgccganattaagttaaacg

SEQ ID NO: 396830 - DNA, 707 bp, Oryza sativa
  unsure (1)..(707): unsure at all n locations
aactcactataggcgaattgggtaccggcccccccctcgaggtcgacccacgcgtccggtgctgcccatttccacctgatcagaacaaacatgcattcaaggaagtggccattataaggcatcccagaattggcgaatatgcatttggattcatcacttcggaagttctacttcaggattattccagtgaggaacaaatgtactgtgtatatgtaccaaccaaccatctctacattggggacatatttctggtcaactcaagtgatgtgattagaccaaacttatctgttcgtgaaggcatccgagattgtcgtttcaggaggcatgtcaatgccccaagttctatccatagtggaaacggagcagaaccaatggagcaggatgagatctagtcgaagctaagataaccctcctacgtgtgcccagatttcgcttgtaatcccgtgtttactggtttctgtaagtacaagggtaggatccaatagtagaatgtacagttctcctggctgggaatgcaaaatcacgctgtgcacgcacttaagctgtcactccattcaaatgcgcgcgtgtgaacttcgttccttaggttggagcttcatgaggtagagtttgtcctgacggtttagatgacacagtttattcgcttcatttatttggttaagagggagttctagttctgattgtctgnnnnnnnnnnnnnnnnnnnn

SEQ ID NO: 396831 - DNA, 783 bp, Oryza sativa
  unsure (1)..(783): unsure at all n locations
gtggtgtcttgcacgggcatctggaataagatactgtgtgcttttctgtgatacagaagtggaccattgtagggaatggaacaccaagcgtcaggagaaaggagaacccacgtatggataactaatatattcgatgatctggtaagtagatttgagaagccagataggcgcaatcgttgggattctcctctttttgaattgtttccatctagagatggagtaatggaatcgtctcctgttattgctgaggctgtatcatatttgactaagaaaagtggactctaagacaagagatgtgaaagttctccaacctacaatagccactcagactgctcggacaacagaagctaattcccctttacgagatggacaaagcaacgcaggaggtgatcctgcggcaattgttgaagccacaatcttgtggtcttgggcttccccntgaataagatttctcttggtcctnacctaccaactatatgtcttcaaagatcagtcggtctncctgagcttcgaagcctncgacgcactttcattaagctggcagggcagtacagcttgagtggacctcccccaccagcagatgctgatagcgcaacnaggatgtttgtggactatttgaacagggaaatcagttcctgatatcaatttctgatggattgaccctatgtaagccctctttgtcttgtgcggcaaaggcattgaaacttgaaactttttattgagcctaacggattgttttcccctcnnnnnnnnnnnnnnnnnnnnnnnnnnnnnnnnnnnnnn

SEQ ID NO: 396832 - DNA, 642 bp, Oryza sativa
  unsure (1)..(642): unsure at all n locations
acttcgagntcgccccacgcgtccgaaattaccagaggaagcttgtgtaccctttgcacaggaaaccccatgccgaaagacattgaacagatagcattactggttgctgaatgaatcattttcaaccagcttcaaatgtatatctgatatgaagatgagaaaaggactggccttggttgatatcatacgggaggtcactatgtttgtgttcaaaatacagatgccatctgatgtacgcataaagctgattaatgatctggctgatatcgagtaccggctaagctttgctttgcaatggacaagttacagctggggggcgctgatatcaactttcacgggtgctcgcccggctatgggtgctgctgcccactaatttcagcaaggtgatgatcattttgttgcccttcacggccacttcaatctggaaatgacgcggcaatgctcgttattattataagcatgtggttagcgtaaagcttaaaagcatggcgaggagaaattttatctgtagggtttgtctgctcgacgtgctagcttctgggactcgggagtgccttgtaattgaactgtaaccgaattctatcgggngtaaccgtgtnggtnatgcnnnnnnnnnnnnnnnnnnnnnnnnnnnnnnnnnnn

SEQ ID NO: 396833 - DNA, 650 bp, Oryza sativa
  unsure (1)..(650): unsure at all n locations
ccagctggcgaaagggggatgtgctgcaaggcgattaagttgggtaacgccagggttttcccagtcacgacgttgtaaaacgacggccagtgagcgcgcgtaatacgactcactatagggcgaattgggtaccgggccccccctcgaggtcgacccacgcgtccgggcgtcgagctgaagaaaaaattttcgccgatgcatgcatggagtagacatctcacagaaaaaaggcttcatgcatgagagagatgagatctatccgtggacatcgtcatgcatggcgattcggacggctggccaagaaggacacttacacgtggatgcatcttgtttttgttctacgtagatgtgtagatgagatatccaaggatctgaattctaaaaaagttcaggattcagttggatcggagttggtgaggaggaggatatgatcgatcgagcagagctgcagtactcctatgtacagaataatctagctgagattttgggtttgttgggaatggccactgctagttctgcagatttgtgtacacatgccttttttttaaagctttttttttcctagctcctgttgggtcactgaagaatcctgagagctgaagaaagagaaacttggaagtttggtcnnnnnnnnnnnnnnnnnnnnnnnn

SEQ ID NO: 396834 - DNA, 557 bp, Oryza sativa
  unsure (1)..(557): unsure at all n locations
atgtaaaacgacggccnntgagcgcgcgtaatacgactcactatagggcgaattgggtnccgggccccccctcgnggtcgacccacgcgtccgctgaaaatgggcctggtgctcctggagggcaatcttggacatctgagtggctcaagtttgacaacagctccttcaaggaaatcaaagaacgccgagatgaggatcttctagttctccctactgatgctgtgctctttgaggactcatcattcaagatccatgctgaaaagtatgctgaggatcaggatgcatttttcgaagactatgctgaagctcatgccaaactggagcaatcttggggcaaagtttgatccgcccaaagggtatttcactttgaatagctggcgtcacctgccgatgaactgcattttggcgagtgataaacaagataataccttgtttgttcttgctactatagagcatattctggttttactacccatccagaaatttaacttattgtaaatgtgatgctggtgctgtgtattgagctgtgttactgcttgccaaaaaaaaaaaaaaaa

SEQ ID NO: 396835 - DNA, 624 bp, Oryza sativa
  unsure (1)..(624): unsure at all n locations
ctgccgtaaagcatttnggcttcctgtcgacgaaccngggcgatatgacgtggatgagaccgaagtttatggcaaagattactacgacccgagtaagcctatgtaccgctacgactactggggagagcccaagaacaccgagaagaccaagctagagagggaggtggagcttcacaaccagcaggttatcggagacgcgaagaaatggtgcgagatgtcgtacgacgactatgtccggcagaaggtgcggatggaagccgctgaagcccgggagaggcagaggaaggcatcggagccacaggaggaaggacgagaagtatgaggatgagatggaccttgacttgaagaagatgatggatccccaggcgccacacaatcggtgtttcatcacaaaatgacaggttagaatgttaggcacactatgatttagacatagtagctctttttttgggtgttgtatgtgcaaattttgtaggagatgtaacactgttgatgatagaccagcaatatgctttgcctggcatagccctggatgaagccacagttgaagctagactgctagaggctatgctgtttgcttggtcacctgttcaaagctgtnnnnttggcaaaaaaaaaaaaaaa

SEQ ID NO: 396836 - DNA, 560 bp, Oryza sativa
  unsure (1)..(560): unsure at all n locations
agntaccgggccccccctcgaggtcgacccacgcgtccgcaaagaatgtgagccgctgtgggaagcttgctatctgcagagcacaaagtgaagattctaaaggtgggggaggattcttgactggatttcttatagggggcgcaatcttcggaacattgggatatgtctttgctcctcagatcagcaagacgctagattctttattagatgaaaatggacaagacagtgaatctgatgaacatggccttgtaaagccacggtatggtcgatattatgatgaaggtttagagaaaacccgtcaaacactgggcgacaagataagccaactaaacttgggcaattgacaaagctgcctcccggtttgaagcgcgttgctggccatgtcggaaaaggaagctattaatgatggatcagaagtagagacttcttagaacttgtaccttttcaggagttctgtttgctgagtaacaaatctttttgtaaattattcgtttcctttacactgtatgtatatgttaatacacaaacccttnatatgnataaaaaaaaaaaaaaaaaaa

SEQ ID NO: 396837 - DNA, 428 bp, Oryza sativa
  unsure (1)..(428): unsure at all n locations
ccggagctatgcgcgcaaagaacacctatcaggaagctcacccggaaccggggcctggtgatgcagcaggaccagatggtggtcgcggagacgcccgaggagaagcagccaacctccaagcggaggcgcctcttcagagaccaacaatcttgaagcgaaaccccccctgccctagctcgtcggctcgctgtagtttttagcactttagcgtgtgcgcctaccttgctctcgtgttgtatgtagagggagagatctattataagttataatagcccgctgtggttttgcctagtgtctgtacaacagtcgggcgacatagctcatctcgtgctagctcgtgtaacagcttagatgtaactaatgttcttcttttaactctattagaatttngatcaggcngcttcgatttttccaaaaaaaaaaaaaaa

SEQ ID NO: 396838 - DNA, 793 bp, Oryza sativa
gggcagcttactgagaaggaatcgcagattgaatccaccggatcagaattgcatggtgcaaagattcaattggcagagaaacaagctgcactggagaagttagagtgggaggcaaaggtttcaagtacaaaagtcgaagagctccaagtagatgtggcgtctatggatgttgaaatctctgcgttaatgaagctatttagaaaaataacagaaaacgaccgagccccttactcgagggagagagccgatgattcatctttggaatgtgaaccggttcaacttgacgatatggttggtgacatcgacatggagaagatggagcaggaaatgtctgcatacgctacagctctcgctgccgcgaaagacaatcctactgacgagttcttgaaggcagtaacagaggcaagactaagactccaagccttcgtactctaatttggattgaagcactgacatgccctgtactacctgaaggagtagctctattttgatgggccatcatgtgttatgcgggtgtcataatgcatctaaactgacagctcttgcttcctggatctcacatttcaaaaagatccatgtttgcgttctgtcggtctgggtctgtctgatgatgccactgagcttgttattgttgtaactttgtaagctaagaaccgtatgacactatgaccgaacatctgaacatcttagtagatgtcacaccgtgtaccattttagtgaagggtgaacagaaggtgagttcagtttacctgaacgacctaaagattgacgttcaaaaaaaaaaaaaaaaaaa

SEQ ID NO: 396839 - DNA, 929 bp, Oryza sativa
  unsure (1)..(929): unsure at all n locations
cagatatctgttcgaatgcactcaatggtgcctgccaaggtgcactgggatggttcgcggtggcgggactcgctctatacatcgccttcttctccccaggcatggggccagttccatgggcagtgaactccgagatctaccccgaggcataccgtggaatgtgtggtggcatgtcagccactgtcaactgggtatctaacctgattgtggcacaaacattcctctcgatcgtcgggttggttgggaccgccctgaccttcctgatcatcgccggaatagcggtgctggcccttcatcttcgtggctctctacgtgccggagactaaaggcctcagctttgagcaggttgagctcctgtggaaggagagagcatggggaaaccagggcaatcgccagagccttttgggcgctgcaccgtagtgagccagctctcatcctgcttgcccttgctggcaagggtcggtggctggctccctttttaagatggccgtgccaccctcagtttctatcggctctctctagctgggaagttttaggaagatctggatgcagaccaaattttattacgtggtagcgactagatcattgttctgtcacctggcatgtattgtcaatttctcatggtggaaactgggataatttcagcattgggtgggtgaagaatcaggttgtgttggtgtcgaatcttgtatacatgggaaggactgtacgagctatactggttgtgcattgccgtcacaagtgtatagttccggtgctagatgtgccggggagacggttaaaaacctgttatggacagaaacaggaatgaaaattatcgctttaatattcttgctcgttattcctccaccaggtgtatctgacttggcaaaccttgagagttatatgcagatgatgtattttgtaaaaaaaaaaaaaaaannnnnnnn

SEQ ID NO: 396840 - DNA, 608 bp, Oryza sativa
  unsure (1)..(608): unsure at all n locations
tcccgggataatctcaatacaatgcaggttgttggagcagtggggttcatggaccacaggttggacattccaagcgatgttgatcctcattgggcgtcgatgatcgagagttgctgggacagtgacccgcagcgtcgcccttcgttccaagaactgctagatcagctccgagatctgcagaagcaatacaacttgcaggctcaactgcagcgaactgcagctgccaagatgagtgttgacgattgctaacttcaaaatctgaatggtccatgttcagcttgttgccaatatgaggtcccagcaggccagcaaaatgggattcgttaggagtccagtctaaccaaaaagggttctgaattctgaacattttgctactttcctgaagaagctgtggcagcaattgagtttgtgccagaaaaagatggtgcattcgatctgaagcctgaagctctgcaactgcaattcaatcaatcttccagcngtgatgaccgatgaaatttcggcagtcatcgaatacaatgctgtattcaccctattaaccatgtacatgattttttttaaaaagaaaaggttgttgttggtnttctgcaaaaaaaaaaaaaaaaaaa

SEQ ID NO: 396841 - DNA, 614 bp, Oryza sativa
  unsure (1)..(614): unsure at all n locations
ttgccggagaacaaagatgaagtgaccctgtggttcgacgtgccggggctttctccggcagatctgatccgtcgagatcgacgaggacgtgctcgtcatcaagaagaagaagaaggcgagcccaaagagcaactacaatactcctacttccggtgccattgcagatcatcaggaggccaccgccgacgagttcagcggcggcgggatctacgcgcggctgctcctcccggcggggtacagtagagagggtgtccaggcaaagctcacctccggcgagctgaagctcaccattggcaaggtcaaggagagtgtccgcaggaagatcaatgtcgatatctctgtcaagtagaattcagtgagcttccatggaattcatatatggtcatctgtgatgaaggatcggagcaacggtgcaagttatatcttgcctaagattctagctcatatatatcaataactggtccatgatctgatctctctctctctatgtatacatcctttgctgttttcctaaggttgagtatgcttatgtatgcaagctttattccggctgcatcctaataaataaaatgatcatctttgttgtgctttcnnnnnnnnnnnnnnnnnnnnnn

SEQ ID NO: 396842 - DNA, 689 bp, Oryza sativa
  unsure (1)..(689): unsure at all n locations
aagcnatcaccgtngccnccgccgtngccgggtgcgccgtcatcgcggcgcccgacccgccgaggggccgggtttacaccacccacatggcagggaccgtcttcgtctccatcctccagggcgccgccgccgtgctcaccttctcccgcacctcggacttcntcgccgacggcctcaagtcctacgtccgcgaggaggacggcgccgtcatcctgaggatgatcggcgggctcggcgtggccatcttctgcctcgagtggatcgcgctcgccctcgccttcgtgctgaggtactacgcctacgtcgacagggagtncggcggcaaccccctgcgccgcagcgccaaggtcggcggcgaggacggcgccggcacctggccatggccttttcaggtgtgatccatccaagaatggacttctgcgagacaagtagcgggtgtttgagaaggaagaagaactgagaactgtgagttcttggaagaaaaaaaaatagtggtactgtttgatgcattactgcatcttgggatgggatattattcgttcattgggttagatctgtattactgttatatgatgattatgttgtaatgcagctgttgtgcatctatgttatgtgaaattacagttcatcgntcnnnnnnnnnnnnnnnnnnnnnnnnnnnnnnnnnnnnnnnnnnnnnnnnnnnnnnn

SEQ ID NO: 396843 - DNA, 700 bp, Oryza sativa
  unsure (1)..(700): unsure at all n locations
cagcgttagggggnacaccagaatgcacacaagaagagaggagcttcggttggaacacccacttctacttcccggccgcttcgccgccgccacgacgacgacgacgacgacgacggcgattgcccntccctgacatggtcggcatgccccacccaccagatgtcctcccatggcgttgcactcctgccggcntcaccagggctcccatgtcaccgccgccgacatcgccaccgctgctgcgccgccacattacaccgtcgaccatggcgttgcccggcatcgccagcggcgntggtgacagctccggtggggtggcgccaaaggcaaagggaggccggcggcgagaagcagaggcaggttgatctcaacctgaagctctagctagtagcttaagttgttgctcatcatgctgatctgtgctgagacgatgatcgaggtaggtgctgtgcttttggtttgtttcttcagagattcttctttcttttctttcctttctttccttggttatttcttcttcgtcgtcttcctttgagagctagtgtgcgtagtgccacgcaagtattttctactggggtgtacaattaagaataaatccgtggccattgtaaattaattaattatgctgttgccttgatcaaaagtgttgcactctttgcacacaaatgcatatgcctttgttgtaaaaaaaaaaaaaaaaaaa

SEQ ID NO: 396844 - DNA, 831 bp, Oryza sativa
  unsure (1)..(831): unsure at all n locations
gttcgttctcgacgccgctgggtcatgcagccgcgatgtgagcttcaacaccggtggcccggtcgcctgccaaagcatgtctgaagaagcgtgctcccccacattcgcctgcagatcatcgttctctgcatttgtcgctgagaatgctccgtcgtgcgcgctctcggggttctccttcggtggcgtctgcgaacccttgcaacgccgtgttcccgtccccggtcgcttccatgccgagcttctccttcttctgcggccaagaacccggcgagcctgagtcgtcgcctgatggtgacgccttgggcgagaaagctcacttgcgacgcgacggtggtggccctcgtctcgtcctcggctccgaggacagcggaggtcctgagggccgccgtaaagggcgaacccgtcgcgcgccatcggcatgaacagcaggaggaaccacaccatcggcgccggcgagcgcgagcacctggatgtggcggtcgccgagtcggtgatacggtgggcgtcctgcaccaacctgtcgacgacgcactcgctccgggttcgctggtgtgctagcattttgtttatctgtgcaattcaccatgtgtcctgtggctgtgagagtnttcgctagtctcttgccttcctccttgcacctgcgatgcaagctgaaagataagagtgagatgagtgatgagatgagatgagagtgtgagtggtagaatgtaacgtggacctgatgatatataatgctatagtagattaccgagtagtgtgcttgctttctgtttgttgaatgtgttccttatttttggtctcctttgtgcnnnnnnnnnnnnnnnnnnnnnn

SEQ ID NO: 396845 - DNA, 529 bp, Oryza sativa
  unsure (1)..(529): unsure at all n locations
gcgaagtgggaggggctccgtgactgcgaggggtggccgttcgggctgtgccgcctccccggccccgccgtcctgccgctgccgccgctgcccagcacgccggccgactcgtggcagtggcgcaagtgcagcagcaacctcgccgggagcccggctccagcttacagttacaagactactccgagtaggagcagcagctgaactttgtcgaagctattagccaagacgaacctttttaaccgtccattctagcaagcggcaacgctgcggcgggcatgcgacgatgaatgcgagattttcactcaggtatagttaacctcgttgtgtggagagatcgatatgatgatgtgagagtgtgcttcttgtaatcttgttggtttccgtttggatttttggaacaacatgcaatttggtttgcatgtattggtgtaatcgtgtcgtatactcgtgtactcctgtgtgctgaataactcggatgaaccttgagatttttcagagctgcaaaaaaaanaaaaanaaaaannnnnnn

SEQ ID NO: 396846 - DNA, 712 bp, Oryza sativa
  unsure (1)..(712): unsure at all n locations
anggaggacnacgagctnttcggggatcgtcgtcggtgtccggcggcnagtcggacgactatggggaaggggaggaccanttctcggagggcggcgcnncggcggcggcggcnttggaccagatggagcaccgccggttcgcgccgcagccgctgcggcngttgaactcggacagcatctacgacatgtcgtccatgacggagcagctcccagccaggaaagggttgtccaggtactacgaggggaagtcccagtcgttcgcgtgcatgtcggaggtgaggtgcctggaggatctgcgcaagaaggagaagccatacaagtcgaagatcaagtcgtgcaaacactacgccgcgctgggagggatcgccaagacgcagtcgtcgagttcttgcgcgaatctgagcatgatgggggcgggcggattcagggctcccccgatccctgtaaacaagaacggctaccatcagtagtagcgactctgtagcgtagccgcgcggtagattttgttcttgaggtcttttctcccctacctctatttttggggattttgttcgcaggcgcattagcctgtgaatgaatgagcttaattacgaggcgtttcgtgatctgcagcagtcatagtaaggagggttgttcttgttgatgtttgaaaaacgatcgttttgtgtactgtaaatacggagcagaggttaaaagtaaaaaaaaaaaaaaa

SEQ ID NO: 396847 - DNA, 732 bp, Oryza sativa
  unsure (1)..(732): unsure at all n locations
aggagntaaaagacaggaagtcatcaggtaaaaaggtgccaaagggtaaaggngaatcagcagaagtaggtctacccagtaaggacgagctgaggaaaaccataactgaaatccttaaaaaagttgatttcaacacggctactttcagtgacattcttaaaaagcttgaggatcgctacaagattgacctgacaccacgaaagtcagctatcaaaatcatgatccaagaggagctaaccaggctgtcgaaagaagacgacgatgaggatgaggacgaggatggaaatgaagacgctgagaagaaaaaaccacaacatcaagccaaggaggtggtggcctgagctgagcattggtgaaacctcgtaggtttagcacccgctgttaattattatccgctgttaattattattttgtacctgcatgtatgccgaaccttgtgcttgcatcatgggcagcccccatgttaattattgttaatccgtgtccacagatagccaaaaaccatatccctgtttggtaatgtcaaaaacaaggttcgcttaggcagccctacacctgtagctgacttgggaggcaatttcttaggtaactgttgatgtccaaaaactctgcaatgggatgtggcagagcatcatgtaatgaatcatgttcgtcataggtttgaataacaagtggacgtattaggctgtaaaaaaaaaaaaaaaaaannnnnnnnnnnnnnnnnnnnnnnnn

SEQ ID NO: 396848 - DNA, 608 bp, Oryza sativa
  unsure (1)..(608): unsure at all n locations
cagttnaagatgntgnangnagnccagaaaaaatcntngnatgataaagatgtganggtaactgcaacctgcatacgagtcccngtgacgcgtgcacatgctgaaagtgtgaatctacagtttgnnaagccacttgatgaggatactgcaagggaaatcttgagggcagctgaaggtgttnccattattgatgaccgtgntnccaatcgcttccccacacctcttgaggtatcggataaagatgatgtagcagtgggtagaattcgtcaggatttgtcgcaaagatgataacaaagggctggacatatttgtttgtggagatcaaatacgtaaaggtgctgcactcaatgctgtgcagattgctgaaatgctactcaagtgattttcttntctgtacctttctctccttgcccctctttgctctagtcattgtttgacggatgtactctggttagtatgagatcaattttgatcatcttttgtaatctatattcctagtgaaataaatgtaaaacggttttgctctatcttctgcacaagtgtagaagaaatctgaaattgggaaattggngtgtggccnttgttcnnnnnnnnnnnnnnnnnnnnnn

SEQ ID NO: 396849 - DNA, 579 bp, Oryza sativa
  unsure (1)..(579): unsure at all n locations
ataaagatgctaatgtaccaagcatacggagggantatgctgaattgcagagtttgtatcccaaccttgcttcctttgtgancggaattgagncccagcatccatgtggatcanccttcaagagagcttagagttcattagtgatgataaggcttgcnccctggaatccaagatcaagaagcagaagatagcggaagtgagaatgcagctccgtctagcagacacgaagaaggaagtagccaatgctttgttaggattgctggactaaaacattgcggtgctgacatcctttttgtgcgatggttgtattgaagattcaagttgcagaagatttttggcttgtggagctaagggatatgacgtgacgagttgagctactgggttttctgtctctggttctcgagagctattctgtgaacggttgtttatgtgattagatggtagtatccctttaatctatgagttagcaattggagctgatgacagtttaattaactcctgtatctatgatggcatttggctttaattaggaggtgtgcctaattaagggggttctatnnnnnnnnnnnnnnnnnnnnn

SEQ ID NO: 396850 - DNA, 566 bp, Oryza sativa
  unsure (1)..(566): unsure at all n locations
ntgtaaaacgacggccngtgagcgcgcgtaatacgactcactatagggcgaattgggtaccgggccccccctcgaggtcgacccacgcgtccgagatgatcggatcacgatgatgggttgtgggcttctcccgcgcaattcgatccggggaatcgcaaccaacttcaccaacgtggtgaacacgcgcgagacagcgtgaaataaaggagccagcgtggatgagggccggtgcgtctggtttagtccaaatcccacagcctggtgttatatgaaaattagtttgttatcctccggtgtaaagtgaaagtatccgtcgaacccggtgtaaagtgaaaacagtgtcaatctacccggtgcaaagtgcaatttactcttaaaattacagttttcttattctctaaatttatcacaaatgtactgtaatttttgttttcaatggaatgcaactgaattaagattgtcgacatgctttttctttttgattgttgacaggctttgttttgtttatttgagctaaacctgcngatatttcttgnnntnnnnnnnnnnnnnnnnnnnnnnnnnnn

SEQ ID NO: 396851 - DNA, 1009 bp, Oryza sativa
  unsure (1)..(1009): unsure at all n locations
cttatttacgagtactctcaaaaaggttcactcaagaatcaccttcatgatcctcaaagcaaaggttacacatcattgtcttggatctacagggtccaaattgctcttgatgcggctagaggacttgaatacattcatgagcatacaaaggatcattatgttcacagggacatcaaatcgagtaacatcttgctcgatgaatccttcagagcaaagatttcagattttggtcttgcaaaactggtagtgaagtcaactgatgcagaggcttctgtcacaaaagttgtgggtacatttggttacttggcccctgaatacttgcgcgatggcctggcaactccgaaaaatgatgtttatgcttttggagtagtactttttgagttaatatctggaaaggaggcaattacaaggcctgatggattgaccganggatcaaactcagaaaggcgttccttggcatcagttatgttgagtgcactaaagaattgtcgtaactcaatgtatatggggagcctgaaagactgcattgaccctaatctaatggacctgtatccacatgactgtgtatacaagatggccatgctagcgaaacagtgcgtggaggaagatcctgttcttcggccagacatgaagcaggcagtaatcacgtatcgcaaatactgctgtcgtcgatcgagtgggaagcgacgctagctgggaacagccaagtgttcagtggtcttgtggctgggaggtgatcctgtaagattggcctggttgctacggtgctatcccatgcgctcttcggtgatctccttccctgctccactagaggcgttttcccctgtaaccttctcctgcattttgctggtttcttgcccagttgagcagttttctgcatcttcttttcaaagtatctaccacagtgcaatatatttcttggtgggtgatatgtaaccatgtatgtataccaaatgtgccttgcaagttctaatgcaatgatcttgcnccaaaaaaaaaaaaaaaaaaa

SEQ ID NO: 396852 - DNA, 725 bp, Oryza sativa
  unsure (1)..(725): unsure at all n locations
anacagcttattggagngccaactggggngtattatgatgctatattatattttgggataatagacatacttcaagattatgatatcagcaaaaagctcgagcatgcatacaaatctttccagtatgacccaacctcaatatcagcggtggacccaaggcagtactctagacgttttaaagattttatatacaaagcatttcaagaagacaggctagatagctgaaaatgtgttgaagctcaagaaacctctgcctccaggtgtagatgaactttaaactgtccaaagaaagatcaggctgtcacaccatgcaaaatgcagttgggcactctacttgtgtgctgtcaattgtatgtatgaaaatggatggcagcttcagtggaagtgatcttggtggtagagctgcttgaactcatggttttccaacagaggtagtctggctgtagcgtaaatataaatagctttatacacacatatatagagctcactaatattttgtagggtagatgttaactcaatgattcaacttacagataggaaatttgtagccatgcacaaaagtgcgcaagccagtccggagttgtaaatgtttttacctgagggtaacatgtatcaggtactattcttttgtaactgtcttgatcaatacccataggaaatccttggataaacactctaaaaaaannnnnnnnnnnnnnnnnnnnnnnnnnnnnnnnnnnnnnnnn

SEQ ID NO: 396853 - DNA, 386 bp, Oryza sativa
  unsure (1)..(386): unsure at all n locations
gtatttattggaacaccgagaacacatcgatgagtttgaagtttttgatgtgaaaccatttgtcagtcgtcttttaggcatgggagactggtcggggtttatggacaagattcatgaagtagtacccactgatcaacaacctgagcttttgcagaagctgtctgaaggaaccttcactctgagacttatgtatgagcagttccagaacatcttgaaaatgggtcctattggccaggttttctcaatgttgcctggatttagttctggaattgatgccaaaggggacatgagaagggaaagcccaagctaagattaaaccggtacatgacggatgatggattccatgacagatggagagcttganagcacaatccctaaattgatga

SEQ ID NO: 396854 - DNA, 712 bp, Oryza sativa
  unsure (1)..(712): unsure at all n locations
aaattggccgttaatttaattgttttcccaaaaccctcctttccccgatgtttgatcctgattatgaagtttggataccccgtaaacatcgggtccctttttcaancggcttacacttcctgtttccagagtgaaactgacgcngtttcctcttgtcatgcgtgctcacgagggcggtttggaatactaatctccgtcttctngaggtgaagtaatccnccctggagtagaagatgactgagctggagagncgtctgaaggcggagttcaagaaagtgaatgagcagcaatctgacttgggggttggatatgcgaactaccagtctccttacccaggcataaagaggagcattccgtggtgctgaggttggtcaggttgccacagacgaagatggtggtggcatgccattgccgggcgctcatggaacctgtggggcatgtggcatgccattgccgggcgctcatggaacctgtggggcaaacatgccccatcaagccactagctagtgtcatgcttgctacccaaccattgcaatatggtgttggctataattcttcttgtcacatcccacaagtttggatgataaataaaacttgggaaatgatgtacgaactaaaatgaacaagtacttttgcttataattttaaacttgtntgtttgtgcnnnnnnnnnnnnnnnnnnnnnnnnnnnnnnnnnnnnnnnnnnnnnnnn

SEQ ID NO: 396855 - DNA, 481 bp, Oryza sativa
tggatggatccccactctccagcaatggcggcaaggttgtacttcccctatccttagcagcgatgacgtccgccacgaagtgagaaggaagccgagcgcggcccggcgatggagcggccaaggaagccggcggcgacagctgcggcgccggccggatctggagacgtcggcggcagcggcggctcgggttcttcctgcaatggcggcgactgacagcaacgttctgtctgcttctttcgatccagaaatagaaggccattgcagtgtctagaacgcggaattggtcaactaaaaattcatgtgactgtgaaacttgacgagaaaccagtggtgctgaaccaatctgtagaactttctttactgctttcatcgtcaccgctatgtggacagtcttgtatggttattatattgttgcaaaatgtacaaaacagatacttgaatccaaacggttcacattaaaaagcaaaaaaaaaaaaaaaaa

SEQ ID NO: 396856 - DNA, 328 bp, Oryza sativa
  unsure (1)..(328): unsure at all n locations
cctagctgacgccatcatcgactccttccataacgttagctagacgnggattcaggtcnctgctattgtggttaatccttcaatatgctgggatttttggttccttccagcttgagttcttagccnggattgtatatccggcgctacgtaatttggagataataatgaattttgtctgtgcaacaaactttgcatatgctttgtcgaatgtacactggcactatgttagaagcttgaaatatcgaattgaataataatgagnctngcnataagccnnnnnnnnnnnnnnnnnnnnnnnnnnnnnnnnnnnnnnnnnnnnnnnnnnnnn

SEQ ID NO: 396857 - DNA, 786 bp, Oryza sativa
  unsure (1)..(786): unsure at all n locations
cgcattggtggtggagtttttcctgtatcaaagaccctgattaccttgttaatggggagtatcgtgtcgacaagggggcagcaccaaaaatgttgaattgcttaatgtacaagctttgttattaccgttttggagaactgaccacagaatatggaaaacctccaggatacgatcgagtacgaggagtggagattggcaacaaagacattaagcttgagtacttggaggaggcttccacaacttcgaactggatagtgcgcatatacaaggtcaaacccccgaagaataggtcttgaggagaggaatcatctcttggttagtatctggtgctattaccttgaggtacattgtgtcaagtcaaaacgtattggagttcctacaggagacgggcaattgatttgaaaatctgcatcagctgcccccaagtgcgatcttttgttttggtgagactgacggaagtagaccataggtcagtttgaagtaacgatcatccgtcttcccctatatcattttgttagatgtaatcaggtgccattcagaactagcaattgcgacgaccgagtactttttgattgctgagcatggtatgacagtactccagatgtttttgtaagcacaacagcttatttgcgtagtaactttagatcgggttacacgggacacttgcaattttctggtgttgaagacaacaatgaataacttaactgtggttgctctgttttcctcnnnnnnnnnnnnnnnnnnnnnnnnnnnnnnnnnnnnnnnnnnnnnnnnnnnnnnnnnnnn

SEQ ID NO: 396858 - DNA, 637 bp, Oryza sativa
  unsure (1)..(637): unsure at all n locations
ccaagctaagattaaccgtacatgccgatgatggttccctgccagatggagaccttgaccagcacaaaccctaaattgntggactgaatccgcgtattcttccggattgctccggggatctggcccgacctgtcagagatgttgtcgacatggctcgaagagtacaagcggcttgctaaaatctggagccaagatgaaagggctccaagataccaaagaaaggagaaatgagtgcactgtccccgcaacatgaacgttcagcacatgagccaaagttctcccgcccgcagatgctgaagcagataggcggcatgggtggcctgcaatctttgatgaaacaaatgggctcaaaagaaatgggtggcatgtttggaggcatgggtggtgataagtaaacagatcctgattgcatttgacaaatcgtcagagatatggctgtagacagattgttcaccagggtgctaaatggagagttttgaagatgatactgactgctgcaattatgttaccagatgaggatacacatgcaccccgatgtaaaatttgtttatcataggcaaatcgtagctccccaaagttcttaccgagattttatttatagaatctgtttgggaagaaaaaaaaaannaanaaaaaa

SEQ ID NO: 396859 - DNA, 765 bp, Oryza sativa
  unsure (1)..(765): unsure at all n locations
ccgaggattgcccccagaactgatctaaccagaccagggctccactccagggnagcatgctatccggcattgctccctttcaacggcatcgcagcagttgctggtggatacagcaaggttggtnccgttcaatatggtgtttccaaggatgtactagngttttagtcaggcagttgtggaattgctccatagatgagcaagatgggaatgccggagcatggctttgtgttgtgccccatccacccagatataaggctggcaagggaattggtcgcatctggtcatggatgcaggcgaaggttgaagaaaggagaagggaaactccctattccatctcaggcggccattgtccatttgaaatggcagtgagctcgcgatggtgaaagaggaaaagagggagagaaagttcatggtggaatttctcgcactttatttgttgtggagaaaaggagaaaatgtgaataacagcactaggctgggcttgtgtacatacctgcaacccttgatttttttttcttgttttcttgctagaagctgttgcttcttgtgtaaacctgcaaaagcatactccgaaaatgaatcattcgccaaaaaattgagacggcggattatttggtagaatgttatgctagctatccaaagtttaatcttgttgaaatgaggaagcaaaatatgctagtgatatttgagcctccagcccagttaaacaagcaaacaaaagtcaatagaaagagcaatttatttgatgtaaaaaaaaaaaaaaaa

SEQ ID NO: 396860 - DNA, 645 bp, Oryza sativa
aaacgaatcttttactggagaacatgaagagcacaagtaggtcaactggtgtcgaagggacggatcataaatgtgtcgtcttcggggcacatttttgacctatcctgaagggatatgtttcgatcgtgtaaaagatctttcgagattctccacttatattgcttacggccagtccaagcttgccaacattttgcactctaccgagcttgcacgaattctgaagggagatggtgtgaacatttcagcaaatgcgatccatcccggttttgttggaaccaacctattcaagaactggactatggctaatgctgtggtgaacaccattggaagaatcgtatgtaaaactgtagaacagggtgctgcaacgacatgttatgtggcattacatcctcaagttactggaataagtgggaagtacttcagcaactgcaatttagagaccccaagctcacaggcttcaaatgcagagttggccaagaaactatgggaatttagctccaacattgtgtcggctgccaaactgtagtttgagttattcatatatgcatgcgctacattttatttcgtgtaagccgaacataaaattttcatagaaagtctacaaataaagagagtgtagttcctcccaaaaaaaaaaaaaaaaaa

SEQ ID NO: 396861 - DNA, 673 bp, Oryza sativa
  unsure (1)..(673): unsure at all n locations
ttnccnanatttntcacncatcncncgaacacccacnanngatgacccnagtcncacccgncganaagnttaacccaanccacnancggcctccngtttntttgcnagctcnntgctcttcccctctcttnnaaccttntnctcntnctaacacatcctcgtntcgtcatcnccattgncgncgtcgaccaanggccttggntctcctcttcgcggtgctcttcgcgctcttgccgncgacggcgnnccgtganagttgctggaggannaggccntntgagctnggncggcctcgcgcctgctctccgcgccgncccaacgcngcggccgccgtcgcccccgggntcnttgngccttggccgcggtcgtctcgcccctggccttcctcgcgcattgagatgagattcgacccctgagagggcgcagcgggtcgtttgcggaatctgttgggacgggaatcctgtggtttggatttccgttgcagcggtagcatttggtgtttatctgaggagattattgctgtacgtttctatagttattttaggcgtgtttgttctagtccgttatggaggtgttgtgtactgccgatctctcttttgcctgtataagagaggaatatggttttgaataatacaattcatttactattcttttaaaaaaaaaaaaaaaaaaa

SEQ ID NO: 396862 - DNA, 983 bp, Oryza sativa
ctccatttgaataagaacatgctaaaacatgtaacatatccatccaatcctcctccactaggatctcttggcgatgcagctgttttgccttttgaaaaactacgagttcttctcttaggatctaaccagatagatgaggtcctttctgtggattcacttaacctctttccgagtttaacagatgtcaggctttctgataatcctgtagctgaccctgccaagggcggcgtgcctcgatttgtgcttatcgcccgactaggaaaagttaaaatactgaatggtagtgagataagtccacgtgagcgaagggaagcagagatacgatatgttcgccttgttatgggaaaagctgaatcatatgatcctgaagagatcaaacggctgcaccctagatttgctgagctgaaagcctttcatggtattgaggatgagaagccgagttcaaggacttctggtcctcaaaaaatggcttctgggcttataagtatcaccttgaaatgcgtagggccatctatgggtgagaagcaaccattgacaaagaagctgcctcctgcaactactgttggaaagttaaaatctttgtgcgagagcttctttaaactgaaggacgttaaactgagactgtatcttgaggaagagggttgccctatgccgcaattcttcgaggaagacacggtttctctcatggagcttgggatcggcacgggatcgaccattatcgtggacgaagaaagctagcctaatctagtttactggcattctttgtgtgcgttttaatttgatttatttgagtaaatttggtgtgttgagctggagaaaacaaagtccctgtaacatggtacaaatgctcaagtaacttacactcggcagcttaacgccatcaaatgtgtgtgcatgtacgtgctctcgagtctcgactcgaccacattatgagtcatgacagaaagacaatcattcttgctgtttaaaaaaaaaaaaaaaaa

SEQ ID NO: 396863 - DNA, 681 bp, Oryza sativa
  unsure (1)..(681): unsure at all n locations
ancgccgctacagggcgcgtcccattcgccattcagntgcgcaactgttgggaagggcnatcggtncgggcctcttcgctattacgccagctggcgaaagggggatgtgctgcaaggcgattaagttgggtaacgccagggttttcccagtcacgacnttgtaaaacgacggccagtgagcgcgcgtaatacgactcactatagggcgaattgggtaccgggccccccctcgaggtcgacccacgcgtccgcgacgatcctgttcggggcgtgggagttcgacccgacggcgatcgagaacccgttccccaacggggacggcgtcgtcagcatctggcaagggcgcgaggacaagatcgtgcgggtggaggcgcagcgctacgtggcggagaagctcccgtgggtacggtaccacgagcaccccgagggcggccacctcttcatgtgcgccgacgggttgggcgacaagatcgtccgggagctcctgctcggcgaggagccgcgagatttgtagacagatcgagttcgtgtcctgtttcgctacacagagaggggaacacaaactcacagattggggaggaatataggtccaagcggtgcttgtagttgttgatggaataaacctccgatttgctaaactagaaaatcgaaattnnnnnnnnnnnnnnnnnnnnnnnnnnn

SEQ ID NO: 396864 - DNA, 649 bp, Oryza sativa
  unsure (1)..(649): unsure at all n locations
acggaatattgtgaacgagagcaaactatgacagatttgcaaatagtgacccanttggatccattacgtgtttacccgtacagataccgtgcagncagtactgatggatagtcacaaggagaaagaagcaattgcagagctaaccagggcgattgcattcaaagctgacctccacctattgcatcttcgcgcggcgttccacgagcatatcggggatgtccccagcgctcttcgcgactgtcgagccgccctttctctggatccaaatcaccaagaaatgctggagctttcagaaacgcgtgaacagccaagagccctaacaaaaaattgtggtgccacttggtgcattgcataccatgatttttgcgctcataggtgcgcctcatgacagcccttgactccatccaattttcttcatttctttgttaattactgtaatatgatgtattcagcaagaaaggaaaaatgaaagcactagttctttggaagccatcatcgatgaatcttagcactcgatgactgctggcttttgtaaaagtaatgcctaatcactgaactgttgtctcctggaaatgaaaatcaccgtgcatgatgtaactttcaggcccctattttnnnnnnnnnnnnnnnnnnnnnnnnnnnnnnnnnn

SEQ ID NO: 396865 - DNA, 683 bp, Oryza sativa
  unsure (1)..(683): unsure at all n locations
aantcgcnagagcacnatctgaancgtgccagaaatctggcnggtcncgatggcctnaagagcggctgctctggcgagggagctgaagaacatcaaatcggagctgcacttcatgcaggngagatgcggtttgcttgaggnggngaacaagaggctcagagaggggtatgacaatggngttccccctgaagaagatgacctggtgaggctgcaattggaggctctgctcgcggaaaaatctcgactggcgcaggagaacgccaacctgtccagggaaaaccagagcctgatttcagctggtggagtatcatcagctgaccttcccaggacctcgctgaatcttacgaggacgtaatggcggggatgcggctggacttctcgtcgccgctaggcaagatcgacagcgatgaagaaggcgagcgtgagaaccgaagagttgctgtcactccatctgataagttggaagccttggagtcatctgatgagtagataaatctgaggagaataagctgggtcttctccagtggtggatttactgatgagtaacagtatgatcttctatttctgctgttgtatgatgcttcaatttggccactctcggtggccatatttatgtgatcaattccacttcgtaatgttgacaataacaaatgtgtgttctgaatcttaaaaaaaaaaaaaaa

SEQ ID NO: 396866 - DNA, 1175 bp, Oryza sativa
  unsure (1)..(1175): unsure at all n locations
tctaaacatgattcgtagtaaagattggtggataaggagatgaacaaaatggtgcaggagaattctgtttcttgttcaaaaggtacaactgtttgtcagcctacagatgaagaatcaggaggtcctgagcaattgaagcagaagcaggttaattctgattcatctgacaaaaaagattcaccactgcaaactctggaaccgtccaccctccaagcactttatgaactcatctcactggttcacaacagtgctgaaatggttagccaaaacgaaataacagaacctacatctcaggatgcatattgcaagcaaagcaatggaagtaagaagattgctgcagatgattcatctctcttggagaaagatcctattgcaaaaataattttaccactcaaaccgcttggaattgcagagtatgctgcttgccatggcgcgtactttcccaaggactctagaagctcttgtcctcaacatgcttggaccaataggagcagagatactgacaaggaagtttgacgagatggaccaacaagcgacaaaagagcaacagagtgagttttacaagacattctacagcgtgtttgatgaccagtatgctgcgatggatgcacttcttaatggaaaagaaatgttttcctttcaggtattccagagtgtgctgcgccaatatattggggtgcatgctgaccgaccaaagtaatgcacttgtacatgccaattcatggatcatgtagcatgtgggaagcatgtaaatcctagggtttgtcttaaccagaaaattttgtgcccgtggttttggttcaaggttacattggcgggcctcgtggtgcttacaaagggtcagtgagcaaacttcccctcggaatgatgttatttttcaggcaattccttggttctttgaacttataacggtactacccagccaaaagctatattttgggacggagttggtctctccgttccaaaatggaggtacttacagtagtactaaaaagcngtgatcttcgctcgggtggcgggttcaccttttctttttggaaatgtttcaccgtttggaaggtaagaggtactccaccttccattcaaacaaatacaaacgatttaacagcgtacttgtaataccttccaatcaaacaaataccaacgattagtaacagtgcaaaaaaaaaaaaaaa

SEQ ID NO: 396867 - DNA, 684 bp, Oryza sativa
  unsure (1)..(684): unsure at all n locations
anaagcactgtcctccgtttcaacagggggttaggggagcaatgataccctaacaatgtgattatgaatgatcattctatttgnncatggcatatntgtgcaaggtattaaaagtctgttcttctgcaggttcaagaagcaagagtcacataataggaatagcatgtggatcaagcggcggaatattattgantgtatctatattcatttttgcttggcacaaacgcaagaagaggaaacaaacccgagatttgaaaganntcatgcatagttcatcttcaatgcaatcatacagcaaagaccttgagttgggtggttctccccatatattcacttacgaggaacttgaagaggctactgctggatttagtgcctcgagggaacttggtgatggtggttttggaactgtttacaaaggaaagctccgggatgggagagtagttgcagtgaagcgcctttacaagaacaactacagacgagtagagcaattcctaaatgaggtagacattttgtcccgcctacnggcaccagaaccttgttatcctatatggctgcacgtctcgttctagccgtgaccnttctcttggtctatggagtacatcccaaatggggacagttgcagaccatctacatgggaccccgtgcaggagaacgaggcctcacatggcctgtaagaatgacaat

SEQ ID NO: 396868 - DNA, 643 bp, Oryza sativa
  unsure (1)..(643): unsure at all n locations
ccgacccacgcgtccgcaaaattccaaatctccggtccagatcgagcacagctgtacggagcgcctcttctccgggccgccggcgccaactcctccggcagtccggcactccggctctacgctgcagccacaccgccaccgccagccgttccagacgcgcgcgccgccgctgtcccgtcccctccatcgggcgtcgacgcgccgccggaagccgccggtgtcgcgttgcccggcgcctgcagccgtcaacgcgggcgtggcgccagcagccgtcgtctcgcggccgggagaagccgtcgccgggagcacgccatccgtcgggagccgccatcgccgggagcacgccatccgtcgggagccgccgtcgcctggtttgatatctagtgtgctgatttgttgatccatgactaatagttgttaagtggattattttcgaaaaatactgatgtgctgtattgctcaagtgttgatttgtgtttctttgcatttatatatgtatggtatggagtttggactttagagattaactaggaaagaggcgggcacttatattattgaaaggtaagattattgtatgttcagaaattttgtcttatagattaagggcaaattaaagtttggaaaaaaaaaaaaannnnnnnnn

SEQ ID NO: 396869 - DNA, 646 bp, Oryza sativa
attctcaagtccatcccttcattcccttctcttggtgtcgacattactaacgaggatccaaacactagttcgctagctccttgaacacaacaaaatttagtgcttgaggttatatccttgtttatttatggttcctcagaggaccagatcgccaacatctcagtctgcatcagggttggttctatcatgctctaagtttgatgatcaaccaagggagtttagtttcggcaagtttctgttcagaggctgaagttttcccgtgctttctcgagagtgaaatgcccaataataatccagtacgtgtacacgtaccaaaagatgtccaaaaattacgcccccatcaagagcctcctgtgacaggaggtgtgctaataattatgcccggacttgtcgactatctgtcattgtttgagttgcccatccctgttcgtatgtatcatttcacgcttcatctgaaagacatctatcatcaatgtgttgtgttgaaaagaagagatatgtcatctgtgtactttgatattgttatcatctatgtaatgtacttgggatcaggctgttaaaacttttatgaaaactttatgtaattgagaacaagcagttatttatagtacttatgaaacaactctgtttaaaaaaaaaaaaaaaa

SEQ ID NO: 396870 - DNA, 375 bp, Oryza sativa
ggccgcccgcttcggtggccgaccgatcctcctccctggtggcgtcgaggcggcggcgcccttcttggagcctgagccgccggcctccttccggccgtcgcccttcccggatgacgacgacgacgacttcttctgctgctccgtcgccgccgcggagagcttcagcgtctccagcaacgacaccctctccgtcgacggcgagccgttctggttcatccggttcaggaaatccacggcgtttcgcttcttggcaaccccgcccgccgccgcccctgccgaagagctgccgcctccgccgccgcccttcttgtcggacttcttggtcccctcgccggtctccgagagcttcgccgtcttctgattcctcgcgggtcc

SEQ ID NO: 396871 - DNA, 629 bp, Oryza sativa
  unsure (1)..(629): unsure at all n locations
ttgagatctcccgaatgctcccgatgagatcgtcgagttccggtggcgatggtgctnctggagcagcaggacaggtgccaggaacagctttgagatcaaggagaggggagaggagnagaagatctggttcccaaggtctgacagctccaggggtttcaggtctctgccttcctcaccttcccaagatcctttggaactgagaaggggtgtggagtgcattgagcaggaagcccaaggtggtccggcgacgatcaatggcagatacggctatgaagattcagtgtccacaagcagcagcaagttcctcaccaggtgcaagcaagccatcaagaaagcagtgaacaaataaacaattctttgcaccatgatgcagcacatttcaacctgtttattcttcaaatctgtgtgtttaaattcgtgtcaaattgctagttttgttttctgtagctgaataagttagtactcaagtgaggcatacatagctttgcagagttccttctgcaactagtgagacagacatttactgttcatggtcactattatgtgatcatactggcgttgtacaactatttgttgatttatttatgaagagaaactaaattcttnnnnnnnnnnnnnnnnnnnnnnnn

SEQ ID NO: 396872 - DNA, 524 bp, Oryza sativa
  unsure (1)..(524): unsure at all n locations
tggttatgtgaattgtcctactgtccgcctacacatccccactattgtcagcggtgaagctgcgacctatgggcccgaaatatcccagaaagaggctagcggcaacatttcagaagctagttttcagcaaggtagatgtcgcggagctggactcttggtttgttcgagggaacatggtggacgcattcttctctctggaactatatgactacgaagaaaatgctggtatccggctggttgctaagaagctggttgtacaatccaaatagcatcggactaactgcttatgatcctagtgctagaaactaactcttgcactaatttagtggtgttagccagatgtaaataattcaaagtgttgattagatctgaccagcagcacatgttgatcctgaactaggaatttatatgcgctgtaaaatattaaccagtacctctaatgcctttggatgctctgtaataaaatctccaggtgttatttccttgtatttaaaaaaaaaaaaaaaaaannnnnnnnnnnnnnn

SEQ ID NO: 396873 - DNA, 494 bp, Oryza sativa
  unsure (1)..(494): unsure at all n locations
tacgactcactattagggcgaattgggtnccgggccccccctcgaggtcgccccacgcgtccgcatgtcctcgccggactcaaccaccagatgcttcctcctcagctattctgaatatattcttaactagcttaattaatggccatggaaatcgatcaaacgcagtcgatcgaatttacggatgctacgtactggcatgaacaatcttgccgacgatattaagatcggatggaagcatggacgacgatgatgattggggtacggtatagaattattgtagtattgaacaattaggcatttgtatgcgattttttctcctacgtattcatttcaggcacagtgcaaaagcaagctggagccttgatagtactttacaccgtagagagggaatgttggtacaattaaagattactagatatacagaacaataatactttactgtagcccaaaaaaaaaaannnnnnnnnnnnnnnnnnnnnnnnnnnnnnnnnnnn

SEQ ID NO: 396874 - DNA, 701 bp, Oryza sativa
  unsure (1)..(701): unsure at all n locations
cgccgagttcgccgtcccgccgccaccggggaaagaagtttgtaacaaggtagattgggaaaaggacacttcagaggtgaagaatactgataggatggttccagtagcctcatcaacgcttgtgttggcatcaggtgctgcgatcttgcctcatccttctaaggcagcaacaggtggagaagatgcatattttattgcgtgtgatggctggtttggtgtggctgatggagttggccagtggtcatttgaaggtatcaatgcagggctttatgcaagggagctaatggatggttgtaaaaagttcattatggagaatccaaggcgctgcagatattaaacccgaacaagttctttccaaggctgcagatgaagcgcactctcctggttcttccactgttttggttgctcactttgatggccagttcctcaatgcatcgaatattggagactctggatttctggtgataagaaatggagaggtgtaccaaaaatcaaaaccaatggtttatggtttcaactttccactgcaaattgagaagggcgataatcccctgaaacttgtacaagaattatacaattgagctggaggatggtgatgtcattgtaacagcaagtgatggcttttttgncaatgtgtatgagccagaagtagccaccatggtcttggaatcttacaagccgtcctnaaccacggggattnc

SEQ ID NO: 396875 - DNA, 644 bp, Oryza sativa
  unsure (1)..(644): unsure at all n locations
aancgacttgcnctccctngcccgtgaagggggtcggggtccggtcgcgcgttgggggtgcggtctcccccgttcccccgcaactgggggccagaactggcagagcaacgcgtacctcgacggcaaggcgctctcccttcccgcgtcaccgccggcgacggccgctcccctcaccctgcgccgacgtggcgcccgccggctggcagttccggccagaccttccgagggcaggcagttctagattagtttagccaagaggattattatctcttaattcttactagtatcttttgaagtttaattgcacacccaatcggtgtttagtgaggtctagtcgtctagtagatgctgaggttgctgtggctcctgcaagagaaggcaaggcatttcgcgcccgcgtgtcagaggccggatggtttgcagtttgctgctctgctcttagttcagatttgtacagggcatgtggcatgagtaaatgagttgattagttaggtccagagagtggctggctatagtgcgagcggtgatcggtgagccagcctctctgaaaaagagtgagctgtctgtacaaatgcagttgcttgtttgctactcactccatttaaaatatagcaatttatattatttctaaaaaaaaaaaaaaa

SEQ ID NO: 396876 - DNA, 679 bp, Oryza sativa
  unsure (1)..(679): unsure at all n locations
catctgaacgctaccaaccacctcgtcccaaggctgcgccttttccacggaaagatattgacgcaatgaacgatgaaacatttgggtcttctgaattttcaaatgaggatagagcagaggaagaaaggaaacgaagggcatcgtttgaaatgatgaggaaagagcaacataaagcccttcaagaaaagaagaatggtcctgagattgagaaagaaaactccggtcatgatatcatttcactgttacagactccctccgaaaggacagcaaccacagctaaaagtgagaagccagatggatctgcaatttcctcagcttatcaagaagataccactaaaacctcttcagttctatcagcttccactgccagaccacttgtgccgcctggtttttcaaatggcctttgtggaggaaaaagcttcagccacaatcgtccaacatctctcttgaaccaaagggtattgatgcaactagtgagggtaacatattggctacagcacaatttggtggccttgtagagggtaaccagtcagcatcagagatcacagcaagcaaaaataaagagaagggcattcctgataacattgctagtgtagggtaaaccacacacacttccatctggangtggttacatattcagctggatttgcatcgagcattctgnaagggagtggagact

SEQ ID NO: 396877 - DNA, 307 bp, Oryza sativa
  unsure (1)..(307): unsure at all n locations
tgcacttaacaaactacagcagaaattgctggacatttctcaagtttctgcagaagaaccagagttcgttcttcctttctgcgtatgatggtggttctaaaggtactgatgggataaagaccaaatagaagcaaactgttgcatctgtatgttgactgtacttaactgtctcgctgtgttattttaaattttcatgtgattgcacaatgtgtcgatgaacatcgcagcactgtttgctaatgctaatttcatgtagtgctgcagnnnnnnnnnnnnnnnnnnnnnnnnnnnnnnnnnnnnnnnnnnn

SEQ ID NO: 396878 - DNA, 640 bp, Oryza sativa
  unsure (1)..(640): unsure at all n locations
agattcactgtggattacgtgctaccatgaaccgtccacacttcatgtggaaggtcttcttgttttgcctggggagggatgttccgaacaacctcctgacgtggctggtagattcttcgagcctctccgccgaagttcggcaaggagaccaccttctaatgagagatcagatccaggagatggaactgggggaggaatgatgctgcttttaggtccacccccaggcagtagatcaaactcggggagtaattgatcactctgggatgtgaattacatggaaaaggagactgggagtctgctgtcctcttatgtacattgtgcagggctagtgctatagagtgttgctgttaaggggctagtaaaaagtaaataaataatttcccagtttcgaagaaatgtaagtggaaaatatgtgtgatgttcagcagtgtataatatgtctgatgtttagcagtgtgtagtctcattatacaatagaaatgcgaaatacttttgtgtaagagacctaaacgatggtggggtgatagtatgaaatgtaaatgtagcgcccaaaatagaagtcaccctgtacatgttatgttgtatgtggaaggagaatacaggctgaaattnnnnnnnnnnnnnnnnnnnnnnnnnnnnn

SEQ ID NO: 396879 - DNA, 501 bp, Oryza sativa
  unsure (1)..(501): unsure at all n locations
tcgacccacgcgtccgcgatcgaccacttacccgnccgtcgtccgttggtgggctgccgcttccggcgcacngtgctgcagcagctgcccggtcnctcggccggggcaccagagatgcacgcacacgcagtggcagtacggctggcattggttggagcttggttgtgtagtgtagaccggaaatgcaaacatgggagttccggccggaaaccgatcaatcaccgggcgggtagactctgcttcagctgcccggtggccggtgggggttccgggcttcttgctcgtgggattctttcacgaattcttgccggttcatgcagcaaaatttgctgcttttagctagctatctagcttagtgtacgtacgcgcgtatgtatataatgcggagaccaattgattgatttgttcctcgaatggttttgatcaaatgaaggagaacaccattgctcacctcaggcgcgcactgcctgatgtgaccttcttgataaaaaaaaaaaaaaa

SEQ ID NO: 396880 - DNA, 622 bp, Oryza sativa
  unsure (1)..(622): unsure at all n locations
gctggcgaaagggggattttnctgcaaaggcgattnaagttgggtnacgccaggggttttcccagttcacgacgttntaaaacgacggccngtgagcgcgcgtaatacgactcactatagggcgaattgggtnccgggccccccctcgaggtngacccacgcgtccgaagctgcacaatagtctactgatcatactctctaggttcctcacctggctgaaggtgggtggactatgctagttgagataacgcaacctctgttgaggccagaagggccattttttgctacagaaaatttgcgcaattacagaagaaccaagaattgttggatcattcacagaaattgaatcagaagcttgaacaagttttgtccagatggcaaagccggcaacttttgtaacacctttgcagtttcctagatgatactgacggaaaatgtttcagtatgatcgcgttatactgaaatgttgcactatagcaagagtttgctatagtcagtcaacccccgttaccgtggtgtgggtaaaagttaaactgttgtgtgtaacatgtgactgtcgataatgactatccatccattcagttcagtgctttnnnnnnnnnnnnnnnnnnnnnnnnnnnnn

SEQ ID NO: 396881 - DNA, 621 bp, Oryza sativa
gctcctccccatccactgggcgccgccacctcctccttggccaaatccgccgcgcgccgccacctcgctccccatccaccgcgccccgcttccccctctgcctcggcgaaatcctcccacctcctccacacctttcattccaagtcggcggcggcggcgagttcaaagttcgaagctgcaagcccggtggttccctgagccagagaaggtgtgtttcgatttgggaagaagaaggccttgctgtccagtgagcaggcaaccataaaaagggctagcagaggtgctgtaaaagaaaatcaagaacctacaagaaccataaaagagatgattttgtattggttttggaacctcgatacacctacaagaaccttagttgcatctaagttatgtaattattgctatgtacttgaagaactccattatatctaagttggacatttatgtaatagctatttgagctgatggacaactgctatttgtatcagaatactgctattgtgatactggtacttgaaggctacttgatggatgaacaatagttatgaatagtttaatattgtgttatgcatgtgtgtaacttactaaaaatgataatctgtgttgcaaaaaaaaaaaaaaaaa

SEQ ID NO: 396882 - DNA, 360 bp, Oryza sativa
  unsure (1)..(360): unsure at all n locations
gccccgacnacntcgcgcantcgagtccatncccaccagggtccagtcctaccagtacctcgtcggctgcctccagatgcccgccgtctccgtcctcgccgccctccgccttcgccaggaggccatggcgcagccgccgcccgccgacgagccggctccaacgccaccggcggacaagtgatcaccgcatctctcttctcatttttttttctcctgcaaatttgtgttgcagaaacattggtagcccataaaaacgcattgcgttgcttgaatatgatgtatcatcttccaatattacatgttgatgttttgcnnnnnnnnnnnnnnnnnnnnnnnnnnnnnnnnnnnnnnnnnnnnnnn

SEQ ID NO: 396883 - DNA, 553 bp, Oryza sativa
gctcaaggaccaaggtatctcaggagcctgaacagctgggcagcactagcagttcccatgccaatgccaagagtcagtgtttcatcggtagagctagagaagaagataggttttcgaatcaatgtgtcaatggagaagagtcagcctgagttgctgacgtcggtgttagaagcattcgaggagcttggcctcgacgtccttgatgctgacgtgtcgtgcgcagacgacaccgcttttcgtcttgaagcgcttggatccagccaaagtgaagctgcagagacaagcgtggatgagcaaatggttcgtcatgcagtgctgcaagccatcaagaaatgcattgacggatcatcaatttgatccagaatgaattttatgtttcgacttaaattctcatctgccgtagcgcaaacttattgtgatgatactaaatatatctatattttcagttaattttgttgtaaaaattagctatcttttggtgctgaatgaacaagggcggcgtttaatttgtcgtttaaatattcgtgcaaagaaactaaaaaaaaaaaaaaaa

SEQ ID NO: 396884 - DNA, 782 bp, Oryza sativa
  unsure (1)..(782): unsure at all n locations
tgctcagctgagctcgggttgaaccggagagcgggaggagcgagtgagtggtggtggaggccatggcggaggatgaggcggccagcgccaagaagctcttctccgcctccgatgtcgtagggcacgcgtccaggaaggattgctgggtcgtcatccatggcaaggtgtatgatgtgaccaagttcttggaagaccaccctgcgtgggagaggaatgttctccctgcatgcatctggcctctggggatgcccacggaggcatttgaagactgtggggcacagcacatcagcccatcagcatgatgaaacaactacttgattggaagcattcaaggactatgtgcctcctagtgcatcagaggctacaaccattggcggcaatgatgtgccgcccaaacttcagaaggattgccacagaagaaaggacctcctgctcccaacacctttctggacttcctgctccctctgtttgtgctcggccttgcctttgccgcttggtactacctggaccttcattgccaaggcctagtaaatttgggtgaaggtttgaagtattgaacattttactatgccacgtctgcttcagcgacacatggagatatattctggtcagttctaagttttattatgaggtttctggctgtgaattagaaatgtcatcgtattattatttgttaccaaattgtttggctttgcttcgaagttggtaccactcttacatgtaaatggcgatggctgcatcagtaaaatgtatggatggggcnnnnnnnnnnnnnnnnnnnn

SEQ ID NO: 396885 - DNA, 353 bp, Oryza sativa
  unsure (1)..(353): unsure at all n locations
cctggccttcgtggagntgaagtcccggcgacgccgccagttcgccggcggtgatcctcggagggttccagatggagaacatgttgctgcagttcgactcggagaagaagcggctcgggttcgcgaggctgccgttctacacgtcgtgcagtaacttcaatttcaccaagactcagtagataatttacttacttaccactgtttcgcggccatgtaactgtaactgtaatgtcggtgtccggcatgccatatgccctgtatctgtcacccatttaagaactttgcttttaatatatagtccatctaccatctacatgcngtnnnnnnnnnnnnnnnnnnnnnnnnnnnnnnnn

SEQ ID NO: 396886 - DNA, 468 bp, Oryza sativa
  unsure (1)..(468): unsure at all n locations
tcaagatggttcactgntgcgctgatccgtgcaatcaagaaagggcacagcgctggtaggatctggggtgccaccacatgaagtgactgaaaccttgatggattactttgagaagaacaaagatgtagatggagctgagaaatttgtcgaggtattaaagaaggtacagaaggatttgggcacggtggtgtttgaaccactggttcgcacgtatgcagctgctgggaagaagctccctgggatgaggcaccgccttaagatcgaaaatgtggaagtcagcgaggaaaccgccaagctgcttgattctgtctgtattgatcaatgaacgtgccttagatttggattatgtaataacatcaggatgcatgcaaattgacatggttcttctgcaaaacctgtaatagttgctgtaagctgaaatttagcactacatttacttttgttcctcggcaaaaaaaaaaaaaaaaa

SEQ ID NO: 396887 - DNA, 558 bp, Oryza sativa
gggcgagcgatggcggcccaaatcgggaagccttggcgattcgacggctacggccggcgtcggcggcgctggatcggtggcggtggtgattcgtcggcgacagcggacgcgacttttctggatgcaacggcggcgctgcatcggcggtggcggcggcgaatcgtcgccgactgcgggcagcggcctcgatgcgtaggcggcgctgcatcgttggcggcggcgattcgtcggcgggagcccggcaatggttgaagctatgattcgtcggtgacggcgggcggccggggctgcatcgtcggcggcgacggtgaatcgtcggccactgcgggcagcggcctcgatgcgtggcacaacatgcagagtgagggagaaaactgatccataaggtgtgtgttaattggttgctttttgtggttttttattcattgtatgggtattatatatttcccccaataaatcggtggtgatagattgaaattgtcaaaatagttcatacagttgggacaatcagaaccgatagattcaaagacatggttggaaagaaaaaaaaaaaaaaaa

SEQ ID NO: 396888 - DNA, 474 bp, Oryza sativa
  unsure (1)..(474): unsure at all n locations
agcgtgtactaccgctacatgggntcgctcaccacgccgccttgcacgcagggggtggtctggacgattgtcaagagggttcgcaccgtgtcgaggtatcagctcgaccttctcagggaagctgtgcatgatgaaatggagaacaacgcgaggccccttcaggcggtgaacaacagagacatctccattttccggccttaccctcataaacgctattaattagcggcggatttgtcgtctgatgtggattggtagcctaaaataaatatacacatgcagataggatcacacgtagggctcattttgccgttcgttcgatccttctatcacccctccttttcttttgagaggactgatctctcacatttcgatatatagctgagatttttgtaattctttccattactgttcctggttgattggattggaataaaacactgttcattaatttcaaaaaaaaaaaaaaaannnnnn

SEQ ID NO: 396889 - DNA, 463 bp, Oryza sativa
  unsure (1)..(463): unsure at all n locations
gcgtcggcgacgncgtggacccgtcctacgacccggcgtacgcgcggcagctgatggcggcgtgcccgcgcgacgtcgcgccgaccatcgccgtcaacatggaccccatcaccccggccgccttcgacaacgcctactacgccaacctcgccggcggcctcggcctgttcacctccgaccaggagctctacaccgaccgcgcgtcgcggccggcggtgaccccttcgccaagaaccagacgctcttcttcgaggcgttcaaggaggccatggtcaagcttggcagggtcggagtcaagtccgggaagcatggagagatcagaagagactgcacagctttcaactgaacatagttgcatagctgcactgcgacatttgtaagttgtagcaattggggatttgatcgtatattaaaaatgaaatcatttcaaggtaagaatttcataaaaaaaaaaaaaaaanaa

SEQ ID NO: 396890 - DNA, 893 bp, Oryza sativa
  unsure (1)..(893): unsure at all n locations
tctttgttatggccagggaacatgcacccatccattattttcatggatgaaatagactccattggatctgctaggatggagtctggaactggcaacggtgacagtgaagtccagcgaaccatgcttgagcttctgaaccaacttgatggttttgaagcatcaaacaaaataaaggttctgatggcaacaaataggatagacatcttggatcaggcccttctgaggcctggtcgcatagacaggaaaattgaatttcctaatcctaatgaggattcacgctttgatatcttgaagattcattcaagaaaaatgaacttgatgcgtggtattgatctgaaaaagatcgctgaaaagatgaatggggcttcaggagccgagctcaaggcggtctgcacagaagctggaatgtttgctcttcgtgagagaagggtgcatgtaacacaagaggactttgagatggcagtggcgaaggtgatgaagaaagacacggaaaagaacatgtccctacggaagctctggaagtgaagctcacgtcttaatagcctaagctttcactgcatcgctgaagcagcggaagcatgtaactgcatgttgtggacttcttccatgtgctttagaatatgttgttccatggttaactttcagattttaagatgcacctatgataatatgatgttgaaaagtttaatttattgaattggctagatacacgatatgacattgctttattgcaatgtncccctacgctgcctacttgggttgtttgcttgcctgttttgtgatctctcaagtcagaacatttgatttttnnnnnnnnnnnnnnnnnnnnnnnnnnnnnnnnnnnnnnnnnnnnnnnnnnnnnnnnnnnnnnnnnnnnnnnnnnnnnnnnnnnn

SEQ ID NO: 396891 - DNA, 537 bp, Oryza sativa
  unsure (1)..(537): unsure at all n locations
acgataaccattgagactatcaggaaaaggttcaaagtttttgttgaatccagtttgcctgtccattgagtactataatgcaaaggacaaggttaaaaagattgatgctgcaaaacccaattcctgaggtgtttgaagatgtcaaagccattttcgctccatatgcgccaaatgccgcttagagcaatagaaaggaccacatgagtgataaattgcaccaactttagaaaaggctttgctctcaggtgtgactacaaatctgtgattacgaaaccgttgatatagaagagagttttggctcatatgagctacctgcatacccgtaggcaatttgatttgttacttgcaataattaattttgatccccatttcctgctagattaacttttacgagagttggcgtatcgtatgtaatgctgtacttgtaccaatgtatcatttacctcatggacgatgaaactttgtcctcccgccagtttctggtggtataatacagaaagtggaacttccgnnnnnnnnnnnnnnnnnnnnnnnnnn

SEQ ID NO: 396892 - DNA, 649 bp, Oryza sativa
  unsure (1)..(649): unsure at all n locations
ttttttttttttttttnnngcaattttctggttttcttcattcacaaaacacaaagccatatcctcccaaagaggattgggtacatatttatagctgcttgtagcagccatgctagggcaagagggtgctgtcctagagcatcctaacaaactgtcctagagcatctcaacaaactgctgtcctagctgtcctagagcatccaaactgaaagtagagatgctgtcctagaaagctaaaaagcaagaaaagacaccacaagaccaggaccaaccagcccaagacttattcctacacatgaaccattctccagtcctccctccctaggtgtgctccaaatccaagactccctgccatggtcctttgcccagatccaggctgccacgtcttcgattgctcacatctgcacttgatcgtggtcttcggcgacagctgcaagggagaggagacctgacggtggggattgaagcggtgcgatggagatccggcgggagggaagaccagtgcttgctcccgccgagcgtgttctcgactgcgcctcctccttcccacctcaaagaaatcagttcgatttaatctaccacaggtaatgcttcacttgcaatgttacctggcaaatacaacttcttagtgcttttgaaggtagctgct

SEQ ID NO: 396893 - DNA, 582 bp, Oryza sativa
caccatatctgcaggtcctttgggaagccgagctgccaaggcaattggattcattgagaagatgatagaatactcttatgttaatgcaccgttgcagaaagaactgttggcagacgaatggggaacacagcagcattcctgggtgtccccattggcttccgctatcactggctcgactgtttacgttgacaatggactcaatacaatgggggcttgcagttgacagccctacaatatcatcataggtgtggtatggtagatagatgggttttcctgctttcattgcggctttgtttcttgaataaagagcttagttaggtagtataagagctaagggcaggaagaaaaaatagagcatgaatccaatttggtccttgacatttgagtaattcctgcactggggtactcgagcaatactactaggtggttcggaatgattcaagccccagttaccaatgttctgtgctgtatcttgaaatttttaatcattgatactgtgtttcttcgtataaactttgtcaatacagtgaaaatcatgtgcaataataagaatggataatgtttggtaaaaaaaaaaaaaaa

SEQ ID NO: 396894 - DNA, 472 bp, Oryza sativa
  unsure (1)..(472): unsure at all n locations
ccgttgaaccgacggccgccgaacccaccacgccgaaggaaggccctgaacgcggnttgcccnttgaacccgggcggacttggaacatggacgccatccgcgcggcctaccacgaagcagttcggcgggaggctggaggacgccgtcgccgggaaggcgcacggctactacagagacgcgctcctctcgctcgtcgccggcggcaagtgacccggccgatcagccattgctcctccgatctgtcgcctcgccttgtcagtgcgtcgccatcgtgtacgttgttgctgctgctgttgttgttgttgtgtttttgttgcatgcgtggatcgagacttgtaaacttagcatttccgcagcagagctgttggtatggaataaggtcgatttaatttttcttgaaaaaaaaaagaggatcgatttcatttgggacaaaaaaaaaaaaaaaaannnnnnnnnnnnnnnnnnnnnnnnn

SEQ ID NO: 396895 - DNA, 516 bp, Oryza sativa
  unsure (1)..(516): unsure at all n locations
ctactacatagcgctcaccaggaagcaggggttgttcacctccgacatggcgctcatcctggacccccaaactgcggccatcgtcaggcggttcgcgnaggaaaaggccgccttcttcacgnagttcgttacgtccatcgtcaagctgagcaaggtgccgaggcccggcgggaacaaaggcgagatccgccgcaactgcttcaagaccaacagcggagcacgcctcgtggacgtcgtggaggcttcgctgcctctgcttaattcatgtcatgtcgctcatcgatcataatcgagatgaatatctagggtcgacatcattatgccgttgtatgtgtgacctagtacgtccgccccttttgggcccggtcggtcggtctcgccagtatggcctttgtatgtttcgttacggccgtgcgcgcgttaataagatgtactcccgcaccgtaataattatgttgttttaattttttttatctttaagtaaaaaaaaatcttctccaaaaaaaaaaaaaaaaa

SEQ ID NO: 396896 - DNA, 322 bp, Oryza sativa
  unsure (1)..(322): unsure at all n locations
cggtggatccagtggctggccattgaccgaggcaccgcncatgctcaccgccgagcggaggggctgcggcacttgcgcagcggcgccatgatcatcgaggtagctgcctatagctccatcgaccagtgttgtctctgcgtgcatcagcatgctagtaacttaaattaataataagttccaggtctaagccctgtactatgtgtggggcacagtgtctgctttgccaatgtaacgtgatcataataagtcaattcaattcagagagtgaattgcagtttgtgccnnnnnnnnnnnnnnnnnnnnnnnnnnnnnnnnnnnnnnn

SEQ ID NO: 396897 - DNA, 211 bp, Oryza sativa
  unsure (1)..(211): unsure at all n locations
aaattaatagcataaaatggctagaactgcnacagggatagcctagctgtatgacaactgtatgttcttgtcttatgcttgtgtggaatgtgtatgtttgtctgtgagagtgttgtcatgtgtgtgtggttggccggttaatagtgcttgttgcattgatcgcatgcctaatatacttggggtttttctataatccaaaaaaaaaaaaaaa

SEQ ID NO: 396898 - DNA, 933 bp, Oryza sativa
  unsure (1)..(933): unsure at all n locations
gagcgcccttcttctctcgccgcccgtgcagcgggggtcgcccgcgccgccgcaagttccttccaggcggggataggcggctgcgaggtaacgtgctacacaacaccgccccaaaacattttcccctgttggacggcgacttgggcgctccatcgactgctggatggcaccatgtggttgaggcccgtggcaccgtcggctgcccctctgtcgccgacatccatcccatcgccggatctaggagagcttcgcccgaatcctcttctgattcttgcgtgtcggtggtgggtggagagcagcggtaccaacgacatttgaagcacagagggtggcaggattcggagagggaggctacggatctgggggtccgatgggtcgttctccctcctccctaaagnggtggcgaaggatgtcagtaaattgtcgttggcgtcatgcgcggcaggtcagcgccgccaagaaatacaggaggtccgtgtagcggttgtagtcaattgaaatctatttcaggagcacaatgtaccccggtggactcgaagatgatgaaatgcatcatgcgggtgacctggggaaanattgtcactagcgccgggagcggccatgcttgatcctgggctgcccatcctgattcctaactgctaccgccacacagtcctgttctaagctggttgggttggcgagccagccgcctccactacaacattcgtccatcaaagacgatggatcccgcggtgaagaggaggatctgctgatctgaatttctttgatgatttttgttggagtgtttatatcctttgtaacttttttacttttgagtttaagcatgtaatttgtttattgtatagtgtgtccagtggcgaacccagaacaaaaattactggggtccaatatatactaattatctaattattaactaataaaaaaaaaaaaaaa

SEQ ID NO: 396899 - DNA, 703 bp, Oryza sativa
atagagagcccttctaccctggatgatcagcaatggctcacctactgggtcctctactccctgatcaccctctttgagctctcatgctggaaagttctccaatggtttcctctgtggccgtacatgaagctcctcttctgctgttggctggtgctgccaatcttcaacggcgcggcctacatctacgagacccacgtgcgccgctacttcaagatcggccagtacgtgagccccaactacaacgaacggcagcggaaggcgctccagatgatgagcctcgacgcgcgcaagtccgtcgaacgattcatcgagtcgcacggccctgacgcccttcgacaagatcatccgagctgctgaagaggaggcaaagagagcgtaacgatggttaagattgtggtgaactgcaaggcattctttccaacggggagaagtaaatggaattgtgtaatggctgccgtgtattgcaggcttgcagctcacttcacctcgtctgtacttgtgtgtgccgtgtgtctgaaatgttcgttggcttggcaatggcaaagatacctctcctacaaaactggcaagatacttggatacttgagaaaaaggttgccatgcatacaaagaatgaggaatacatctattcgggtgtacagttgtatggaaaatctccgaatctaaaatatgtcttgtctgaacaaaaaaaaaaaaaaaaaaa

SEQ ID NO: 396900 - DNA, 916 bp, Oryza sativa
ggaagctggcacagtgcccattcggtcatcaccactgaagaatatttctgaggggtcactgccacaactagaatcagagtcacattctcctacatcacaggctgcagatagcttactagatgcatctgactcaaagtctgtggctgtggcctcagaggagatgtctcagctaccacttgcatcgcaggcaactactacagaccttgtcagtacaactgcaatgcagccacaatctgagggtatagtggatgagtcattgcagcctcagcatccaccctcttctaccgcacatgattcaccttgtttacaggactctgtgccattggtgccaccaccaccttccccttacctaaataaagaagtaggtcaaatggtatgtggaagctgccgtattcttcttggcttattttagaggtgctggttatgttcactgtacttgttgccagacaatgaactatgtattggaagctcatgaagttggtaaggtgcattgtggacactgtgcgacattattgatgtatccttttggtgcgcctgctgttaagtgctcgttgtgcctctttgtcactgaaattggagagcggaatgttcgccgtcggttatcaatcgagcaacccacaagaactaactcatcaggggctagctgaagcctgatcagttctgggcccatggtacccatccggattccaagaaagcttcaaatgctaatgtggatgaaaggaacagaatgttcgcccttcgtcatgaggtgtgggcatgaaagttcaagatggtatggacaagccaaagtgtacaaagatagcgttttttttttcattgatgtagacaggaaaggtgaccttgttagtacgactagatctcctttgaaagggaaaataaaagaaaaatagttcgattcaaaaaaaaaaaaaaaaaa

SEQ ID NO: 396901 - DNA, 435 bp, Oryza sativa
  unsure (1)..(435): unsure at all n locations
gggtgaatcaggaaacgttagcaccagcatcttcaggagctagcaactccacacgccagaaatccaggaaagcttgttttcggttcaagtgcaaacaacaacaaagaaccgcaaaaggcttccgttaaggatgatgagtctccaaagaaggacgagcccaagttccaagcatttagtgggaagagctactccttgaaacgttagctgggattttgtagccttaacttttggaatgagccatcctaattcacttggtgaatgtgtggggccgtctggctactctagcgtagacaaatgcgtatattcacttttcatactatgaaacactagcatgtatatccaaattaaactatataaatgctttagcgtgatggaaatattgcatttacagttatatttatttacccgcggctaaaaaanaacaacaanaanaaa

SEQ ID NO: 396902 - DNA, 857 bp, Oryza sativa
  unsure (1)..(857): unsure at all n locations
ctcacctacgaggagaaggagaccggcgctgacggacaggaggtgactaaggtggtgcctgctgtcacccctgaggttaaggatgccctagttaagaatataaggaggaggatgacaccacagccacttaagatccgtgctgatgttgagatgaaatgtttccaatttgatggggtgcttcacattaagccaagccatgaggaaggctgaagctgctggtaatgataattgtccagtgaagattaagctagttgcacctccactttatgtgctgaccacacaaactcttgacaaggaccaaggcatttcagttctcactgatgcaattaaagcttgcacagctgagatcgagaagcacaagggaaagttgatagttaaggaagcaccgagagctgtgagtgagagagaagataaactgttcaatgagcacatagaaacccttaacgagcaaaatgcggaggttgatggtgatgctgacagtgaagaggaggaagatacaggaatgggtgacatcgaccttacaaattccggtgtcaacgcggattaaagttccgctatttgatttggatgagttttgttgtatagcaccagccaatcttaagtcgtcctatttgaaaagagttcgttaggttctggtggctgtgacccctttgaattcactgatgcgcgttgtctggggtgtttgcgttttggggttgaggtcgtgttggagaattgctcgagtagcatctaattttttcttgggatcgaaacataattctgttgctatacatcgtctttgattggccacttctattgcccgttgtttttcattcaaaatatcattactgatgattactaaaaaaaaaaaaaaannn

SEQ ID NO: 396903 - DNA, 438 bp, Oryza sativa
  unsure (1)..(438): unsure at all n locations
ccagatgggagaaagntaaccttcaacagaggatcatggaaatggacgaggaaatccaattgctagttggctcaaanctangcgattgctgagtcancgttccaaatggggngcaaccatcgttccgccaacagtgaatncagcaggaggctggctcaatcggatatgcttctctcccacgcgagacatgagcattcacgcttgcaagctgctaaaagctccaggacgctgtcagtggtagtcatcaatgaaggctggagcggaacatgaatcagatcagacacttcttgtgtctgcagcaccacctctctgacgctacaggcctacttttttctgaagatgtagggttaaaaatggtgatgactgcaacgaaacattgtatatgacggtacatccatccaggtgtatttatgatttgtgcaaaaaaaaaaaaaaaaa

SEQ ID NO: 396904 - DNA, 469 bp, Oryza sativa
  unsure (1)..(469): unsure at all n locations
cctttagccctctttgcatgattatagtgnctattttgggatctttcattctttgtgaggttgttaccttgggaagggtgattgggtgcnntaattatttgttgtgggcctgtatgctctcatttggggcaagaaccaaggaccatggcaatcaagttgatcaagatgacaattttgagaagcagaaaacttttgagctaccattgtccacgactaatgttaacgaagcacgtagtcctaatcatatttaactgtcaagttgacagcatcgacaacgaaagcttcaggcaattaatttactacatggtgacttcaatgtatctcttgatattctcggtttcatttccttggtaatggatgtatctggtcaattcaacaaagtctaccaaaatgttcttgtctaatttatgttcaacttataacttattgattnnnnnnnnnnnnnnnnnnnnnnnnnnnnnnnnnnnnn

SEQ ID NO: 396905 - DNA, 380 bp, Oryza sativa
  unsure (1)..(380): unsure at all n locations
acgacaccaagccgatggtcnacgacaacgccgccaacccggtgccgtggatgncgaggttcgcggcgccgatgntgaagatggccgccgtcgaggtgctcaccgggaacgccggcgaggtcaggaaggtcctcttcgccaccaacacggcgagctgataattaagctacaagttctctttctccagcgatcggctggatcattaccacataatatatatattccttgttattttgatctcttaatttgtactccgtagttacctgcatcgattcttgctgttgtaaaactgaattgtaattcactatctttgaatattcagtgatcagttacngtggttaaaaaaaaaaaaaaannnnnnnnnnnnnnnnnnnnnnnnn

SEQ ID NO: 396906 - DNA, 624 bp, Oryza sativa
ggtttctttagtcctaacctacatgcatctttgtgtggaggactggaagtggtggtggaaagccttctttgcttctggttctgtcgccttctacgtcttcctatactcaatcaactacctcgtgttcgaccttaggagcctaagtggaccggtctcagcaacgctctaccttggctattccctgatcatggcccttgccatcatgctgtctactggtgctattggcttcttgctgtccttctacttcgtccattacctcttctcatctgttaagattgactagaggcacccacactcttgctgcaataggatcaacctgagcatggtgatagttatcccttagaaacatatcacacaataatattgaattgaaaagaaaaatgtaaacatggcaacgcccatggcttttggccctgattaattctatcatttagcatagcacagtttctttaagttcatgcttatgttttgtaggcatgtctgcaatgtttcagctatgttttttgactttgtaatactattatgttttgttttctctgggcatttgtgagcagcctttgttggaacactttgacagatattcaatattaaagagctattcgattacaaaaaaaaaaaaaaaaa

SEQ ID NO: 396907 - DNA, 777 bp, Oryza sativa
  unsure (1)..(777): unsure at all n locations
tggagaaggatcaggacaaaaagatgaaggacatcatcgaggacaacaaatcactgtccgatggggagatctttgttccaggtgaaggattcaagagtcttaagctacttcgcttctttgcacctcttgttccaaagctaggcttctgtcacaatgcaatgccagcccttgagatgattgagatgcagtttcaagcgtttgaaggcctatttggcattgacacgctaggaaatctcaaaggggtgcgcctcagagaagctaaaccaagagaagaggataagcaaaccgctcaaataaatgacctgttggtacgagatttgaaagatagcactgagggactgaaggtnatcattgatcacacatttcacttcttgaaaggtcgaaagatattggtggctaccgcaccgaccaatcgttctcagaacctcggtcctttgccatcgagtttatatatattgttacggttcttgcattggttgtatgaacaataaataggggatgccgtagtatgcatctacatcccatggaactcatatatgttgcgtttgtttttgctctgntatgttagtattgctgtgatgtttggttattgctattacagtgttgatgatacctgaagtttgttgggtccttgtttctacataaagggaggaccctcgaagggaccattttataacccatttgttgcatcggttttatgatatttcttgtttgtcctcnnnnnnnnnnnnnnnnnnnnnnnnnnnnnnnnnnnnnnnnnnnnnnnnnnnnnnnnnn

SEQ ID NO: 396908 - DNA, 493 bp, Oryza sativa
  unsure (1)..(493): unsure at all n locations
tttncgccaaggttaagaaagccaagggactacctggaaaaaagctactaccacaacaacctccccatggcggttgacgtccaacgcggactgggcgctgctcaccgggaaggaagccccgcggggcacgtcgtggaagtacgccaagaacgcgacgctgtggaacgtggactttcggcgacgcgctggtgaagctgagcaagctgcccatgccggcggggagcaagggggagatcagggccaagtgcagcgccgtcaacggctaccaccattgacgtcgacgacgatccttccatcgatcgatcgatcgaacgatctcatggatatatgatgcagtagctttgaattaatgtttgactatgatatgatctctgtaactctattgtattttttgttccttcgcccgcgtgagtactagttcaaattcaattcgttgtactgcaaacttttcaaaataattatgatgcaaagtagttcaaaaannnnaaaaaaa

SEQ ID NO: 396909 - DNA, 538 bp, Oryza sativa
  unsure (1)..(538): unsure at all n locations
ttcgtccccgacaacaagggccacaaaatccggccagggatttggaantccggttttctttgcanccgatcccgggnagaaaactgccgcaaagttttggaaggaagggcctccagggattaggattagccaaaagctgcaaaacttggtttggcaagccatccacgtatccaaaaggatggatgggcttaaatctatagcccattttcacgtatcaaaagactgcttcagacgtttactgctaaaagtttgttccaatacttgctgcaatatgcaccgtgtttgtttcattgccgatacattcatacttgtgccactgttgaacttacaagaccaattgagcagaaattttctgaagctatattcctgtcagttctgtagtttgtattcaggtagccaggcccatgggccacaactcgaaacaggtttcggcccaatcggcttgtatatctgattcagtagcactgtggcaattcaccaatcagaactcagaaattcagaactgaacagtttgttttccaaaaaaaaaaaaaaaaaa

SEQ ID NO: 396910 - DNA, 423 bp, Oryza sativa
attgcgggcccatatgatcatgatatatgaacctagattgtggccttccgaccttccccgtactcccctctgcgctctcgccttgagccatggggaggagatgtaacagatgtgtaccttccagtgtatgttagcatgtaagcttctggcataatgtggcttcctgacctgacctgtgtgggtgaaggtcttagatgccaagaggagtggagtgggtgtaccatatacacatcacatggattcatgcgtgtactattgccctaacctgaagaagtggagaacatctcatacttaatgggatttccctccatcaggagtaaaaagagttacagcagatggactccagatttgtacaaaatttcctcatgattctcattatatttttgccttgatgagatgagatgacaccaaaaaaaaaaaaaa

SEQ ID NO: 396911 - DNA, 580 bp, Oryza sativa
  unsure (1)..(580): unsure at all n locations
gttgtttccgtgcttaaggtgtgcttgccgatttcaagcgagagacaatcggcaacttcaacccctcgaaagaagaacgtcatggatgcagagattccaagacagttccagttgatgatttctggagcttcaacaacaagctacgagggcagctcctttcagtctggatataccggtggggtatcagaaataagccacatttctgggcggtgaaaggaaattgctatttgttacatatgctgggagatggtttgatcatttgcttgctccatgtcgttgtgacttaagaatggatgtgtgtatattggatttaaacattttcgtgaagccatctggggacttgagagtggatgtgtgtagattggatttaaacatttttgtgaagctatttgggacactacactagaccaatataagtccaggagtggcgccttcagtagcaaagtactcagaagagtaacttgtatgtctcgtcttctttttcaaataaaaaggggaaacactcttgcnttgctnnnnnnnnnnnnnnnnnnnnnnnnnnnnnnnnnnnnnnnnnnnnnnnnnnnnnnnnnnnnnnnnn

SEQ ID NO: 396912 - DNA, 501 bp, Oryza sativa
  unsure (1)..(501): unsure at all n locations
atcatctctctgcctcatctcaagaagaacaaagcttactatacccaagatcgatataaatttccctctgtatagagcttctttgatttcatttgctagctatgagctaccagactcctcctcctgctgccacagggtacccctacccggcgcaagaagcagggcagcagcagcagcaggcgtaccctgcctacgtggcgccgccgccggccggctacccgaccaaggacggcccgcaggagcagtaccccgccggcgccggcgccggcgatgaccaccagccgcggccaccaccaccaccaccaccacggcgacggattctggaaaggatgctgcgctgcactctgctgctgctgcctcctcgacatgtggcttctgaatgagcaagcatggtggttcatcgatcatgcatggcatgggtgatcatggccatatggatgtgctgtgtgtattggtgtaatatcactagttcataanatactactcccagtattttaattg

SEQ ID NO: 396913 - DNA, 921 bp, Oryza sativa
  unsure (1)..(921): unsure at all n locations
cgtcgggccgccgctccgccgcactcgcagtgtctcgacaacccgccggacctgacgacggccggtggcggcggcgaggccggcgtggtcgtccacgatcttggaggattcgaggcctacgtcaccggcgccgtccattccaggcggaccatcctcttggccaccgacatcttcggattcgaagcgccattgctgaggaaaatagctgataaagttggtctagccggatattacgtcgttgtgcctgatttgttccatggacaaccctacacatttgaccagaaccgtacagaatggctcagtgctcattctccggtaaaagcagctgaagatgctaaaccaatctttgctgctctaagcaaggaagggaaatctattgttggagttggaggttactgttggggcgggaagttcgcagtggaggtagcaaaaactaacgaggttgaagcaattgtcatctcccatcctgcagcggtgactgctgatgacatgaaagaggtcaaatggcccattgagatccttggagctcagaatgacacagttacaccaccaagattagtttaccagtttgttcatgccttgcgtcaaagaactgatcagattgattattttgccaaggtctttcaaggagtgaaccatggcttcgcttgcaggtataacgccagcaacccttttcgaggtcaaaaaagctgagcaagcacttgcgttaatgcttgactggtttcacaaacacttgaaatgaagattgctaattaatcatgctaggaagaccagtgcaattatttcatcgaaataaaactcncgttcncgatataaaagtttgcatatcaagcagccatgcatttgatgtacactattttctttaaattatatggagtgaattaatagtnnnnnnnnnnnnnnnnnnnnnnnnnnnnnnnn

SEQ ID NO: 396914 - DNA, 773 bp, Oryza sativa
  unsure (1)..(773): unsure at all n locations
ggcggccccgggaacaggaccaaccgcgccacgccgcgcggctactggaagaccaccgggaaggaccgcgatgtccaccaccgcggcaagctcgtcgggatgaagaagacgctcgtcttccactccggtagggcgcccaagggccagaggaccaactgggtcatgcacgagtaccgcctcctcgacgccgacggcacccaggatctgcatgtggtgtgtagaatcttccagaaaaatggatctgggccacaaaatggtgcacagtacggtgcgccatacttggaggaagattgggaagaggaggatgatgcaattgagaacatgcctgccagtggcgctttcgctgaaatggctgcagtcacagatactgcagatgagtcgactgaggaagatgggaatttctcccttaaaactaatgatgagcctttacaaacccaagaataccagccagagataactcctgtgaaagctcaaggttcaaatgaggagaccaatggcggtggttacagttgtgatgttttttctctggatgagattttgcaggaacctgaaaatgtctgcaaaaatgaagagcagaatgccattgatgacaagttcactatcgcagagttatctggatacccaaggcaagatgatggctatgtagggcgagaatggtcctgtgaattggattgaccccttcaaatggtgataatacaaacttggcctttgagagcatntaggtacttaggaccatgtcaatggaccacttagcgctgatgggttctttgaca

SEQ ID NO: 396915 - DNA, 537 bp, Oryza sativa
atttaaaaattaatttcataaatgagagcttatctgtgaggcgaattttttaagcctaattaatccataattattaaaagtttactatagcatcatattgtcaaagtcatgttgtaattagacttaaaagatttgtctcgcgaattagtctaaacttatgaaatgggttttgtaattagtggatgtttaatattttaaattagtgtttaaatatctgaggtgaataagtccctgaaaaccaaacagcccctttacgttaggaggatgagggttgacgatagcgaggggtagaagcaatcggcatcagatatagatggagatgttgcatgtttgcagaagtttgtagtactcctgtgattgagatgaggcaggaatgaaactgggaggtagggtcctttgcaagttaatccaagtctagtcttgctgatgcaagtgtgtcctcccactctgccttggtggtgggctctctgtacctggaacacaactgtttgaaaaatggaacatctactgtacacctctacaaaaaaaaaaaaaaaa

SEQ ID NO: 396916 - DNA, 472 bp, Oryza sativa
  unsure (1)..(472): unsure at all n locations
tccgtctgatcgtgatcgaccggcaggccgtcgaccgggggatcgcctacgcgctcatggtcgtcgcgctcgtcgccacctacgcgctccactagctcgatcaatcggctcacgggaggaggatggaggagaagaagaagtcgttccccttcccctaccaacctgcacttcgatcgatcgatgccaaaagtctataactatagaacctgattctttcttattcaattcttctttttagagaaggttaattaattgtgtgtgtgtgtgtgtgagagagagagagagagagagagatcgatggataatttggatatgtacactataccaagtgggttaattaactggatgtactcttctgcatattttggtgttcattggtaacagtttggcattggaatgtctggtaaatcgatgatttacccctttcgcctccnnnnnnnnnnnnnnnnnnnnnnnnnnnnnnnnnnnnnnn

SEQ ID NO: 396917 - DNA, 613 bp, Oryza sativa
  unsure (1)..(613): unsure at all n locations
cttatccatgcgctggaatttgtgaaaatacaatcgggagttacaaatgttcttgccctcaaggacaaaatgagctggctcggggtgtctgtgttccagatcagaagattcagaagtcccaagcttgggtgatgcctgttgtaggggcaagtgttggatttgtcatacttgtgatcatggcaacttgttcgtacttgatccgcgagagaagaaagctgcaacacatcaagcagaaatattttaagctacacggtggtctactgctgtttcaagagatgaattcaaatgaaaggaaatcatttacaattttctcagaagcagagttgcagcatgctacaaacaagtttgacaaaaaaccaaattcttggccatggtggtcatgggcactgtttacaagggacttctcaaggacaacactaaaatagctgtcaagaaatgcatgacaatggatgagccacacaagaaagaatttggtaaagaaatgctaatcctatcctaaataaaccacataaacattggtaaactattaggatgttgccttgaaagtacaagttcctatgctagtatatggnatttatcccaaatggggacgntatccaaactcatccatggg

SEQ ID NO: 396918 - DNA, 369 bp, Oryza sativa
atttccgtgaaataatctaattaagagaaggccctcgtgccgctcagccccagggcggcacgggcggcgaccagacgagcgcgccgccgccaacctcttcctcttctcccctccaccttgccgccgctcgagcgcccgccggcaaagccggggggacgcaatgacagcggcggcgaggctccctacctcctctcgcaggcgcggcggctggggcgatgccatgaccggagagaggtctcgcgggtgcagcggtcgccggcggccagatccggcgtcggtaggaccggatccggtccccacacggctggatcgggcgtctcagccggtggcgacaggaaagaagcgcacgctcaaacgaggagcgcggaa

SEQ ID NO: 396919 - DNA, 854 bp, Oryza sativa
  unsure (1)..(854): unsure at all n locations
ggcctgtgacaaacagttcaaaggaggtgatgttcttgggtgaactagaagaggttctggaggcaacacagcctgcagaattccaaagatgcatggttccactcttccgttcagattgccctgtagccatggaattagctccacattttcccaggtggcagagccggccgctgtttctttggaacaatgaccaccattggaggaacttaattaagcagaattacaaggtgatattaccccattatctttcctgccgcttgagaggaatgcaaggggtcactggaaccaagcagttcgaagcctgacactgaacgtacgcaagatcttctcagatcatgattctgcatttttcggggagtgcacacagaagttcaacgacgatgaactcaagcaggaagaatctaattcgaagcgagaagctttgtggaagcgcttagaggaagcggctgtccccagatccgacaataacaaccctgtgggcacgcctaatggcaaattcagtcaagcagctggctagaaaataccatagcaattacagtcttgcaatcctttaaccccatgtgcgattctctggaacttggtttgtgattttagtgttgaaaattttttgttggtgagttggtttcccccttgttctaggcgggtaggatgtctttggtttcctgagaactgcatgatgaaaaatgtacacatacagaagaatttctgcgagctttgccctatgtgtagtcacattaatcagaattatcatatagttgaataaacagtgttaagtttctgttgcggatacatagttgtgttgcttactgtaatggcagcnnnnnnnnnnnnnnnnnnnnnnnnnnnnnnnnnnn

SEQ ID NO: 396920 - DNA, 691 bp, Oryza sativa
  unsure (1)..(691): unsure at all n locations
cntgcccttacccaagcccaaccatggctacgganttccaaccgttcgacaaccagagcttcctcaagtacntggtncagggaagcgcgcccagcactgcagagtacactgcggctttacccgacggttactccagcttggtataaagccggtgttcctgacagaccgcaccgaggaccagaggacggtcacaaccaacaaccttattaagcagggctactgcaattgggagaagcttgtgctgcagccggttaggcttcagacctcgacgttggcgttcaagactgcgaacgacagaagctggtgaatgatggctacatcatcgtcggcaacattggcgaccagtggaacgacatccgccgctcgccggatggttgccgcacctttaagttccccaaccccatgtactatgtcgactagctagctagctatccatggatatataccttgtttgtgtctgtttcatctactcgttttttgtcatgaatttgcatctagtaattaatctttgacgcgtgcatatgtttgatatgtttgttaatttttcgtgagatgaaaattgaatttgtaataacgcttgtttggcagttggccattgattggtcaatgtactgtgttgagcaagcttgttgtatttttacagaattaataatggaactgatgggccnnnnnnnnnnnnnnnnnnnnnnnn

SEQ ID NO: 396921 - DNA, 705 bp, Oryza sativa
  unsure (1)..(705): unsure at all n locations
ggggatgaaagaggccnaatttgggagtcttggactcgtgcaatggatgcgatacatgttggtgatatggatccggcttatgctgaggttctttcaactggggatgctgaattacttgtaaaattaatggagcaaactggaccagtagttgatcaactttcaaatgaagttgccaaacgaagtcctacatgctgttggacaatttcttgtggaagaaagcttctatgatatagctttgagctggcttcagcagttgactgatctggtaatggacaacggatccggttatcttggaatccccctagatgcgaagaacgacctcttactgggattacacgaagctactgcccattgagttgccctgatgattgggagggggcgacgcccggttcagataatgaagcagctagcttcatcatggcggattgatctgcagcagcttatcagttagggccatcggttgttgacatgagttaatttcatttgttcatttctgcctattttttctctatatatcttgctattagggctataagtattaggtttgacagaacctttgagtggaactgtgttgacatggattggtgttgtacggggaaatatgatgttgatattgtttacctcataacctgtgttggctttcctatttataatttggaggatctcaatttttacattttttactggctcaaaaaaaaaaaaaaa

SEQ ID NO: 396922 - DNA, 600 bp, Oryza sativa
  unsure (1)..(600): unsure at all n locations
tggacacttgggcctctgacgctctncatttcttgnacgtgagcgatgatgaacntttcttcgatgtgatcgagaaggtgtgcggtctcgagaatccggctgcagcggttgaaggagaacatgctatcatcgtcatcgtcaactgacaacaatgtggctgctgagagtggcttgcaaaacgaagttgtgcttgtaccagctgctgagctcaaggataaagcatcttaacccttgcatctgggtccccaatgctttgcttcagttgaccatttgctcataggattttatacatcagaaaatagtacaggaggggctggagtgtagcttgccccgtttatctttgaacttatataccggtgaactggtaccattctatatagggagggacagataattcggattaggttcgtgaggatttgcaaagagttagtttaactgtaatctttcagctggaactttgttcagcgagtaataggtcatggacaattaccaaatgcatgcgtaattctcgctctctgtccacaaatgtagcgaatatttttatttgtgcatgcatgatatactaaactactctaattgacctctaaaaaaaaaaaaaaa

SEQ ID NO: 396923 - DNA, 630 bp, Oryza sativa
  unsure (1)..(630): unsure at all n locations
accactactacaccaacatcgaggtcaaccgcggcttcctccagtcggaccaggagctcaagtcggcgccggagaccnggngnacgacggcgcccatcgtcgaccgcttcgccaccagccaggccgccttcttccgcagcttcgcgcagtccatgatcaacatgggcaacctctcccctgtcactgacccttccctgggtgaggtccggaccaactgcagaagggtcaattaattatcacttcatgtatgacgttggttagtttaaaattgaagtaaccaacgtcatcatgtcaaacataattaattacgtatgtgtcgattattattgttgttattattagcaaaatgagagagatttatttgtgcatagttaattaagcgcgcttgcatttgtgagaaatattagtagtccagcttaattaatcaaggagaagaggatggaaaaaagaatgtacatgtgttcaatttggatgtgtgatcaaggatctattatgatcacgcgcatccagcttaataattggccaattggttgaccaatgtaattgtacgtaccatgattgtgtttgttccaaattaaaggtgcaataaacggtttacatgtttgattccaaaaaaaaaaaaaaaaaann

SEQ ID NO: 396924 - DNA, 774 bp, Oryza sativa
  unsure (1)..(774): unsure at all n locations
ccctatattatntttgaaggcnaaccactagggggtganccagcccagtcccctacatgactcccaatgggactattccgagtnttgctgcgatcttttgagacaattggtcgtgtcctgcatggctgatcctgctgatgggggtgtaacatggagttatgtgcacgagactgccctccctaccccaaactctgggattgatggagttaagatgaaggatgggagagtactcctggcttacaaccaccttctcccagaggaacactaaaagttgcagtccccatggatgatggtgattcatgggaacgatgtaatgacattggaagatactgaaggcatggagttttcatatcctgcagtgatccagaccatggatgatctcatacatatcacgtacacatacaaccggacacaaattaagcatgttgttcttcaacctagcgggaaagtgaggtggtgagtgtgcaactattgggagagttattgctgccaattgcaaggcacgcaagtttttctctatgtgtgtcacatcatattggctggaccgtggtgctaaattggtcatcaatgattctttttttgggtatatttggtcatttgcataatttcttgcaattgtaacctaattaataatctccctgattcctatcaacaatgatattgaacatctgtacatatgccccaaagtttaacataagttgttccgtnnnnnnnnnnnnnnnnnnnnnnnnnnnnnnnnnnnnnnnnnnnnnnnnnnnnnnnnnnnnnnnnnnn

SEQ ID NO: 396925 - DNA, 804 bp, Oryza sativa
  unsure (1)..(804): unsure at all n locations
aaggatccaaaacaaaggcctgtttccttctcatactgttttgcctccagttgattttacttatatccaaactggccgcaattaccacctttactaagatggctgcagccgagccaggaggtgctgctgctcgtcctccacaggctccagctcgccccagagaatccgtgctccgctagctgccccagaatgatggcaatgttccaaccgcctgggggaaaatcttgcagacccagcaaacaatgaccaagctgcagagaaccaggaaccagggggcagcagctgctaatgagaaccagcaagaagtcgatggagaagggaacaggcgcaattggcttggaggcgtctttaaagaggtccaattgattgttgtagggtttgttgcatcacttctccctggctttcagcacaatgactagagctaatcccatcactgcctaatcttccattggcaatgtaactgtttattgtgagataggcgtgaacagaaaaatggtacaaagcagcacaaagaagagtttgttatagaacaaaaaatggtggcgttgttaatattgttttcttccaagtgctattgttatattttgtttctaatgcggcatgagtatatgacttgctgggagttaccactttcactatctagaataatatgactatatatgacttgaagaacttgggtctttccatgggcagaagtatgtatattctgcagccgtcaacagaccgtatgtaaaatgtgattgaactgtttgtatgtgttggttgttgattgtcatgtcctnnnnnnnnnnnnnnnnnnnnnnn

SEQ ID NO: 396926 - DNA, 455 bp, Oryza sativa
ccgggggctctttccactccgactcgtcgctgctagacgacgcgttccaccgccggctatcgtgcggcggcaggccaccggcatgtacgccgccgagttcttccagggattttgccgagtcgatggtcaagatgggcggcgtcggcgtgctcaccggcggcgaaggcgagatcaggaagaagtgctacgtcatcaactaataattaatctacgtattatagcttaattaagcaattaagctcgtaattatgtgtcttaatttttcctgctgattattgattaagtgttccctaattaatcatgcgtgtaactgatgtatgtgtagagtggtggcgacatatcgatctatactagttttacttggattactttgtttgttaattgtattattatgcaatgtaactaagaaattaatcaaataatgaatcaagtattgcacaaaaaaaaaaaaaaaa

SEQ ID NO: 396927 - DNA, 691 bp, Oryza sativa
  unsure (1)..(691): unsure at all n locations
tcntggttgggaacatctagtccatagtgggtcttttcagctaaggagcatatgatcaatttgtccctcccatttctcccttagttccatggtcaggctgccctttccacaggaatcttgcaaattgttaacttaatatgagatttttattgtttggttgcatttgtagtgatgatttcctccaggagcattggctggatgttccttcatgcatgactaattatacctctaaacacttgctactgccagatggactataagaccaatcctgggtcatacacacttgggcatttgatccaaatgtcagcaagtatgagtccataagcgtgaacgaacgaatatgctctttaatgttcatgccatttctctcatgaatgttggttattttttctggatcagtcatcatcatgtaactgtgctcattgaacaatatgcaggagaaagcttatagtgaggaccagaagtacaaagaaggcaagtatatattagagaagcacatgatgctgaaagaaggatagtgattggaaaaccgctgaactaccaagtctgcaaatgcaggcatatgaaaccatgtaaaatatcgctgaatattgggtttcaattctccccaaaattgattatctggcgaggaccatcgtcattaaattgcatttatgaaatataatgtcatgtgaaaaaaaaaaaaaaaaaa

SEQ ID NO: 396928 - DNA, 336 bp, Oryza sativa
  unsure (1)..(336): unsure at all n locations
gcgctcaacntgtgcaaggcgttcgcgatcgtcgaggagacggcgtacaccgtcgtgccgtcgggagtcagcagggtcctctcggagacgacagcntgtcgctgtccttccctgttcagatcgacctgcaggcggcagcatagcagcataggttctctgcaattcttggagttcgttggattcttttgctggggtggtaaaaggtaaaaaaaaaatcgaancaagtgtaattagtttacaccacgctatagatgaaacttttacaaagcacattgcatcattgggaattaattggaacaggaattttnatttttnnnnnnnnnnnnnnnnnnnnnn

SEQ ID NO: 396929 - DNA, 436 bp, Oryza sativa
  unsure (1)..(436): unsure at all n locations
cattgtcaaggggcaaagtgccctnntgggagaacccggagaattacttggtctgggatggcattcacctcaccgaggctgcctaccgttcgatcgcggatggatggctcagcgggccatactgtaccccagctattctgcactgagctgcagcctgcagctgggctattttcatgttcgtaataaattaatactactgtatcacagtatatgttgttatatatggcaggggatactctggaaaataatgctagggtctagggaaatggaatggaaatatgggagccactggtggtttgaatctcattacatgattactcatgtatgcattttcgagcactgccaatgtatttttactccaaaattcaatacatttccnctnatgttgccnnnnnnnnnnnnnnnnnnnnnnnnnnnnnnnnnnnnnnnnnnnnnn

SEQ ID NO: 396930 - DNA, 390 bp, Oryza sativa
  unsure (1)..(390): unsure at all n locations
agatttcnnnaagctgcagacnncgatcttcctccactgcttagtcaccaagtatagatnnnangcgatcaagggaggaacaatggtgcttggtccaggactacgattccctgaaggttttcacatccaacttttcccaaaaccttgaagtaccggggccagatacttctagcccctacacaatatatgtagctcagaagcaacgtttgagatctatattgttgatgattggtacttcgatgtaatttccattaattttctgctgttcccatctagttcactgctgaatgagctatgcttattcttcactttgccataaatgttgtgtgatgtccaaatatcacaaataaatgtagatatgtttgagtcctcttaaaaaaaaaaaaaaaa

SEQ ID NO: 396931 - DNA, 596 bp, Oryza sativa
  unsure (1)..(596): unsure at all n locations
ttgtatcaacacatgcaaactgccaactcagacattcttcaaggatcacatgggtgttgatttgtatatggaaccaaactttgaagactatagctgccagttcaactttggggtgtcacctccacctcttgacaccgacaaagccctaaaggagccctgcttggacatatgcacgaacgcgagaagacggaaagagctcggaactggtagtagcacagatggtttgcaatgcccccaagtttgatgagacgcttttgaaagtttggacagcataactgaagatgggattgagatcctctgcagtactgcgactgacatgtgggccacacttaccaagagcccagatgtcagtgacttctactgcaggagaatactgcagagtctctgaaggatgcctgggcatacagccattgtgcccctttttcagttactgccactcgactnaactgctatagtctgatatcaatactaacactgttgtctcaaacaacaacttatatttttgggatgtaacacaattctacttggaaatcaatttggagagatgntcatgtgaatgatttgtctgcattgctaaaaaaaaataaaaaaaaaaa

SEQ ID NO: 396932 - DNA, 707 bp, Oryza sativa
  unsure (1)..(707): unsure at all n locations
nttacctcgagtggctcgaacgcccgcccggcccgggctcggttggtggtacatctccttcggaagcctgtcgacgatgagccggcggcagatcgccgaaggtgtcccgcggcatgccggcgagcggccggccgttcttgtgggtgctgaggaaggacaaccgcggcgaggctgacgacgtcgccatcgacggcggcgtggtggtggagtggtgcgaccaggtgagggtgctcgggcacccggcggtggggtgcttcgtgacgcactgcgggtggaactcgacgctggagccggtggcgagcggcgtgccggcggtgtgcgtgccgcagtggacggaccagggcaccaacgcgtggctcgtcgccgagcggctcggcgccggcgtcagggccgccgtgagcgaggtcgacggcgtgctggaggccggcgagctgaggcggtgcatcgacgccgccacgtcggaggcggtgcgcgccagcgcggcggcgtggagagagaaggcgcgggcggcggtggccgacggcggctcgtcggagaagaacctgcaggcgtacgttgggaagattcgcgccaattagatgtgtcttattggattttgaattgggatgatgctccaattttatatgtaattagccgaatttcctatgtaattgtggaaatatatgctaatgcatatttgtatttcattttaaaaaaaaaaaaaaaaa

SEQ ID NO: 396933 - DNA, 417 bp, Oryza sativa
  unsure (1)..(417): unsure at all n locations
actgaggaaattgatagttcggtagacccctgtgctgaatttcaatcatgatggtggaacacgatcaagatattaagaacataccctcaccacctgacagcctgagctggcgaaaacttaaactcatggaacagaggtaatattcgattcggcgttacaacacaattttgcaggtagattggcaatgtgaccaggtggttccctttgtagatgcttttgcttctcccgttgtaaaaagggcgaggtgtctctcccctcatctcgatgtttcgttgtgtacattacctttgtattaacttatcagtgtcgcaactgaactactgaaaaagcccattgccctgtacatatctgcagtaccagaatcaaatagagaagttttgaagtgagataaatcaaaaaaaaaaaaannnnnnnnnn

SEQ ID NO: 396934 - DNA, 307 bp, Oryza sativa
  unsure (1)..(307): unsure at all n locations
tcaagaggcactgctccagccccacaaaatttcggattnatccacgagatcgattcggctggccaccagattttgtgtttcgtcagtactagctttccagctgggttaatttgtgatttgtgcatcagtggtgatgaccgatatgatggcgtgatgaattatgctgcattactattgaatgtgtacctcagtacctgtgcatcattgctggctgatcccattgagccggacaataataagaagaaacaataatgctccctgtcgagcagtgttgggctggttcaggcttaaaaaaaaaaaaaaaaaa

SEQ ID NO: 396935 - DNA, 669 bp, Oryza sativa
  unsure (1)..(669): unsure at all n locations
ggccgcatcgcttgccaaggttcgcctccagggattgagcatcaccgatgcttctctttcggtgattgggtactacgggaaggcgatcaccgatctcaccctcgctcgccttcccgcggttggcgagaggggtttttgggtgatggccaacgcccttggcctgcagaagctcaggttcatgagtgtcagctcctgcccgggagtcactgatcttgcgctcgcatcgattgccaagttctgcccgagcttgaagcagctcaacctcaagaaatgcggtcaggtctcggatggccgtctcaaggatttcgcggaatcggcaaaggtcttggagagtttgcagattgaggaatgcaacaaggttactctcatgggcattctggccttcctcctcaactgcagcccgaagtttaaggccctctcactggtcaagtgcaacgngatcaaggacatctgctctgctcccgcgcantttcccctgtgcaagtctctccgatccctcaccatcaaggattgcccaggtttcaccgatgccagcttggccgtggtcggcatgatctgccctcagttggagaatgtcgacttgagtggtctcggtgcagttacagacaacgggctccttccattgatcaagagttccggaaagtgggctgggtccatgtcgactttgaa

SEQ ID NO: 396936 - DNA, 448 bp, Oryza sativa
  unsure (1)..(448): unsure at all n locations
ccaaacacggaacncgttggtgaagacccctcttgcactanctgcctgcaggatattgtaacccggtgaaacggcgaggagattgccgaattgctcccacactttccaccagccttgcgtggacaaatggctcgttggccatgggtccttgccctgtatgtaggcaatgtgtgtaacaacagaaggtaaaaaaaacccctgcattctgcaggctcctccatccttattagaagagactagttgtgcaaatgtttgctcttgatagcacccaccacagagttaattatacacagtagctttgtaatttactgtactactagataggcgtatcttttaccagcgtaaacagaggctgtaaatcagaggatttgacactgtttcttacgctgagtttcaatgtaaaatggaataaaggtttctctgtnnnnnnnnnnnnnnnnnnnnnnnn

SEQ ID NO: 396937 - DNA, 471 bp, Oryza sativa
  unsure (1)..(471): unsure at all n locations
ccatggtgtttttgagaagcgagcgcctgccctccttgacaatcttgtccaagctttcttgatggctccattcttcgtgctactagaggctcttcacaagtttgttgggtacgaaccgtatcctggctttcacgccaaaagtgcaagaagctgattgacgaggccccgcagggaatgggaggacaagaaagcgaagaagatgacgtgaagtgtgatttggaagttggcaacccccatactgcagaggcgtcttaatcacgtggccatttgatattttgattagacggaactgtgttaacatgtcgctgccaacatattgccttatttatgttgtaatatataaagagttttatgcactctcttgtctgatgtgtatacgttactggagaatatagaattctgatgatgattgtgaactgtattagaaaataaatacaggaaagtctttttaaaaaaaaaaaaaaannnnnn

SEQ ID NO: 396938 - DNA, 998 bp, Oryza sativa
  unsure (1)..(998): unsure at all n locations
ctaagcatcgcctccaccctcgcctacgtcgccttcttctccatcggccttggccccatcacgtgggtgtacagctcggagatcttcccgctccaggtgcgcgcgctgggctgctcgctcggcgtcgccgccaaccgcgtcaccagcggcgtcatctccatgaccttcctgtcgctgtccaaggccatcaccatcggccggcagcttcttcctctactccggcatccgccgccgctccgccttgggtgttcttcttaccacccttacctcccggagacccgcggccggacgcttggaggagatgagcaagctgttccgcgacacgcccgccgcctccggaatccagacgacccagcccaaggagaaggaagaaggtggaaatggccgccactaactgatcaaactaaccgcaaaatcaccaaatccctaagggttttcttgcaaaaacgtgtgctgtactggctagctagcaagtagtagcagcaacgtgggaagattcgctgatccggcgttgctggagagcgacggccggcgacgacaaagctgagctccagctcgagacttcttaaaatcatcttcaagtacatggattttaattttgctctttgctttgtccgtaaaagttgtactatgcgatgaagaataccagtatgtagcaaggctgaggttgtgtgtagctactagaagtgtcagtcacgttgttcttgtaagaaatgtttaactgttaattaagcagtattgttgcagtaatcaacaaccttagccagttattcctcgatcgctgcaaggggtcaagcatgactgcatgaggttagaaaaattggcggtggttcgaggattctgccgagtgagtcaagcaagagacagtaaagtgtgaagaaaaaaaaaactatctggcccttttaaaatgttgtcacggctggttgccacggagaaataatgaagttttaaattaagttgttcgactcnnnnnnnnnnnnnnnnnnnnnnnnnnnnnn

SEQ ID NO: 396939 - DNA, 348 bp, Oryza sativa
  unsure (1)..(348): unsure at all n locations
acggctcccnggaaaaaagaccagattcatcgatggatgcatcgccgcactatgctgctgctggctgtgtgacctttgctgcgattagaggaagggaaacagatgagattaaaagatgccttgatattatatgtggatagtatttctacatgggtgtgctgaaaagaggatctttggagcagagaattgaatacaacgaaatgttgttgcagaaagtatacatcccgtaatttctgcgtatattttcgatatatatatagcgcggnataatgaataatgatatgcgtgaagtatctatgtaattcattaattacatagtgtgctcgttttgattaaaaaaaaaaaaaa

SEQ ID NO: 396940 - DNA, 409 bp, Oryza sativa
  unsure (1)..(409): unsure at all n locations
tgttgctggtatgggatcttgagcgcatggaacatccaccgattggcagcataggagtacaatccaagtagcagctaaggtaggagatttgagcaaaatgtgtagtgttcacctgctcttctgcgcaagaaatgtcttttggtacgttctcccccaggtcagagctgttttgttgctggagaccttcccttccaggctccagcgaggggcctatgtagtgttgatatattgtagtaataatttgatagctaaccgtagtccatgtcctttgtttatttnnctttatttaagaaactgacgnctattaaaaatagaggggacatnggcccaatattcaggaaatattattaaggttcaggcaattatattggactnnnnnnnnnnnnnnnnnnnnnnnnnnnnnnnnnnn

SEQ ID NO: 396941 - DNA, 336 bp, Oryza sativa
  unsure (1)..(336): unsure at all n locations
cacacccaagccgctgtcacaagcaaggcatccacacacacacagagaggtagagagggcgagatgaaggtggaggtggtggagacgacgctggtggcgccgagcgaggcgacgccgcagcacgcgctgtggctctccaacctcgacctcgccgtgcccaagacgcacaccccgctggtctactactaccccgcgccctcgccgccgccggggattgcgggggcggaggcggaggcggaggggttcttcgcaccggagaggctgcgggaggcgctggcgagggcgctggtgccgttttacccgctngcggggcggcttngcggcggggcccggcgg

SEQ ID NO: 396942 - DNA, 354 bp, Oryza sativa
  unsure (1)..(354): unsure at all n locations
aaaagctggagctccancgcggtggcggccgcctcgtcccgcgcctcagagaggtcggcgccctctgcacctagcccgcggggccgccacgtgtcccatcgtcgtcttcctccgtcctatcctctctaccatggcttagctccatgccttccatgtacataagctgggttatctccgccatttcagaaatctagagggggtggggtgaaaaattccacgccgaaataatactaaattttgtttgggctcatgtgttcttctggaaatcaaaggggtttgtgagaaaattcctggatctaaatgtgattattaaacagtncttnttnnnnnnnnnnnnnnnnnnnnnnnnnnnnn

SEQ ID NO: 396943 - DNA, 402 bp, Oryza sativa
  unsure (1)..(402): unsure at all n locations
ccgacgccgacaccgcctccatcgctagcctcgatggtacacctcacctcgcctcgccttcaattctctgtcgctcgcaagcaagctaattgtgttcttgtacgtactctactattgctgctgccaatttaattaaaaccaacagattccttcatctccatcaagttcgaggacaacggcaaggctacgtgggacagccagaaggccgccgccgggaggaaaaagacagatacgacgaccacggcggtggtggagcacgtgaagcggggcggcgtaacccggtggcggaagcaggtggtgggggcggcttcttcagctngcgcggtgggaagagggtccggcaacgncaaggcggcggcgtgccaccaactttggggattcgacgggcaagaagacgtcgga

SEQ ID NO: 396944 - DNA, 746 bp, Oryza sativa
ccaatgctgagcctagtcagtcgaatgaagctgctgataatggaattataagacgttatcgtagtatgaaaacaccttgaaactagtgtgccccagttcaagggtaaaactcaggctaaaaatgcgggttgggatcaacaagatggctacgagtagttctgaatctatcaaccagactatcaagtttgagaacagtggtcgtcttgttgagcaccagaagaaccaagcgcatgatgtagcttctaccaagcggtcagacgcagggaagccaagtacagagctcagcagcaatcgaggatttctcaggggtatccgaaatgcatttgcaggctgttcggatgctcgatggaacatgatacttgttgcgggtttcgctattggagtcgctgtggtagcgcttcatataggccaacgccttggattaagccagagagatcagcagcatacctagcctttaggtttgcaggttactgggtttctatgctttttgcaatctggagaaacgtaaacaaactccgatctttggttggtgcagaacatttgatgtatgcgccgttttttttgtgttggttttgtacatattattatcttcggttttggtcgacttttgttctcgccagctagtagtactatgttgacgaatgtagaagaaaacctcaaaaaaaaaagaacaaatgaaaaaaaattgacgatgaaaatttatataattaaccgcttgcattgtactaaaaaaaaaaaaaaaaaaa

SEQ ID NO: 396945 - DNA, 492 bp, Oryza sativa
  unsure (1)..(492): unsure at all n locations
gttccggggaancggccccattttccaggcngaggttgatccgggcaactatgatccattttncctacagagtttgaaaccctatccagccaagatattctagcngtggcccgtttttgggtcaatcctttgctcaaaagaacttcacccggtacatctggaaaggccatcatcaaacgtaggtctgtttcaactttgcaagacagttggtccattatgatgtacaagttttgtcgtgaagaatgtctaggttgaaacttagtgatatctcaccttggaagtgtagccatcaactccgtagattatagaagaatgtgggcaatcaagttgaagttattattgagcgtgttgaattaattaatagaccatatggttcggtctactcttctgcacttcacaaacacggaccagaactatccaagtctatttgaggtacgtaatcaatttgcatttcattttttggacaaaaaaaaaaannnnnnnnnnnnnnnn

SEQ ID NO: 396946 - DNA, 658 bp, Oryza sativa
  unsure (1)..(658): unsure at all n locations
atgggccaccattcatggcntcatcaacacggcctntgcaagcaccntccatgcattcttacctggacactcttgaagcccaagggccaagatgatcttggttggcctgcctgagaagcctcttccagnatcccaaccttcgctttggttggagggggcaagatactagctgggagctgcatggggagcatcagtgaaacgcaggagatgatcgattcgccgccgagcacggggtggccgccgacatcgagctgatcggcgccgacgaggtgaacacggnccatgggagcgtcctcgccaagggcgacgttcaggtaccgcttcgtcgtcgacatcggtcaacaccctcaggtcggattgactagggagctcactgtcactggtctcagctctgtagcataccggacctgcaatcctgcaaagtagtgcaatcttcttgctacaagacatacatatcacctctacttggtgtcaataaatgtagcaaaagtggtacattgttgtactaatctgtgtttaatatagcgttgcaacacacatgtatattgtgtaatggaatggaatgggtcactgactcctatccaagaacgagccatttgcattttgcaataaagcattactgtacttgtacnnnnnnnnnnnnnnnnnnnnnnnnnnn

SEQ ID NO: 396947 - DNA, 578 bp, Oryza sativa
  unsure (1)..(578): unsure at all n locations
catccctgcatatacacgacaatactacttcaaatacaagtacatatggatncctatgttgttgataacaaaggaactacttcgataataaaaagtcttttagttagtctgatataaatttttaccctttaggtgtcattgagatggattcatgagcaaggagtgaccccaatccccaagagctacaacaaggagaggctgcaaacagaatcttgagatattccgactgggagctgaccaaggaagaccgtctcaagatcagccagatcccgcagaaaaagatcgtcacggctgcacgaatgttctctccggatggtgagttcgcgtcggttgatctatcagacatggaaattgtggaggagtaggtccagatgaagatgcctggctgcccctgctgcagtttttttttcacgtttgtatttatgaaaagattcaattaggatttgtatttgaatactaattttatatggctgcctttttaattcgcttcggatgatcggttatcaaataaataatggatgtatcttaaactataccaatataccaatagtttttgttnnnnnnnnnnnnnnnnnnnn

SEQ ID NO: 396948 - DNA, 595 bp, Oryza sativa
  unsure (1)..(595): unsure at all n locations
tcaggggggcccgactgcacgtcaagctggagagatgggaagcgtcgtttncgagattaccaggtgctgatcccaagaactcccggagaacgnggacatgaagaaggcgctgtccgaggtcgaagcccaagctccggagccagaggaatgggggcattgcaagcagatcacaacagtgacgccatgcttctttaatctgtcggctaccccgaaatcaactgcaagatctgaagaggaccaagactttggacaaaacaatgcagcacgcaccattgcgcggtttgttagtgtcaagtcagtatgattctttttttgtgcactatacgccaaattacaagagaattgagagtaatgaaactgtacataatacttgctgcaccgagaagtatagctagttaatttgaatgtgggttggcagtgatagcaaccatgaaagtttctgaagatttaagtttgcctcacacaaaaaacatactgggttgtactttgtactacaaaactaatatccatcccaaacagaaaatgagtgagtatccatttgagcatggctccnnnnnnnnnnnnnnnnnnnnnnnnnnnnnnnnnnnnnnnnnnn

SEQ ID NO: 396949 - DNA, 350 bp, Oryza sativa
  unsure (1)..(350): unsure at all n locations
gaaggacaagttcgcaaagncgttcgtcaagatggcatccgtcgntgtcaagaccggctaccccggcaagatcaggaggcactgcagggtcgtcaactaatcatcatcgggtcaatccgactaatgcaaacccatcgatctatacgttcattcgtttgttttccaggactttgttcttctgatcgattcgacatgacgtactacatttcttggttcttttggccgttggtacggcttgcattatccctctaaaaccaccatgacaatgaactgtacttggataaattcatctctcataataattaatacaagcctcatctcttttttattggtaaaaaaaaaaaaaaaaa

SEQ ID NO: 396950 - DNA, 478 bp, Oryza sativa
ctctaacaccaaggtcagagatgtcaccttttcctttccactatagtcgtcgacctcgaactccacatgagtctcagcctccctcttgtcttccttcagatgttccaactagtaccattaatgctcaatctgatgatccacccgttgctccgctcattgatgatccacttgtgtcatcaccacagtctgctacaccacgatatggtcttcgagatcgcagcaagataatgcctcatcctcgctatatgtgtgcagcaattgatggtgttcaggagcctagtacatatcaagaggctgctgccattcctgagtggcaattggctatgacagaggagcttgctgccttagagcggaacaagaacctgggatattgttccctctttccttgtcatggccatatcccaattacttgacaagtgggtgtttaaggtgtaagactcgctctgatggctctattgagcgctacaaagctcgctta

SEQ ID NO: 396951 - DNA, 722 bp, Oryza sativa
  unsure (1)..(722): unsure at all n locations
gcaaagcagagcagagagagagaaggcctgcgccggcgaactcggagaggaaaaggatgctgcgcggcggcggcaccaccggtggctcgcgacccgcggcgaacaccaccgccgctcgaggccgccgtcttcgccggctccgtcgtcgcggcgagcggcacggacggcaaccacctcaccggagtcgaagggcgcgacggcgttgcaggatccggtggtttcctccatggaagagacctctttcacttttgaattcaaacgagggtctaaaagagctaagaaaacgatgctgcctgaagaatcacataaagggaaaaatgattccacgaagggtttctctaacaaaagaaatctggttcctgcaaagacaccatctgcaaaggaaagaccggagcaaagtggagttcacacattgttcacctggtattgttgccaggctcatgggacttgacaccgtgcctcgccccaagaaaagcttcttgaaccggtgccaaagtggacattcaagttgcaaattatgcagcgggtcctatctggaaggtgatcaagtctatgatgcttcatctgaggatcaaccatgtagcagcagtgctgatggatcttcctgaactcaagggatgttttcgaggtcactgagatggagaataagggagacgtgcattggggtncaatcaggggacgaggagccatgtcccaggangtgataagggtganttggaatt

SEQ ID NO: 396952 - DNA, 241 bp, Oryza sativa
  unsure (1)..(241): unsure at all n locations
caatcttcggcttcgcttgaagccaccgcaatctccccaacttccgaacaaaaaaaaaaaacaaaacaaaaaaatcatcanttacagcgacgntccaccgcctctcctccgntttnaatcccctcgccgcgaacggntcgggcggcggcgggggctagggtttcgcgtttcgaggttttccttctagaagcttccgcgggcggatggccaccgacgagctccactccgccggcgcgccagg

SEQ ID NO: 396953 - DNA, 747 bp, Oryza sativa
cttgacttctatgagtcatcagatagtagtttggatgacagcattgacttcttggcatccttatttggccatggcaggagaattgccagtggtgattcatacaccagagcttacagaaggtacagggagaggcctaggcgtaatgtcacagctagctcggtcgctgcctctgatatccagcatgattcagctaacactcgaaggggacgtgtcagtggtattcgggccatagggaggacttcgcggcggtaccatcctgtggtgactcatgtaaggtcaacacatggcatctaagaaagggagctaccacgggttctgttcattctatccatccgcaagggaggcaaaataacataccgcggcatttgatgcctggttttcagaggatcatcatgttcttccagtacctttttctttgctgagacaggcagcaaccgaggatacaggttggacggagatctctgttagggcactgctcatgcctatatagggcaaaaacagtgctgcttttttccggtgctgccttgcatggattttgtgaatgcccttttcttttccttccattggatcgacgcaaatgggtttttttgtttggcagcgattgctgttccaaaacatgaacatcatgaaaacttattgggcatatttgcttgtcatgtgctgccgttttgtatccatgttctagtggatcgcacgtttgatcctagcgacttattagctattattatcatcaaaaaaaaaaaaaaa

SEQ ID NO: 396954 - DNA, 486 bp, Oryza sativa
  unsure (1)..(486): unsure at all n locations
gcgttcggctccggattcaagtgcaacagcgccgtctggaaggcgctcaggacggtcgacggcggcgccggccgggacgccggcgcgtgggcgcaggacatcgacgcgctgccggtgcacgtgcccaaggtggtgcccatcgtcgacgacgacgacggcgccaatggcggcgacggcgaccgacacgacgcggcgtcgcacgtacgaccggaataagctacatacttaattatgtgtacttgcgtgtaaatcgtcacgagtcatggatggactgaaaaatactgtcgcgtgttgtttcatggacatgaggacatcgtatcgtgtcagggaaggactgataattccttgtgcggcattttgtctaggtatactgattaatcaatcgtgtgtgttaaatgtgtgaaaggttgagtatatacgacaataacttgagtattttctctttgttnnnnnnnnnnnnnnnnnnnnnnnnnnnnnnnnnnnnnn

SEQ ID NO: 396955 - DNA, 374 bp, Oryza sativa
  unsure (1)..(374): unsure at all n locations
ggttttactgaaaactgaaattttgaccgattcccatcagccctggccctgtccagtttcctcaaaaaatgacttgtanctttgaagaatgttgctgttgttactgcacgtcccctgcgtgagtatgctgtatgcagaatacttgaaattattacaccatctgaaggtgaaggagaaatctgaaccttgacatacacaaaaggatactgctatacatccccagaatgtcagtagtaaactgctcagctgtggactactggatgtaaattgtagtctagcagttgcatatatctcctcctttttacctcctttattaaacaaagatcaaacggtctttagtgtgttnnnnnnnnnnnnnnnnnnnnnnnnnnnnn

SEQ ID NO: 396956 - DNA, 310 bp, Oryza sativa
  unsure (1)..(310): unsure at all n locations
cagccgagcaagtntgttgctagaagaaaagccttgtgagttggtaattgatagtagcaagacaatgtgtgggggagcgatcatcgccgacttcgtcccgcccgccggccgtggggacgctgggcggcggagatccgcgacccgaggaagggcgcccgcttctggctcggcacctacgccaccgccgaggaggccgcccgcgcctacnacgtcgcggcgcgcgacattccgcggcgccaaggccaagctcaacttccccccgaccatcggcgccgcgccgcgccaccgncgnccaagaagcgacgcaaag

SEQ ID NO: 396957 - DNA, 406 bp, Oryza sativa
  unsure (1)..(406): unsure at all n locations
cctgttcttgatgtcatctctgcncaagagctcccatgaccaatagnatgaatgatgcatctgcacttggatagttcagatcagttgaagaggctgcctcttctggtgcagccacaagaagtagcaaaaaacagagagagagaggatgatttttagaanactttagagaaggttgctcaaggactaactttgttcaatgttcagagagtnacattcactgactggtgcccgtgtgttttgttttcgtgcgtgttaggaattcagaaatttgatncgtnacaggtggtaggagagctaattgttcctgatatgaaatgttgancatctccctccagttgggcttcgtgcgcgctggagatgtttggagtgttctttgcnnnnnnnnnnnnnnnnnnnnnnnnnnnnn

SEQ ID NO: 396958 - DNA, 371 bp, Oryza sativa
  unsure (1)..(371): unsure at all n locations
caggctgttcggcgccgtcaccaatngccccggcggcgtgctgcccaacatccaccagacgctgctccccaagaagngcggcaaggacaaggccgacatcggatccgcctcccaggagttctaaggatcccctcttgggtccgctactcggaatcaagaaccttgttgctccctgttctttgatccgattcttttccccctcccatcttagtaatatccatcctttgtaggttgttaggttaggttttgatgaacggttggatgatggtgtgatgggtttggtgcttgagaaatcttgttggaatggaatggaatatatgaatgaatgctcgtttctacgccaaaaaaaaaaannnnnnnnnnnnnnnnnn

SEQ ID NO: 396959 - DNA, 439 bp, Oryza sativa
  unsure (1)..(439): unsure at all n locations
tagctccttttcttggtnaaagagggggaatacaaggtggtgttgggtttgcttgtgttgctcagctgacttgatcactgtcggttaatccgttatgacattttgaagatctgcccatgtgatgtgttccctttgctgaagatattgtcgcgatatactagttcggtacgtgttagtgttacacagagttctttctgttcagttcatactacttgtaactgtgtaagcaccaggtcttctgaattactacaattttaccattggtttccctttatagtggagtatgatattnacaactactacgtagaaagatgtaaaagtgagaaacttatgtgaatgttgtacatgcacgtcttataaaaaaatatttatttattttggtcnnnnnnnnnnnnnnnnnnnnnnnnnnnnnnnnnnnnnnnnnnnnnnnnnnnnnnnn

SEQ ID NO: 396960 - DNA, 476 bp, Oryza sativa
caagatagcatgtggctagcttccctgcctcactgcacaccttcttccaatcacaacaccccaccatggacaccttcttttctgctgttcttggtgatcttctcagcaggtctgtatccttcctgatcaacagataccaccagcaacagaaggatgccgaggagaatcaacagcggttacaccgtgtgcttctgcggatcgaagccacagtcgaggaggccgaccggaggtgcatcacaaaccaggcgatgctgctgcagctcaggatgctgagagacgtgatgtacagaggctattacttcctcgatagcttcaggtaccgaaacatccaagcacatgctcaagatgagggttcggtgatcactctcttgggcctgtcccattttcttgtccattaaagcggttttctgcatctccactaggaccatgggaaattcttgtcacaagttctggagaggaagacttcaagagatgct

SEQ ID NO: 396961 - DNA, 496 bp, Oryza sativa
  unsure (1)..(496): unsure at all n locations
ctacagttgcttgatgaaatcaaaatcagagaatcattcccagttaagaacatttggaacaaaaagagaggntgatgtcagatacaaaacaggtgtcatgggtgtaaagcaagcagagcctcgtcttcaactcaaaaagcccagaagggtatcaagaaagaagattaaccagtcaattcttgatgatattgatgatgagctcgacgaagacaactagtttgatgtcaagcagcggtctaggaaacgatgacctaattactttctgatctaacggctacaaacattgggaacctatgtatgtgttgtacatagctggcgtaatctgtagctccaccatgccctttaacttgtatgctgaacagtgaacacttgcaaatagaaatctgtaggcaaaggaaactgtagaaatattttcctgttaatggcgatgagtattttgtttccnnnnnnnnnnnnnnnnnnnnnnnnnnnnnnnnnnnnnnnnnnnnnnnnnnnn

SEQ ID NO: 396962 - DNA, 757 bp, Oryza sativa
  unsure (1)..(757): unsure at all n locations
gggaccctggatctgttggaccaatttcaggcaactcccatgaaccttgggaattncgtgctgaccgccggtaacttncgccgcaatcattcccaggnaaccactgctggttcctgccgagaaagggactgctctttaccacaacccacgacaatccagaccgaagctctcttgcccgtctatgaaggcgaagggaatcaggctgaagacaacctctattgggatacttcaagatcaccggtattccagcagcagcaaagggcaccgtcgaaatcaatgtctgcatggacatcgacgctggcaatgtcctcagggtattcgccggcgtcgtcaagcctcagggccaggctgttccaccgttcattgaggtgaggatgccaacgctagacgatggccatggctggtgcggaacaggctctcgccaagatgtatggcagtacgcttgacctggctactatcccgaagaagctgcatccttgagaaattgcatatcgtcgcatgtagttgtatgactccattatctaaaaaaaatgtagttgtatgactcgtatcatccggtgccgtagttcgtgcatatgtggttcgaccgtgtcatgatggttacttggttcagtagcttgtttgccggactttttacatgtaaacataaagagtgccaatgtcatctctgtacaaaaaatgtgtgtcgcgtgtatagaataaatcaatgttaccggctgttcggnnnnnnnnnnnnnnnnnnnnnnnnnnnnnnnnn

SEQ ID NO: 396963 - DNA, 634 bp, Oryza sativa
  unsure (1)..(634): unsure at all n locations
ttgtattccncatgcctgatggtcntcgtccgggaaagncgcttttatgaaatccgaacaaccttcaggtccctttttgatttccataggatatcttccagggccttttccaacccagggaaccttatagggctggtgaggtcttatcccccgggcgtggcattccaccgactctggagtccccagatcgtctttaagtgaatcttgggcctcaattagccaagcagggaagcccctggtttctaggggccggatttcagggataggggggaaccggggaaaggagtttaatggccattaaccacaacagggatttccacagaattttttttttcctttttaccttatgcctgggcacatggttcgtgaaaatattagccaaggttcgcatgaaaacttggcgttaaggtctcatgaccctcttttgtgttttggaatggtgactctcaagtaccgggtttcatgtgatactcaccctgcatatttgaacagtcagaactcagaatgtacatagactgctgctttcagagctaccgcaattcatcaattcattaatctatgttcgcttgttcnnnnnnnnnnnnnnnnnnnnnnnnnnnnnnnnnnnnnnnnnnnnnnnnnnnnnnnnnnnnnn

SEQ ID NO: 396964 - DNA, 1026 bp, Oryza sativa
  unsure (1)..(1026): unsure at all n locations
ggtggccgccgcggccggnggtcagcctcgggatcgtgttccccgccgagcccgccgagcggcccttctgccgcgagcgccgcatgctggaggccctccccgccgcggccagcagcagggaggaggagcccgaggcgtaccggtaccgcggcggggccttctacatgaccaccgccgaggccgccgacttctactggatggtcgtcttcgtcccgtccgccctcctcttcgccgtctcgtctgcctaccttgtatctggcatatctgttgcatatgctgctccaagaagacatccattgatttgtgtcgtcgagaataacttctgtgcttctaaaagaggtggtgtgcgttgcttggctatactaaatgcagtttttgctgtcatatttggtctcatggcaattattcttggatcaacgcttctggctcttggaagtagttgttctgttcctctcttctggtgctatgaaattacagcatggggtttggtaatcctatatgctggcactgccttcttcttgagaaggaaagctgccggtgatccttgatgagggtgattacactccccacaatgtgggtctagaaatgctggagataacaatagaagtaaccccagagatgcagaggcgaattaatgatggtttcaagtcatggatggggccgtctactctatcttctgatgatgaggaggaagcttcggatgactatatagagcacaatgtgcctatcccaactgcgtcagttcaagtcaggcaagagaatgatctagagagttgactaatgtataaacagatgtacatagtgctccacttattccttgatgtttggtaatgtttgtaaatgcttggcgtgggttttgactgctaacaagtgattttgtttgttcttttcccctagaggaaacaaatgttgagggttagttagccactgaagttcatacaagaggttacctttttttccctgtaccctttcctgtcaatcctttgcctttccnnnnnnnnnnnnnnnnnnnnnnnnnnnnnnnnn

SEQ ID NO: 396965 - DNA, 694 bp, Oryza sativa
  unsure (1)..(694): unsure at all n locations
tccgaaagtacacttcgacggcntacgtggtcatgtcaaaccgctttccgccagcaacacggagctccctggttcgccgccggnttccccggcgccgtcttcgacgtccactactacaacctnttcaccagcagcttcaacggcttcaccgtcgaccagaacatcgctacgtcaggaccaaccgctccgacgaactcagcaccgtcacaaggccgaatgggccgctgacgttcgtgggagagtgggtggctgagtggaatgtgcagggagcatctaaccaggattatcagaggtttgcacaagcccagctagatgtttatggacgagctacttcggatgggcctattggacttacaagaacgtcaacaaccactggagcatgcagtggaatatccagaatgggatcatctctctcaaaagctagaaataatgactaataattaaatatgtctctagttatcaccaattagaacacgtaaataagcctaaccaaggccaattagtgagtaattactgttgcctaataattggaaatgtgtatgtacttgcagtcatatgtaatccgtgagcaaataagacgttgcggaagcgcagataaaacgtcaggtactcaggttgagtgtaactttctcttgtgaagctgaattaaagaaataaagattcttcttcctagatgcttaaaaaaaaaaaaaaa

SEQ ID NO: 396966 - DNA, 796 bp, Oryza sativa
  unsure (1)..(796): unsure at all n locations
acttctttcgccggaatgttcggcaaaaactccatgaagttcccccgtgactttttcatgcaggagttgaggaagcacttccgtcctgactcttgaaccggcccgacgaagattgtgatattcgatcccctgtcccacgagcaactcaggaagttcgcccgtctccagatgaagacgtcccgtccggntcgccgagagggttgtcgccctggccgtcaccgacgccgcgctggacgtcattctgtctctgtcctatgatccggtttatggcgcgaggccgatcaggaggtggatcgagaagagggtggtgacgcagctgtccaagatgctgatccaggaggagatcgacgagaactgcacggtgtacatcgacgcggcgccgcacaaggacgagctggcctacagggtggacaaccgcggggggttggtgaacgccgagacggggcagaagtcggacatcctcatccaggtgcccaacggcgccgccaccgggagcgacgccgcgcaggcggtgaagaagatgaggatcatggaggacgaggacggcatggacgaagagtagtaagtagtagagcgcgtatgtgcgtgttgcgcccccgggcagaggcagaggagggcgccgatcgagctgtgtgaatgaatgtggggtgtctccgttgaataagctgtgaaatatggtgtttttccgatgatgcctttttgtgaagttgttgttctgctaagacgactttcttttgtgaaatttctgatgaactgaagaagtgtaaaaacgtttnnnnnnnnnnnnnnnnnnnnn

SEQ ID NO: 396967 - DNA, 832 bp, Oryza sativa
  unsure (1)..(832): unsure at all n locations
attccgtcaaccgttggggacttatggtctaagttcacttctaggctgaaggttcccccaactttngtcatctgccccaaattatggctggttctgtgcctagcatggacaagctcccaatggtgtgtccattgatctaaggctaagaccacgaaaagtaatttccaccatacaagtatgaaacatcacaagtaaaaccagctcctgggttgcaaagccagcatggaatgcaaccagatatgactgaaagtcggactgaaaaggttgttgccaactttctacagtctccctgttccaggatgaaaccaagatggacatcagagatgtggctagaaattcacatgggatggataatgtgctggaattgttgctgaagcaccaaagaattattgacgaactgcgggacgagaacgacaagctccgtcaaatgctcatagaagaactcaaggtttcaccttccaagttacaattagatcataaaaatggagtgaaggcctacaacccatgctcggactgctttgattgccggaggcgaagtcgaaaaacaagaagatgataatggaattgcaggattgcattttggctattttcgcaatcctttgcaatttcttggattcttcagtagctaaatagttcatcggattagctttcgacataatatcctcagcagaagatccactcttgttgttcaggccagttatgttacctatctcctgaacattcgtgaacacttgatccaattgatgcgttacttctgtgctgaacatgcgcagactgatagcatcacagcagtacgtgattttagttctcnnnnnnnnnnnnnnnnnnnnnn

SEQ ID NO: 396968 - DNA, 586 bp, Oryza sativa
  unsure (1)..(586): unsure at all n locations
tgctcgcgcacgccgccgtgggctgcttcgtgacgcactgcggctggaactccaccgtcgaaggcgctcagcgccggcgtnccgatggtggcggtnccgcagtggtcggaccagacgacgaacgccaggtacatcgaggacgtntggcgcgtcggcgtgcgggttcgcggcggcggcggcggcgacggcggcgcggtggtgaggagggaggaggtggagaggaaggtgagggaggtgatggagggggagaggagcaaggagttcatgaggaacgcggcgagctggagctccaaggcgaggaagcgccatgggcgaaggtggcagctcggacaggaacatcgccgagttcctgtccaagtatcggttgccgccgcatgggaccaaatgatttttcggcgcatatgttatgctttgctttctcattgtcgtttgtggtcaattaattaattgatggatcgcctcgccatgaatttggaacagtttcatagtttatgcatcgctatggttgttgagttggatgatgttgatttagggattgtctaaatttcaggtgactgaagtttttagttctcaaaaaaaaaaaaaa

SEQ ID NO: 396969 - DNA, 720 bp, Oryza sativa
  unsure (1)..(720): unsure at all n locations
taccccgccgcgccgatgctcctcccgcagagtcctncccccgactgcaaggtcggccgnctacaacatccccgcgcgggtccatgttgctcatcaacgcgtacgcnatccaccgtgacccggcggtgtgggagganccggagaagttcatgccggagangttcgaggacggcgggtccgacggcaatctcttgatgccgttcgggatggggaggcggaggtgccccggcgagaacgctggcctgcgcacagtggggttggtgctgggcacgctgatccagtgcttccgactgggagagggtcgacggcgtggaggtcgacatgactgaaggtggcgggctcaccatccccaaggtcgtgccgttggaggccatgtgcaggccgcgcgacgccatgggtggtgttcttcgcgagctcgtctgaatattttttggcggcgtttgcatctccaggacgaactcatgtattgaaagcaccaaaagtaagtagcaaataagcttctcgtgagcatacacataacacatgtgagcttgtaatgtggaataaattacacgtagaggatttggaagagagtgactgcgctagcaatcgctctttgagagttgtgttttacagttttagtgaggaaccaatttgtatgaatgtgcaataatcatgtataaagtataattgtacacgccaggtatttcannnnnnnnnnnnnnnnnnnnnnnnnnnnnn

SEQ ID NO: 396970 - DNA, 509 bp, Oryza sativa
  unsure (1)..(509): unsure at all n locations
ccggtgcagcacgagaagaagaaggggagagaaaaatatctcgcgcttcacacgcaacgcaagaactcgacgaggcgagcgagcgatcgagcggacaccggcggcatcgtgggaacgggaaggcgtgggggagggaggagggcgacggtaggggatggccggagatcggctgagctggtcggggctgctgaaatggagcctctcctacgccgacgggacgcggccgtctcgcgccatcagcgaggaggagcggaggtggttggcggaggcggtggagcgtcacatgatggtggacgtggtgagccgcatgagggagatcgcgctgctcatgagcaccccgctctccgtcctggaggcgcacggcatcacccccgacgacatcgaaggtttactggctgagttcaggtacatgtcgagtctattnacatgcaaacgatcttcattctgttggtggcttggttccgntatcaagtacctcagaaattctaatgtcgtatccgagcanagaa

SEQ ID NO: 396971 - DNA, 502 bp, Oryza sativa
  unsure (1)..(502): unsure at all n locations
cccacggtccgtttttttaaaaagaaagatgaacgtccattatccatgaccatgagcatagaagcttacatgatcaattacaattaggaaccaagtatataactcagtatctctgtggaacagtacaaagattgaaaaaatggatatcactgagagtaataacaacattgttagctagcaggcctcacagttaagtatcccagtatccacataaatgtcccagtgtttctatatgacaagaggagagcatgttagctcttgtttgcatggtagcaacgggagcagccgatcaactatgtaccgtcttcaataattaatggggtgtcacgactactaaacagaagtttctctatatacttgcgctggtccaaagagtnggcacattattgccgaatatgtcatttgcaaccanccatttcctctgctnccttgcctcccagtaaccctccgacatacgggatgttccncctctgtgtcctttggaccatcttgggtccaacca

SEQ ID NO: 396972 - DNA, 731 bp, Oryza sativa
  unsure (1)..(731): unsure at all n locations
catcggtacccctggtaacctgaatttgtcatttgcatatgttgaggggnagagcttgctgatggncctgaaggaggtggctgtgtcgagtggcagtgcctgcactagtgccagcttggagccctcttatgtgctgcgggcacttggtgtagaagaggacatggcgcacacctccattcgctttggcattggccgctttaccactgaggaagaggttgacagagcaattgagctcaccgtgcatcaggtgaagaagcttcgtgacatgagtccactgtatgagatggccaaggcaggcattgacctcaagagtatccagtgggcgcagcactgagacagctttcacttagagctaatccctggctgcttttgaagtgcacggaaggacacatagataggcctgtctggtgttggtgaagacatttctatgaaccatgtgatagttctgtcaagacaatcagctagtattgtacatctgttcacttgccaagttgccagctctcaggctggcaactaatgttttctgctaggttagcaccttgttctctagctagaataccccaacacgaaataagaatgcttgagtggttactgtgttgcctgaaaccctttaagatactaattggagttactggcataatgctgttactatatattttggtgctcacattataatttcaacaccccaggttatctgttnnnnnnnnnnnnnnnnnnnnnnnnnnnnnnnn

SEQ ID NO: 396973 - DNA, 412 bp, Oryza sativa
  unsure (1)..(412): unsure at all n locations
ngagcgntntncntntcntnaattttcttcttcccgtttcccgactcaagtcagcggttagggttccgagatctccgcctcgcacggcagccatggcggcaagcacttttagcacagtcaaggtgagcaatgtgtcactgaaagcatcactgcgagatgtaaaggaattcttttccttttctggtgacattgtgcatgttgaaatgcaaagcagtgatgagctgtctcaagttgcctacattacttttaaagacaatcaaggatctgagacggctatgcttcttacgggtgccacaatagttgatatggctgtcattgtcacgccagctaccgattatgagctaccagcttctgttttagctgctctagagcccaaggatagtaagccttctngnccttcaaaaggcagagg

SEQ ID NO: 396974 - DNA, 397 bp, Oryza sativa
gccgccttctcgtcctcctcgccgaaccacccccatcgacccacacaaccagcgaaccggaagggtttcactcagctgagtttcctgcctccatccccacggcgatggcggaggaggcgaagaatctggagacggcccgggcccaccgctccgtgtggctcatgaagtgcccgaccgtcgtctcccgcgcctggcaggaggccgccaccgccgccgcctcctcctcctcctcctcggacgccgccgctgggccaactccaactccaacgcgaaccctaaccccgtcgtcgccaaggtcatcgtctccctcgacccgctccgctccgaagatcagcagctccagttcaagatggagatggctcaaacaggcaatggcaatacaccaaagagttactct

SEQ ID NO: 396975 - DNA, 300 bp, Oryza sativa
  unsure (1)..(300): unsure at all n locations
cccacgntccgcccacgcgtccacccacttctcgaaccttctccgcctctcctctcttcctccccacctccgtctcctctcttccgcaccggcgaatccccaggcgagccttctagaaccttcgattgctcgggcgggcctcctcctccgcgagccgcagccatggcgaccgtcatgcagaagatcaaggacatcgaggacgagatggcaaggacgcagaagaacaaggccactgcacaccatcttggtcttctgaaggctaaacttgcaaaattacgccgtgagttgctgactcctaca

SEQ ID NO: 396976 - DNA, 411 bp, Oryza sativa
  unsure (1)..(411): unsure at all n locations
gagaaaaagagacatcggggggttttccagccctaagcgccgccattcatcgctgctgcgtggtcgtcgtcgtcgccgccgccgtcgtccgccattacagccgactgatccctcctgctcggctccttcctgtaggactgaggagcaagcgaatccggtgagcaagtgcgtcgagaaccaagaggagagatgggggacaccgagaggagctctatactaggtccacatcttggtcatcgccctcttgcctcaccgcattcggcttcgccatcgccgcggagcccgccgcagcacgggctcaattgttacagacagcttcaattccacattttgtgtttatgactctgatattgctactggctatggtgttggtgcaatcctgtttctcctctctggggaaanacattttat

SEQ ID NO: 396977 - DNA, 310 bp, Oryza sativa
  unsure (1)..(310): unsure at all n locations
aggtggggcacgtccctngagcacgtaaccggcgtcgccgccgacgagcttcttcttcatcgcccacttggccgccatcgaccgttcagacgccgccggcgccgccttccgggactccttcacttcgagcagcttcttctccggcacccccgcgggggccgganccacgccgacggcctccatgcggcggcgacgacgacgaggaggggcggcgcttaattatccgttaaccaaaaaaaaaaaacaaaatctttctcgagtggcaaacgcaaagcgaattctttgtatctgcgattaggaacaaaaaaaa

SEQ ID NO: 396978 - DNA, 684 bp, Oryza sativa
  unsure (1)..(684): unsure at all n locations
ccgtcgacatccaccccgccgcccgcaatcgncaagggcgtcctcctcgaccacgccacgggcgtcgtcatcggagagaccccgtcatcggcgacaaacgtctccatcctccaccacgtcacgctgggcgggacaggcaaggccgtgggcgaccggcaccccaagatcggcgacggcgtcctcattggcgccggcgcnacgatcctcggcaatgtcaggatcggcgccggggcnaagatcggggccgggtcgctggtgctcatcgacgtgccgccgaggaccacggcggtggggaatccggcgaggctgctcggcgggaagaagggcgacgacatgccgggtgaatccatggaccacacctccttcatccagcaatggtcggactacagcatctgagcaggacatggtgtatgcgctactaaattttctccttgtttcgagctgtgcttgaactggtactagtggtgttattacttaataacactacaagtaatagcacaatgtgtttcttttttgcttgtaatggctgtaagctttgctccggcgagctgaaggtgaaccgtactgcacattgtcgtgctcgtctccggacacttgtactggatgttcactttgtaattttgcgaaggtctcgtggaatgtaatactatccactaccttaaaatagccccaaaaaaaaaccan

SEQ ID NO: 396979 - DNA, 344 bp, Oryza sativa
  unsure (1)..(344): unsure at all n locations
aattaccccctcacttaaagggaaccaaaanctggaagcttccaaccggtgccggccgcatcgaatcccgccgaagttggtccgggtgggcccagatcaaggcggagatgaagaacggcgtgctcaaggtggtcgtgcccaaggtgaaggaggagcagcgcagggacgtcttccaggtcaacgtcgagtaggagctcaaatccgcgcgcgttcggcgtgcgaagttgcaggatgcggatggatcgtctccttttatccaataagaaatgcggcgtgctgtagctttgttttgttttcgaagttatggagataaaagttttggtttaaaaaaaaaaaaaaaaaaa

SEQ ID NO: 396980 - DNA, 761 bp, Oryza sativa
gcattaggacacaaaagtggtgatgagcaccaacacgttccaaatttgggaattgcaaattaccatgtgggtgcacatatagacccccatcaagtcggaagttaactatgctttataaggttgaccccggtgcatgtgaccaaagctttggtatccacgttgcagaattcgctaattttcccagaagctgttgttgctcttgcataaagcaaagcagaagaattagaagatttttcaactgcgcccaatttttccgatgattcaaaagatgaggttggatcaaaacgcaagagggtatttagcccagacgatgtgactagaggagctgctcgcgctcgccttttgttggaggaattggcctcattgcctctagacgagatggatggcaccaaggccgcagaaaccgtcaccaaactgaaatccgacttcgagaaagatgcagctgataatccttggcttcagcagttcctttgaaggaaatcattcactgcttgaatggagattttgttttgcaagttagaatcactgaaagtaaggctgatgcaaggatcatctgatcctctttttgtccatatccatcagcagattaccatatatgtaaattatctaggcttagcatcagatctatgctatggaaaatgatctgccaactgccaagtgcttcagctagcacactgcgagtaaacatagccactgtatctgtacgtattatcttgaggtaaagcaattgatgagcttgtcttgcaaaaaaaaaaaaaaaa

SEQ ID NO: 396981 - DNA, 846 bp, Oryza sativa
  unsure (1)..(846): unsure at all n locations
tgctatgccttactacccttgtccccnttacaattctggaatggtgaatctggagatttgaaatccccccggagcagtccttatgaggtcaacattttgattccagtagaaggctatgatccaattgaatttacgctcaccaaagaatgtgtncatatacaagaaaaagagagtaatccaatgagaggctgggcaacatttgggattatttcttgcatcttcattgtgttgtcaagtctactttgttgtggaggtttcatctacaaaacacgtgtccaacatcagtctggtttatatgcgctgcctgggatgaccatcttgtctgccttcctagatgcggttggtggaccaagctacatgagagcagatgatcatggcggaaaccatgcaagccaagcatcatgggaacgcatgcctggtacctcacaagcagcagagcatggcaccaaagataggagatacggatcactttgaactgaacgatgctttagtttttgagggttgcttttttgtaagtttgaagtattctgtaatcagacaaactctgcacttcatctgcagttgagcttccgaagcattgcttatcatcttttcagcttagatggtgttatgaattgtggtggtggatcattcaccatgccaccatcgtcatcgccatccgatcgacgtgcatgctcattagcagatactagacctctgttcttagatagtgctccctccagtttttaatgctcaacattattgactttggacatatgtttaatgatttatcttattaaaaaacttatgtaattataatttattttgttaaaaaaaaaaaaaaaaaagaaaaaaaaaaaaaaaaaa

SEQ ID NO: 396982 - DNA, 1163 bp, Oryza sativa
  unsure (1)..(1163): unsure at all n locations
ccaaaagccctagccgcctcccccttcgtcctccgctccacgagaccacgacgcagggttttctggttcttgctgtcttgggatctttgatttgctgcgaaggcgaaggcgaagatgaggcccgtgttcgtggggaacctcgactacgacacccgccactccgagctcgaccgcctcttctaccgctacggcaggatcgaccgcatcgacatgaagtcaggatttgcttttgtctactttgaggatgagcgtgatggtgatgaggccatacgagcccttgatggctatccttttggccctgggaggcgcaggctttcggtggagtggtcacggggtgatcgtggttccaggcgtgatggctatagcaaaccacctgtgaatactaaacccacgaagacactatttgtcattaactttgaccccatcaacaccagagtcactgatatcgaaaggcatttcggaaccatttggnaaagntttcgaatgttcggatcaggaggaacttttggcttcttggtgccagttttgaaacacaggaagagcccacaaaagcacttgaaagctactcatttctaccaaagttgttggacagggtgatttctgttgagtatgccttcagggatggatacagaacgaggtgacagggatgatggtgcaaagaggtggctatggtaggcgagatgatagtccatatcgtcgatcagttagtccagtgtacaggtcacgcccaagtcctgactacggtcgtcaaaggagtcctgtgtacggttcgtatgacaggagtcctgttaatgatcgctatcgaagccgatctcctgtccggcgatcaagatccccacttgccaacagaagagcttatgattgacagagttttctcaagggtggttggctggttgctgaagggtttgcatctgcctctctagatctttagcagtgatagcaagaacttgtcttctccgtactatatatataatttagatatgggtactcatgggtggttcgtagtcgaactgaaaatcttttaccttttgttgacctggaactccgtactagtataatttagatatgatgtgttgtgcatcaaggcaaaactctgtgcgatgtacctgtgccacaacgttttctatgactaccgcactttatatttcaaaaaaaaaaaaaaa

SEQ ID NO: 396983 - DNA, 377 bp, Oryza sativa
  unsure (1)..(377): unsure at all n locations
tgcatttatcaaagaccctgatggctactggattgaaatatttgacctgaacagaattggggcggtgactgcggaagcatcatgatgtgtttgaaatgctatgaactctagttatgcagctggggtaaatcatttccttgttgacaggtgcgacgtgcgagacgataaaactccagctacccatgggcatatatacaatatacttggtcgtttagagcaacaagttatagattgtgataccctgtttgctggtcagtgtttgaagcttgaacttaacattgcactgtaacccgtttctgcgttaaagattttggcctcannnnnnnnnnnnnnnnnnnnnnnnnnnnnnnnnnnnnnnnnnnnnnnnnnnnnnnnnn

SEQ ID NO: 396984 - DNA, 516 bp, Oryza sativa
  unsure (1)..(516): unsure at all n locations
aatgcctggtggaggtttcccaggtgggatgcctggtggcttccctgggggtgctatgcctggaggtgttcctgggaatgtcgatatgagtaaaattctgaatgaccctgatctgatggcagcatttggtgaccctgaggttatggcagctcttcaagatgtgatgaacaatcctgccagctttgcgaggcaccaagccaaccccaaggtgggccccatcattgcaaagatgatggcgaaattcaatgggtcccagtaaacgttttgagtgagctgatggtatgagtaaattgttatttggcaatatggtgtcaagtgttttgtgatgagcaaaagcacgttggacggtctcttgttaggtgctactcttttttgtgaatgtggtattaaacggtggatgtatatgcagaaatacttttcatcgggctgctaactctatattacttcttttagaggtgcgacaatgaggatttggtgatatgatttgttgacnnnnnnnnnnnnnnnnnnnnnnnn

SEQ ID NO: 396985 - DNA, 572 bp, Oryza sativa
  unsure (1)..(572): unsure at all n locations
tgaagcagcccgttncggaaagcacggntcggacgcgacgccggcaccacccacatctgggtcggcaactttgcgaagcagtgcccggggcagtgcgcgtggccgttcgcgcagccggtgtacgggccacagggcacgccgctggtggcgcccaacaacgacgtcggcgcggacgggatggtgatgatcctcgcctcgatggtggccggcacggtgaccaacccgtacggcgatgggttctaccaggggccccaggacgcgccgctggaggcgtgctcggcgtgcccgggagtctacggcagcggcgcgtacccggggaacgccggtaaactcctcgtcgacgccaccaccggagccagctacaacgccaacggcgcgaacaggaggaagtacctgctcccggcgttgtacaatcccgcaacgtcctcctgcgacacgcttgtgtaatccatagtgccggacacgttacgtgttctgtacctgtacgcttgggaagttgtacatacgagttgggaaagtaatggaatcactttgttcgttctaaaaaaaaaaaaaaaannnnnnnnnnnnnn

SEQ ID NO: 396986 - DNA, 570 bp, Oryza sativa
agagcagagcgcggagggaagagggcgcagagagcaggaggagaggcaggcagccatgggcgaggaggagaaggctgctgctgacccaatgaaggtggtgcaccgtgtgcagaagaagacaggccgcaaggttgagcttctatcaccgatgccacctccggtggaggagaagaaggaagaggagaaaaaggaagagcccgagccaccaaaacctgaagagaaggagccaacggtgatagcggtggtcctgaaggtgcatatgcattgtgaggcctgtgcgcaagttatcaggaagaaaatcctcaagatgaaaggagtgcaatcagcagagccagacatgaaggcatcacaagtgacggtgaagggtgtgtttgaggagtcaaagctcaccgattacgtgcataaacgcattggtaagaatgccgccgttgtaaaatctgaaccagcccctccccctgagaatgctggcgatgcaaatgcaaaggatgacaagaaggcggccgaaggtggcgaggagaaggacgagagcaaggaggaaaagaaggaaggtgatgatgagaaaaaaaaaaa

SEQ ID NO: 396987 - DNA, 316 bp, Oryza sativa
  unsure (1)..(316): unsure at all n locations
gatgcggtggcggcgggcggaagggatgcggcggcagtgggcagaagggagggggatgtggcggctacgggcagaagggaatgggatgcagcggcgaaggttggaaaggagggggatgcggcggcggtgggcggaagggagggaggatgtggtggcggcgggtggcaggagggagtcggctggaggccacggatcgatctcttcccctccccttcttgtccctccttctttgtgttttgtattatttcctctgtgatttgttgaatgtgatctagatgtgttcaaggatttgatgcaatttaanaaaaaaaaaaaa

SEQ ID NO: 396988 - DNA, 387 bp, Oryza sativa
  unsure (1)..(387): unsure at all n locations
ccatccaggagcccagcctcctgctcctggcgctcaagtacaacgagaagaagntggtctgccgcaangtacgcacgccttcccgccaggtctaccaactgccgcaagaagaagtgtggccacaccaaccagataaggccaaagaagaggtttatatccaagactgccaactgaataaaagagttgtcatgcatcagttgagtcgaagagtcttcctattcagttattagctcatatgttagcatcagttgagtcaaagagtcttcataaatgtttagcctggctgcttatgctatttctgtttgtgagatttggttagaagtttttactgttcaaatctctatatacgcccctacttttctgtttttgagaaaaaaaaaaaaaaaa

SEQ ID NO: 396989 - DNA, 711 bp, Oryza sativa
  unsure (1)..(711): unsure at all n locations
catttccagaanaagaaaagctcatggcttgttttgtttctccgcagaccagttcatnaactccgcggtcatctggactactctttcgcgtcagcgtggancccagatggccgnacattcgcgactggtaaccaagacaagacatgcaggatctgggatatccgaaacctttccaagtccgttgctgttctgggtggcaatatgggagccatacggtcgattcgctacacatccgatgggcgattcttggcaatggcggaaccagcagatttcgttcatatattcgacgtcggaagcgggtaccgaaggaagcaggtggtggattnctttggtgagatttctggcatttcgttcagtcccgacaccgaggctctgttcatcggtgttcatgatcggacctatagcagcctcctccagtacaaccggctacggttctactcataccttgattctgctatctgaatttgctacttgcaatcactggcagagtaatgtgagttctgaatcacaaaaaattgtagaagctagtaaagtagtagagaagatgtagatatgtccatatctgtagctgttactgtaaaggaacctgaaatgcatctgcaaatggcctgttgcttttgctggacaaaactgtatccatcagacttcagggtgagcaatcatcctacggaagagaagatgttatctggtnnnnnnnnnnnnnnnnnnnnn

SEQ ID NO: 396990 - DNA, 493 bp, Oryza sativa
  unsure (1)..(493): unsure at all n locations
cctcatcaccgacctcaccaagacggtggccnatatggacgcccacgccgncaaagaaggccgccgccganccggcccaaagaagaccgtgcgggagatagagaaggaggtgaccacctaactggcggagttncgtcgcncaggaagaagagcagcctcgtctgctgatcatcgactcctgcactcgcgcgtacataaagtgcaggaacgaataattcttgacccgtcttgcattgagttcttcgtttgctgctgcttcttttctttttttttttccttttcacccgctgaattttgagttcagtttcaaattcgcttcgatagatttgtgtatgtcacaccgatttgtggcattcttgcagacaagttaccaatatgaaatgcgtataggcatgtacacgcagagacgtgtcaggcagnnnnnnnnnnnnnnnnnnnnnnnnnnnnnnnnnnnnnnnnnnnnnnnnnnnnnnnnnnnnnnnnnnnnnnnnnn

SEQ ID NO: 396991 - DNA, 376 bp, Oryza sativa
  unsure (1)..(376): unsure at all n locations
cggacatgatcaggaantgggaggacgaggagagcaagggggagatggtgaagctgatcaagatcgggatggcgtgctgcgaggccgccgtggacacccggtgggagctcaagacggcggtggagagcatcgaggagctcaagggggggaaggaggaggacgccaacgacgagcactccttctactcctcgatcgacggcgacgaattcgccagcgtcgccatcaactaactcggaaatcaacccacattagcgcgcgcatcggttgtaattaagcagcatcaaatgatatgttaaaaagctcattatgtaaagtatacagaaatgatgcctaacacactaaatctgaactagcattctgtaaaaaaaaaaaaaaa

SEQ ID NO: 396992 - DNA, 619 bp, Oryza sativa
  unsure (1)..(619): unsure at all n locations
taaggccaatatgtggcccagcntattccgcgatgttgataagccctaatgtcttcttcttgggtggatccatctcccgatcatgtatttctgcaccttataaacaactcaagattttcatgttattggctcaaaattttcatcataaggtccagatatttctccaggatgcaatgagatccaatagttacagtagaggtttcgcaactgagattaattacgttctgcttggcatattttgttgttatatctccaatgtggattctgtggttcctctattcaacgcgatttggctcaaagaaatgaccagttgcccataaaacaagagttgcatatactgttttcatgtttttacattttacaagtatagaagagttgcatgagatggtggaaaatgcgtataattatatcttgtaatttatatcgagcacattgtatcacattccccatggaacctcccctttgcggggtggtgtatttatacccctagctcgctcgcattcttcagggacttggatggataaatttgtctactgatttaggcagtcctaggtcttcaaagaagaagcatttttttttgatcgttcaaaaatgcatcttccttaaaaaaaaaaaaaaa

SEQ ID NO: 396993 - DNA, 587 bp, Oryza sativa
tctacggcgtcccgcaccccatgcagccttccccgccgatgatgtacgggccacgcgccgccgcccggcgccggtggtctactcgtcggaggggaagccgccgatggaaggtggggcccacgcctcgtaggccccgcaagtggagaggagggagggaggcagagcacggcgcggatgagctgtttccctggaggagctggtcctgagctcttccatcctcgtgattgcatatgccttattcctactaaggatttttgcattgccattgccgtgtggtgaattcttatttttattcttcttctttggatggcttatgtgggttgctgtatagatgagggaggtggaggatgggattgatattgcaattttcgtcaagtgaaaatagatttgctatagttattatatttataataatatattatataagagtaagtacatctggtgtgattaagtagtagcaagttaatgtaatatgggattcatatgttctatgtggttcctacctgaggaagtcaaaattttgtgtgctgctggatgcttgatggattaaaatgtaaacaattcctgtgattaaaaaaaaaaaaaaa

SEQ ID NO: 396994 - DNA, 721 bp, Oryza sativa
  unsure (1)..(721): unsure at all n locations
ccattcaactgcagttggaaaattacgacaggacctccccagatgttcccatcagatgnctccgtgtgatgtttccacggtaccactgtaaaatgaagctgagactgtctgccactattatatgaggcaaaagntcatcaagcgcgaaaatttttcagaagagaagtggaaaaagatttattatttgtcaaatggaaatggctcagagatgagatggcttgctgcctttatctgagttctgagtttctcatacccggattgcttctcccaaagaaaaaaacccaattgagttcatgcaggctgtgcaggttttaaactgaagccatccattgttgtatacttgcagtacacatcttgtaaaactcgtaggagcaaggtgctacctaatgacggttctatgatttttttatttctaccccagtaatttgaagtgcgagcaattttggcagcagcataaaaatttcacccatgtgcctgacgacgacgttgatgtgtactgagtaggaatgtagtaggattcactcaacaagccagaactcaagtttgtgacgcagttctgcccatttatatttgatgaattttgaggtgcgttgcttagtgacgcaggatacaataagaactggctgctcttaactttctttctggtacagcttccatttactcttttttttttatcaaatactgttgctgtttgcgatcgtttaaaaaaaaaaaaaaaaaa

SEQ ID NO: 396995 - DNA, 601 bp, Oryza sativa
  unsure (1)..(601): unsure at all n locations
cggacntggtcntcnaangatanggagcaagttccgcaagacgtgcattggacacagccgtcgcatcgctcctctgcagcagatccacgcaccggccaccgccttcacaacatgatttggaggtggagaagcttggtgtgccctcgacgagttcttccacaaatttactaccctcgaatgaatggcccaggccgcggcggctttgtcggcttcttcgacaacactaatgtctaccttgccaacaatatggatgcactggtgtttttatatttggatctcaagccctcgtatctggttctccagctgaatgtgttgatgcgatgactgcagcttaccaatggatgactctgtcatcttttcgctggcttgaagaactctggcagagaagcagaggtaggatatgttgacatcaggtgcttaactggaaacccgaatagaatccatttattttgacttcaaactgatgttcagatctgacatttggtgcacaacatgcagttgggggttttgacgtttcttaagtttttttcattgaacttgatcagccaaataagctattttagacgtgattcnnnnnnnnnnnnnnnnnnnnnnnnnnnnn

SEQ ID NO: 396996 - DNA, 584 bp, Oryza sativa
  unsure (1)..(584): unsure at all n locations
cgacataagccacatccagctttttcgaatccaactggaatccanaggacgacantgacgacgacgacntggcgacgctggacagcgttcgnagcggcgtcaacgtcgccaggtgcatcaggcccgtgctcgancccctcatcgctcgtcatttcgggaggtgcatagtggacgacctgttcgacatgtacgcgcggaacgtagcacagcacctcgagcaggtgaagaccaagtaccctgtcaattgtgctctccttgtaaggcaagacgctgaacctatccgttcgtcggctcgtggtacacgatgttgcattttataagtagcgtgccagtgtgtgttgttggggaccgattgatcacccagctgctctgcaaattgggtctgccatagcctttgtctagctttgagtcgtttgtcgttgtaagttaaatgcgacgtgtgcgtgagtcagtaaaagtaaaatgaactagcccacgcgaatacgcgggcatgtatcttaagttgtgtttatatgggtagaaaattaatctaattatttcatatcttgattgaaaagtatgatttctctaaaaaaaaaaaaaaa

SEQ ID NO: 396997 - DNA, 606 bp, Oryza sativa
  unsure (1)..(606): unsure at all n locations
cggagagataggccatgatgattcttccaagaaagcgtccatcnaagcctgagccaggagccttagtcctcccaaggagntccactggaaaganatcgagagcacatcgcaacagagacacagacagatctcatggtaatgatgctggacgagagagagacagggtacgtgaaaaaagcgcaagccgagggagggatgatcactatgatagaagcagagacagggagaaggacaggagaaagggaaggtgattgatgcctgcaaaatctcttgcattcatccccttgcctgaatcaggtgccagtgtgatatcctgtgccaggttgcatcagttaaaatctgttgcatatatgaagagtatctggcctgccacctgcccgcatggcttgaagaacctgtgtattgagtgccctactcatgtagcttgaaaaacagggacagcgtgtgaaaaatagaatattatcaagtggaactgcggaagtagtgcattgaaactctccgccttgtggtggacgaccgcagctaggaactttgctttggtgacaaatgaagtcaagagagttgctttggcgacattgtccatttttattaaaaaaaaanaaaaaa

SEQ ID NO: 396998 - DNA, 429 bp, Oryza sativa
  unsure (1)..(429): unsure at all n locations
tccgctgcccctacttcttagatcctggttttgggccagctatnggaattatcttgtacatgagacggctcaggttaacctgttattaggtcctgcatgattccgccccatacaaggaagtatactgaacgatttttgcttacacaaggggatggagtgtagaacatcaaaggaacttacagctatgaatatgttcatgactcaagatgtggaagtagcaaaaatatgggtgatcccatgcctccacaaggagatgatactgtgaatatgtaaacccacagttgtacattactaggcttgtaaatagctgtcatttaaaaatctcaagtcattagcttgaaatgtgacaactgaaagaaaaaacaacattctattgcccagtttcgcctatctgaatgggattacaagtttacaaaaaaaaaaaaaaaa

SEQ ID NO: 396999 - DNA, 513 bp, Oryza sativa
  unsure (1)..(513): unsure at all n locations
cggacntgngntncganaaccaacatgataccataaccccggggggtgggctggcaaggcatcacgatcagtcagttcgtccatgggcagtctgctccctagatcaatctttcttctcctcgtcggcaaagccacagaatcttcgctgtgtttatgaaggcgaagatttcttcgtatagatgttcagtgcctgagatcaagatttggagttctgccatatccccttctgttcaccatccatttcactgagtaaatctgttaatgttgagtatttcctttgaactacacattgaaaagcggtgggtgtttttgaagtgaataggttttgaacccccaactcccttcaacaaccagggctattatttccatgggcggtccatacctgtggggttgccatttgtaatttgtaaacagctgtacaaaaattagcaggtgcctgtaactcttatttaaaggaaaaatactacaactagtttagatgtgatctgcnnnnnnnnnnnnnnnnnnnnnnnn

SEQ ID NO: 397000 - DNA, 429 bp, Oryza sativa
  unsure (1)..(429): unsure at all n locations
acctccaggaggcccctcgtctccgagggaggaggaggaanaggacgaccagaaaacacaacccgcgtgcgtccacgaatcccggctcgggatctccgtccccccccccccagtgacgtcatcgtaatccgcgggtcaaaagcagcaaggcggcgagcaccggagcaagaagcggacnngcaaggtagccggcggcatccgcgtctccttccagggattcttggggggctccgctgctggtggtggtgggggagggatcgagaggatggccgtggagtcgccattcagggcggatgtgttgaggggcaaggcggcgctggtcaccggccgcggctccggcatcgggttcgagatcgccgcccagctcgcccgccanggcgcgcacgtcgccatcatgggccgccgccgcgaagtcctcgacaaagccgt

SEQ ID NO: 397001 - DNA, 729 bp, Oryza sativa
  unsure (1)..(729): unsure at all n locations
gcgagctcaggccgaggggaacatggncttttcccacctgagagtgcatgagcgcttctgtagtttanccggcaagtaacctctttgagaagtccagattctaacttggctagcaacacaggacaaatgattgttggtgggaaatttggcatgccgagcctgggttttgtgatgcacacagcacacattcagatttgaagattgagagatgcttcttattggcagcttgttcagaaagatgactaaccggtttgggataaaatcagctgattgggaaacattagccaggatgaataagcatgactggtggtaccaatgaaaagggttgaaatcctttgcattgttcatttgttgtggagcaagagtggccgcagttgcttatcacacaggatgatggaggtgtttgtgtgaagcttattgctgaagctggattgtttttgacctgtgtttctaaaagaaaagggaaaagaagaagctgtggattgaggccggagcagcagagatattacaatcgacatagataaataagatgtaatactaatttagcccaggtggtttgtgtgtggagatgcaatccattgtagtaacagcctaacttgtacattcttgccatctttttcttattaattgaatgaatgaatcgcagacctcctgcgttttcatcaataattgaaatgacttctgcttcatcaagaaaaaaaaaaaaaaaannnnnnnnnnnnnnnnnnn

SEQ ID NO: 397002 - DNA, 606 bp, Oryza sativa
  unsure (1)..(606): unsure at all n locations
cggaggtggaggcgttcgcgctcgtcgccgacgacctccggttcgtggcgtcgcagttccggcgcctgcacagcgcgcgcatccggcacaggttccgcttctacncccaccagtggcgcacgtgggcggcgtgcttcatccaggccgcctggcgccggaacaagcggcgccgcgcgtccatggagctcaggatgcgggaaggcggcgaggcccgcccgggagggaccgtgaggtgtcgtcggcacagctgcgacggcaaagcgctcatcaagaaccccatggaaccggatttcaccgtcgaagaagaggactgatctaatcgaatagatcgatcatactgtgttttctgttcagttagctagtcatgttacgttctgatgtacttttgctttgagtggtgtgtaataagttgagctgcttgtatcaacttgaagttgcattttgtgtaagtatttagacgcttttgctagatatacattggtcctgtgaatgttctagatatacatttagacgcttttgctagatcgggaaaattggttctgtgaaactgtgacatatattgaaagatgtcgttcactngtngcnnnnnnnnnnnnnnnnnnnnnn

SEQ ID NO: 397003 - DNA, 578 bp, Oryza sativa
taagcgcgcagatgtcgtcgtcggtggtcgacgtgggcgtggtgccggagcgggcggcggcgatgggggaagggagggaggcgaggctgatgaggtacagggagaagcggaagaaccggcggttcgagaagacgatccggtacgcgtcgcgcaaggcctacgccgagacgcgcccccggatcaagggccgcttcgccaagcgcgccgaccacgacgccgacgacgccgacgccgacgccgacgaccccgccgccgtcccatcctcctacatgctcgacttcggctacggcgtcgtcccgtccttctgatcgccgcccgccgccggccaccgccgccgcgccgtcgcttgtaatcttgtatcaaatcgatcgatcgatgtgtaggggcgtagtaatcccatgtagtactcattttgagctagtcacgctagttttgtacactactactgctactaattacgtgcttactacttagtggtaattatttttttgatcagcaagatcatctatattgtattagctccccccaacgaataaatcacaactatatggtattattcatcaaaaaaaaaaaaaaaa

SEQ ID NO: 397004 - DNA, 425 bp, Oryza sativa
  unsure (1)..(425): unsure at all n locations
cgaattacccctcactaagggaacaaaanctggagctccacccgttgcggccgcgcaggactccggcgaccggccggcgaggttcgatctgtgcaggcagaagctggcgaggctcatgtccacccgaaggcggtgcacgtacgacgactactactccgtcgcattcgactagatatctagctaggctaggcaaactggcgagcaccaccgtgcaatggcttgcagcactgcaccaatgatggatcatctgggttgggttttgcctgaagggtgcaagaggacgaagtcgtagtggatggatggaagaagagtgtgtgacatcatgtacatagtgcgatcttgtaggctgtttgatgcatcaataaagcttgatcgagccccattttttggctaaaaaaaaaaaaaaannnnnnnnnnnnnnnnnn

SEQ ID NO: 397005 - DNA, 459 bp, Oryza sativa
  unsure (1)..(459): unsure at all n locations
tggtccctcggccccggcggcgggtcccacnaggtcggccacgactgggtgccccggccggggccccggcccccccgcggctgggacaagctcatggacaggatcgtcaggtcggaggccctccgtcaacagccagtgcaagtagctaagctagcttagcttagctgcgagagtgatcgagtgagataaatcactcactggttaatcttaatctgcatcgtgtaattcgcttcttttttcttctttttttttaccctactgatttacttgcaggtttgtacaaattcatcaagttaaaacttaaaagcatatatatgtatagagatagagagagaaagagagagataagtatatagtacttgctagtactaattaactgtaatccattttcattatcccatctcgaaaggacaaggtgttttctgtggttnnnnnnnnnnnnnnnnnnnnnnnnnnnnn

SEQ ID NO: 397006 - DNA, 473 bp, Oryza sativa
  unsure (1)..(473): unsure at all n locations
cgacgccaggaagagattggccacccgcctctcgattcgctccccaataatccagagctaccactaataatccccctccgttccagcgcgcgcggcggcgggagctcgtcggagaagaagaagaagaccaaaccaggccggccggtcgtcgtcgtcgtcgtcgatcccctcccgccaccgcacccgccggctgtgatactatggagatgaagaagatcgccgtcgccttcgccgtcctcgccatcgccttcgccgcgtccgccaccgccgtgctcgcctcggagtccgaagccgggggcgcggcggccgcaaccgcggtggaagttccagcttttgttccctttagttagggttaaattncgcgcttggcgtaaatcaatgggtcaatagctggtttcctgtggtgaaattggttatccgctcacaaattncacaaaaacaatacgaagccggaagcataaaggttaaagcct

SEQ ID NO: 397007 - DNA, 715 bp, Oryza sativa
  unsure (1)..(715): unsure at all n locations
gcactttgaaaaccctacctgggaagggaaaaccttnaaaccctcaattcaaaccctcatgctgatcctgccagaagacacacttttacagaatactttcaaggaccggctgcgcacccgaatgggttgagctgaacaaggaaattcgaggcatgattgncacgatggagatcagcattgaggaaggcttgggcgaaccgctctgaggatgatcgttctacctggcatgatgatcacagactgcttcaggaacaaattcgccaaataaatgacaaggtttnccgatacaatctgatagtgccctttgggcgccaaatgtttggtcttaactgggacaaggagctggacaaattgaaacagtaagacgggaaaagtgtaggctactgggatgcagttttataggcattatcctgtattttgttgtatccaagaataccttagaactcgagcagtggtaaatagcttgaataaaaaaattaagaaactatagttatatacgcggcatttttgtagtcatcttgctcttggatttagattttcagatgttagcctgcagtgtaggacatgaagcaaagggggtcgaaataatggtgtgtagcatgcagaacagctaattttctgcagcagagctgaatactgaagttgtgtgctgtactatagtagaatttgagaatggtttcagattattcaaaaaaaaaaaaaaannnnnnnnnnn

SEQ ID NO: 397008 - DNA, 739 bp, Oryza sativa
gacggcgatgcgaccaagcacccgttgacacgggcggtctggtcgagccggcaacgacggtcatgctgtgagggtgggtgttcaagcctgtggcaagcttccttccaggcgtctgccctcttacggtggcggcttgccgccgaaagatggccacagtggacgagcgagtgcgggggagaggggatccattcttctctctcaccctctccctctccaacccaaccacgtggatggatgtgaagcgcggtgaaggttaggactcttcttcgatggctagccggcggcgaggcgtcggcgcggtggctgcgcgtcgaaggggattagatggtggttctgctgaactggcatgcactttttaacgcgggagagtagaacaacgggcgaaagcctagccttcgggccggcaacggcgacgctgcgggcgccgttttccccttggggtgttgccgtgttttctattttcccagtgggttcttcttggagacgtcgtttagaagtcatattcctttgagagtgttgtgtgcttgttttgttttaaacaataggatcagacgtataagcgtggtgtggttgtttattttctttttcctgactatagtctcccaggactataggcttgtattttattccttctttatcaatagaaacatcatactatcttatgcgggttgtttcaaaaaaaatggccgggaaaacaaaataaggctttgcagacaatttttaaaaaaaaaaaaaaaaa

SEQ ID NO: 397009 - DNA, 299 bp, Oryza sativa
  unsure (1)..(299): unsure at all n locations
tcgtgcccaacaatgaataggcatcaattnnatgatgcaaattgcacaatttggtgctttataatttggatgtatgtttatagaagccaagagtctgattgtgggtgtgataatcttgaatattggcgcccatagatgctcataaaaatcctatatattaaaaggataaggcaatgcgccagtgtgtctctagttttgtaacattgaagcattttaagcttcttgtattccgcttacttttttcataataaatcgtactggtgtggattacttttttcataataaaaaanaaaaaaaaa

SEQ ID NO: 397010 - DNA, 711 bp, Oryza sativa
  unsure (1)..(711): unsure at all n locations
agccagctttcaaagctttggaancggaactttncagtgccaatgcttgcagagaagggaaggagggaccgatacatgcccgtggcgtatttattacgagcacctgctatcttggatgtaggttcaaatgttgaagtactggcggattgtcctgttccatcggatagacccagtattaccaatagcgtctggagagggtnttgaggaagaagtgtactcgaaagatcgggtaattgttgctgtaaggcaagggaacatcctcgctactgcttttcacccagaattgacatcagactctagatggcatcggttcttcctggacatggataaagaatctgatacaaaagccttctctgctctctctctctcatcatcttcaagagacactcaagatgggtcaaagaataagcctcttgatctacccatcttcgagtagctcatgaaagaaaagaaagactgttaaacattgaagaacagaagatgaagaagctaacaaaattttgagcattcagttggtgacaatagagaaagttgagtacgtgtgatgctcagtccaaatgtgttattgttgtcaaactgtaccaatcaaaataatgataatgccgtcccaaacattgtgattttgctacgacaaagaatctgattcagttgaatatatgtcacaattttttttcttcctcaaannnttnnnaaaannnnnnnnnnnnnnnn

SEQ ID NO: 397011 - DNA, 715 bp, Oryza sativa
tgatattgaaccagatgagcatgttaagagagcaatgaatgaaatcaacgcagctgctaggctgagggtggcagcccaatgagaaagctgaagcagagaagattcttcagatcaagagagctgaaggagatgcagaatccaagtacttggctggtctgggtatcgcaaggcagcgtcaggctatagtggatgggctgagagacagtgttcttgccttctccgagaacgtgcctgggacctctgccaaggatgtcatggatatggttctggttacgcaatacttcgacaccatgaaggagataggagcctcatccaagtcctcttcagtgttcatccctcacgggccaggtgccgtcaaagatatcgctgcgcagataagagatggtcagctccaggccaaattgatctaagaggatggcagggaatggatgttctggatttcttgggcattacgaaagtctgcagtaataccttatctacgtattcgatattttgtgagataaaaacttaggcaaaagaagttctattgtaagtatcacatgcacgcgtgcttcagtaccgtttgttcatagtaattcctgaggttatttccctagacgagtgtcaatatacttcttgaattgcatgtttctgtaaataattcctaagtgttaccgggctgtttggaattatttgcatgttgatgttagtgaccttaaaaaaaaaaaaaaaaaaa

SEQ ID NO: 397012 - DNA, 416 bp, Oryza sativa
  unsure (1)..(416): unsure at all n locations
gcgtgaagggccgcttcgccaaggtgcccgacggcgagctggacggcgcgacaccgccgccgccgtcctccgccgccggcggcggctacgagcccggccggctcgacctcggatggttccgttcgtagctagcagcctagcactataatagcagatcattatttctctctttgtatacgtactctacgtacataggccaagcatgcattgactagctaggctattggttgaaaagtttaaggtttaattaaggtagatatatatggcaacaagtatatatatgtgatttacttgtcttactgaagaactagcatggtgacccgcgcagattgctcggctagcatcattatattttctctcatataatagcatatatgttttctcnnnnnnnnnnnnnnnnnnnnnnnnnnnnnnnn

SEQ ID NO: 397013 - DNA, 421 bp, Oryza sativa
  unsure (1)..(421): unsure at all n locations
tcgagcggccgcccgggcaggttctaccggtccctgggcgagaggaacaataaatccagaagggacttcttaagtcaagatcttcagcccttctttgcaagaagtatgtggactgtagccatttgaatctagcattcggatgtttcagtattgcagagaaatagcaggagtttttgggggataatgggtgctggcatctgatggaaactgcccccttgcaactgtgtgtgcatcaagcttctgcaacaaaaagaccctaatgtacattgcacgttgtaaagctgctgatcatgtaattctagtttgtacatncatncacntgtacaagnataaagagaaccacttgtcctttggaatatgngtntaccatttnttctaaaannnaataaataaaaanaatnntaaaaataataaataaaaa

SEQ ID NO: 397014 - DNA, 526 bp, Oryza sativa
  unsure (1)..(526): unsure at all n locations
ggccgcgaaccccacggcgatgctctccgccctgatgagcaagcgcgccaagctccaggaggagctccgctccatagagcgccaggtttatgaaatggagacaacctacctacaagagtctaatcaattcggaagtgtgctaaagggttttgaatcattcttatcatcgtcaaagaacacttccaatctcaagcgctccaggaagttccaggctgatgagaggctgttctccctgtcatcggttacatctccagcggtcgatgaacatgtggctggacgagatgatggaagagaatatggatcaggtcgttcgaaaggtgcaaccactcctgcaaacgggcaaggaaaaccaaagaagggaggtcgccctggagggagagacggcaagagaatacggccatcaaatgatccagatctggacgacgaagaggacttctaactcgacatgttgtaggcctagntcagtgatgatttaaccttgctagactcatgcttcgaatcattctttctgtattgtaattttttt

SEQ ID NO: 397015 - DNA, 650 bp, Oryza sativa
  unsure (1)..(650): unsure at all n locations
tgcatttcccaaatctgcttcagaccatggactaattgtggcaaatgggacttatgcacttactgctggaaactgtgtgcagtgtagttgcgggccagggaatctcaatttatattgcacaccagcttcattgacagggtcatgtccaagcatgcagtgcagtaacagcaatgttctgctaggtaatgtaagcgctcgttccaccagtgcaggctgcaatgtttcttcttgtagctacggaggttttgttaatggaaccattaccacattgctgagcacaggtcttcaatccagatgtccaggaccacatcagttccctgaactcactgaaccccctaccacggtgaaccatgattcaacgtttctcccgccattatcggcacctggacctgcagaagccggcggcgccattccccctccgaactcaggctcaccatcagtgcaaggagggtctttcacactgcccaaagtatccactgcaaatggccctgccggaagcgtttcagaggctccttgggatgaacaagccgcatcagatcctgtcaagtttcatcttgtgtctacnacttctcctactcgcagatgtgaattgcaatgtgtagtcaaggaccaattctgtagtaattgtaaaacttgaagcctcatttang

SEQ ID NO: 397016 - DNA, 698 bp, Oryza sativa
  unsure (1)..(698): unsure at all n locations
cttgccaaatgctanagccattgaccccagggacaacatggaacctccgtgaaggaaaagcttaagagcacaggctgctcggctgatcaatggaaaccggggtccgctgtacatgtatgtatgactgagccgcttccatgccaattgggcgtgctgtgttgccgatgaattcgcgactgtccccagagaaggtacggaatccccttgaaatcctatttctgcacttgtgatccccagctttgttcttcctgacaattaccttgtaatgtgagaacattctagagaagacagttggaatctttcgctttgccgacaatccattgtccctcgctgctgtgtagtagccactcctgtggctcggctgggaaaaataggctgcccgtctatttgttccgactgccaacagcctctcgccgatccccaccagccgtagcatcggggagaagaaaaaaaaaacttcaccgggtggtcgagcccccgccgccgccacggaccataccacgcgccccgccnccgccggagaccacctnccgcgnncgccgcgactacgacgagcccaggagaganagaggggagggggaggctcggagccggaanccgngcgatccgccacgcgccgccgcccgccggggtgctcctngctcgggtaggtcggcggcgaggagtcgtcttcctgagttttccccccttttttttcc

SEQ ID NO: 397017 - DNA, 464 bp, Oryza sativa
  unsure (1)..(464): unsure at all n locations
gatcaactagctagcacttgatngatgatacancgctgcgtgcttcgctccggngtcagcgtgttcttccacgtctgcctctgccgagcaagagnatcagctagcttnaggtgcagcggctaggntaccccgtcgaggtcntcgaccattgggaggacgcacacgccgnccgggctcaccgccatacgcaccagcaattgagccagagggggacggatggcgagttcaggcatccctttatctggcatctgcgccgccgcccgacacacgtgagcggctgcaagattcatgtaggggttctgtactctactaattcatcattggtgcaattcatttgtactgtattatatccagtgttctaaatctccggagatttagagcattgattatatcaaaacacgtataacgaatcatatatatttttcgatatacnnnnnnnnnnnnnnnnnnnnnnnnnnnnnnnn

SEQ ID NO: 397018 - DNA, 533 bp, Oryza sativa
  unsure (1)..(533): unsure at all n locations
cggacgtgatctttgttttttttttttttttttcatcaaatgtatatatgtatatagctattctggcgaaaaacatttgagcatatatatatgtaacccttattatgcgcacacacacgcactgctataccaaagaaagagttaattaattgaacaacttagtccaataataataaaaaaagtgtgcgagtagtggggattgtaagtatatgtaaccacaacggtgcgagaaccgtccgattcctgacacgtgtcgtctcttctgaccgtcgatcttccgtggcagacagcgtggtccatgcgtatacgtggccgtgtgacgtgtccggttacacttgcacgcgcttgcgatctcgagaggtcagaggaagtcgacgccgaactcgtcgtcgagcgcgccgngccgaggtcgaagcaggactccggcatgtcccgcgacacgacccggatcgggaagctcgncgcggcgccgcgcgccgtccagcctttgcggcggcgtcggcagcgtcggctcgtggtggtggtggtggtgg

SEQ ID NO: 397019 - DNA, 355 bp, Oryza sativa
  unsure (1)..(355): unsure at all n locations
ttgcgattgccagctgtacatttggggcnctggcttgcttctggagggcccagcagaagaacagaaagtactcaccccatttacgctctttaaagaaaatatgattaggaaaaaacattttaggttggtagggtaccattgttaccccgtgactacgtggaatttcatatcacagagaagtgattaggttctatttgtcaatttttttacaggcaaagaaagaactggaactgaaaaatagcctaccagttgctcaccctgcacttcatcagaggggctcatcaatgaatgtgtatttttctggnnnnnnnnnnnnnnnnnnnnnnnnnnnnnnnnnnnnnnnnnnnnnnnnnnn

SEQ ID NO: 397020 - DNA, 693 bp, Oryza sativa
  unsure (1)..(693): unsure at all n locations
ctcgctcgctcggcggcagggagggccccggggaggtcgacgccgacgccgccgtcgacctcaacgccaccaacttcgacgccttcctcaaggcctcgctggagccctgggccgtcgtcgagttcttcgcccactggtgtccagcttgcagaaactacaagcctcattatgagaaggttgcaaaactattcaatggtcgggacgctgcacatccagggttaatactgatggctagggttgattgtgcatcaaaggtgaacatcgatctttgcaatagattctcagttggaccattaaccctttcctactttggggtccaccaacaaaatttggcttctgctaagtgggatcccaagcaagagaataatgaaataaagttaattgatgatggaagaacagcagaacgtttactgaagtggataaataatcagatgaaaagctctttcagtttagaagacaaaaagtacgagaatggaaaatatgcttccaaagaatgcttcggatcctggagcagattgttcaagcaatttacgatgttgaggaagcaacagctccaagcgttacagataattttggagcgcaagacgatcaaaccaaagaatcgtgattcgctcatcagattttttacaaattttggtggctcgtcacccatccaagaggtgccgaaggggatcnggctgagctacttattaa

SEQ ID NO: 397021 - DNA, 321 bp, Oryza sativa
tgtcgcctctgcctccggaagccaccctgaagaaacggccgcgccgcgccgtcgctcgggcaattcctcgagatggagaggagagcaagcagcagctcgttgtagcctatgatctcatattctcatggggaaccatggctagagatgctcgagtttgatcggtttcgcgttgcatttcgattcctctcattttccagagaacccgggtcattgtcgaatctttcatgattcttcacattgatctctgctacgtttgtctttgccgagtaaaacatttgccgataaaaaaatagacaagttctttatcaaaaaaaaaaaaaa

SEQ ID NO: 397022 - DNA, 300 bp, Oryza sativa
  unsure (1)..(300): unsure at all n locations
catatttgattngctttagggntgagtgtggtgagcttgtaaatagaagaacactagtagatggcaagcaaatgganacgatcgatgatgcagtagatgttactgcnaaaatggcaattattagatgaagtcgacacacaaagacagatctcgtttcatttgtacattctacagtctacgtcgatgaggacatgactggatttgtatagcaaattagtactagcagctaataagtgtggattaattatgaaacacgattgtttnnnnnnnnnnnnnnnnnnnnnnnnnnnnnnnnnnnnn

SEQ ID NO: 397023 - DNA, 640 bp, Oryza sativa
  unsure (1)..(640): unsure at all n locations
cggacgggganantnacactaggtggcgatggaaacacttggctcatgtactgggaggttctttgttctatccacttacttggaaatctttttccatctcttttataccacgttctacatggacctatttcagtatctcacagagagcaagttgtctggttaccatactgggttcgccggtgcttgttttatgcctgccggtgggggccttaattcttcccacccttggaactgggcttgcctccccgttttgccctctctttcctggactgggaaggaatcattttgtggaaagagataaaatcccattgttaatccggtggaccaagattgaagcatgaaatttcttggatgtaaaggtggcgcaatacttgtcctgttgtatcttttgaagaagtgaagtttgttcaagtttgaggattagcctcagagtttagcttggtattgtatgacccccaagggagattatgctcaagttggttgcacgtagactgacctgttagctgccagcctgccactttgttgtagttggagtgttattttaaacttttttctagttttattcttactttgttgtaaatactcaatagcaagagatgctgtttatctttgttgattnnnnnnnnnnnnnnnnnnnnnn

SEQ ID NO: 397024 - DNA, 580 bp, Oryza sativa
  unsure (1)..(580): unsure at all n locations
ccaaacttgcgaacccaagtaaacccaaagccgccaactgcttctntcgccgccgccgccgccgccgccgccgctcaccgtcgccggagaagagggcaggaggaggaggaggaggaggaggggggagccatggcgccggagcccgaggacgacatcatgaacgagaagaacccgcgcccgctcgacgaggacgacatcgccctcctcaagacctacggtcttcggaccttacttcgaccagcattaagaaggtttgagaaggaaatcaaagagatggcgaggaagataaatgatctctgtgggattaaagagtctgacactggatttggctccacctaggccagttgggaccttgtattccgataagcagatgatgcagggggggcaacccctgcaggttgcaagatgcacaaagatcatcagccctaacacggcgatgcttaaatatgtcatcaatgtcaagcaaattgcgaagtttttggtttgggttnggcgcaaggtnttcccactgatatcgaggaaggattcgggttgagtttatccgaacaagtaccaattcaattcctttgccaccaagttt

SEQ ID NO: 397025 - DNA, 720 bp, Oryza sativa
  unsure (1)..(720): unsure at all n locations
acgccggcaattcgccgcccgccgcangcggcggccntaaggcgacgtcgaccggtgaggcgtggtgcgtggcgaacgccatggccggggaggagcggctgcagaaggcgctggactacgcgtgcgggccgggcggcgcggactgcaaggccatccagcccggcgcggcgtgcttcgagccgaacaccatggtcgcccacgcctcctacgccttcaacgactactaccagcgaaagggccgcaccattggcacctgcgacttcgccggcgccgcctacgtcgtcaaccaagcgccaaagatgggcaagtgtgagctcccgtcgacggtctgaaccgaagcaacagtagcgaaagactgaagaagagcagcggcagcagccatctcgggatgcgaggatttatgaaagaaaatcgaacgccggacagaggaaggagggaaaagaggcagagatgttggaatctttgcttttcttttccagttttcctccctttctttacctgtggtgctgtgcccgctgcttgactcctgctgcatgtttgctgcggcgtagaaacagattactgtagtagctgtacctctttctttttgcagctttggctaatggtgggggatatctttgtttagtccatgtaactacgctggagtatggagtattactatatgattaacctaaatcactactattatagactgatttgtactaaaaaaaaaaaaaaaaa

SEQ ID NO: 397026 - DNA, 564 bp, Oryza sativa
  unsure (1)..(564): unsure at all n locations
ggcgagccagagttgtccatctcgcctgaacaatgtgccaactgatagtacgtcggtggcggcggacacggaggcgatgtccccgccgtcgccggcgcggcggcagacgccgacgccgacgtcggcctgcaagacggcgcggccgtcgacgcacagccccgggttgccgctgaggtcgaggttccggccgaggcgcctgaggaacgcgccgtcgaacggcacgacgccgtcgcagcccgttcttgctcaggttgaggtggtacatccgcttgagccggctcagcccggcggggatcctacccggtgcaggttgttgttctccagcgacagcgtcgtcaggctcgccagccggccgagcgtctccgggatcgaccccgagtagccggagttggccagccggagctcctgcagccgcgcaatgtcgccgagctccgacggcaacgggacgcccatcgggttgttctccatgatcaggtactggaggtcaaggaggtcggagaggccggccgggaggtggccgcttaggcattgttgctcaatgccaagaatgtgagagatgtcant

SEQ ID NO: 397027 - DNA, 551 bp, Oryza sativa
  unsure (1)..(551): unsure at all n locations
aggatatggtgcttatggcggactggnaggtatgggcggtggtgggagcacaagtggtagaggctcgagcagataccacccgtacggaaaatgagcataagatcattgtggttttttagaactgataataaatctatacctttacattattcccattttctgctttgagaaagttggaacattacattcaccgtgttgaaccagcggcatcagacgtgttctttgatgctttgcattgcatcgcatccggcaactagtacattgattctgtccgctgaaccctgaacctctgtagaagctacagctaaaacaatgttgtatcattagtttaccatgcagccttagaacccttgaaactaaactttgtggtaggaagaatatttgtgtgttggaacaatgtatcgtgatgtaacactctcaatgagcagctaactgttgccagtttggcttatatgtagggagactcaaaaatcatttgacaaaaaaaaaaaaaaannnnnnnnnnnnnnnnnnnnnnnnnnnnnnnnnnnnnnnnnnnnnnnnnnnnnnnn

SEQ ID NO: 397028 - DNA, 779 bp, Oryza sativa
  unsure (1)..(779): unsure at all n locations
caggcttaaaggaccgnggaacttccatttctgngctaaacatcccacttggatctggttagctgtggttcttggtgttnttgcaccctgcacattcaggtgcaggagaggcaccttcttcgtcctggaagtaaattgcagactgttggctacgggacctcaagtcccaatgcatagaagctgagaaatgaaggggagagcngtccatggctggcatgatcggtgctgttctgctgctgttcntgcagttcagttttgagattcaggaggggcacattgcccccttgaagtcaagcactcagcgcgggtgatgagaagagaatcggcacaacatctaatatgtggatatttattccaggacgtgctgcttggtccttgtcgcttgctggaagttcgccttcgccttccacctgaagtggcgtcagattgactggaccgaagatgcagcgctgtagtccccacagtgaacctaagcccctcgctgaggcttaatcagtgtctgttatagatcattgtagttgtagttgagtaaccccaactttgtaactccactctagtaagttaaaacaatgtactaagctcgattgccaattgtactagtagcactatatgtattgtcgtatggactgggatgtcgcagttactgcttgtacagtggagctgcgtaactttaacccattactacagctttatgccgccgatttaataaaaaaaaaaaaaaaaaaaannnnnnnnnnnnnnnnnnnnnnnnnnnnnnnnnnnnnnnnnnnnnnnnnnnn

SEQ ID NO: 397029 - DNA, 561 bp, Oryza sativa
cagctcaagtcagctcaagtcagctcaagtcagctcaagtcagctcaagtcagctcaagtcagctcaagtcagctcaagtcagctcaagtcagctcaagtcagctcaagtcagctcaagtcagctcaagtgaagtccgacattgttgttaagatgcagcaaagcccacactcaaaagagagatagttggtgatggatcaggagctctgagcttggcggtggagcgtgatgctttgctccaggaggactccatcgtttttgcgcccatcaagcagcagcctacactcccgctgccgaagctaccggtggccggtcccttgcggaaatgttctttcacatgacaacttgtggttaatcaaagctctggacatctacagaagaacaaggaatatgccacggcagtgaaaccaacgggcgaacgcgttgaccaccgaagtcgccaccatgcgatttccaccaagatcaccataagccggtcttcgcccaataacgttgccataaaaccccaggcaggggcaagattattggcgaaatgaggacatagttgaagtgatgccatgct

SEQ ID NO: 397030 - DNA, 390 bp, Oryza sativa
caagtggtgagggttttcctttggaagggtttggagtcagtccacagcgggagttgaagcctagttgcatggcccaaaatttcccgacctaaggagctatgaggttgggcatcatgaacctttgggtcatgggttgggcactgcatcacacaagtaatcccaactgggctagcttttgtcatgcccagaaattcacgaaccaaaatttctaagctgaatgtacattaaatctctgtccaggaccagccaggatacacaaaagacaattgttgatgtatagatctacgtcttacaaaaatataaaagattacaaatgcagcggaaaagataaaacaagctagacttgaaagcttgacttctgcagcgggcaactccactccacaggcatcc

SEQ ID NO: 397031 - DNA, 690 bp, Oryza sativa
  unsure (1)..(690): unsure at all n locations
gttgccacgccggnggtccaagaatggctgtccgcgctggaggcccgtgtggcggcgcgcggcctcgtggtccgcggctgggcgccgcagctcgccatcctggttcgcaccgcgccgtcggtggcttccgtcacccactgcggctggaactcgatgctggagtccatcgcccatggcgtccccgtcgtgacgtggccgcacttctccgaccagttcctgaacgagcggctcgccgtcgacgtgctcggcgtcggcgtgccggtcggcgtgacggcgcccgtgctgctgttcggcgacgaggccatggcggtcacccggggtgacgtcgcgcgggcggtgtcaaagctcatggacagcggcgaggccgagtccgacgagaggaggaggaaggcgaaggagtacggggagaaagctcgcagagccatggagaaaggaggatcctcgtacgaaagcctgacgcagctgatacacagcttcaccctgcagggagccaagaacgctccagaacagtaaacagtggaggtgcaaacaaaagcacatttgaatccagaagttacacactgttttctgaatatttttcctttttgttggcatcagatttacactgatttacttcttcaagtcatctgtgtttcttattctgaagaagttaatggataatgtaattttagtaaaaaaaaaaaaaaaaaa

SEQ ID NO: 397032 - DNA, 391 bp, Oryza sativa
  unsure (1)..(391): unsure at all n locations
gaaaaatacacgcgcgaaatttccggataagagcagcgccggcggngaatgtaggcagcgtttgctgttgctgtttttttccctttttttccgtctcgttttgctcccacttcgctgctcccggatccgcgtagggttcttgtgtcgtgtggtggggttatgacccgcggcgctgctctgctttgctcgatttgctgtgcttgccttggaggtcgcctgcttggctgcttttgagagtgagtgtgtgtgtgtgtgtgttttttttttatacctcttttccttttctgggagaatttcccggtcctgggtttggccttttttgcgaacctttgaaccctttcttgttggaatctggggggaagtttatttatgcttaatttggcggttcttg

SEQ ID NO: 397033 - DNA, 354 bp, Oryza sativa
caacaagaaggcgatcagctcgttcttcttctccctctcctccagcggcggccatggcgagattaggccttgccgtctgcgccgcctccttccacctcttccttcttcttgcgtcgacctcctcgctccggcgagctcccacggaggcggacacggccaaccatgccagaagaactgcctatcacttccagcctgcaaagaactggcagaatgatccgaatgggcctatgtaccataacggtatgtaccatttgttctaccagtacaacccgcatagcgcgctctgggacatcggcaacctctcctggggccactccgtctccggcgacttcctcaactgggccgctctcgaca

SEQ ID NO: 397034 - DNA, 673 bp, Oryza sativa
  unsure (1)..(673): unsure at all n locations
gagtaattttcccgtctccttcggcggcatccaccccaattcatccgggaaggggaggaggcgtccttccttcgccgctaagcaagcatccagcccacccagccatccatccagggaaagggtaggggaaggtggcaatgaggatgtccatgcccaggtgactcttagatttcttcggtttgagggaagggaggaagggggatcgatttcttcttcggttctgatttggcggaggaggaggaggagcacgacacccaacgatatggtgggcgtgctgtccaaccgggtagatcggcttggaccttcgccgccggggatcacatctactccttggagaactgcctacctctatgcgcaccacgggatatatattggtgatgccatggttattcattttacaagagcaactggacatgaaattgggacaggaacattcttgggacatgttccttttcagctcatctccagcaacggaggagggtcctccctgcgagaaatgtggtcacctgattaagcagcagggggtcataatgtcgtgcctcgattgctttcttggatgggggcaatccgtanctgttcgactacgcggtgtcccccgctttcttcctcgtgaaaagcgcgaagaggaacgtgcaccctnggcagcctcggaccccgccgacatcgtgatcaa

SEQ ID NO: 397035 - DNA, 1125 bp, Oryza sativa
aaatatgtacagatttcagaaacctggtggaagccctcttacaagagtgtgtcaggttgttgttgcagcattccgtaagtggcacactgaagtgccacatgatacatctcttttatatgaggttgatggccagacttcagcgattgagggaagccggaagctggagcacacaagtgaacttgaattctttgacaaggctgccatcatctcatctgatgatgccaagagtgactcctttacaaatccgtggaggctatgcactgtcacccaggtggaagaactgaaaattctaatcagaatgtttcccatttgggccactactattatatcaacccggtgtatgctcacaactcttctatgtccatagagcagggaatggttcttgacaaccgagttgatctttcattgtccctcctgcatccctctcaacttttgatgtcatcagtgtcatcatctggattccgttttatggccgtgtgcttgtgccaatagctagaaagttcactggaagggagaagggtttctctgagttacagcggattggaatcggattagccctctccatccttgcaatgctatctgcagctcttgttgagttgaggcgtttagggatcgccagatctgaaggtcttattcatgaggatgttgctgttccgatgagcattctttggcaaataccgcagtatttcttggttggcgctgctgaggtctttgctgccataggtcaggttgagttcttctacaatgaagcccctgatgccatgaggagtttgtgtagtgcatttgcgcttgtaacagtctcactggggagctatttaagctcaatcatattaaccttggtgtcatattttacaactcaaggaggggatcctggatggatcccagataacctgaatgaaggccacctagatcggttcttttcattgattgctgggatcaactttgtgaatttactggttttcactggttgtgcaatgagatacagatacaagaaagcatgatgactgtactcatggtaaggtcagtttgtgttagtaataacagattttacattcatcgaatccaatgcattgtacagactagaccatgtaagttaagatgccttagctaaaaaaaaaaaaaaaa

SEQ ID NO: 397036 - DNA, 373 bp, Oryza sativa
  unsure (1)..(373): unsure at all n locations
tgttgagctcgtccaatggcgngtttattattgaatcaattaataataaattaagaataaacttgggagcatgtgtagattggctctcaaagaataataataatatgtgatctgattgatgattgctcgagagaggagcatgattaagctccgtgtgatcgagcatgaagttgtgtgtgtagcattgcaatttgtaactgtgtccagttgttttggacaccgttcaattggatattaattgtggccaccttgtaaattagtagtagttgaaaacattgtattagagctgtaagtttcgttgtaccatgtttgtacatggggtttgtaatgttagctattcaaaaatccatgtttatgtaaaaaaaaaaaaaaa

SEQ ID NO: 397037 - DNA, 583 bp, Oryza sativa
  unsure (1)..(583): unsure at all n locations
cggctgggattgctctaggagagttaacatcattgagtgacctgtatgatacccaatcgatagcgctgctgttcttgatcgggattgtttcggtcacaccaacattgttgggcaaggacgaagcgcaagaaaaaacaacggaaattgcagttaccgcgtcatgatcaccgaagcgccgatccgcatgccctcacctgtacatatgaagctccagcatgcagggttgcttcagaagtagtaggagcatcaaaggcctgacaacaccatggtttgcaaagactacacagcatgacaggacctccaaccccaagtgcttccctgacccctctccattactggaagcctgcttgggttgccatcgaaacatttacgaagtgaagtgtttagccacccaaattatggagtctggggaggcacaatgcccatcaggcaaagctgctttgatgtgtaagcattaagccaagtagtgttgtttagatgggacaagcaaactgatctgatccctgtatatattgatcagattcattcaatccatattcagtggttcaatcaaaaaaaaaaaaaaaaaannnnnnnnnnnnnn

SEQ ID NO: 397038 - DNA, 1128 bp, Oryza sativa
  unsure (1)..(1128): unsure at all n locations
ggcgccggctcgcggcgatcgaccccacgctgtgcgccgcgtggatatgagccaccagggagacatcatggaggtcgacgaggcggtggccatggcgcgcgccgcggntggaccgagccgccggcaccatggaagctttctgggccgactccttcgtcaccgatggcctcctcctctacatctccgagagagcctcctcattgaagagccttcaactcagcatgtgccttaatgtcagtaatgaagggatggcagaggcaatgaagggctttcctcggcttgaggagctggatattacattctgttctttgtatggtgatgtgtgtgcatccgttggcaaagcttgcccagagctcaaatgcttcaggctgaacgaacgttatactttacaaatggattatgcagcccctgatatcatggatgatgacactgaagcattagggattgcaaagcaatatgcccaagctcagagagcttcagctgattggcaacaagctaactaatgatgggctgatgtcaatccttgaccactgccagcaccttgaatccctggacatacgccagtgctacagcattcaaatggatgatgctctgaaatcaaagtgttctagaataagtgatcttaagcttcctcatgactcgatctctgatttcaagtaccgggcttacattttcagcagcagtgccttttctggttctgatttagagcttgatatgtatgatgatctgctggatgtggtcactgatgatgatgatgctgactttgatgatatggatgattatgatgatgggggctcagatggtggcatgtacgatgaatttgatatctgatgagaattacactgtgcatgtgaaaatcgagagctagaacagtttggtgcttctgtgtgttgagaatatggaattaggtcttcatatcagcggcaatgtttatcacttagctacagcagatctgctggtgtttatattcagtgttcttttctggcctcattttccaagaatctgtaattgattatatgttgactttgctacgagtagtagttttgcagacatgttctgagtaggatgcttgcaaatgtgataatattgcattcctgngnnnnnnnnnnnnnnnnnnnnnnnnnnnnn

SEQ ID NO: 397039 - DNA, 419 bp, Oryza sativa
  unsure (1)..(419): unsure at all n locations
ggagggcgctccggtcggtggacccggaggaggaggcgctgaagaagaacccgtggatggatgagatcgatcggttccccgtggttgttcccagggtgtccaggatttcaaccgactgagcttgaatagattaatttggtgctcctttggaattggcacttttgttaggtggatgcaccaaggtgattacggattgttgggttttgtggtacttgcaaattgtttttgatcttttaatctattgttagggtaggaacaggagtgtgttgttgtgtctgtcttgtggttgtacgttcaccacttcagcttgggtgtgtgatcagtcctccaaattttctgattatggaccaaatttggcgaattttgattggacgnnnnnnnnnnnnnnnnnnnnnnnnnnnnnnnnnnnnnnnnnnnnn

SEQ ID NO: 397040 - DNA, 695 bp, Oryza sativa
cacgtacgtatcagtggaaaaggcccactgtttttcttaaagaaggtgattccttgccaccagatgttgatccagatacagttagatggattcccgtaaaccacccatttgctgctgcttcaactgaagtggatgaggagactgctaaacaaaatgtttatcaaaaggatggggtcccatcccgtgtcaaagctgagcatgaagctttgcagacaaggctagaggcttcaaataatgttaacaagttctcttctagccaaaggaatatgcagcttagtgacaggcaactaagattatcatcaaacgagtcatctgggagtcggcaaaactcgttatctggcacagtgaagaaccaaaatggtcaaccaaccttggagtctgaaaagcgtagccctggacaacaactcacaatcaaaaagtctggaagaacaataaatttgtgatttgtgtcaactccttagcacctggcttcaacagcttgtcagcttcgttgtgtagtgtactgaggactcaggttttagctgtagatagaagaattttggacctgtaggcttacgtagtgacttgagcatagggcattgctacggaatgtatttcgtatgttgtaaagggatgggcatgagcatagggcattgctacggaatgtatttcgtatgttgtaaagggatattttctttctcaaaaaaaaaaaaaaa

SEQ ID NO: 397041 - DNA, 323 bp, Oryza sativa
  unsure (1)..(323): unsure at all n locations
ctgcctcgccagaagcgtcagctgatgctgcgaggagtgctgaagaggccttccttcgggtgcttgagctggaaattggtttctgggaccatgagctcttctcgatcatgaacggcaaccagcatctcgatcatgaactacttgggagaaataatcgaataatggtgcagccggttccataccgaaccctgcagtgtactactgtgttttcctcttccttttatccccatttctctccttactcccatgaacattgatgtatcatcgtaactatgaaataaatgaaataatgccgtttcctcctnatcaaaaaaaaaaaaaaa

SEQ ID NO: 397042 - DNA, 726 bp, Oryza sativa
  unsure (1)..(726): unsure at all n locations
atcagcatggaaggaattttagtaggtgaagatctaaatggttgtgcttttgtgtatggctcattaagttttgttgacaaagtgtcatgcggactagctctgtatattcttgagtcctatcaaggaagtaccaataccagacagaacctagagttggcatttggttattcagttacaagacttggtttggggttagtcccagctgcctgttcactgctctcagccataatagcttatacgatggacctacctgacactcggcgaagacctttagttgaacctcttctcgcataactctgctggtagcacttccattgcaactgtatatatgtccaacggccaatgactccactgctggaggctggagctattaacaacagtacagttatacgactcgaaaggaaagaaactcggacattgtcaattcattttgacttggtctgaaattctgaattaagttatagatgacacagtgaaaggtactcagcaacgagttgagtatgtaccaaaagtagcatgggagtacaatcctgtgtaagttaatccaaaatccccttacaaatgtagcctagccgcattgttcacaagaatacatagcttgtatgctaattttatatttattcgctttggatgtaattgaattaccatttagctatttttactaaaataatgaattggtctttttaattttcgcatttnnnnnnnnnnnnnnnnnnnnnnnnnnnn

SEQ ID NO: 397043 - DNA, 446 bp, Oryza sativa
tggacatgcggagcccagctgctgcaccaggacgctggtggaggagctcaacaagcgcctcttcttcaacaccgtcggcgccgtccacgacatcggcttccgcgaccctactacttacggatcgtcgtcgtcgtcttcttcgtcacagcatcgccggagaagcagcagcaaggtcgaccacaagcaccactacatgttctgaataaactttttcagagcaaattagtactctaatttggtatgtacagaatgatcgatcagatgcagagtacgtaagtgtgcagctagctatctagcccgcggccacaaaattgtgtatatttggagagaagtgcatatatgagtgttgttcatgacaattttgccatgcgacatgtgaatgaatatatgagtgatatttgtacatatggtatgagtgatatttttcccaaaaaaaaaaaaaaaaa

SEQ ID NO: 397044 - DNA, 531 bp, Oryza sativa
  unsure (1)..(531): unsure at all n locations
cagattgctgagacagagagcttcaagntgaagaagcaggatggactgntgaagctccagggatccaaagaagggaggaaaggncagctcgcgatcgatgcagagatctttgaagtgacaccatccttctttgttgttgaggtgaagaagtctgcaggggacacgttggagtacgaaaaattctgcaacaagggcctaagaccttctctccagggacatctgctgggatggtcagtcagagcatcccatcactggcacagtcatcaactctgactcagtcctctaagtcaatctcgagacatgccatttaagtgcaacctcataagagatgcagtaacaatccattttcctctctccttttccctttcatcaaagtgctgagcctgagagtattctcacttgagcatcaggcttagggctctttgatgataatttttgccagttttccttgtatagtagcagtttgtctacatggatctcctgttctttcaccaatagaaacagggagattgacaaaaaaaaaaaaaaaaa

SEQ ID NO: 397045 - DNA, 478 bp, Oryza sativa
gattttcctgtagctcgaccaaaggagaagggtaaagaaaatgccgctgatgctcctatctcaaaggagaacggtgaccaaaaatgcccgctgatggcctgtaacgccaaagaagggtaacgaaaatgtcgctgatgctggtagccacaaaggaggggagtaaagaaaatgctgatgatgctgctaactccagaggaggagtaaagaaaatgctgatgatgccggtaacgcagagaagagtaaatctgatggtgctgccagcggtgcaactggctcgtaaccagcttataccttttgtaaaccgttgcggacattgctgtagctgcgaacctacattaggatacgtactcttgcgaaatagaaattgtggctagtttgaatcggactgtgcggatgatggtgttatggtacatgtgagatttttcctactgatctgggcctccagccatatactttagttgacaaaaaaaaaaaaaaa

SEQ ID NO: 397046 - DNA, 812 bp, Oryza sativa
  unsure (1)..(812): unsure at all n locations
gaagagggatgagctggccagcctgcagcggaagcttgagcgccggtcagacctgaccaccgagacattggggagggcgaacaggacgcagcttgagatcctggtggccatcaagactggaatcgcgacgtttgtcaccggtaaaggccgggtaccaagcagtgagcttgtagaaatgttcctcatgacacggtgccgcaacctgaactgtaagagcacgctgccagtggatgactgcgattgcaagatttgctccaccaagaaagggttctgcagcgcatgcacgtgttcagtatgccacaagtttgactgtgctgcaaatacctgcacctgggttgggtgtgatgtctgcggacactggtgtcatgttgcatgcgcgctggagaggaatttaatcaggccagggccgacgctgaaggggccaattgggacgactgagatgcagttccaatgccttgcttgcaatcattcttctgaaatgtttggatttgtcaaggaggtgttcaattgctgcgcagagaactggaatgctgagactctgatgaaagagctggattttgttaggaagatatttgctggttgtgaggattttgagggcaangggcttcatgccaagggctgaagagggcctcagcttgcttggaaagaaaattatttctcctttggaagnaacaaacagtatcnttacaattcttcaaatatggagttacagattattctgttactgggagcacggcccaaaggtanatttggcanctcaggcaagtcaaatctacaggatatgcggtctcttcaaacgccaaagggtcaga

SEQ ID NO: 397047 - DNA, 458 bp, Oryza sativa
  unsure (1)..(458): unsure at all n locations
agtctacaccatatttgcaagagggaggagtgatgtccttgctgggattattactggctgatggctcgctgctagtgaaaaactgcccaacaagtataggccaagagactgtaggagtatgtcccggaatcagatagaagtatcatagaactcatggttttagtaggcgtaagagcagatgttatttgtaacccatttatggactggtaggtcataggccaattttcctttgtactgtggcgttgtgtcgtcatggtacatatgatgtgatataagaaataaaaaccgtaatatcctctctagcctgtgaataaagatgcaacggcttgtggcaggcgagtaggttgtgtgaactgctgtcctatctccctctcaaagaaggaataaaatgtttcccctatctgtttttcagccttcaaaaaaaaaaaaaaaaaannnnnnnnnnnnnnnnnnnnnnn

SEQ ID NO: 397048 - DNA, 716 bp, Oryza sativa
  unsure (1)..(716): unsure at all n locations
ggcattgagcacgagagatgccaatggggggagcttcaacggaagctcacattcatcggagcagcactacagaaagccgaggtccagcgagctgtcaagggggaatttggagaatggtgtgcggtcctctgtgagccatgaggatgtggcaagtgtttcagctgaggatagtgcacacggcggtggaggaaggatactggacgactgtggcctcctgccaaacaattgtttgccttgtattgcctccgctgttggtgtaaatgagaagaagagaccactttccacaagcccaactcattccatgaagatgccctccttaaagctctcattcaagaagaagtctggagaagctcatccttcttccacactcattggtctacaaaggatttccttgaaaaggcctcttagcaggttctcaagttcagttatgcttactggaaaagaaaatactgaacagctggtctcatattgatcctggcactttccgagtccgtgggtcaaactattttagggataaaaagaaagagcttgctccaaattatgcagcgtactacccatntggagttgatgtatacttgtcaccgcaaaaactcaaccatatatcccgatatgttcaacttcccgatgttcaaatctccagtaaacttccaccacttttgggggtcaattgtacaggtncactatatcctgcctcattattcaaaatggaatcgtgg

SEQ ID NO: 397049 - DNA, 539 bp, Oryza sativa
  unsure (1)..(539): unsure at all n locations
attcagtggtcccctcttggaacatacttggcaacagtgcataggcagggctcccaggtgtggggtggcgacgataagtttgagcgtctaatgcgatttgctcatgcacaggtgaaactgattgacttctcccctngtgagaaatatttggtcacatatagtagccacgagcccagcaaccctagagacactcatagggttgttcttaatatctttgatgtgaggactggcaaagtgatgcgcgactttaaaggaagtgctgatgaattcagtgccagtggaaatatcagtgtttctggtgtttcatggcctattttcagatggggtggtggaaaagacgataaatattttgcaaggcttgggaagaatgttatatctgtctatgagactgaaacattctcccttcttgataagaaatctctgaaggttgagaatgttgtcgacttctgctggtctccaactgatccaatcatagccctttttgtccctgagttgggtggaggaaaccagcctgcaagggtgagccttgtgcaaattcc

SEQ ID NO: 397050 - DNA, 842 bp, Oryza sativa
  unsure (1)..(842): unsure at all n locations
gcaggccggcacgcccgacaccgtgtccgccgttgcaggctcgttcggctacatggctcccgagtgtggttacacgagaaaggttgatgagaaggtggacgtgtacagctttggggtggtgctcctggagcttaccacgggcaagccggccaacgacggcggcgagcacggttccctggcggactgggcccggcaccactatcaatcgggagagagcatccccgacgctaccgatccagtgcatcaggtacgcgggttactccgacgagatcgaggtggtgttcaggctaggcgtgatgtgcacgggggccacgcccgcgtcacggccaaccatgaaggacgtgctgcagatcctggtcaaatgctccgagcagacgcaccagaaatgcaaggcggagagcgggcaggaggagtacgaagtggcgccgctgttgctgccgcaacgaggcagccgccggaaacagcccgcgaaggccaaaggagcagacgacgacgctgacgagaggagcgatttcgattccattgtctgaagaaaggagcagagcactgccgcacctttacctactaggaaacactgatgtgagcagggaatggttagtctatgagccagcactgcactgcatgaatataaacgccatattagacagtactagaaaagatgatcatactctattaccttaccttgatggtacacttcttagtactattttgttagctgctcgcggctgatcagatcatttgagctttgataccagtgtgtaagagtacatacatagttcaaactgacatacgaaaagtgaaattatgtccaaaannnnnnnnnnnnnnnnnnnnnnnnnnnn

SEQ ID NO: 397051 - DNA, 503 bp, Oryza sativa
  unsure (1)..(503): unsure at all n locations
gatctccctctctccctcttcttcttctcctcctctcgccatggatgccaccaccaccgtgtccatggagatggaattgccgtggggcgcgcggtgcgcgaggctcgccttcttcgcgttctcggtgtgcctggcggcgctcggcgtcgtgctcctggtggcgaggcggtggccgtggtgcagctgccatgtgtgccgcgcctacctgacggggtcgtgggcgagggagttcaccaacctcggcgactggtacgcgcacctgctccgccgctcgccgacgggaaccgtccacgtccacgtcctcggctgcaccgtcacggcgaacccggcgaacgtcgagcacatgctcaggacgcggttcgacaacttccccaaggggaggcccttcgccgcgctcctcgggcgacctcctcggcgacggcatcttcaacgtcgacggccaagcgtggcgcccaccagcggaagatggccagcctcgagctcggcagcgtngccgtgtgctt

SEQ ID NO: 397052 - DNA, 397 bp, Oryza sativa
cctgagggcgttgtcgtgctgtctcgccccttaagggtggttgccgggcaaaagcctagtcctggctcctttgagccttgacggatggctgcggcggttttccgtcgcttctcttcttgaagacgtcgttttggcaccctcttgctgtgtggcgatctcgtctgtgttcctttgttggtctagcggcggtcggtccggtgctagccttctcccggacttgtgtttaggcgctgtcggtgtgtgggtggtggtattttttttctttttcctggttacgaccctccagggttgtaatcttgtaattttttcctgctatgtcaatagaacttcgcaccgtcttgtgcgagttgttaaaaaaaaagccattaaagcaagtactataaaaaaaaaaaaaaaa

SEQ ID NO: 397053 - DNA, 584 bp, Oryza sativa
  unsure (1)..(584): unsure at all n locations
ccaccatcagaacgnccgaggtcatggacncggcggcggctgacaccatgtccgacagcttccagacgcacgantccgacatcgacaacgcctccgcccgcctgcggcacggtggctgcggcggcggcggcttcggcgacgtggcgccgccgaggaatgggttcgtgacggtgaaggaggacaacgactggttcaccggcctcaacttcgacgagctgcagccgccgtacatgatgaacctgcagcacatgcagatgcagatggtgaatccggcggcgccagggcacgacggcggctacttgcagtccatcagctcgccgcagatgaagatgtggcagacaatcctgccaccattctgagatggatggagcaagaaaaaggttgctgtagataaagggcggaaataggagtgatggctagaaaattattagatttactagaacgaaaatgattagaaatctggcaagcatgattctgcaaatgtggtggtagatgcttgcagtatgtaattcatttgttcagtatatgcatttggtaatctgcaaaacatctccttttgttctcataaaaaaaaaaaaaaaaaa

SEQ ID NO: 397054 - DNA, 1077 bp, Oryza sativa
  unsure (1)..(1077): unsure at all n locations
gtgctctccagcgtggtcgccggcgttcccgagcccgtctccggctgcgccttcaccgccgcccttgcgctcctcatcgccgccggtggcacgggcgtcaccgacaaagtgaaccagctgctcactttcgtcatgataggattactgctgacgatcgaggtgtctgcagtagcattcggtgccggcctgaccctgccagctaacaccaactgggagcaggtccctgcaacgcttccggtgatcatcttcacgctggtcttccatgatatcgcaccagtgatatgcgcgtaccttggaggggacctcgtgaggattcggctctcgatactcgtcgggagcatcgtgccattgctgtccttgctcgtgtgggacgacatcgcgctcagcatctccacggatcttgatgggtttgacatcctggaatatgcttaatacagaatggagttatactgttgtggagacgttctcactccttgctgtcgggacgtcgctggatcggaacactgctgggagcttcacagttcttcattgagcagatgaccaatcttgtctcttcttcagcccaaggacatgaagaagaagcattaaggcatcgtggagcgaaaacggctgtggacaacaacaggctcagctacaatcgctgcaggggctgtggttgccccaaccgtgctaattgcagctaccgttccgaattcattctccattgctactgacattgcaggcggttactgcatgaccatcttgtatggcgttcttcctccattgatggcgtgggctatcgcctccaggatgtcagattcgagagctggatctgtcgaagcggaatcatctgtcgccggtggcagtggcaatgtggacttgactagtgcaaagccagttttagttagggatgggggtgttctctgtgctcatggtctttgagcaaatgtcccaagatttcgttagttttcagtcctatctccttgcatggacaggctagattgcagtatagaaagaagtagctgctagcaagtgtacacgaactaatgattcagagaataatcgttaggtttnnnnnnnnnnnnnnnnnnnnnnnnn

SEQ ID NO: 397055 - DNA, 987 bp, Oryza sativa
  unsure (1)..(987): unsure at all n locations
gctcagcaacaactcatcctagagcttgcagagcaagagggagttgaagtatggcaacctctgttccgagtgtactactactacctgtgcctacctgcaccgatatgctagtctcaccagtagaaggaggagatctgctgcactgtaaaccccactttgatcaccatcctaatgtctggggcgattactttcttaccttctcaccctgcactccatcaatgcttctgaatatgaagagaaaagctcatgtttccgaggaacaagtgagaaggatgatacttgagtgttcttctggccccaatttgcacgtaaaacttgagctcgtcgacaccttagaacgtctttgcattgactaccactacgagaaggagattgaaaatgtgttgcgccgggttcatgaggaagaagacgataccgacaatcactatgacctccacactacagctctccggttctatctgctcaggaagcatggatactatgcctctccagatgtgttccagaggttcagggacgaggaaggaaatttcacacgcgatgataacaataacggcacaagaagcatgctgagcttgtacaatgctgcccatctcaggattcatggggaggagatactcgacgatgctatcgtcttcactaggaactatttgcagtctgtggtaaaacatctgcagtcgccaatggcggacgaggtgtgcagtgcacttaggacccctcttttcaggaggccaagaagagttgaagcaaggcactacatctcagtttacgacaagttgcccacacgaaatgagaccattttggagttcgccaagctcgactttgggattttgcaatctctgtattgcgaggagctcaatatcctcaccatgtatgttctaaaaatcactagattaggtccaattatcgtttctgctataggaattggatgaaaattatcatcttggtgacatgcttttcaaactnnnnnnnnnnnnnnnnnnnnnnnnn

SEQ ID NO: 397056 - DNA, 421 bp, Oryza sativa
  unsure (1)..(421): unsure at all n locations
aagnatatnnnnnnncgattagagannnaggacaaaacgttgtagtnnaacgnnaaggcaaaaaaggcatcatctgaagaagacaaatagagagaggaagacgctaaagttgatgcagaaagcttcctactcccatacgtgcatttgccttttggggcatcgtctgtaatataggaagatgcctcatacatattaaaaatgaggcatcactgactgggtttggggtttggggacaaggagatcaaggtagattagcggcacgcttgtaaattatggggggtaaacactgtagtgttggtagacaaatagatatgcatgtatacacaattagcagattattgtgtacagacaatcatacctttgatgggacatcttactcccatgaaatcatagacatgttgntatgaaaaaaaaaaaaaaa

SEQ ID NO: 397057 - DNA, 903 bp, Oryza sativa
  unsure (1)..(903): unsure at all n locations
aaaagctcgattgttcttggtttatcccgtggctattttggatgctgcattcgttgtttggatttttatttcgctagctaagacccttgacaaacttcaggccagaaggtcaatggccaaacttgacatttacaggaaattcacaatagcattggctgtaactgttctggtgtctattggctggattggctatgagatttacttcaaatcaacagatgtattcaatgaacgatggcagtatgcatggataattcctgcgttctggcatgtcttgtctttctcacttctttgtgtcatttcatacctgtgggcgccgtcacagaactcaatgaggtttacctatggatgcaagcgaaaactttgatcgagaggacagtctgtcactaataaggccaggtcccattgcttccaagaacgggtggagtttatcttcttcaccagacaccaaagcaacaaagaacgttacagttacatcttttgatggagatgacgaagaaaacaaaagggagtagaaggggcactgtgcatttcatgagggagagaagatacagccacattcaaattttggtatgcagcagatcacactttactaattctagttgtcgggatacgccaagggaattatggaagtaatctttattgaattcatttcctccataatagtagtttttcacacggtgcgccacgttataggcatcactgtatggatgatgatatatatgataggaacaatttatctatgccatccagaggatgtgtggtgtataatgtgtatttttgtagatttgatgctgcttctggtttatgtgaactccaagattgtcatgtacggtagaagagaatgttgtttttctgtgttttnnnnnnnnnnnnnnnnnnnnnnnnnnnnnnnnnnnnnnnnnn

SEQ ID NO: 397058 - DNA, 584 bp, Oryza sativa
  unsure (1)..(584): unsure at all n locations
tncggcggcggcntggacttcatggaggagtcgatgcggccgtacccggcggtggtgaacgacgaggggatgtaccgcacgcgcgggcgtcggcggagcggctgctgggcgccggcggcgtccgcgtggcaccgcagctgatgggcgccgaggacttcgggttctaacgcggcgcggatgcccagcgccttcttcaccatcggcgtcggcaacgccaccacccagcagcgcccgggcggcgcacaccacgcactccccgcacttcgtcatcgacgaggccgcactccccgtcggcgccgcggtccacgccgccgtcgccatcgactacctctccaagcacgcgtcgtccatgtgaagaattaaggatcagtgtgtgcttgtgcatgcatgtgcgtgaggcaaagaagtatcgtttggtggtcataggtacagtatgtgtagaggatacgtagcatgcgtacacattctcgccatacatagggcatgtgctatattttagtgcaaaaattctattgtttctcaaaatataggttaaatgagatataaaatacctcgttaagtttaaaaaaaaaaaanaaaaannn

SEQ ID NO: 397059 - DNA, 758 bp, Oryza sativa
  unsure (1)..(758): unsure at all n locations
gtataatcctgcctcctactagctataatggcagcagctgcagcatcatccgtgtccctccccggggcgagggctctcccgacgtggtccagctccgtgtccggcgactcgcactcgttggcgctgagctcgtgggcggcgcggcctcggtcggcgcggccactgcgggcgccggcgaggatnggcaacgtgaacgagggcaaggggatcttcgcaccggtggtggtggtggtgcgcaacatcgttggcccgcaagcgcttcaaccagctcaggggaaaggccatcgcgctgcactcgcaggtgatcaccgagttctgcaagaccatcggcgccgacgccaagcagaggcagggcttgatccgccttgccaagaagaacggcgagaagctcggtttccttgcctgatcgacatgcccttcctaattcctactagctcatttgattggtgtggatttcctctctgaatgaatgaatttcctgtagctagctagccagccgcgccttcctccctgcgtataaatgtgtcttgtgcgtacgtatacctcctcttctgaccttcaattccatccatccatgccatggcggcatgaacgaatgaattagtagtaagtaatacggcgcatgcatgaacggaatgaataatatactatataatgcgtgtatacagacactagcgctggcttagcatgtattgatgatcaatgatgtatatgtatgagactnaggactttatgtagccagttaagcggaaaaaaaa

SEQ ID NO: 397060 - DNA, 376 bp, Oryza sativa
  unsure (1)..(376): unsure at all n locations
ggaattcattgcatggcattgaattgtataccgcaaaaagcgaaggtaaggaagtgcatgaatggatatcaatcaacattcaggttttgtgtaaatgagaaaaatggacaaaccaccgggcagtcaaatggttccttgatccaacaaggccagaatttccggtgtcattcttatggttctcataacagcagtgaaactaaagagtgcagccttgaagatggcactgattcatacagggattttgaagaacattcaagaggagcctcccaattttcagataatcaagttgcagcaaagaaaaaatcagtcaaatctagtcaagggttggctgaagcttgcaaatttgtttacaacgatgcaaaatttgtgaatgnaa

SEQ ID NO: 397061 - DNA, 724 bp, Oryza sativa
  unsure (1)..(724): unsure at all n locations
gagctcgacacaaatacagggggactcgtcttcttccccgagctttgcgagcagagtcgttcagccatggcgcggcaggagcagcagcagcacctgcaggtgctgagcgcgctggacgcggcgaagacgcagtggtaccacttcacggcgatcgtcgtcgccggcatgggcttcttcaccgacgcctacgacctcttctgcatctccctcgtcaccaagctgctcggccgcatctactacaccgacctcgccaaggagaaccccggcagcctgccgcccaacgtcgccgcggcggtgaacggagtcgcgttctgcggcacgctggcggggcagctcttcttcgggtggctcggcgacaagctcggccggaagagcgtgtacgggatgacgctgctgatgatggtcatctgctccatcgcgtcggggctctcgttctcgcacacgcccaccagcgtcatggcgacgctctgcttcttccggttctggctcggattcggcatcggcggcgactacccgctgtcggcgacgatcatgtcggagtacgccaacaagaagacccgcggcgcgttcatcgccgccgtgttcgcgatgcaggggttcggcatcctcgccggcggcatcgtcaccctcatcatctcctccgcgttcngcgccgggttcccggngccggngtaccaggacgaccgcgcgggctcaacgtcgccagccgactacgtgtggcgga

SEQ ID NO: 397062 - DNA, 677 bp, Oryza sativa
  unsure (1)..(677): unsure at all n locations
ggaacgaggactnaaagccccagatcatgggcccacgacgancagcagcccgtgcntcacggtgcagttcgaggtcgacgagccgtcgtcgtcgatcgactccatgatcnccgcgctccggcggctcaaggncatgagcgtcaaggcgcgcgggatccggtcgagccatgtccgggaacaggctgtggacggagatgaacgtcgagaccacgattgcggcttgtgaagtggaaaaggcagtggaagaggctctccaaggaagtagagaggaaccagcctgacagcgatgccccatttcctggaagcaaaggctggacacagacatctcatgtgcaaaatgtgttttgatcggttttgaaacatgatcctgctgggacccccatttgttcatttttttaaaagcttgtgatggagcaagtggaaaaaaaatctccatatctccttgtcaatgtaccttttttttgtccatgtagatacaatcatacaaataatagcttcctctcttttctacaaggaaaaaagaaagagaagagtacaaaaaagatttaagcagcttgtttatcagttaaaaaagaaaagggaatcagatttgtcatatctcagtctcttcctgttccaatcacaaagggatcaatttcacatcccacataaactcnnnnnnnnnnnnnnnnnnnnnn

SEQ ID NO: 397063 - DNA, 779 bp, Oryza sativa
atggaggaaaagatcaatgaactgctagaaaacagaaatgtcatcaacaaggttaactgtaagatcaacttctgggggaacttggacatgtttgagccaatcagtgagggtaccagctgagaaactgatggctacccactgctgaaaacacgggactggtcttctctgtttgcatgccatacaactccacttctggagattgtcaatgcggtcaataaggtctgtgcagaaaggagggatatactgcagagggaggatgctgacagtgttgcgaataatggtgtgtattcagacatttcagtggcagatctggaccgccatatgtacagcgctggttgccccgatccctgacattgtgatccggacctcaggtgagactcgcctgagcaatttccttctgtgggcagacgacgttcagtcatttggcagaatccagaccctctttggccggagttctctttcaagcaccttgtctgggccatactccagtaccaaagagttcacccttctattgagcaaagcagaaatctggctaagaagcagctgtaatcacatcctccctgggaggagatagaaaccatcatacaagatatctgtagttacacaataatctgtattctcctgtggtatctcctggaatatgaaatatataaaggatagctatgccattgtatgcttgaacatgtggtatgcttgaagttgggccaaatgtgtgaaatgtaataacatttggtctaagcaaagtgccttactttccctgaaaaaaaaaaaaaaaaaaa

SEQ ID NO: 397064 - DNA, 382 bp, Oryza sativa
ggctgtggagcattacactgctgctttgttaagcaataccgagtcaccgcgtttttcagcaatctgctttgctaaccgcgcactgtcttaccaagcaatgggccaaattttagatgcaatagcagattgctcactagccatagcccttgactccaattattctaaggctatttctagaagagctggtttgtatgaacttataagggactatgatcaggcagggaatgatcttcgtaggttaatttctcttcttgagagacagcttcaagaaaatatatacacgccttcagaaaaatcagatggttattcgcagcagtctggaaccgatccaatcttaggctttctgctttgggagcgggatgccaagaagggggatctcact

SEQ ID NO: 397065 - DNA, 400 bp, Oryza sativa
  unsure (1)..(400): unsure at all n locations
ccgaatgtccaggtttgcgtctcttggtgtgccagagttttttgttgtatgcccagtgttacttctctttctcacagccaaaaaaaaaaaaggtgtgcatagatccaatggtatgtatagttcttgaagcagttgtaaatggaatcagaaacactgtaaatacgggtacacacccatttacatgagcgtggcagaggtatatgatttgtttgatgtgttgattgtaacacggtgattttgtaagcaggattttttttttctttttaccctttgaagctgccctcagtacagttttgtgtgaaactgaaccagtgagtgattcttttgttgtaacaaacgattaaagctgcatgaatgaattgtgtgttattcttgttgctnnnnnnnnnnnnnnnnnnnn

SEQ ID NO: 397066 - DNA, 687 bp, Oryza sativa
  unsure (1)..(687): unsure at all n locations
ctcctctgccagcagtgactcacctcgccaccacggccacggtctcctcctcctcctccacacctttataatttgtaccagctgccttctttccaccagtcgacgacgacacggctcggttgttgctttgatcgatctgagctgcgttcgcttgccttgatctgagatcggcgttggtcggggagagtcaagagttggggatatatacatggacgcgtacgcggggtgccggcgcggcggcgcggcggattgcgaggagcaggaggaggatatcgggtcgccgtccacgtcggcggggagctcggcgcggtcgtcggggtcgtcctcggagctcgccgacgacgcgagctcctccttcctccttccagctcggcggagcgccgctttcgagatgtccgacctcatgacgcagctcccgttcaagtgcgtgccgtttgctctagctggtcgcgttcttcttgatctttgatgatccttgagctagctgagctgacaccggagtgttttntttttttcatttttttcgtttgcaggagggggttgtcgaggttcttcgacggaaagtcgcatcgttcgcgtcgctggcggcggtcgcctcgctggaaggacctggcgaagcgcccgaaggaagcgcctcaagccggtcgcagagcttgcggggggaagcctggangcgcaaccgggggg

SEQ ID NO: 397067 - DNA, 890 bp, Oryza sativa
  unsure (1)..(890): unsure at all n locations
cttttagtgagtaaagactatgatggggagaccgatgatgagcttgatgcagatgttcaacaatacttgcgtgctagtactgcccctggaataggcactaagagtgagttagaagtttacttggaacagccactattggaatggtacacatcagacaaaaccacatttaatattttgcattggtggtcactcaagcaacatgagtttcctattctcagtttctcactagacttgctcgtgatgttctggctattcaagtatcaaccggcgccccggaatctgccattcagtgtccggtggccgtgttattgatcccattccgtagccagtctagaccctgaaattgtgccaagctctgatttgccaccaaagattggactgcagcatcaagaaaaggtggaaatgtggttgggtctatcttactgagaaggacatggagaacctggagccagaacttctgtgcccatgttgtccttggctaatggaacagagccaagagacagagacagtggaatgttctaatgaggatggcattgccgccaatggatgtttgaagaaaatgttggtccaatttaattttccaagttacatctaatttccaagtttccatttcaaattagtgtactcctgctgcacaagtggatgagatatgttttgtgatgaaccatgtactgatgtgttttgtgattgaactatgttttgtgatgaactatgtatttatagtgtgatgtgttttgtgattgaactaagtactgaaatactgatggactgacgtgtcatgtgtgttgctgttctgtgatgattaatgaactattgctgttctgtgatgattgatgaactaagtattgatgggctgatgttcnnnnnnnnnnnnnnnnnnnnnnnnnnnn

SEQ ID NO: 397068 - DNA, 864 bp, Oryza sativa
ccagatttgatacatgccaacctgttgcctctttgcagaaccagaagttccttcctttggtctagctagcaagagatcttacttgtgagaggaagaacaagaggaggagaggtagtatagccttggccttctttcttcagatgaattcagaagtaggaattcttggttgagattatactgcccatgccagtgagctgacaagagagaacaaaaatggagaaagaacacatcaagatggccatcctgaagcaggaacagaccttcagaccaacaggtcaatgagctgccatcgtgtgtaccgggttcagaagcaactgatgatagagatgcagagcatctcaacccaggctcaagcaaaagcagacaaccgaaccataccaagattggagatggaccatcaacaatggtacagaaactcgggggagaagaaggcccccgaattcgttgaagatttcgaccttgaactcacactggccaactggggctggtaggaagccaggagaagccatccaactcggactccggagcaacagtgtccatcgtcgacttctgctgaatcagagtcggagccagcggttccctgagtccaatgtagccctaaggtttcagaatgagagcaagaggcatgatgatcagctcatgcaatctccttggctctatcaatgtttaagtctgaagatggcatgatgacttagctatgatgggtggctttatgagtgttcaaaaactcaaaaatctcagataaaaaaaaaaggcttcttttatgtatatgtatatgacactaattcagagtaactggaaggctcaaaagagtgagaaaatgcacacaaaagaaaacatgcaacatgaaaaaaaaaaaaaaaa

SEQ ID NO: 397069 - DNA, 779 bp, Oryza sativa
  unsure (1)..(779): unsure at all n locations
gtcgagctgccttactagatcgttctagccgctgcagagaatagtatattcttagcctcttaggccatgaagtgtttaccggttgctttcaatcttgctctcgtgttcgttctggccattccattactcctcgaagctcgaccacttgctagtggtgatcaagattatgaaaatctccctgtacttaccacagtcacagtagaggaaaccacgcaggttatggtggactacttggacctaaacggaagcagtagtgacggtgaggacgacgaagctgcccaaggatcgccgccggacgcgggttgcgccggccggcggcaacgccgccgttcgccgcanggggcgtttacccgcctcagcatcagcagaagccggcgccctgtaagtggtggcccagctggggttgtaggcgggcgcaggccgtctgctccaccggcgcccccgtggacggagcccgccgcattgggtccggtcaagtgatcagcaaggcccatggctgctcgacgtattccaccgcctgctctgtgcattaactgggctgacaggtcagacaggtagtatgggatatgttgaggtttggaaaaccttccggcatgtacacctgaacgaggagtagatattaacgtgtgtgcactgtgtacgtgttgagatgcatgcacacatacgtgcacgcgcacggtgatcaaccgaacgccctttcgcgtttcattttgtacgcacacagtgtcactgctttcctttttatagaaactttatactcataaaaaaaaaaaaaaaaa

SEQ ID NO: 397070 - DNA, 830 bp, Oryza sativa
gttctttccatgcatggtcttcctcttccagctccggaaacaagtaggagtatctatatatctgaaggtgcaatgcaaatgtctgaaaagaaggcgcttaccttggcacccgacatccaggagtggctagcgatggcgtctgagctgccctggccacccggtggccccaggtggtttatgcttgctgccacccgacggcccatcagcgtgttccttccccggagaaggcgaacggccttccccggcaaggtcccatgagttcccggttccgttggcctctgtgcggttgccgaagggcaggggagcattcaggcagctaacgttcgggtttagcggcagaggccagggtgtcgaccgcccgccgacgctgctgcaggcgttcgacacgttgctctatcgatgatcgacggaggcaagcttggacgacgaacaagaaaggccgtgcgtgcatggccggacaatggttgggtccgtctcgtgtagtgtaactagtgaagcgtgcaacaccgtgcgtgtgagttgtgatgcgcccgttcactgacgtccaaattaggggccttgacgagatgactggggaatgtggaagtctttggcctgcgaggttgtcctggtctccaaggtctccacgaggcgccaacaggggctggttttaccatgtgcggatattgaagcatgttgcatgttttgttcaaatttgcttttctgtaagttattctagcctggctttgaactcatcgagacttatttactctgagatccagttgagttacatcgtcgaagagcttataagttataagcaatgctcatacgtttaaaaaaaaaaaaaaaaa

SEQ ID NO: 397071 - DNA, 687 bp, Oryza sativa
  unsure (1)..(687): unsure at all n locations
ccgtaataagaagctgactagccgattgcagtcaatcaattggaaagttccagttcaggttaagggtttcgttacaaagatggaagaatgcatgggtgcttgtgactgtataattacaaaggcggggcctggtacaattgcagaggccatgattcgtggcctgcccattatactaaatggatatattgctggtcaggaagctggcaatgttccatatgttgttgataatggatgtgggaagttctcaaaatctccagaacaaattgccaaagattgtagccgattggtttggccctaggtcagacgagctcaaaatgatgtctcaaaatggccttgaaactagcgcgaccggatgccagtgtttaaaattgtccacgatctgcatgagttagtcaggcaaaaatgttttgtaccccaatatgcgtgtgcatcataaactcctaccatccttagcgagtttagttaattctattattttttgtgcggcattagtaactagtttatctgtgagaattcataaatatcagttgatttggaaattttctccatgatagaaaaaggtcatgatccaatttggttttcctcaatattttgcttgtacatgactgttgggactagacagtttaggaactgtatgaaagaaaaaagaacaattgaatttcnnnnnnnnnnnnnnnnnnnnnnnnn

SEQ ID NO: 397072 - DNA, 554 bp, Oryza sativa
ggccgcggcgagaggcggccacggcggtgcgcgtcctgcagcccgagcccgacgccgcagctgcgcgacgtcttgaggcgcttcctcatcggcttcgccatgtcctccaggccgcccaccgccgccagcgacgcgaacgactgcgacttgccgtcgaagaacttggagagccccctcttgagcgggagctccgtcatgagcgaggacatctcgaagtggcccgccgccgacgatgacgaccccgacgagctcgcgtcgtcggcgagctccatcccctccgacgacgacgagagcgacagctccggactcagacgggcacccgatgtcctcctcctgctcgtcgcacctgatcatcccttccctccggggagaacaacatgtacgcttccattcccgcacacggatgacactaacgaacgcacggaccaacgatgatcgacgatacgcagcaatgaaaaatggcgtgaggcgagatgggaagaggaggtggaggacgcgaactataaaggtaacggaagtaggaggataagaatgacgacgagggctactcgggc

SEQ ID NO: 397073 - DNA, 766 bp, Oryza sativa
  unsure (1)..(766): unsure at all n locations
caagtaccttatcccacattcctctggagctgagagctcagtcttctactacaaaatgaagggagattactaccggtaccttgcagagttcaagactgggactgagaagattgaagtgtctgaactgtcactcaatgcttatgagactgcctcccaaaactgcgcagacagatctcactcccaactgacccctatcagacttggtttagctctgaatatatctgtcttctactgtgagatcatgaactcacctgacaaagcttgccaacttgctaagaacgcctttgatgaagctgttgcggagcttccctccctcagtgaggagaattacaaagatagtacactgatcatgcaacttctgagggataatctagcactgtggaattctgatatggctgatgatgcagacgatattagggaacgaacagatacaactggtgctaaaggtgaccctgcagcgtgatggaggtgctaatagctggtagagtcgaagcataacaacaacaacaacaagggtgtggtggggtgcggaaggactaccatttactcactgttagtgttaggttctgtagtgtagggagttgagctgctgagtaaccctcgcttgtagtctggggcctgattcttcgacttcttgagcaacatcgtgtactaagcacccgctgatcgctcttttgcaagcattgtttttttttgggttactcttgatgatgattaggcaaaagttatctggttcatcnnnnnnnnnnnnnnnnnnnnnnnnnnn

SEQ ID NO: 397074 - DNA, 625 bp, Oryza sativa
tggtgttcttaagacagaaaactctgacgctctgaaccatagctatggttatcttggtggtagcaacccccctatggactctggcttactctcttcacaatcaaaaaatacacagtttggtttactgggtcaggatgacatcactggtagctggtcgcctctgccgaatgttgacagttatggtaatactgttgggctaagccaccctgggtccagttcatctagttttcaaagttctaatgtggctcttgggaaattgcctgatcaagggcgaggaaagaatcatggatttgttggtaaaggtacttgcattccaagccgctttgcagtggatgagattgaatctccaactaacaacttgagtcacagcattggaagcagtggagatattatgagccctgatattttcggatttagtggacagatgtgaaggcttcttgaatttgtaagtagggtaatcactggaaacaatttttagtgggttgatgaacggttgccgtgtttttcatttcatcctttttttttttccttctgtaattggtttataaagggaataatttatgtgacagcatgtcgaatcttggtttatagaaggttgttcggtttaaacaaaaaaaaaaaaaaa

SEQ ID NO: 397075 - DNA, 741 bp, Oryza sativa
  unsure (1)..(741): unsure at all n locations
tgctaatttgcccacattgaaacgtgaagacatactggcatcattcttcaataaatttgaagttctttttgagatctttacaaatgaaggatttcaggcgcttgaggaacagtactacaattcatggcttcatagtggacagaaggtcgttgtgcaggatgggcctgaagcccagcatgcagacagtgtggttactattcaggggttgacaccagctgggtacttgtatgctattggcgaggatggcaaaagctatgagttgcaccctgatggaaacagggttagtgcgaaggaagatggaaacgtagttctacatgaatacatacataggtagaagagcagtgtacaataatggatagaaggctgctaaaatccacatacttgtaaacatgaggggttgaaatgttttcaactatgtaaattaactttgagaaactgctnccccctttgggtttgctactgctaacatggcnccatcaggcacaagatcaaaataagccttccaattcaaggtgggattaaagaaaagaaaaggagttgncctgttaagtcctgtagagactcaaggnccagaaggagccatgctttgagtgaaatgtttctggctttctgctacccttttgtaagttgtaactttcttgaaacagtgtaacaatgattgatgcaataatatatcatctgagcttgttnnnnnnnnnnnnnnnnnnnnnnnnnnnnnnnnnnnnnnnnnnnnnnnnnnnn

SEQ ID NO: 397076 - DNA, 565 bp, Oryza sativa
atcatggagctttctctgatcaccttcacagcaactggtgcagcagcagcattcacttcacccaagatcaagaggaggatgaggatggcaccaaccatggcatccaaacctggagccaaagtgaaggtctctgccggttgcaagacgtgcagaggaaagggagctgtagaatgcccaggttgcaagggcactggaaggaacaagaagaatggcaacatattcgagagatggaagtgcttcgattgccaagggtttgggctcaagagctgtcctagctgtggcaaggaagggctcacaccggagcagagaggtgaaagatagaacaaattaattgacaagaacaatacagacaccctgcacttgcatgccagtatcattatggttaagcttgttctgatgtaattatctagtggtaatttcttagctatagattagatggagtgcaagcttgtgtactgtatgtgaactgttgcaaaaagaacttgtgtatttgcaccctgcttgagatccaaactcagataaatatatgtcaggtcgagctgtgtacttaaaaaaaaaaaaaaaa

SEQ ID NO: 397077 - DNA, 528 bp, Oryza sativa
  unsure (1)..(528): unsure at all n locations
agtgcaggcagcagcacatgacgcagaggagtggcaggacaagtgcggggtgacgtccatgaagaaggaggcgccggcgccgcccaacggccgccgccgctccagcaagaccaccaccagcggcggcacggtggcggcggcatgatcgatcgatagccaccacagcctctagctacctagcaagaacgccgagctcatcagcatcacacacctaagtatactacaagctacaaccaccatgcacacggctcaattacgacgacgacgacgacgacgaagaaagcaaagcaagaatcgattattaatccaccattattgtatggttcgatcgatcgatccatcgatctgcctttagagagataccattagttttgatcaatccatgtatgtatcacctgatcagtacttgggatcgatcgagatgttaattagttgcagagttcttgccgatcagtgatgatgggttgataaattgattaattgatcgatcnnnnnnnnnnnnnnnnnnnnnnnnnnnnnnnnnnnnnn

SEQ ID NO: 397078 - DNA, 516 bp, Oryza sativa
  unsure (1)..(516): unsure at all n locations
gcactggatgcccgtattcttgtgttaaaagggcacctcacgcgtttgcatttgccgatgacactggtacagcacatgcatcatctcaaggtcactatgatgactacaatgtccaacttgctgttgggcagtgtccaaggaagtgcatatactatgtcacgccctgccaacgtactattttggaggaaattcttgcaagtgtgttgatgactccatacgacctctctgaagcagcagttctggattctctcttatcaaaagcaatgtttgagaataacaggtacaagaagccgaaaagagaaacaaaatcgtcttctgattatgttgactggatgtgatccactctatagcacagttagagggtttaagatgtattatgtaaatattattgtagggcaaaccgtgagtggtagttgtttgcttcaactattaagggcttgtttggataggtggaataacatcaaccccttcagaatgggatcgaaattgactnnnnnnnnnnnnnnnnnnnnnnnn

SEQ ID NO: 397079 - DNA, 326 bp, Oryza sativa
  unsure (1)..(326): unsure at all n locations
caacccggaagcacaaaaaccgccctctcctcctctcgtcgccactgctccccaatccacccgactccggcgatctcccatggcggcagcggcgacggccacgaggcggccgagcgggcacgtcctctccgccgcgcactaccgctccgcctccccgacgcgcgtcaagctcgccggcggcggagcacgcgcgtccgtcagcgtctcgtccgtgagccgncgctcctgcatgtgctcgccgaccaaccacccggggtcgttccggtgcagcctccacaaggagcagaagcggagcatccaccacaaggcggcggcggcgccatcct

SEQ ID NO: 397080 - DNA, 361 bp, Oryza sativa
  unsure (1)..(361): unsure at all n locations
attggaagaggagactagagtccatatagaaatacaatttagaaataactgaaattcggaataaaaaaaaaagaattttagaagaagagtatagagtccatatagaaatccaattaagaaataatagaaattcggaattgaaaaaaataaggaatattgaaagatgagtttagagtccatataggaatttaaaactaactaaaattcggaataaacataataaaactaaaagtagagtttagaatccgtataaaaatacaatttagaagtaactgaaattcgaaataaaaaattaaagaatattgaaagatgagtttagagaccacatagaaatacnnnnnnnnnnnnnnnnnnnnnnnnn

SEQ ID NO: 397081 - DNA, 634 bp, Oryza sativa
  unsure (1)..(634): unsure at all n locations
gattattatgctgcactttttgattcactggacgcgacacttccaagggaaagtccggatagaatgaatgtggagcggcaatgtcttgctcgtgaaattgtcaacatcttggcttgcgaaggtcctgatcgtgtggagagatatgaagttgctggaaaatggagggcaagaatgacaatggctggcttcacaccatgcccatttagtagcaatgtcatcagcgggataagatcgttactgaagtcgtactgtgacagatacaagttcgaggaggaccatgggggacttcacttcggctggggagagaaaactctaatcgtctcctccgcatggcaatagagcttacagaatgagttggcattagtcttgctgttatttaggagcatctgatgcagagactgtaaaaaatgtgaaccactggaacttgtcaactgatcttacctaatcgtagatgtctgcttgtcagaataatcgagttagttgaactatgttgtattagagaattggcacatgatcgtgttgtattctggggtagaattatcttgtcgactctgcttcatgtataaaattatgtgttgctagaatatgccatatttatcatcttgggagcctnnnnnnnnnnnnnnnnnnnnnn

SEQ ID NO: 397082 - DNA, 539 bp, Oryza sativa
  unsure (1)..(539): unsure at all n locations
acccaaccaactataggccaagaataaacaaactggactccacaaaagacagggaacaaaagtctgcaggatcctactactaccttgatgactaatttgaaggcgtacagaatcttcttgtggagcttcccgcccataatttgcccaggccttcgatgtcctacgcattacttgttcagaaggttactttgaagctaccacagcttgaagcatgctaaataacttggctgcaggagtgaagtggtatcatcatcagttataaggctgagcatgtgatgctgacacttgagttcttttgctggtttgatatatatgatgatgggaaagagagatgttactgttaaactgagcaactttgtcaggatcggaagattgtgaatttttgtgtatttttgcattattgtatcgtggatttaccaactggcacccttaaatcgttggttttataggcataaagtttttgagctgttactcatgttaccaatgttatcaaagttctctgagttattactgttnnnnnnnnnnnnnnnnnnnnnnnn

SEQ ID NO: 397083 - DNA, 461 bp, Oryza sativa
  unsure (1)..(461): unsure at all n locations
acatatcaggtcatcaggaataaattncaccattataagncctggaggcctgactgaacaaccaccaacagggaatatagtcatgganccagaggatacactttacgagggctccatatcgagacagcaagtcgcagaagtagctgtggaggcattgttatgccgagaggaatcttcctacaaagttgtcgagattgtcacccgagctgaagctcacaatcgtcctctcaaggatctgtttgcttctattaagcaaagctgagtaacggagcacaactgaacaagttgttccggccctgaacttcaaagggggctagcattattccagaaattgtatagtgatgtgtcagggtgttcatacctagttaggaaaaatagttgtcctaatatagtgatttaatgttctttactataaaatggaatacgcacacccacatcatcgttataaaaaaaaaaaaaaa

SEQ ID NO: 397084 - DNA, 766 bp, Oryza sativa
  unsure (1)..(766): unsure at all n locations
cgatgagagtagttcgctgagcaataatattcctcagcttgatgggtcatctgatgaaaaccaggaagttccacaagaagatggtaagtataaaatcaacaggaaaagtgcaggattgcctagttactcatctcctcaaagtagttgaacttctctggtgctctttgccacctcccattaaaaagaggtcagatgtaaatgttgatggtcatgttaaaacctctccagacggtgcgatgccaactgagaaggaaccaagtgtttctttcatgagtagaactggaaagaactcccatgctaccacagataagactggcagggaatcttttagtcgatcaggtgaacatgacccattgtgtgattctgtgagggtctgagagacttgatggatggagggaggaggatatcttttcagtctgaacaatcagaagttgggcaagtctggagatgcaatatacatcatttgtaaagagaatgaaattgtgaattccgagggactagaatggcctgattcatccagtggcctttcgaattcataaatgtgtttttctggcagtgaatattagcagatgacctttgcacagaagcctccaatgaagaatgaagtattatgttgtttggagggctcttcagcaggtagtgagctgcctcagtttaagttaaagtggtatttatttatcatggtcaatgtaagttccacaagtgatctttattttatcatggtgaatgcaattcatttgatgtnnnnnnnnnnnnnnnnnnnnnn

SEQ ID NO: 397085 - DNA, 461 bp, Oryza sativa
  unsure (1)..(461): unsure at all n locations
gacacactntgggtggaactcgacgctggagagcatatccaggaccgtnccgatgatatgcaagccatntggcggtgaccagttagggacggcgaggtatgtatgtgacatgtggaaggtgggtgttagggttgaggtcgaggataagctgaccagagggggaatacaggcagcgattgagaggttgatggatgggatagagggtggagtagttagagataggatgagagagatgggtgatgtcgtgtcaaaatgcactacgaaaggtggttcttctgatttagccctacaggacttggttgactttatcaagtcgtcctagaaattatttctagcattaaaattttagtgaacatttttctgcgacaattattcttatgaatttatcgcatttggtaattggcgaaaaaaaaaaaaaaaaaaaaaaaanaaagcttgtacctgcccgggcggccgctcga

SEQ ID NO: 397086 - DNA, 324 bp, Oryza sativa
aatctatttggataaattcctctggtgctttgtgttttgttcttgaagttcatagtgccaaagcctttatttataaggctgataactgataagtataggtcaggtatgaagcgggggtaggattcataaattaaaagggctttacgtgtaaaaactgctgcactcgttgtgttcagcatatatctgatctatcctgaaactattgtattgtattagtttcctaactaacagacaagatatttctttgataaattttttgcctgatatgggtaatataatcagccccattttggaggggttcttttcttaaaaaaaaaaaaaaaa

SEQ ID NO: 397087 - DNA, 766 bp, Oryza sativa
gacaaaaccaccccaaattggcccgaaagctgcctcctttttcctcctcctaaccaccgctccggcctctccatctcccgccgctcgccgtcgccgccgccgcccgccatgtggaagcgcgcgacctccgtcctcctccaccaccgctccgccctcacccgccgctccccggcgatcggcggcggcgtccttccccgtgctctcttcttctccacgctcgatgcggcgcaggcgaggacgagggtggaggacgtgatgccgatcgccaccgggctcgagcgcgaggagatcgccgccgagctccaggggaagaagaggtttgatatggacgcgcccgtcgggccctttggtaccaaggaagctccagctgttattcagtcatactacaacaaaaggattgttggttgtcccggtggtgaaggagaggacgagcatgatgtcgtgtggttttggttggagaaaggcaagccacatgaatgccctgtctgcactcagtatttctcgcttgaggtgataggagaaggaggagatcctgatgggcatgacgatgacgacgatcaccaccatcattaaggttgcagaagtcacctctagcaataaaaacactggatatggccatatccatgtcaactctcaattcagatgacttggagcagcagtggattttggaaaaacaaagtttgtctttttagagatttgttcatgcaaataacaggattcagtaaacaatgatatgcaattctctttttcaaaaaaaaaaaaaaaa

SEQ ID NO: 397088 - DNA, 590 bp, Oryza sativa
aagtgtcgcttccttctcgagtttgaaaaagaagtgaaacataagcttggtacagtgcccttggaagatcatcctttttgtggacaagatgtaaactcatcttcccttggatgggctatgtcagcagcatctactcgggcattccgtttgcatggtgaaatcccaatgctgttgcctcttattgatatgtgtaaccatagttttaacccaaatgctaggattgtccaggaaggaaatgtggatagccctgatatgtcagttaaggttgttgctgagacaaaaattgatcaaaatgctgcggtaacactgaactatggttgctaccctaatgatttcttccttcttggattatggatttgtaataacatcaaattcgtatgatcaagtgggaactgcagctatggatggaactctcctagatgctgctagcatggcagcagggagtttcttcgcctaacttttcagctccagccaagtggcaacaggatatcttgtcacagctaaatctgtatggagagggtgctattctaaaggtcagcataggaggtccagaaatagtagatgggcgcttattgggctgctttaagggg

SEQ ID NO: 397089 - DNA, 987 bp, Oryza sativa
  unsure (1)..(987): unsure at all n locations
gatcaattgtcacaactagctacgatcatggcagcctacgggaagccgcagccgccgctgaacgacgcgtactacggcccgccgatcccgccgccaccgggcagcgtactacggcgcacggcgcctccgcccgcgccacgccggagcggcgcgcaccgtctgttctgctgcctcttcagggtgctcgccgtcgccgtcatcgcgctcggcaccgccgtcctcgtcctctggctcatctaccgccccagcgtcgtcaaggcctacgccgacaccgctgcgctgtcccgcttcgacctcaccaacggcggcagcttcctcgtgtacaacctcaccgtgggcatgcgcgtgcgcaaccccaaccgcttcggcatcaacttcaggagcgtcgacccgcaggcgtccttacgacggcgaccggttcgggtacgcgccgctgcagccgttataccgttggtcggaagagcgacgccaggttcgacgtgacgctgagcggctcggcggccatcgacgaccgcgacgtggagcgcacataccggagggagacggcgcaggggtcttacgaggttaaggtcagggtgtacgctagacaaggattcaaggtcaggggcttcaggctgaacaacaagagcaaattcacctgcacgctgaacctgccggcgcccaactccggcaacggcaccgcgagcgggacgccgacgacggtgttcacgaggaagcagccgaagtgcgacgtggactattgacgtgttcgtgtcactgatacgacatggaggcatgatcgaactcctcggctgggaacgacacgacacagtctgccatgctttatttaatttgttcagcttgtagaaaattctttcgaaaacatgtatttgtatatgcacgaatgaatagatggagctatatgtatttatgcacgaatgaattgatcgagctagccgggtttttgtgccgctnnnnnnnnnnnnnnnnnnnnnnnnnnnnnnnnnn

SEQ ID NO: 397090 - DNA, 407 bp, Oryza sativa
ggagaagctggagaaggagaggaggaaggcggacaaggacaaggccgatgcagcgaagagggcggccgccgccaaaggggataagaagggcggggaagctcgcccaacctgatccgctgggtgacagtgaaactgatgatcaatcacacgatccggtgctggtgttctgtttgaatgcttctgatatgttgattcgcagatactagtagctaagtactcttttaaagtttttttctgtacagtgggaaaggagtcaagaaataaataacagcatgcccctggggtgtgtttattttactgatgtgaattagtaggagctactctgtaaaagggaaatgtacctgcttgtgttgtgacgcatcatatatgccagtgtaaattccagaaaaaaaaaaaaaaaaaaaagg

SEQ ID NO: 397091 - DNA, 517 bp, Oryza sativa
tgcaggcggtggcgcagggcgcggcgtcgcacgggcagatggtgatgagctccaagtacctcaaggcggcgcaggagctgctcgacgaggtggtgagcgtcacaagggcgtggacgacgtcaaggccgccgcggcggcgaagagcccggcctcggtgaagaagaaggaggactcggagggcgtgtccggcggcggcacggaggatggcggcggcgccaagagcggcggcgcgccgccgccgcccggcagatgtcgacggcggagcggcaggagctgcagatgaagaaaggaaagctgattaacatgcttgatgaggtggagcagcggtacaggcagtaccaccagcagatgcaggtggtggtggcgtcgtttcgaggcggtggcggggggcgggtcggcgaaggacgttacacgcgcgctggcgctgcggaccatctcgcggcagttccggtgcctgcggggaacccgattcgcggggcaggtgagggcggcgagccgggcgctgggggaggccgtc

SEQ ID NO: 397092 - DNA, 783 bp, Oryza sativa
  unsure (1)..(783): unsure at all n locations
ctcgtacgtacgtacacatctcgaagaaccaccagctgtgagatcgttcgacgactttggatcggatggctgctggcgtgggcaaggtgggggagtggatacggaggcggatgatgccgcggaggagcaagagcaaggcggccgggagccggagccggagcgagggcgacggcggcgaggccttgccggacgccgccgcagaggaagctccgtgcgcgggcgttgccggcggcgctgcggtggcgaccgcgggggcgcttgctggcggtgctgtacgagaaggtggtgtaccacctgctgtggctggtggaatccatcgtccgtcgccgccaggctctgcttcttcgtccatgcgcttcggcctcaagcagctctgagctctctcctcattggtctggattctaggggctagataaatttcgagaaaaacagttcgagatgtttggatttcgcgaaattcgttcgaattttgtcgaagattgtctgctctgggatcgagaagggagaaccgggggggagaaccaacaaattgggagattttttgaagtgtcccgttgattctttcttcttctttctttcgcgctaatttgttttgccacttttgtgtggctttattttcagagaaactgtaagtatcctgctgtctgtgtatacgaggaattgtctttgttttttaatccccttgtgtaaatgtaaatgtttcatctgatctctgcccgtaaaatgttgtgacttgaatgaaaatacctgtgaatatttctggnnnnnnnnnnnnnnnnnnnn

SEQ ID NO: 397093 - DNA, 535 bp, Oryza sativa
  unsure (1)..(535): unsure at all n locations
gtgctgccatgattggcttcttcatggcatactttgttgatagcttgaccggcgtggggcttgtcgaccagatgggcaacttcttctgcaaaaccctactgtttgttgctgtggctggtgtgctgctggtcaggaaaaacgaggacatagagacagtgaagaagctcatcgatgagacgacgttctacgacaagcaatggcaggcaacctggcaagatgagtccccttctcagcccaagaaatagctctgaagtggaatctgaatctgaatcctccctatgttgtattgtatcacttctttttgcagcccttttctcaacccatttattagtgaggctcagtacattttgatggatcttaatacctatgacgtcttgtaaaaagtacgaactcgtttctgtgctagaggttaacgttgctgcgggttacttggttgaatgttttctttgtgagaattgcttgtactagttactccctccgcttcatattataaaatgctttgactcttttctnnnnnnnnnnnnnnnnnnnnnnn

SEQ ID NO: 397094 - DNA, 697 bp, Oryza sativa
  unsure (1)..(697): unsure at all n locations
gcaaatagctgcagcgatcgagcgaatattgatcgtgctcgatcatcttagccgcattgcaaacgatcgaatcgatcggccgatagcctttctcgttggcattttatttcaagcagaacacgatgaagcaaaagatcgtgatcaaggtgagcatgccgtgcgagaagagccggtccaaggcgatgaagctggtggtgatggcctccggcgtgagctcggtggaggtcaccggcgacggcaaggaccggctgcaggtggtcggcgacggcgtcgacgcggcctgcctcgtcacctgcctccgcaagaagatcggccacgcggagctcgtgcaggtggaggaggtgaaggagaagaagccggaggagaagaagccggaggagaagaagccggagccgtgctactgccctcatccctgctactaccaccaccactacggtgggataccggtggccgtcggcgaccagccgagcgacccctgctccatcatgtaatcatatatagtcacacagatcgatcgaattttgcagtgatttcttcagcgatttggtatggctatgtacaaagaaatagtaggagtggtagatatactatactactatatctttgtggggcttccttcgccttgtttaaatccaaacttaattggaaatgaaaacttactataatgttcagtagcnnnnnnnnnnnnnnnnnnnnn

SEQ ID NO: 397095 - DNA, 772 bp, Oryza sativa
  unsure (1)..(772): unsure at all n locations
acgaaaggggccaccattgtttctttctttcaaagaatttggcgaanaaagatttacatcatatttaagagctacgttttgtgttctttcagagtattttattttgatccccagaatgaatttgtacattgtcctcaaatgttatgtctgcatctgccaggtgcatgatgaagtgatcttggaagggcctacagaatctgccgaggaggccaaggccatcgttgtggagtgcatgtccaagcctttctatggaaccaacatcctcaaggttgacctagctgtcgacgccaagtacgcgaagagctggtatgctgccaagtagaatccacactcagttcttctgccctatacatagccagatgaacacatttgtctgccccaaagttaggcgacaccaaagttatgtgtcgccgatgcgatgaagactgcccatccatcctgacgaaatacagcggactgagccagcatagataagagatgcaaagccgctcaagcactcgaagtgccacccccatcacccacaggaacacaagatcacacgtccattttttcggtggcagaggcagagcatccaacgagggccgaataggctgaagactctttcactggcagtagctgaatgtacagaagtagcctgtctgatagttagatttggatttgactgtagggaccccagtagatactgacctgtatgagactttcagatacttgggcagtgtttagttcccttcaaactttaaaaaatttcgttnnnnnnnnnnnnnnnnnnnnn

SEQ ID NO: 397096 - DNA, 744 bp, Oryza sativa
tgcacgagctaagagagaggctgagggaacgggaggagaggagcggcaacggtggtgccgccacgacggcagcaagcagcagcagctgcaacggatcaggcagcgaggaggtcgacgacgacgacgacaagaggaacgccgccgcggggtgcctggacctcgagccgccggagagctgcgtgctcggcggcgcgacgtgcgccacgccggcggacgtgtcggtggagtcggatcagtgcgacgaccagcttgactacgatgagggcttgttcccggagtccttctgcgccacgccggagctgtgggagccatggccgctcgtcgagtggaatgcggtggcttgaaagacagagagtagtatattaccctaggttaatttgtgtgtacatgtagcttaaagtacgtggatcacgtctcctcgactgatctgccgtctcccttgggacagagagggaaaagagggccgtggcaatgacgtgtggggccggtttgtagattggggttgcaagaggaatctcgttggagtagtggtggtggaaaccttggaagcaattaagccaatggactttgtgttttggatggtgctaaaatggagaaaactagatcgagctcattggaagagttgcataggaattcaagcatcttttgtggtcacttcgaattcggatttagtagtaatctattcgaaagatgttcaattgacgatattattaaactagttttatatctaaaaaaaaaaaaaaa

SEQ ID NO: 397097 - DNA, 783 bp, Oryza sativa
  unsure (1)..(783): unsure at all n locations
gccctttctcttcctttcccctgtccttgcgccgccgccgccttgccttacctccccggcttctcctcgccgacgacggctttcccctcacgctctcccgtacccncctcctctcttggcgctcccnccatcaccccccctcccagtagagcaaggggatttagggactggatggcgtangttggatttgggtgcggtgatggagtttcgccggcgacggcctccccctcgcgctctttccctgtcctgcccatctcctgccgcaccctcaagcactctccgcctgtttctcctcgccacccgttgcagcagttaccctgttttgtgttgggctccacggagctgcgacgacggtagcctcggccaggaagcgacccatggaccaatggtgggagcatttgggcaaggacacactcactcaagaaccagacattggcctgtgatgggaaacaagctcgagggatggctagatgggctatagacttgatccttccactctcacagccgtcaacaacatcggggcgattcgttttgctgcctggtgggctattgtttactgctgtctgcttgctgctgaatgaagcagctagcaaatattgttccaaactaaaagttgtagtggtttggtgtgatgaggaagccagaaaattaatggttaggattcagtggcctttcattttatctttatataggacttcattcccctaaatcttgcctttatatattgattttaattatgcagattttctgtncnnnnnnnnnnnnnnnnnnnnnnnnnnnnnn

SEQ ID NO: 397098 - DNA, 557 bp, Oryza sativa
  unsure (1)..(557): unsure at all n locations
gatagcggcgtccatttccagcggatcaacgtggcctaccagatggtgatgggcaacatgagggaggccgaggagaggctggagtactggaggctcaagtacggcctcgacgacgaggacctggacaagtacaggaaccacctcaacgacgaagacgacgatgaatggttcgacgtctaatctgaggatcgtgaatcgctgcctggactgacgggatcaacgagcacagatgcaaaccatctcgttgatctccatcattgatactagaaatttaatcttgtttatagcactgaaaaatctgttcatttgtatgtatgcctgtatgtagaacagtagtagtagcagctagaactgaaaaaatctgtttatttgtatgtatgcctttcccccggttttattgtaggggaaggggtacgattagactgatatatatataactcaattggtactaattttgtgcttataattatatggtctcttgatcganaaaaaaaaaaaaaaaaaaaaaggaaaaaaaaaaaaaaaaaaaaaaaaaaagcacctcggccgcgaccacg

SEQ ID NO: 397099 - DNA, 666 bp, Oryza sativa
  unsure (1)..(666): unsure at all n locations
cactaaactagaacctgcttcacaacacaacacaactactacctgttcaactgctactactgcaacgagagagaaaaaacaatttcagtttcagaagagagaaaggagcaactgagcaagaactgaagaaaatagagagagagaagccatggagcaggggtacggctgctacagctactaccagcagtacaagagcagcggcagtttcatcagtggcaaggagaagaggccgccgctgaagagggggcagctgaagcggcagattgtgaggacgctcagcaacctcatggcgccggcgacgaggagcagcggcgacgctgtggctgctgcagactccaagaagaaggcagcggatcgcagcagcttcaggagagaagccagctacaactgaatcgatccaatcgaacagcaacatcatcatcatctgatactcagattgatatgcatattacttgtagtatattgcttgtgtacgtgtgctgtgcagtaggagtattccgtacgtagatgtgtatggatcgatgtagttgacatggtgacaggaaaagttgctgctgctagattgtagatgcccttttgttcatctttccctcaattttgttcggacctttcggagtattagtaatgaagatcaattttcttttgttgaaaggctaaaaaaaagan

SEQ ID NO: 397100 - DNA, 627 bp, Oryza sativa
  unsure (1)..(627): unsure at all n locations
tcanttttnngaagggcnntcgtncggnctttntcgnnnttacccnnntgncaaaaggggtatttnctnnaagccgattaagttggntaacnccagnttttncccagtcacgncnttttaaaacgacnnccnntgnncgcgcgtaatacgactcactntagggcnaattggttnccgggccccccctcgaggtcgacccacgcntccgccgaggccggcgccggcaaggcccccgtcatcgacgtcacccagttcggctacaccaaggtgctcggcaaggggatgcttcccccgcagaggcccatcgtcgtcaaggccaagctcatctccaaggtcgccgagaagaagatcaaggccgccggcgggccgtcctcctcaccgcctaggtactacatacttgggagttgagttggagggaggagggttcttgatatctaaggcgctagtttctttatccttcaaaagactttgatttagctcttgtgctttttctgttatggatgttactactgtatggtatggctacttgaatctgtggtggcaattcaggagttttgaattacatgattatgccggtctatatcaatatttgcgtctaccgcgtgctnnnnnnnnnnnnnnnnnnnn

SEQ ID NO: 397101 - DNA, 601 bp, Oryza sativa
  unsure (1)..(601): unsure at all n locations
cggcgcccggaggaggaaggcggcgtggagacggttcctctactactgctgcgcgttctaattagcctcagggatgaatcaacaacaccaaagatcaatcgagcactgctcgatcggttgctttctggcctcgccgccgcctcggttcttcccagctcggactcgatcggctcccggcgagcttcgaatgaagctcgtcgtgttcttgattcgaggctgtcccggcgaagttttgctgagaccaatcgtcccggcaaaagaggggctgcgaaccagaacgaaatggcacatattgcagaggttttgcaaacttgaaataataagtatagagacagaaacgatgatcacgatctcgagtcgatcgatcatcaaatcgagatgtaaaaagtcaaataaaaagattttggttttctttttatctatgtcagtgaaatttctgctcatcacaaccagaagatctttgtcagtacagaagagatcttccacgttctcccaacttttgcattaggtttgcttctcctattgaaaacctcgttgactatcgctgtacaggtgtacctagagaaaaaacannnnnnnnnnnnnnnnnnnnnnnnnnnnn

SEQ ID NO: 397102 - DNA, 590 bp, Oryza sativa
  unsure (1)..(590): unsure at all n locations
aatgctagcaaggatgatgaagatgaagaggaagacgagagcnctggagatagcagcgtgtctctaaaggtgacagtctccaagggctctgggcccaaacttgagttcacctgcacagcctttcgtgaggagatcaccatcgacgacatgttaatagtggagaatgcagccacagaaggagatgagaaattcccttacgagggccctgaattcaccgagctaccggtgaatgtgcagaagggcctattcaagtacctggagcaaagagggatcactctgccgaccaccaactacatgcacgattacatggtgaccaagcaaaccaaggagtacgtcgggtggatgaccaagcttgaaggacttcgtccggcaatgagaaattgccgagcaattttggcaggatttttggtagcttagccttttagcatacctgcatatgtaacaaggattactagaattatgcgaagaagtgcaacaaccggggaaactgccttccctgcaatgtgcgatttctgatgcccagtagtcaatctgaggctattggcacttatgatatcagtgcttattttactaaaaaaaaaaanaaaaaa

SEQ ID NO: 397103 - DNA, 350 bp, Oryza sativa
aagaaggactcgtcaagcggcggcggatgcgggtcggactccgactccgacaagtcaaccccttgccaccatggctgccatagcaagcattagtcgagctctctagctagggtacatttaattctataatcgagaaatttatacgagatttttagataaattaatcgtcgcttgattaattttccatatattctcaaacaaaagaaaaccaaaaaaaaaaaaacaagccatgcatgcatgcatttctcatgagaggccagtaatataatcaagtggcctagctatatttgtatcatggaaaacttgttgtaattaattaatgtttgtgtgtgtcaaaaaaaaaaaaaaaa

SEQ ID NO: 397104 - DNA, 461 bp, Oryza sativa
cccgcgtccaatccgctatggcagctcttgcttcttccaaagaagctgattggaatgccatgagattgagggaaaaagaattagctgccatcaagatcaaccctgctgatgttgaaattatcgctaacgagcttgagttggacaagaagattgcagagagaacactacgggagcacaaaggcgatgctgtagctgcagtccggttcttgcttcgctgattcttacacattttgcaagatctatacaccatatgaagcagctgtagtttgctattgcttgctgctgagaggaatttctgtatccacaatgaaacgatcatatttggcatctatgtagaactttttttccatggatgttgcaaactggtctctgttgtcttcttgtaaaacttggttcactcaggagtttattgccgtttatccaaggtctttctataccttctcaagaaaaaaaaaaaaaaa

SEQ ID NO: 397105 - DNA, 377 bp, Oryza sativa
  unsure (1)..(377): unsure at all n locations
actccccgcacaaaatgatggatctngacaagtcgcaccgctacacgaatcttaaagcancggcattgctgtccacttcccctgaatgatgtttgatgtttctgtatatcagttcctctactctctagtgcctcccccccttcccttcagagcaagtccaatatagtgtatgtagttacctgtatcatatcatcaactgcctagctttgtcgcccaaggaacttagaacagtgctgtacatacctcaaataaaatgtttcgtcagctaaagtaaggctaccctggacatgtgaaaaatctgtggtctctgaacattgtctgcacatcatcagtagtaatggaaatcgttcattcttttcaaaaaaaaaaaaaaaaaa

SEQ ID NO: 397106 - DNA, 297 bp, Oryza sativa
gacggtggcgcggcgcagaccggggatcactgaacggacgctcaccgccggcggcgcgtggaacccggcggcgccgccgaagggcctcgtcggggcgacgccgccgccgtggtggtagtacggcgcgtagtagcacggcatcggcggcggcattgcgtcggccgccctgtcgcgcagcatgacggcgtgcagcatgtgcaccagctcggcggccttcctccgctcttgctccagctcggcggcggcggctcgggagccggacgccgccgcttgtgctgctgcagccggacgcgtggg

SEQ ID NO: 397107 - DNA, 241 bp, Oryza sativa
  unsure (1)..(241): unsure at all n locations
aaagctgaggctntcctccgaggccgcatgctggngttctngggcnacaaccttttgtgataccccggcttcaaactgctctcctcaatatgtcngtcttgtgtgcacaaaagggntatacagaaatgcatgtggtnctgggtgcctccnggatctctgatcctagacatgataaaacagnataaaaagaattgntcggtgtcctccaaaaaaaaaaaaaannnnnnnnnnnnnnnnnnnn

SEQ ID NO: 397108 - DNA, 460 bp, Oryza sativa
  unsure (1)..(460): unsure at all n locations
ccgccgccttcnacaacgcctacttcgggaccctcgtcaacggcgagggcctcctcaactccgaccaggagatgtggtccagcgtcctcggctactccacggccgacaccgtcagcaagtactgggccgacgccgacgccttcttcaagcagttctccgactccatggtcaagatgggcaacatcaccaaccctgcaggtggtgaggtcaggaagaactgcagatttgtcaacacatgatcatatgcatgctcaatcaaaaggactgcacatttgttctttttaatttgatggctggcttgtcctagatagaaataagaaatgctttgatgatgaggcccttgtactggtacatataatacgcgttgttgtcattttgtcatcactctacaagtatgttacatggagatacacatgataaggtacncctggcttttgcncnnnnnnnnnnnnnnnnnnnn

SEQ ID NO: 397109 - DNA, 457 bp, Oryza sativa
  unsure (1)..(457): unsure at all n locations
ttgnaattgccctcatggacggtcctgacggaacaacttggaggccatctgtacctctttctgagcaaggggtggttgccagtacatgatctgcgcaacaaaagctccggagtgaccatttcaaatacccatcaccacatgatccattcatgaggaactgcgatgtttcccaggttttgagagaaaatcaagagaacatctgacgaatcagatggcctgcatgattcggtagagtggatatgagtttctgtctgacagaagatagccaagttttacagttttattacatcatacatattttgttctcgagtcagctgatatggtgcaacattttgcctatttttttacctgcagagtttactgcgcgatactttttagaaacatcagtacaaaatattgtgtgctgattcattttttgaatgataatacggtttgggntttcaaaaaaaaaaaaaaa

SEQ ID NO: 397110 - DNA, 549 bp, Oryza sativa
gacgacgttgacaagacaatggatgaaattaatgacaatatggagaatatgaggcagatccaggatctactatctgctcctattggagctgcagctgattttgatgaagatgagctggaagctgaattagcagatctggagggggaggaattggaggcagagcttctagcacctacaacgactgcccctactgctccagtgcgtgtacagcaaccaactcggccttctgcccagagcagcaaaactgaagatgacgagttggcagctttgcaggcagagatggctatgtaattagttttgcaggctttgatagggtcatgccaaaagatcagatacttcaaatactcctatattggactctgggtgtactcatgaagatctttcctagggaggatgtcagagacacagaggcaagctgcatgccagcctaacccgttatgtatggtatcatgtcatgttactgccttgtaaatcaaacagggctattttgggcacattatgagctaataaaatgtactacccgtgatggcgtcaaaaaaaaaaaaaaaa

SEQ ID NO: 397111 - DNA, 460 bp, Oryza sativa
  unsure (1)..(460): unsure at all n locations
atcttggattgggaaggtcaggttgcaagttcagttccattaccagaatcgctgctactagttgctagaccatggagatgcgtcgccttcttgtcttgttcgctctcctctccgtcaccgccgtcgtcccggtgttcttatggcccgacaagaagggcggtgctagtgacgtcgccgtcgtcgtcgcggcgcctccgttcaatgcgtccagcgtcaccattatctcctggaaaccgaggatatttttttacaagggcttcctttcagatgatgagtgcgaccaccttgtcaagttggggaaggagaagctgaagaggtccatggtggcagacaatgagtcgggaaagagtgttatgagcgaagtgcgcaccagctctggcatgttcttggacaaacaacaggaccctgttgttagcggtatttaggagagattncagcttggaccctgctttccgaaaga

SEQ ID NO: 397112 - DNA, 447 bp, Oryza sativa
  unsure (1)..(447): unsure at all n locations
agtatgtggagctctgtgtagacctgaggaagggcaggtttgcgaaagatggccttattcagtacaggattgtctgccagcaagtgaatgtgtcatccttggaggaggtgataaaacacttcatgcagctttccaatgagaaagcagagcaagcaaggaaccaggcgcaanactggaagatgccctggatgtagaagatctggaagcagacaagcggcctgaggatttgatgctcagctatgtcagcggggagaaagggaaggaccgatcagacagagagcatgtcacaccatggttcaagtttctcttgggaaacatacaggacagttctttgagatatttgaggaaacaattcaaagcttgaagcattatatgcttatgacttctcacaaaggcttttcaaattttgttaggcagtataagagacggcttgaattccctaggttt

SEQ ID NO: 397113 - DNA, 598 bp, Oryza sativa
caaagatccagcttgcttccttctctgggggtaccaacctgttgatgcaagtcagaggaagtgggctactcgagcttctcatctaagcctctcacttgaaacctctagcacttcgaatgaacagagaacagttaggggctcctctccaagtttgtggaaatgtgttgagctggatgacatccggtttgaggcagctatggttacagctgatggtagccctttgttgattgtgccacccccagaggtgtttgtgaggattggtgttgcttttcaacagtttacaaccaatacttcagtagagcagttgttttttgtgttaggtctctacacttattttggccaggttggagaacggatttcaaaggttagcaaaggtaactgctctgcgacaaaagaccatcagctgacaaacgtgaggagaaaacttgcctagtgacacagcagtgaggcttaactatgaatagtcttccactcaatttcttggatctttatcatcaaatgactacaattgccctgggtcagtttggtggtaggactttacctaaagttcttatcgactcttggggggccttaagtacaactacctgcatggaactgc

SEQ ID NO: 397114 - DNA, 420 bp, Oryza sativa
  unsure (1)..(420): unsure at all n locations
ctccgtgcagggcatcgacgccgtgctcttccctcccaaggacaccgccaccgggcggnaaggctcaggctccggctcgtcgggcgccgctcccgccaggaaggcccccgccgtcaccgcccactccaagtccaagctccgacgagggaagttgttggaaggggcatgccaagtgatgggcttcctaggccgaagatcgcgattcgcgagcttgccaatagactacgacaatggcttgatggacaaatatgtatatctgccactgctttttgctcaactcatgacgctgaaacatgaaccgaaatgaaggctacagatgatgattggttggatggatgaatggacgaacaaattgatgatggttttacataagcttaattaagaggaagaaataaggttgtcatgagaccgggttgagag

SEQ ID NO: 397115 - DNA, 444 bp, Oryza sativa
  unsure (1)..(444): unsure at all n locations
ccttccttccctcccaaaatccacctcacaaccacacgagacgagagccaaccgcgacgcatcgtcacatcacagaggaggcggtggccatggaagagagacctcgcgatcgcaccgtcgaggaggccgcggcgttctccggcgatgagtccgatggggaattcgagttcccgttcgtnagcagggagacggacgccgggggcgtggccgacgagctcttcgcggacggccgcatcagggcgttctacccggtgtttggccgcgtgctcgacgacgtggcggtgacgctgccggggcgggcggcggaggagcggaggccgccgctcggaaggctgttcctcgaggaggggcggacctcgtccgtcgggtcgacgtngtcgtcgtcgtcgtccacggacatcgccgagctngacggcgtgtcnccgaaagctacttcttctggtt

SEQ ID NO: 397116 - DNA, 451 bp, Oryza sativa
  unsure (1)..(451): unsure at all n locations
ctgcatcctgttcccatcggtggcgctctgctacatcgggcaggcagcgtacctgaggaaattccctgagaatgtcagtgacaccttctacaaatccatcccagggccgctgttctggccgacgttcatcgtcgcgatcctcgccgccatcatcgccagccaggccatgctctccggcgcgtttgccatcctctccaaggcgctgtccctcgggtgcttgcccagggtccgggtgatccacacctctaagaagtacgaggggcaggtgtacatccccgaggtgaacttcatgatgggtctcgccagcatcatcgtcaccatcggcttcaggaccaccaccagcatcggcaacggctacgggatctgtgtggtgacgacgttcatggtgacgacgaccttatgacggtggtgatgtgctgatatggaagaagacctggtgttnatctgcttt

SEQ ID NO: 397117 - DNA, 470 bp, Oryza sativa
  unsure (1)..(470): unsure at all n locations
cgcgccgtggtgccccttctgccaggccatggaggcgtcctacctggagctcgccgagaggtgggcggcgcgggcggcggcgtgaaggtgggcaagttccgcgccgacgggatgcagaaggcgttcgcgcanaggcagctgcagctgcagagcttcccgaccatcctcctcttcccgagccgcaccgcgaggccgatcaagtacccgtcggagaagcgggacgtcgactcgctcctcgccttcgtcaacagcctccgatgagggagagacccgatcggcacagccatcattttgttcttggcatccaattggcaaatcgactttggcgacggaccatgatcccgtgtattagtattagggtgagatgggttaagttgggaatcggggaggtcagangaaggggtcggggtcagggttcagatgcagttgctncatctatagcttttgctgctactncgggttaatcctgg

SEQ ID NO: 397118 - DNA, 382 bp, Oryza sativa
cacttgtgtatctcatctcatctcatcttatcgatgttgatctcaacttgtgcattcagatttcacttgtgcatctcatctcatctcatcttatcgatgttgatctcaaattgtgtatgcagatttcacttggtagatgctgcaggaaggatcaacagcttatgaaaagccattcacagaagatatgatcatgatagacgggggtggcggcgcggcgcggtggccggggaagcatggtcgccggcttgatcgccggcgctcgcttagcttggacttgaacttggaggaggaagtaaccgagccgtcatattattatttattattattcagaggggtctttgtgcaaaaagggaaagaaaaacaaaagatgctggctgcgata

SEQ ID NO: 397119 - DNA, 861 bp, Oryza sativa
  unsure (1)..(861): unsure at all n locations
ctgaagggtcgactgataataggtggtcttgggtagaagttaaacatctatccaaatgtctagtccaggcccttgatgctggtcttgaacatgccctcttgggctctgaaatgactctggacaggtacgctgctgctgagggtttctataagctagcaatggcctacgcgcctgtgccagatcttcatataatgtggttactgcatctatgtgatgcacatcaggagatgcaatcatgggctgaagctgcacaatgtgcagttgctgtagctggtgttatcatgcaggcacttgttggaaggaatgatgcggtgtggagtaaggagcatgttgcttccctatgtaagatttgccctattgtgaacactgatgttagctcagaagcatctgcagcagaagttgagggatatggtgcatccaagcttactgtggattcagctgtcaagtatcttcagctggcaaacaaactttttgcacaagccgaactctatcacttttgtgctagtattcaggaactcatcattcctgtgtataaaagcagaagggcatatgggcatctggctaagtgtcatacatcactcaaggatatctatgagtcaattcttgaacaggaggctagtcctataccattcattgatgctacctactaccgggtagggttttatggggaaccggtttggcaaactcaacaaaaaaggagtatgtgtccagagaanccaagaagatgttccgncttggtgacataatggagaagcttaagtccataacctaatgnaggctaaaatnggatggcaatcaaaacctttaaaacatccattnccggattccgagaanangtcaaaccctgaatgngtttgccaa

SEQ ID NO: 397120 - DNA, 459 bp, Oryza sativa
  unsure (1)..(459): unsure at all n locations
gatggatttcagatggttgcttcagccatgtctcaagattcagttgatggacctcaagtttctgggtgcagtgccacgagtcttggtcagcccaagagtaagcgcaggactggtgacaaggcaagaggggagaagaaggcactcaaagttaagattaaccttgccagcccggccaaaaaaattaagaaaagtagcaaaaagaagggcaaaaagggcactgttgctggcaggatagggagaaaatgcactctctcaagagattctaaagggcgctttcttccaagagagagtaaggggggagacatcgggggaaatgctacagagagtgaagttgattatgaccgctttcatggaactttcaggcacctgacttcgctaccatcttaagtatttttgaaaggcttgggaaggcatgaagcaatgtaacaagntcaggcgcctcaaggatcctgacttnnc

SEQ ID NO: 397121 - DNA, 382 bp, Oryza sativa
  unsure (1)..(382): unsure at all n locations
gaattcggcacgaggcttgcatgtcacagtcccatacagcagctggttccgcagagggcaggttngaggctgggtaacagagtatggtaatattctgacctttgcgacggtgcgaggagcatctcacatggtgccatttgcgcagcagaccgagctctcggactttttcaatcattcgcacttggacggagactcccgaatacaacccacccacctattaactaagtgtacctacgtaaggagctgaagatacaaacaaatagtctaggattttcagttttgctacagaagattagttcataagggtgtattagatggtcaaatacgaatattttatctattagagagaacagggaaataatactagattaaattcaaaaan

SEQ ID NO: 397122 - DNA, 409 bp, Oryza sativa
gaagtggttgccgtccgccgatggggcagtgttgatgctcgtgggcgccaatgtgggcgtgttcatgctatggcacctggctgatcctagcttcatgaggaggcattttatgatttctcttgataacttcaaaagcgggaggttacacacgttgctcacgaatgccttcagccacgcagagagtggtcacctcatcagcaatatgatcggtctctacttcttcggatcaagtatttccaacatgtttggtcctgcttttctactgaagttgtacgtagcaggagcacttgctggatctgcattcttcttgctagagaaagccttcctagctccacgaagacagttttatggcggatgggacaattcaagaactcctgcgcttggtgcaagtgctgctgctaatgcaatt

SEQ ID NO: 397123 - DNA, 331 bp, Oryza sativa
  unsure (1)..(331): unsure at all n locations
aggaaacccaagcctaagaagactgtcaaacaacatcaacaagagccccaggacaactcaagggaactcccagcttctgaacccaaggctcctcctggctggccactgcagcctcccatgtatctccccgtaacccctgctcctccaccacccccacctgctttttcagagctggaagccatccgtgccgttctggaagagagcgaaaaggttcaggagaagctggataagcagcatgctggcgatgcgtgatgaactcatcaagaaatcaaaagacctgcgtgacaaggagttcaagctgccgtaccaaaacccnacgccatgcactgag

SEQ ID NO: 397124 - DNA, 485 bp, Oryza sativa
  unsure (1)..(485): unsure at all n locations
catgaggtgaaggccaaacttgaaccccctcccccacctccagcacctatcaaccccacagcagctacagcaccttcccaccaatccaaggccaaccaaatnatgcctcctcatgctgctgatacatcaagggggctattacccacaccaccagcacttgctaggcttccaaccttcaacaacgcaccagcgagggagatgcttccgcccgctccaaagaacccagaaccacctgtggtgtgagctcttgatgatctctttaggaagacacaggcctctccgaggntctactacatgcctgttttcagaaagaggtggtatctgccaagcttgcagcacgcggcaaagggaagatggcagcgtaggggtggctcaaattttgctgctgctgctgcttgccatgacgtgggtacaatttgacacttgaagaggcttttgnaagggttaaggttttnagagccgtgaaggtcattttggttgtaaat

SEQ ID NO: 397125 - DNA, 374 bp, Oryza sativa
ggcttctgaacttgctcagctagccactctgctccaacgcacgcagcttagctcggagtgacaacggaatggctaccatggatgagcagcagccactgcacatcctcttcctcccgttcctcgtgcccggccacctcatcccgatcgccgacatggccgcgctcttcgcggcacgggcgttcaggtgcaccatcctcaccacccccgtcaatgccgccgtcgtccgccctgccgtggaccgcgccaacgacgacgctctccgtggcgatgccggcggcgcaccggcgatcgaaatcgccgtcgtgccattcccggacgtcgggcttccgccgggcgttgagagcggcacggcgcttgttttcgaggaggaccgt

SEQ ID NO: 397126 - DNA, 550 bp, Oryza sativa
  unsure (1)..(550): unsure at all n locations
agagccatggccgccgccgccaccgccgccgtccccctcgacgaggccaaagccaaggaggttctccgccaggtggagttctacttcagcgacanaaaccctcccccgcgacaacttcctgcggaagacagtcgaggagagcgaggatggcctggtgagcttggcactcatctgctccttctcgcggatgaagaagcacctaggcctggacttggacgtgaagcaggagaccatgccggaggagacggtgctcgccgttgccgaggtgctgcggcgttcctcggccctccgtgtcaccgaggatgggaagaaagttggcagatcaattgagttgtcgaaactggatgagatcatggagcaagtggactctaggacaattgctgcatcaccatttccttacaatgtaaagctggaagatgttcagtctttctttgctcagtatggcaaaggtgaacantgtgaggctacctcgacatatttgccgacanacganatttctgcggcactgtttagtcgattttcagaagagtggagcaaatgttgattaaag

SEQ ID NO: 397127 - DNA, 484 bp, Oryza sativa
  unsure (1)..(484): unsure at all n locations
ctaggggttgaattgaagaacttggtgaatgatatacttcagcagcatccagatcttatggatgggtttaatgaattcttggagcactgtgagaatatagatggttttctggctggtgtcttcagtaaaaggcaaactggacgaattgttaaaactgaggaaaggaaagagggaggaaagggaacagaaaaagaaccggacagaatcgagaaagtaccagcatataaggaagctcctagccaaaaacctgtgttctctagcaaagaaaagtatatatacaaacctgtatcagagctcgatctttcaaattgtcagcggtgcactccaagttaccggcttctacctaaacattacccaatgcctcccgcaggcaaccaagcctgagctttgggcttcagtgctttacgatcactggggatcagtgacatcaggaggtgaggcttttcattaagcacatnagaagaatcagtcgagggagttattt

SEQ ID NO: 397128 - DNA, 355 bp, Oryza sativa
actagttctagatcgtgggggatgggtttgtgacaattactaagggagaaagcattcaaagtttctttgagcatgctgaagaagctgaggaagaggatgaagatgatgctatggacagggatggaaatgatactgatgtcgatggtgttcatccacagaagcatgctaagagtcctgaacttgccagagagtttcttttggatgctgctgcagtgatattcaaagaacaggttgaaaaatctttgagggaagccacggcacaacaaaatgcacatagcgtatttgtgtcccttgcattaaaatttgttggaagagcgggttcatgttgcctgcaaagaaataattacattggaaa

SEQ ID NO: 397129 - DNA, 348 bp, Oryza sativa
gactataccactgcccatgcttagttaatgtcaacactgaaattattaaaaaaaaacttagttaaatacctctatttttgatcttttttatatttgcttccacgtttcagtatgttgtcgaataattttgtatttactttgtactgtttgttgcagatattttgtgagtttaactgggagatggatgattatgaggtttgtactaatttggtagttttgctctggttctacctttggaagtaacctgtgtctggagtcattctgttgaaatgcaggactttgctgatgagaaagttaaagaggaggggctacccgaggatgagagagaaaaaatgaaggaattcctaa

SEQ ID NO: 397130 - DNA, 552 bp, Oryza sativa
  unsure (1)..(552): unsure at all n locations
actccctgtgcataatgataagattgatgaagtgacaatcgcagccattcaaacatgtgcattggtcgattatcagcaatcacaacagaataaaccgtgttctgttaatgggaaatcagaggtaaaatatcaacaaaattttgctgtgcatgaagttggccgcaaagaaacatttgaactaggttcaagctcagatgtggctgataaagagctacttggaacattaaggttacttggggaatctatggttgaaaacattgaggttattgacttgttgtttcaaccaaatttgcactctacctcactgggataaatcagaggaaattgttcttgggtagtatagagcaagctaaagcaaaagcagctctagaaggtctcaaggaggattagtgaacttctacgacgaatctaacgtgtatatttgtgggaactcgcaaggtaagctctacctacctgttccctacttcntgatatatttccatttttttncacacaagtctacttacagattgttgtcctgaccgaccatggtaatgggccnattccttttgg

SEQ ID NO: 397131 - DNA, 493 bp, Oryza sativa
  unsure (1)..(493): unsure at all n locations
aaagaggccaggaggcggctcttcaacatgataaataacttacctacaatatttgaagttgtgactggcgctgccaagaaacagaccaaggagaaggcgcccaacagtaccaacaagcccaacaagcccagctcaaaaatgcaaccaagaccagagtctcattcaaaggctccaaaaccacctgcaccccccaaggatgatgatgagagcggcgacgagtatgcagacgaggaggaggaggagcgcgacaacaccctgtgcggatcttgtggaacaaatgatgggcaaagatgagttttggatcttgttgtgatagttgcgagcggtgggtaccatggaaagtgcgtgaagatcacacctgcttcgagccgagcattatcaaacacttacaagttgcccagatttcggcaacaagagggcaagggcataagagacaagcacaaacaagcaagcagtcggaacggaaaccagcggcaatcgttaggttttcttn

SEQ ID NO: 397132 - DNA, 365 bp, Oryza sativa
cttgcttctgaattgtgcttagatcaaaagattctgtactctgtagtgaaaattgttggaacaaacttacgaagtgcgttttgcttagttttcatcttctcttctgatctgtatatagtaaaatggtactccatgctatgtggaccagaacatagtagtattttgttttgaacttgggtatatatctgtgtacatgtatttcttgctgaggaaatgcgttatgccgtgatgtagctgtgaataaacaattgtagagtttactgcttagaatgttttttttcctgatgacaatcgctatacaactttcttttatatcatgcagtggatggactgcacttcaaccccatttggggaaacaaaaattt

SEQ ID NO: 397133 - DNA, 521 bp, Oryza sativa
  unsure (1)..(521): unsure at all n locations
gaagcatctcatgaccatgcctgcagatgcaggngcacagagcaatggcttcgagaacgctgcctcacccatcatccatgtccagccgaagagcttgcattggcatccaccacgcagacgcctcttggatcaaatcggccagttgagatgatggcgaaggggcctagatcaggcacggttccctttcgtcagaacgctggagctggtctcttgggtgcatgccctgtggctacggtcacgtcctctacgccagatcagagcacaccggttagccattctggagcttcaatttccacaccccggactgctcagagattggctaaatcaggagcacaaggatgaagagaaatatgccttttctctctaaaacaaggatgaaaaaagaaatatcgaagatgacttctccaaattcttgaagttgttttctttctatcaaatgagagggattacctgcaagataatctcctgctgatcgattcgtgcttcaactttgaatgtaatctctgtttgttataggaggt

SEQ ID NO: 397134 - DNA, 499 bp, Oryza sativa
  unsure (1)..(499): unsure at all n locations
ggacgagttcgaggccggcggcgacggcgacgggagatgccgtgcaagcacaggttccacgacggctgcatcctgccccgtgtgcaggtaccagctgcccacggacgacgagcccaccgccggcaacgtcgtcgttgcagccgagggcggcgaccgagctcattggcaatgcacgcggcggcggcggcgactggtgatggcgacggaggaagcagtggcaggaggcgctggctctcgtggccttttggcggggttattctcgcacagatcgagcaggaggtcctcctcgtcgtgacggcaaaatgcagcaaacaatgtgattagttcagttgtcttagttgagtagttgtatgtccctgcatcaagtgcattcttggtatagttggatagcttgcaatttgttcctttgggtcgaaacttgaaactgtaattttttggggtggttaaggtagcatctgtnataacatttttaacaccagttaagcngacattagttagg

SEQ ID NO: 397135 - DNA, 447 bp, Oryza sativa
  unsure (1)..(447): unsure at all n locations
ggcttgaggaaaaagaagaagcttgacagaagacaccggatctggacgaaggaggggctccatcgtcatcatcgccatgatcttccttctctcctcatcgaagccaccatcatcttcccgacagctgtcaactctcctcgtttctctctctccagatcgaccggattgagtggccttgagctcgtggccgccggatcttcgacggtggggcgagtggcaaggtccgggtgggtggtgggatcctgtggggatcaagggggcagcgggatctggtagggaggccggcgatggatctggtggggaggtacgcggcggagtcgtggtnagggtcgagcggttgtttncggcgaggagtccggcggcgataggaacaagtnttgcgagacaaaataattttttcttttttcctttgttcngttttctttaaccgtcaatcatttgtaaact

SEQ ID NO: 397136 - DNA, 420 bp, Oryza sativa
tgccaaacttaatttttcttcctgtccttggctgctgtttggtgggccatgagtagtagaaatgtggagtggttaaaattgggaagaagggtgaaaaatgagtctctctctggcaagaagttactgcgagcctcagtcccatacgcctgaaataaccatagtcttataattaagcctagtcccatcttacatcttccccattccggtgtgcaaagcatatgcaatgcattgctctctcttctcttctgttcacctcaccacctgcaaaagttacattttgcagcagcagcagcagcagcaaaggccagcacacacagtcatcacctctgatggaaaaaggccatctctctttttgacagcggtaaacaaaccaatagcccctgtgtcctgctctccattataattaaccagtaaaacttt

SEQ ID NO: 397137 - DNA, 507 bp, Oryza sativa
  unsure (1)..(507): unsure at all n locations
atcagatgggttgagtgccatgacacatgctgatatgatgaattgtattgggaatgggatgatgattgagaatggaacaagaaagcgtccccacagagaggatggctgcgccgagaagacggtggagcgccgccaacggcgcatgatcaagaaccgtgagtcagctgcacggtcccgtgctagaaagcaggcttatacggtggagctcgaagctgaactgaactatctcaagcaggagaacgctcgtctcaaagaggcagagaagacggttctactgacaaagaagcaaatgctggttgagaaaatgatggagcagtccaaggagaagatgaatgcaaataggggtggcagccagctgcgccgcagcggcagctgcatgtggtgaaacgggcatagcggtgaccggcgagtggcacactcatcctgcttctggtgtggcactagcctctgaggctctgaagaggatttgcacattaagtcttctttcagactaagtgatgtgaangt

SEQ ID NO: 397138 - DNA, 532 bp, Oryza sativa
ggatcctctccggcgagtggccggagaaccttctccctcctcagctacgccgacctccgcgcctacctcgagtcgcagatcgtcaccaccgaccagatgagcccgacggcgaagtcggggcaggtcatgtcgcggctcgtgcaggtggccatggcggaccagaggctggcggacatcgacgcctctcttcgccgcgcagtccggcctgccggggctcgacgaggaggggaggtgcatcggcgtcatctccaagaaggacaaggccaaggcatccaatgggttggactcaactgttggagaagtcatgtcatctcctgctataactctgacaaccgagaagactgtattggaagctgctgctcttatgctcaaggagaaggttcacaggataccagtcgtgaatgaacaacagcaagtgatcgggatcgtcaatggcacggacgtatttcaaggttttggaggccagcaagtgtagtaagatccagttaatattatcagtaattaacatgttcttgtgtaggtatcgtgcttc

SEQ ID NO: 397139 - DNA, 502 bp, Oryza sativa
gaatgcaggcagatcatgaggcccagagagtgagaaaccaggagctcgtgaagatgcaagaggaatcagcgattaggcaagagcagatgagacgtgcgatcgaggagcaaatacaggaagaacgaagaaagactgatagagcaaaggcaattgtggagaaggaaattgagcaagagaaaattttagctgaggcaaatgcgagaataaagttaaaaaaacaaactgaagatgttgaaaggcgattgcttattgagggggcaaaggctgagaaggagaagtgggttcaattaataaatacaacctttgagcatataggaggtggtctacagacaatattaacctgatcaaaataagctagttgtagcagtttggaggtgtcacagcacttgcagcttgggatatacaccacaagggagggtgcaagagtggcctggggctatgttgatcctattctaggtcagccatcactttttagagagtcatcacgagggaatatccctgg

SEQ ID NO: 397140 - DNA, 380 bp, Oryza sativa
  unsure (1)..(380): unsure at all n locations
aaaagatgaaccagcctacacaaaccttcataaaaggaagataatgtgttacgtagttagcagcagatctgcatgaggaacactagtaagagcaagagcatctgagttggtatttgccccgatatttttctcgtcggggcaccaatgtatgtcgatgcctgagatagtagatgttccttttgatttctaagctgccataccacatcttgtttattttgtcccccccctccccctttctttttttttttacccatttgccttgttattaggtcaagttctgaagtgtcagtgtagtcctggncttttgtcagttgctctgtatgngtttattatagtgttacagttctcccaccatcaatccagtgaaagctaaattcttc

SEQ ID NO: 397141 - DNA, 478 bp, Oryza sativa
  unsure (1)..(478): unsure at all n locations
ccccgctcacttgcttcctccatcttgtttacctccattgcgctacacccctaacttttcaaactacactgtcagcaacaacttaatgttagaacacttgactcatattttcccctaatttcaatcgacccctaatcctagattccaaatctgtgacttggtgtttacctatatggtgcagcttggctgtcctgcagaccggtccaggccccagggcaataccagctgcactgcacccagttcaactgattcaatagttctgctaaactgttgatgggaagttctccatcatgggaactatttgcctgtacctatgctagactgttactaataatcatgtttcagatgtggatatattaggtagttcaatgctctatactgcatatactagaaatcttgnttcagatggcagacattagnattattggtcagaggtcagncagtggaggtgtttgtaaggggtatagtaattccctgg

SEQ ID NO: 397142 - DNA, 415 bp, Oryza sativa
agaagatgagacgggaggaggaggaggaagagaaggggcccatccattccatcgcccgacgcggcccgctgcggagaagaggagtttctgatgcttcagatcggattgtactctacatgataagaaagtatggcaccagcaaacaaagcagagagaaaagcagtgctggatgctggagcatggatgttcaacgttgtgacatcagttggtatcatcatggtcaacaaggcattaatggccacacatggttttagttttgctacaacattgactggattgcattttgcaaccacaaccttgatgacattagtaatgaaatggtttgggacatattcagccatcctatttaccattgccagaactcgttaaattcgtctttttttgcaaacttatcaattgttgggatgaatgttag

SEQ ID NO: 397143 - DNA, 376 bp, Oryza sativa
  unsure (1)..(376): unsure at all n locations
ccaccgccttcgtcggaggcagctttgcttcgctaccctgcgccgagctagctagggagaggggatcaatataccaccccgcgcatcaaccggagagacgtacgatcgatcgaatagctagctagctctctagctcggggagagagagagacaaagaagcctctctcttcgcatgggaggagggcccaacggcaacggcggcggagggcgtcactattgtgacgtctaccttccccggacccaaggcgacgtcgacgacgacggcaaaggagaggaggacagggacggtgtggacggcgacggcgcacataatcacggcggtgatcgggtccggcgtgctgtcgctggcgtgggcgattgcgnaatgggggtgggt

SEQ ID NO: 397144 - DNA, 325 bp, Oryza sativa
  unsure (1)..(325): unsure at all n locations
gagagggtgatggcgccagggagagaagaagagaaaatggtggcgactactacgatagaggacctgcacgccgacgtctggcgcgcgcncgtgcggcgcctggcacgggcggtcgctggcggcggcgagctgcgccacggcggggctccgggcgctcgccgcggacccggagacgtggcgcgcgctctgcctcgcggtagtggccgtccatggcggggcacccgggcctgctgtccgtggtcccgccgcgccggctcttcgccgacgcgttcccgttcccgcgcccggacgccgggaagctcggcggcggcggcggaggtcccct

SEQ ID NO: 397145 - DNA, 384 bp, Oryza sativa
  unsure (1)..(384): unsure at all n locations
gtgatttttatattaaaatccattacaatcaatatttcttttagcttgcataggcatgctagtgtaatctaccatagaatgaactgtagtgtagcaatcgaagttcacgtgatactgtaagggcattgacattgaaacaggaagctgacaccttctgattcagaatatgaaaaagaaaagcacaaacaacaacctatattctggtacagcacctaactaagcaagaagccagatagataacaaagggactagtatttgatggtaccaatttttatgaggtcaccaagttgtcaccaagcttcaccaaagccaaacttngccgagcacngctgtcgttttcctggcnttgaacttcccatcngtcaatatcttgtagactcctgg

SEQ ID NO: 397146 - DNA, 433 bp, Oryza sativa
  unsure (1)..(433): unsure at all n locations
atagagtctattttattctggatggcaacatgtggcatttcgagcatcggataatcaggttgcctatctcggatttatttgcgttggagcaaggcaagttattattcctccccttgagcataattaccctatattctatatctcttttctatgcattagtcattcatgattttaaatgcataacctgaacatatagcaaaccagatatgctagcttttgcttagccctgcctagttagattatgcataaaatttaatgaacttagattgggacagtacggtagaaacggttgatttccgggtggctagtaatgttccaaccgacataagactgccaagtacatgtgaaggaccatacgagtacgaccgcaatcctcgtatggggcataggacctagctgattaagttatctngcaaagaagggncccctgttt

SEQ ID NO: 397147 - DNA, 448 bp, Oryza sativa
  unsure (1)..(448): unsure at all n locations
ccacactaatgttatattaatcaactgtaacttaggtcatggtagaagagctttagcagagcaatttgtgtcaaggatagatgaatttcagaagtatgattttcctcaagatgcatatatgcaatcctttaagtctgctaagtcggaatattttcaagctataaactattacacagcagctaagaggcaactaacatatgctgacaatgaggttgataaagtactttacaatgaggtttacactcagtatgcccatacacacctgaggcttggaatgcttttggcaagggaaagcttcttaactgacagttatgaaggggggatttgttgatggaatcatctaataggaccagttccttgaggtttccagcaagtgatgctttccagaggggctttgtctacatatggaatctcttgggggaccatcgcaagcaggaggccgcttttn

SEQ ID NO: 397148 - DNA, 381 bp, Oryza sativa
  unsure (1)..(381): unsure at all n locations
gagctccaaacaaacactcgttccaaacttcctccaatccacttcatacaaagaaacctaagcagctagcgatccacgacaaaccaacaatgtcgctcgtgaggcgcanaacgtgttcgaccccttcgctgacttctgggaccccttcgacggcgtcttccgctccctcgtcccggcgacctccgaccgcgacaccgccgctttcgccaacgcccgcttcgactggaaggaggcngngaggtcgcacgttttcaaggccgacctccccggcgtcaagaaggaggaggtgaaggtggaggtggaggagggcaacgtgctggtgatcagcgggcagcgcaganagggaggaaggaggacaagaacgacaagtggcaccggttg

SEQ ID NO: 397149 - DNA, 359 bp, Oryza sativa
cgcttttgttttgtcagccattgccagcatccagctgcacttggctccgcgtataacttcctttcttgcttggccgcttctgctcctccattcttccctcctcctcttccccttcttccagatccattcctcaggaagaaggcagaggctgggagtgggaggaaggcccaagaaccagcaaagaaagaagagaaccatcaaccatgggttgttcttgggctcttgctgctctggttcttggcttcttggtggtggcagtccatggctctgagccgtggctgaatcagacgcaggtctactccaccaatgccaactctggtagcaatggcgtcttcgtcgggattacgctcatccagtcg

SEQ ID NO: 397150 - DNA, 431 bp, Oryza sativa
  unsure (1)..(431): unsure at all n locations
cactacctcagttagctcagtagcacagctcacctcggctgtccgaatcgagaggcacggccatggagaagccgacgaagaagggggtggcgccgccgatgggtggcggacgcgcctctccatcctcgccgcggggtgcctcaccgacgccacgtgccgcgccgacggaccatcaaccgccgcctcctaaacttcctcgacccgcacgtcccgccctccgccgcgccgcgcaacgggtcgcgtcggcgagttcgtcgtcgacccggcgatcccgctccggcccgcctcttctacccctgcccctccggaggagacggcggaacggcgacgcgacgaagccgctgcccgtcgtggtgttcttccacggcgggcgggttcgcgtacctgtcngcggcgtcgcgcggctacgaaggcgcgtgccgacgcatcgg

SEQ ID NO: 397151 - DNA, 465 bp, Oryza sativa
  unsure (1)..(465): unsure at all n locations
ctcgccctcctcggcgcatcggtccggcgtgccggcgccaccaccttcgaggtcggtggggaacacggctgggccgtgccgccggccaaagacgccggcgtgtacaacgactgggcgtccaagaaccgcttcctcgtcggcgacagcgtccatttcaagtacgcgaaggactcggtgatggtagtgacggaagacgactacaacaagtgcaaggcggagacccgatcttcttctccaacaacggcgacacggaggtggggctggaccggcagggcctcttctactttcatcagcggcgtcgcggccactgcgagcgtgggcagaggatggtcatcaaggtcatcggccacgacgggccttcgccggccagcccgccgccgccgccgtngaacgttcccctanaacgcttaacccagcggggcgcttcggtaagcgccgcgattgctngggcatgtgttcgtttcn

SEQ ID NO: 397152 - DNA, 447 bp, Oryza sativa
  unsure (1)..(447): unsure at all n locations
ggaatttcccagatcttatctctatgattgcncagacgagggtatctttggaccggttgtntcactttnttcaacaagaagaattgccagatgatgcaactataacggttccacatggtagtacagataaggcaatcaatataaatnatgctacattctcttggaacccatcttctccaacccctacactttctggcatcaaccttagtgtggtgaggggtatgcgagtagcagtgtgtggtgtcattggttctggcaaatcaagcttgttgtcttctatactcggcgagatacccaaattgtgtgggtcaagtgaggatcagtgggatcagcagcatatgtccctcagactgcctgggatacagtccgggaaacattgagggagaacattctttttgggcagtccaatgggccaaacagcgttacaaggagagttatttagggctt

SEQ ID NO: 397153 - DNA, 421 bp, Oryza sativa
  unsure (1)..(421): unsure at all n locations
aaaagagatcaggtccttttttgcgaaattgcggatacacccttcccgaagagccccagaacggccggtcaacggcaccgttgacctagtgagggggggggggcagtttcgtaaattccacgaaacactgtcccactcctcgtcttcttcggattgcctatatataaaggccacacctcgtcttctccattctccgtctccaagttttttttttctctctctctttgtcgccgttagcttgaggcggcgaggagctcgacgacgtggaggacatggtggcgaaggcgggcgccggcgcttgtgccctctcctgggatgacggagggcgaggtgtcccgcggcgagaagaggaggaggncggatggggatggctcgtcgacgtttgcggcggcggcggcataggggcgttcacgggttcacg

SEQ ID NO: 397154 - DNA, 353 bp, Oryza sativa
  unsure (1)..(353): unsure at all n locations
aaaaaaaacactaacagcgatgcaaatgcaagagaagctgccatctccttcctgaaaagtcgtgcttaattagtgggacgggtgacgagcaaatcactccaaaccttgcttctcctcctcctcctcctcctcccccatctccggcgccgcgcgccncgcccggaggagagcttctcgccggtgctgctactgctactaatccccacacccacctgctctcagctcagctcagctcagcttcccagctcggcgaagaagatgaagacgaggagctcggggaggggaggaggggagccgaggaggaggcttgaggaatgcggctgtcatggcgctcatgctcttcttcctcgttn

SEQ ID NO: 397155 - DNA, 460 bp, Oryza sativa
  unsure (1)..(460): unsure at all n locations
cacccatccgccgccgctggctgaactcgcgggtgatctgatcggagccggaggaggaggaggaggatgttcgtggagggcttcagggtggagagcccgcgcgtgcggtacggcgacggggagatcgagtcggagtaccgatatgacacgacggaggtggtggcgccgccgtcgccggagaaggggtgggtcgtccgccccaagtccgtcacctaccacttcaagaccaccaccaccgtccccaagctcggggtgatgctggttggatggggaggcaacaacggcaccacgctcacggctggtgtcatcgccaacagagagggaatttcatgggcgaccaaggagaaggtgcacaaggccaactacttttggttccctgacacaatcatccaccatcagggttgggagctacaacgggaagagatctntgcgccttttaagagcttttacccntggtaaa

SEQ ID NO: 397156 - DNA, 463 bp, Oryza sativa
  unsure (1)..(463): unsure at all n locations
ctacagttcacagatccaattcttaagatgggcgaaatgcttgtccatagaatgagagccaaaagtggacgcttcattgcccttcacctaagatttgagcctgacatgctcgccttctctggttgctactttggaggtggggaaattgagagaagagaactcggtgcaatccgtaagagatggaagacactgcatgcaagcaaccctgacagagaacgtaggcacggtaagtgccctctcacaccagaagaggttggcctcatgctccgagcattgggatttgggaaggatgtgcacatatatgttgcatcaggtgaggtgtatggtggagaggagacgctggcacctctgaaagcgctcttcccaaacttccactcaaaggaaactctaagctagcaaggaggagtttgcgcctttcctctcattttcatctcgcatggcagcgcttaataaaatggggtgn

SEQ ID NO: 397157 - DNA, 433 bp, Oryza sativa
  unsure (1)..(433): unsure at all n locations
ggtcaatgtaatgcttaagagagaagctgaatactttggagacattgtaattttgccatttatagatcgttatgagttggtggttctcaagacaatcgctatttgcgagtacggggtccaaaatttggctgctgtacatatcatgaaatgtgacgatgatacatttgtgagggtagatgtggttgtcagacacatcaagttgaacaatggtggcaggccattatatatggggaacctcaacctcttgcataggcccttgagaatgggtaaatggacagttaccacagaggtaataccctctgtctctgtggtttttcctcaaattagtcaattcaactttgaagttcactcatttgatagcgtttcatatccggtttatatttganccctcccttttttactaaccaaggaactatctactcctttgcaactg

SEQ ID NO: 397158 - DNA, 318 bp, Oryza sativa
  unsure (1)..(318): unsure at all n locations
gtacaaaagaggagagagagggtgatggcgccagggagagaagaagagaaaatggtggcgactactacgatagaggacctgcacgccgacgtcctggcgcgcgcgctgcggcggctggacgggcggtcgctggcggcggcgagctgcgccacggcggggctccgggcgctcgccgcggacccggagacgtggcgcgcgctctgcctcgcggagtggccgtccatggcggggcaccccgggctgctgtccggtngtcccgccncgccggctcttcnccgacgcgttcccgtttcccgcgacctaacgncggggaaactc

SEQ ID NO: 397159 - DNA, 426 bp, Oryza sativa
ggcgtcggaggggaaggtggtcgaggaggtgaaggaggctcgtgctggtgcgggcgccatgaacatgacgaaacatttatggtctggagccgttgctgctatggtatctagaacagttgttgctcccctcgagaggctaaagttggagtacatagttcgtgctgagcagagaaatctatttgagcttatccatgccattgcaacaacacagggtttgaaaggcttttggaaaggaaacttcgtcaacattctccgtacttgctccattcaaagccgtcaacttctatgcatatgacacttacagaaagcagttgctcaaatggtctggcaatgatgaaacaacaaactttgaaaggtttatcgctggtgctgcggctggtgttacacggaccgatattgtgtataccaatggatccgattaggcca

SEQ ID NO: 397160 - DNA, 464 bp, Oryza sativa
gcagcaagttggcctgcgacacccatcgttattgtgtctggcaaatttaccaaaacgctcttcagcagttgagtcaagcatttcatgggtcaaaaaccttagattactgcttccagaaatgcctatttgactctgaagatgagcctgagtttttgacagcatggagagaaatgttggaaaagtatgacctagaagataatcaatggctagcagatttgttctctcttaaggagaaatgggcactaccatatggccgcgaggattttgtgctgatatgaaaagtgtccagcagaaggagagcttgggcactgagcttaagaaacacttatccctagaatttgaccttttgagtttcttccaagcagtttgaaagagtattgtgtgaccgccgatcaacagaattgcaggctgatgtggatcctagccagagtaccaagaagccaccacctatgcgagtgttaagg

SEQ ID NO: 397161 - DNA, 394 bp, Oryza sativa
  unsure (1)..(394): unsure at all n locations
cctcgatcctcgccttcgccaagaagctccgcgaggcgcaccacgtgctcgaccgcctcgtcgacgactacgccgactaccgccgcgaccccaagcgcccgcgcggcgccgcggcggcggaacgaccccgagccggtgtcagacggcgactttggcgcgtcgctgcactccaagctcaacctggacgacgtcctgacgtacgcccaccgcataagctacacgaccttcgcgccgcctgagcatggtgctgggctgcctctgcgtggggcgttgccgccttgctcctcaggaaaatgagatgaggatgtcgcagctgtatcaatttgcggatttggatgttggagtgccgaaatcccaggaagcaaaggagaggactgcagcaganggagatgca

SEQ ID NO: 397162 - DNA, 474 bp, Oryza sativa
caatcctcatttcttggaaatattttccatattcctcagttcattgagcaaccgtttgtgagcagatatggctgaatcggctgtttctgcagcggttggtagcatcagcaaccttgctgcccaggagacctcactgttatgtggagtcatggatgaagttgggttcttgaaagctgagctcgagcgtctccatggcttccttgaagatgccaagcacaagaggaggtctggggatgcaagtgcagctgttcttgtagggcagatcagggatgcagcatatgacgccgagaatgttattgaagcatcagagtacatggtgaagcgaaacaagctcaagaagggtttcatgggtgccatttcaaggtatgctccgtttaccaactgatttgatagccctgcacaaaattggtgttgaaattccatggataagaaggaagatcagtgagtatttaccagtgccaaccggttaaaaat

SEQ ID NO: 397163 - DNA, 457 bp, Oryza sativa
  unsure (1)..(457): unsure at all n locations
gcgccgctcaagggagaaagcgtaaagccgtttcccgctttagttctcgcatccgcgctaaccctcgcggcttcgtcgatggtcggcggcggcggcggcggcggccacggggtcaggacgccggcgaacttccccccgcggcagaaggctcgcctccctcgcggaccggttcatgagaagtcgttggaacagcaaaagaaggggccaagttcatcctctccttcagttagcagtaacaagtccccactccaattggctgcagcaattgttcaaccacagaaaccgctagagtcaccacagcacatggttacaccggttcgactggcaagaatctccaggcccaagaaccattccatgcagttctggatctgtaggatctggttcaggagctgcccatttgacatatgcataaaaagagatgataangctccatcaagttaancgtctttaatgggaa

SEQ ID NO: 397164 - DNA, 465 bp, Oryza sativa
ccttcaccagcgctacccggacgagttgcagcactcgccctaccgctaccaccctcgtcgcggaggagcccgcgactacgccaccttccgagacgccagctcggaggatgacgctaccgtcgtgcatctagcacgcatggtggaagcgtacgacgcggctcgtattgacttccatcagatggtgcgccgtggcatggtggagaacaacatgaagatcctggagctgcggcaggagaacctgcagctcaagaaggacctcgacgcgttggaggcgcactgcaccagctcaagatcgcccagggagagatcagccgtcccaagcgtcgccgcgtctgccgcagccagaagattcaccgcccggcaagagcaccttccagggcccgagcttgttcgttcagtcccctgggcgtggacttgctttcgttcgagaccccttcgtggccgagcctgcgcccgtggttcccc

SEQ ID NO: 397165 - DNA, 336 bp, Oryza sativa
ctccgctcctggctcttcgaacacttcctccacccgtacccgagcgatgcagataagcacctgttggcgaggcagaccgggctgtccaggaaccaggtctcgaattggttcatcaacgcccgtgtccggctatggaagcccatgatcgaggagatgtaccagcaagaatgcaaggagctcgagggctcctccggcgccggcgacgacccctccggcgccgacgacacgcacttcgccgacgaccaccgccgccgcgcatcatcagcacaggcacggccagctaatggtagagcacggcggcgcgtccaagggcggcggcgcccaaattgtcgtcga

SEQ ID NO: 397166 - DNA, 252 bp, Oryza sativa
  unsure (1)..(252): unsure at all n locations
tttcaccttagtgaattatcaccgtattgattctcctcatctttgctccaaagagaaaccgcggggctgcagaggatgcaacagctaggntcatgcggcgaagagagcgcagagcggaagggtagagtgcgtcattgcgaacctttggggattaacctcgccgacgatgaagccttcgaccgtgctgcccgagaccgagagcatatgccctcacggccgcctgaggtagagacgaggccatggaaggcggcc

SEQ ID NO: 397167 - DNA, 395 bp, Oryza sativa
caagcttcaacgatcagcgtacgtacgtagcacgagctagcgagccgtcgacgccgacgagttctcgatcgatctccatcgccggagattatatcgaacaatggcgatgtcgtcgtctcccgcctcgccgccgccatccttcctgatcggcggcgcccaggcccagctcctgcgccaccgggaggaaatgctgcttgttcttccctcccctccctccggccggcagctgccatcggaggaggaagaagcagcaccatgcgccgtcaatggccggagtacgatccttgccgccgccgatgattccaagccaacgcggcctggagcgccggcggagggttccggcggcaaacggcggagaaattcacaaccgttgcttttttcctgatccatcgaat

SEQ ID NO: 397168 - DNA, 494 bp, Oryza sativa
  unsure (1)..(494): unsure at all n locations
angnggggaaantnaggtggcattactatnatttttngaacacagattaatatccaattatcatattataaaaaataatagtaatgccacctcattttcccctctttacaaatgtaattagcaaatgaacacacgaggggaagaaaaggcgagcaaattaaatgaatggactaatggatcaacattgtcaatcaaatccaaacaaaaaccacatttagacacttaattataacatgaacgataacgaacacatatcaaaccaaatgtcctctcctcccctccacacccacactcacgcaacaccttcatcattcctcccttccttactgtaggtagtaggcgaggaaggacagcatggaggcgccgatcaccgcgccgaccgccggggaaggggcccgaggttggcggcggcgctggtggggggcaggggcgggcgccttgacggcgaagggccacggttgcccaggcagcgacaaaggacggcgcaggcaaat

SEQ ID NO: 397169 - DNA, 468 bp, Oryza sativa
ctggatttggaatttttttctccgccgcctctccgacgactgcctgccgccgccgcctcaaccgacatcgccgatccggtctcccgtcgttgtccctcggccgctgaagtctcctcggactgtctcaaccggcatcaccgccgtccctccgccactcaaatcgtcacgcatcgccggtctcctccgacaaactgctttggcgacctcctcctcggcctccgcctcaaccgccgcctatacggagccacgccgccgttcctccgccgccgaaaggttaaactttttaattgcatctcagacttttgcatggtcttcaactggcaataatcttcagacattttttgaggagctgaatacaatttcacgtgggggctttcatcagaagatgcagtagaacggtttgcagctgtccggtgcaagcagattggagaagtttatctggccttttctgatcaattgtttacctac

SEQ ID NO: 397170 - DNA, 525 bp, Oryza sativa
gagcttcttcgtttgagggattttcttctcccgggaggcggaagaggcgtaggcgaggattcttgtaggaatcctctcctctccattgatgcaccgaatggcttctcttcttctccccccgcagtttctttgctccctgccttgtagtaccaactcaatcaggagccatttacattataagccccacttcttgggaaacattatgactaagcctaaagctaaaatgaggctgctcaaccgaaacgtaagttccatggcaaagaagagctctcaagatgtagcagaaggttcaagtgatgatgagagtgacggcgagacatcaaaaaccaagaaaagagctccgagacgtggaagaaagaaagccaccatacaagcatcagaaggggaaacacaagaaggtcaagtgagcactgaggaggatgaatcccctgaagggactaagaaaataaaaaggaggggccgcaagaaagctgcaactactgcaagctcatcggaagagaaggacaaagcaaaaaaaaaaaaaaa

SEQ ID NO: 397171 - DNA, 459 bp, Oryza sativa
attcaactgtactggacctactgaagaggacttctagctatgacatgcagttgaggttaagactgaactgccatgtcgtgcacaacttgaaccaagagcttaaaatgggtgacgtggtcgaactgatccctttggctcaatgcaatcctggagctggaggttatgcgagggagttccaccaaatgtatgaccaccggctcacagtttcgcagtcgtgacaactctaggataccaaaaactatgtacatatatatacatgacagattgacagcccatcaagatcgtcggaagtttaggtttccctttactgacaaatagaagcactactcgggaatcatctgaaaaagatcaagggatcgtttccctgtgccaaatgcgcgcgcgtgtgtgacatatcttttacatttgtgtttgtttatatgttactaaggggggtagagtgtcatacgggaaaattct

SEQ ID NO: 397172 - DNA, 445 bp, Oryza sativa
  unsure (1)..(445): unsure at all n locations
ggcgcatatcaacctctcttttctcaaacttacagaattttatccaccaactcttttttgaatatcgtgtggaaaagcctactctttgccaccaagctcatttgaaatggtaaacataggttgagtttagaaaagtattttatttaacatgatgataagttttgaacaaaattcagtgccaattacaaggattaattcattaaacgttcagaagtttcaatgagttcggttataccatacttcaaacttgtgaagattttggagttacaccaactctaatatcatctaacatgataaggaaattttttttgccagccttgtcaagttttaagcatccttatttatatgtaaatagaaagagtacatatttaggaccacggtaaaaaatggctcaggacttttaagtgttgcnctattgatcaagctaaatcatacttacatatat

SEQ ID NO: 397173 - DNA, 295 bp, Oryza sativa
ggcgatcgtagaggaagcgaccgatcagcgcgcggggacgccgccgggagagagggtggaagccaccacgcttcacccaaccccaccctcctcctccaccaccgtttaaccgcttcgtaggctacgacccaacccaaacccaagcgagctcgcgatcgcttcggcgcgccatggggacggaggtgctccgcctgcacgactgcctcgaccgcgtccgcgcccgtccccacgccaccaggcggtctccgcgccagcaggcggcccggcggcgcgacgggggccgccaccggggtgg

SEQ ID NO: 397174 - DNA, 470 bp, Oryza sativa
  unsure (1)..(470): unsure at all n locations
tgccgctgttgattagcagcagcatagaattcagggcacccaggtatatctaacaagcaatgccatcattgagcacaacatttcacttgctactcgtttctgtaatttctgtcaagtgctgcatggagcatggataatatatctttgggaaagaagtggtaattggacaattgcaaactttgaagaaatttgcaggaagcatgaagcatgatgcactgactaaataagtttcagaaaaaaataaatatggttttgctatgacacctatgtttgatttaccatcatgataacatgatagttatggtatatttgggccctttatcccattagatggagatatatttgggccaaatttcttacaaccaaatttattttgtaacaattttttgtaaatagacaattttaccaagatattaacgcattagggaacaagttctctgttgatagctaaaaaaaaaannnnnnnnnnn

SEQ ID NO: 397175 - DNA, 402 bp, Oryza sativa
accgtgtggaaggagcttgagaaggagaacagcgagttcttcgccacgtacaagaagggccaaggagaggaaccagcggagagcaagagcagtagttcttcacaggaagctgctggttccaagagatcaggcggagacgacgactaggtgcatgcatggcacccacgagagagggggctacttgtacagtaggatatccatcaagtcgtagtacctcgtactgtcttacatctagctgttcatagtacatagcgtatagtagtaatgtagccgttattatgtacgttttgccccgaaaataattaagattcggattcgcagctagccatcgtctagttcagccggtggtgtttgcatgcatcccggaagatgacgtacgtgtgtacacatatattcacattc

SEQ ID NO: 397176 - DNA, 302 bp, Oryza sativa
  unsure (1)..(302): unsure at all n locations
cctatntcggccgtcggttttccgccgcacgaatctcgaggagggagggagggagggcaacggcaacccagcccccgccgcccgcaatggccgcagtggcaccgatcgcnatgcccgcncgggtgcaccaccaccaccaccaccaccgccgcgcgttggcggcgtactccggcggcgttanggcggcggggaacgggttgtcggcgacgaggagggtgaggaggtcgccggccgtggagatgaggcgggagcgggacgnctggcggtgcgcggnagagcagccgcggtgcgnggaggtggcg

SEQ ID NO: 397177 - DNA, 417 bp, Oryza sativa
gctgatctctacttgctaccagcatcaccatgggtgctctggagcagcatttcagcaattgcagctccagagcacccatggtgatgctgatctctacttgctaccagcactgccgcgcgaaaagtggcccaaaggctacgtgaagggattgagggctcgcggcaatgtgactgtgaacatcagctgggagaaaggggagctgcaagaagcaacggtgtggtctagcaacccaaaatgcaccctgaggctgcactacggtgaacaagttgctatggtgacagtttttagggggcaatgtttacaggttcaatggggggtttgcagtgcgtggagacattacatggccccttgacaattgaacacggcctctggcatttcaagtgtttacgggtttttcaatccgttttagagtatttt

SEQ ID NO: 397178 - DNA, 460 bp, Oryza sativa
  unsure (1)..(460): unsure at all n locations
caagggcgaggagctcagcatcacggtcgtcggccacagcctcggcggcgccctggcgctcctcgtggccgacgagatcgccaccaccgtccccgacgcgccgcccgtcgccgtggtctccttcggcgggcccaaggtcgggaacgccgcgttcgtggacaagctccagaagaacggcagggtgaacgtcctgcgcatcgtcaacgccggcgacatggtcaccaaggtgcccggcgtggcgccgcgcctgccggtcaccaaggagcagtaccagcacgtcggcgcggagttgcgcatcgacagcaagaactcgccgtgcctncgccccgacggcggcccgggttgccgcacgaccttgaggcgtacctgaactnatcgacgggttaaggggacgggccgccgttccggaagacgggggcgaaggtgatcccgtttttaagtttaanaggggaagtnaaga

SEQ ID NO: 397179 - DNA, 736 bp, Oryza sativa
caattatctttcggatttgtgaggaagaagattttgttctgcaggtttttgatggagcagaaactctccggttggaaagggcagaatgtcgtcggcgaggtctgttgcgtcgccttccgcggtgcgagtaggcggagtctcgtcggcgcctgatgtcgagcagcagaagtcggtggcggccgtaggcgcatcgtcgccggtgagtagtagcaagcaccatcatatggcgaaggcagaagatggaaccattacagttaatggtgacaagcagcataatcctgccgcagataggaatggttttgtgcgttgcatggatactgctgcccggagtgaagtgatgaaccactctctccagaaatatgtcattcatttcgatggatgtcatcctcttcccatgagaaatcctaggaagagatgcgcttggtggctcactccgtgatattcgcgtggcttgcgacatgaatttcagaagcaacgaaacaacccgggtcaacagtaatggttgcgaacatgtgtccaatgaaaatatgtagacaatagtgtgatgatcaggaaaattgtaataagggcttgctttctgcacggtcgtagattagtcgtacgaactgtctctagttttgtatggtattttctatgaggaaaaagcgagtagtatctaagtttagaaatctgtatcttctactgtttgggaagtgaaataaaattgagatgttatcctttcaaaaaaaaaataaaa

SEQ ID NO: 397180 - DNA, 465 bp, Oryza sativa
ctagcaattattgaagcatacatgtaatgcccttgttcatttttgtgcatttcttctaggtactttggactcattgatggtaagtaggctacattattcattgttccttttccttattctggtacttcttcaacattgtgatcttgctacttccatagtgtggtgtgggtgctcctctcagcgcagtcagatggttctagaagtagaaaggtttttaatgtcttgcttaccccactaagctatcattcacagtctcatctgcaccaagatacgccatagatttcaatagtgctgctgcagactcaccagctcaaccatttgattgcaggcttcttaaaccaggggggaatctttatgctggataacttatggtgatccatcggtgaggggtaccccatctgaacccatcagggtgcaattgggaaaatgtactatacagttctgcccagacccgggtcaagggca

SEQ ID NO: 397181 - DNA, 569 bp, Oryza sativa
aaatcagtgacatatacagattgacatgtatacggaccacatgtaaagctccaccaagggaaacgctgtacagacaaccaaagaaaactctgtgtattcccggacgagcgcatgactccgactacgagtatccattttttacgacgcgccatcttcttcacaatatatctaatatctagccaaactgtgtaatctgtttaaacccatttgtttcgtgccattatctgcatatatgctaatggaagatcgcaagcaccgaatcaatcgagatcagtagtctcttcttgctgacaggaagacctggaccacttggcaacccggccgtcccagggtgagctgacaagcatagggtcgaagggatgccaactgcagtctcgaattgccagctgatgatatcctttgagttttgcaacttgtgatccgctcaccacatcgtgggtacaaacactagaatcataggatcctgtatatatgtacttctgtcctgtgctatatgcaggagaaaaatagcaacggatcaatgtacgaagaactgaatggccccagtatgtagctattgactgatcatg

SEQ ID NO: 397182 - DNA, 468 bp, Oryza sativa
  unsure (1)..(468): unsure at all n locations
ctcatctccctcttcgtctcgagacgcgacggactctctcgaacgaacccggaggagtcccgtaccccagcggcagcacggggggaggcggaggcgagcaccggcggcgatgggggatggggaggggagcaccggcggcggcgggggcggcggagatccgcagaggctgaagcggatcggggccgcggcgtacgacttacgagaacgacttcgcggtgggcggggtacttggtccaacgtcctcgtgccccctcaccttcgcctcccgccccgacgtcgtcgaccactttcaagcgcaagttcttaccagcggtacaatcgatcctgattttgattgtttgagccaatgtctttccaacaaaggtttcaaaagttcaaattcccaaccaaaaaccaagcaagcaagggtttttaagcaaacaaccattccaattgaggaaattttcaaggagcttcgtgacttnaggg

SEQ ID NO: 397183 - DNA, 463 bp, Oryza sativa
  unsure (1)..(463): unsure at all n locations
gctgcaatggcagcatgtctggtcgtagtcaactagccagccaccaaagagagagctatcatccatggccgccgtggcgcggccgaggtaaggcggtgaggtgcctcggccgcggcttcgacattggccggcgacctgaggctcaagtactgcaagggcggcggcgcggctgcctggtcgagaggcgcggcgagacgacgccgctcaccgtgcccgggagtcggggtgatcgccgacgtgcccggcccgacgtgaggtgccgacaagggccgaccgcgttccggtttcaaagtccgacgtgcttcgagttcaacaaagatgtcggagcttgtttcaaccagagggagttttcggttggaagggaagatcccgtcggggcanttcaacgcgtcattcgacctggacaacgggtcgttggccacgaggcgccgaaaacaagtnccttgtattgacggtatttnat

SEQ ID NO: 397184 - DNA, 406 bp, Oryza sativa
ccccccacaaaacccggagaagcgaaatcaaccaccagatacgacgagcgcctcgacagcgatccgccgccgccgccgccgccgcgtcgggtgtgtggtagggtttggggcgatggggcccccctccgcctcctcctcgccggcggggcgcccggcggttcggcgcgacgatgaggctgcggagggaggcgctggagtcggtgctggaggaactccggcgggcgctggacgagcttcgcgagtgcggggagctcggcgtgcctctccctgaccccgagggagccgttaacgacggcggcggcggcgaggagcagccggataacgaggaagaaggcggcggcggcggcgggcacggcggttgtaacgatgatgattcggcggcgtcgtttgcgggttgttccacggt

SEQ ID NO: 397185 - DNA, 808 bp, Oryza sativa
  unsure (1)..(808): unsure at all n locations
gctagagatagagagagagagagagagagatgccggagtactgcgtcaccggcgggacggggttcatcgcgtcgcacctcatccgcgcgctgctcgccgccagccacaccgtccgcgccaccgtcagagacccagaggatgaagccaaggtggggttcctatgggagcttgatggcgcgacgagcggctgcagctggtgaaggccgacctgatggtggagggtagcttcgacgacgccgtccgcgggtcaacggcgtgttccacggggcgtcccccgtcgtggtggtcggcaacagcagcagcaacaacggcaagccgaacgacgacgacgacgaggaggaggtccagcagcggctagtggagccgatcgtgcgcggcgctcgaacgtgctccgctcctgcgccagggcgtcgccgcgcccgcgccgcgtggtgttcactcctcctgctcctgcgtccgctacggcgccggcgcggcggcggcgctgaacgagtcgcactggagcnacgccgcctactgcgcggcgcacggnctctggtacgcctacgccaagacgctggcggagagggaggcgtgngcggctggccaaggaagcgcggcctcgacatggtcgccgtgaacccgtccttcgtcgtgggccccatcctgtcgcaagcgccgacgagcacggcgctgatcgtgctcgcnctcctccgcggcgagctccccaggtacccgaacacgacggtggggtcctcacgtggaacaaccaggtgctggcccacgtggtngccatgaggacgcaaggngtagggcggttatctgacgt

SEQ ID NO: 397186 - DNA, 460 bp, Oryza sativa
catcaattcagtgtctagcattattcaaaaaacttcacccagggcaccgcaaggaaagaggtggaaaattgtatcagcaaaggtgctaatttcattgagagttctcagagaagcgatggttcatggtatggttcttgggggatttgtttcacctatgccacatggtttgcagtgacaggattagtttctgcaggcaggacacttgggaatagcgctacagttagaaaggcatgtgactttctcttgtcaaaacagcttccttcgggtggctggggcgagagctatttgtcatgtcatgacgaggtttacacaaatcttaaaggcaaccgacctcacggtacgcacactgcgtgggcccatgattgcactaattgatgcagggcaggctgaaagagatccagtgcctctgcatcgagcagccaaggcttttctcaaacttgcaataggaggatggagaatt

SEQ ID NO: 397187 - DNA, 439 bp, Oryza sativa
ctcctcttcttttctatccaagaaccgctcaaaagctcgaaccttgccgcaatctttttaaatcctcccgaccatttcctccgggtttgattctgggcagagattgcgaggggaaagatacgagcttttcttggcttctttcccctgcattgggaaagatacgagctgttgctgttcttgggaagaacagcttgggacattcttgggttggggtttgattcccaggggaagaaagcatgaggctatggtttctcatacctcttcttctctgtttccctacattgattcgatccgaggattactcggtatgtgaccatcgtcgttcggggtgctgagacgatcgcttcgaccagcaacgaggttcatttgcggcaaccattgatttggttgcctccagagaagtgcaattatgaccagtgtccatgggggaagcttttat

SEQ ID NO: 397188 - DNA, 461 bp, Oryza sativa
  unsure (1)..(461): unsure at all n locations
atcttcctgggcggcgtangtccctggggctgtccgacttgatggagcacagctcgtccgaatcctcgccatctgaagtccgagttatgatcaagtcgtctatgtccagatacatcggtggcagatctgcaaagtttattaattttacagcaattaatgcatgcaataatcaagtaagcaattgaagctatggcaataatgcaagaaatcaagaatcaagaagaagaagaagaagaagaaagctagaagttatataccgtgtttctccctctctcgttgtgtttcactcacgctctgctgcttctgggatgatgaggatccctgactttgctcaccttcacctccatgctgctccccggtgcccttctttctaccagacttgagaccancctgtgggccgctagatttcctgtagggtcccacagcaactcacagggaatattaattttcttgaagggggt

SEQ ID NO: 397189 - DNA, 319 bp, Oryza sativa
  unsure (1)..(319): unsure at all n locations
gcctccccgcttttcccctttttatttcatattctttttctggttcttgttcctttcctcccccggcttgacggtggtggtgccgccggatgggccttggcacggccgtcaatcggcgaggcgtggttgagcgacggcgagacgcagccaggacggcatgcggtgcggcaccggacggcatgcacagcggtcatgtcgatgtagcggaccaaaatgacggcttgtgctgctgctcantggttctttcgttttttttcctccttttcttctttcttctaacttctgctcgttttcttccttctctcttgctaacgctcca

SEQ ID NO: 397190 - DNA, 406 bp, Oryza sativa
  unsure (1)..(406): unsure at all n locations
ggcggcgaggcgaggcgaggtgagtaacagatcgatcgatccatgtcgccagtcgggtggttggtcttgttgttgccggcgctgctgcggcggggcagcagggggtggctgcggcggggaaggtgccggcggtgatcgtgttcggcgactcgtcggtggacacgggcaacaacaacttcatcccgacgatcgcgcggagaacttctggccgtacgggcgcgactacgctgacggcctccccaccggccgcttctccaacggccgactcgccaccgacttcatcttcgaggccttcggacttccttcctgcatccctgctaccttgaaacaacctnacatngaccagtttgcttcgggtcttcttngcttcgccgcaacgcttgaaaaggcaacgccgagtctattc

SEQ ID NO: 397191 - DNA, 504 bp, Oryza sativa
cctatctcggccgtcggttttccgccgcacgaatctcgaggagggagggagggagggcaacggcaacccagcccccgccgcccgccatggccgcagtggcaccgatcgccatgcccgcgcgggtgcaccaccaccaccaccaccaccgccgcgcgttggcggcgtctccggcggcgttagcggcggcggggaacgggttgtcggcgacgaggagggtgaggaggtcgccggccgtggagatgaggcgggagcgggagcggcggcgggcgcgggagcagcagccgcggtgcggggaggtggcgggcgggacggcggcggagtgcgccgcggtgttctgctgctttccccttcgccgtcgtcgagctcgtcgtcctcgcggccgtccgcgctcccgccgcgctctgccgccgcgccgtccgcggtgggcgccgacgccgcgtccgctccacgaagccgaaggagacgggcgccatggacatcgcctcccaaaggtcgctggccgcc

SEQ ID NO: 397192 - DNA, 413 bp, Oryza sativa
ggccgcgccccggaccaggagaggaagaaaggcgtcccgtggaggaggaggagcacaagtcgttcttgatggggctgaagaagtacgggaggggagactggaggaacatctcgcgctacttcgtgacgagccggacgccgacgcaggtggccagccacgcgcagaagtacttcatccgcctcaactccggcggcaaggacaagcgccggtctagcatccacgacatcaccacggtcaacctgccagaagaagacaccagcaacccctccccatcgccgccgtccgtgctcaccaccgcctcagaccagctcggctccctcgtggacacgaaacccgttcccccgccaccgtcactcggcgcgcaacggcacttcatgtcgccgctgccgggagcgctcggcgtcagcaaccac

SEQ ID NO: 397193 - DNA, 536 bp, Oryza sativa
  unsure (1)..(536): unsure at all n locations
gcaatatcagggatctgttaatcaaggcaaaggtctaccttggtcttggagccattcgagcaaatccccagtacctcaaagacttgaggcagcggattcgggaagttcaaaaggttcttggtgatgcatccaaggactccgatctacccaagaatgccaatgagaaggtgaaaacacttgagcagacactgatcaagggaaaactgatgcaggatgattgttctgttgttgtcaaaaagcttcgagctatgcttcactcagctgaggagcaactgcatgcacacaagaagcaaactgttttcctaacacaacttgcagccaaaacccttcccaagggtcttcactgcctccccttgagggctaggctaatgggtatttttcattggatcctaagccattcagcaattccccaaacaaggaaaaactttgatgaccccaaactatatcactatgcatggtccctgacaatatattggcagcagctggtagttgtaattcaccagggtaaatgccaggatcntctcatcatgcttcca

SEQ ID NO: 397194 - DNA, 471 bp, Oryza sativa
gttggtacagttattgagcctgcatctgagttcttctcaagtaggctgacaaagagggagcgcaaaacaacattggttgatgagctcttatctgatcaacatcttaagaactacaggatgcgcaaagtaagggaaattcaggagagccgcactccaggaggcagccagaagtggaggaacaagggcaaagaaaacactcaaaagagccaaggataggcggaaatgagtttttactgctgctactctcactcagtttaccatgaggaagagatgactgattattgggagctaaaggttgagacaaccttcaaattgcgacaaaattagattgtgataccattgtaatgtggggaaatccatgccatatgatgggatgcattaagctggtggagctgagctaagattggtcgggtgctgtaatctccctccttttcattatgagcccactgttcaggttgctgtacctggatt

SEQ ID NO: 397195 - DNA, 707 bp, Oryza sativa
  unsure (1)..(707): unsure at all n locations
gtacttcggagtgtatgagcaactcctatatgccaggaagatgaaacctgttgaaggagcccaatggacaggaatagtgacaacgattgcggttgagatgctaaaggcaaatatggttgatgctgtggtttgtgtacaaagtgacccagatgacaggcttgctccaatgcctgttttagccaggacgccagatgaagttattgcagccaaaggtgtgaagccaacattatcacctaatctcaatacgcttgcgttggttgaggcagctggtgtgaagcgtcttctcttctgtggtgtgggttgtcaagtgcaagctttgagatcagttgagaagtatcttggtttggaaaagctttatgtgctcgggacaaactgtgtgggacaatggtacccgtgaaggacttgacaagtttttgaaggctgcaagcagtgaaccagagactgtactgcattatgaatttatgcaggactacaaggttcacttaaagcacttggatggacatattgaagaggttccctatttttgcctgccagcnaaggaccttgttgatgttattgccccatcatgctacagctgcttttgactacacaaatggcttggctgtaaaggtttccatcgttttaaagttgatatttgtactcttgctatagcagatatncatattttggaaaggaaccatctggtatctggctgtattattccttct

SEQ ID NO: 397196 - DNA, 230 bp, Oryza sativa
ggccgccgtgccatacccgcaagaaccggcagtcagcgtgacgacggaggtgtagtaagccgctctggagcggcgcacgcagcggtcgcagccggaagcgagccgaggcgcgagcaacgcaacgatgacgaggagtagtcgcgcgtggtgcgaaagggaggaggagccgaagcagcaacggacagagacggccatactctctggctcgggcacggggagtgtgggtcgct

SEQ ID NO: 397197 - DNA, 402 bp, Oryza sativa
gggatggaaagcaaactaaatgctatagatggcgatacaataacttatgaaaaaggcaaccattatgagctaaaggattccaagtctattctattgcctatacaaacaacagaaaatacacaagctcctttgacaaagaaccagagtgtgtcaaatacagatcagcctgttactcctctcatggatgaaaatccaaatccttacagtcgcattgagggaaagctggatactcttctctctaagatgggagaagatggaactatactgctccaggtttgacgatggtatgaatgaggcctaatctggtagcatcgagtcaaggctttcagcggattgggaccaccagtttggatgtggtcctctaatgggggattaaggcccttacaagattcttcttgcaag

SEQ ID NO: 397198 - DNA, 402 bp, Oryza sativa
gcttgcttgtggaagcagaattggtcatattggaggaatccatcctacactgcagtgagattactcttcactatcgtcattgccctaatgtttggaacaatgttctggaaccttggaacgagaactaaaaaacaacaggatctattcaatgccatgggatcaatgtatgctgcagttctctacattggagtgcaaaactctggttctgttcaaccagtggtggtggtggagcgaacagtcttttaccgagaaagagcagctggcatgtattcagctttcccgtatgcatttggacaggttgcaattgagttaccatacatcatgggttcaagactctgatatatggcgtgctggtatactcaaatggattggatttgagtggccttttgccagttcttgtgg

SEQ ID NO: 397199 - DNA, 463 bp, Oryza sativa
  unsure (1)..(463): unsure at all n locations
aacacaagaattcagctgtacaacctgatcaatcttacacaagaattcagccatagctagccctgatcgatccaattctgagttcttgaccgacaaccatggcgtccatgaccgccgtcgccgccgtcctgctcctggtcttcttgctgctgacatcgtcggctccgttcttgcaagccaggatgatgccgggagacggcggggagattgttcaggaggccgtgacgatgatgatgggatcctctgccggcgccgcgacgccgccgtcgcaggaagaagaagcacggcgtcgtcctcgccgccggaggaggagatgctgcttccgaggagaccacctctgccgctgtcgccgccggggcgacccaaccggagcttcgnagcagcaggatgcttcgggtcggtgcccagccccggcgtttggcactagcggacgacgccggctnatctatagttagttaataca

SEQ ID NO: 397200 - DNA, 389 bp, Oryza sativa
  unsure (1)..(389): unsure at all n locations
ggcgagcagcagctgcgaggggaagggtgccggcggcgcggggtaccagtacgcnccgtacgggggtcgtactacgacgaggagcggcggtggtggccgtggctcgtgccgaccgtgctcgtggcctgcatcgtggtgttcctcgtcgagatgttcgtcaacgactgcccccgccacgggagcccgctccgcgccgagtcctgcgtcgccggcttcctccaccagttcgccttccagccgctccgggagaacccgctcctcgggccctcctccgccactttggagaagattgggagcactagacttgggcgaaggttgttcatcagcaccaagcatggcgtctcattagctgtatctggctaaatgctggcctaatccacctgattgtn

SEQ ID NO: 397201 - DNA, 359 bp, Oryza sativa
  unsure (1)..(359): unsure at all n locations
aggaagttatgataccgaggaaaaagctgccaggtcatatgatgttgcagctcttaaatactggggccaaaatacaaagctgaatttctcggtttcagaatacgaaagggaactggaggacataagggacatgtctcgagaggaaatgcgtaacatacctaagaagaagacgtagctgctgctcaaagaggggctcctatttatagagccgttactaggataggcagaaaggatcgggaggttggcaggcacgcataggactggttgctggaacaagagacatttacctgggaactttcaaaactgagggaagangcagcggaggcttacgacattgctggctattggagatccgtggn

SEQ ID NO: 397202 - DNA, 360 bp, Oryza sativa
  unsure (1)..(360): unsure at all n locations
gaacttctcatcaccactaaatcagctccagaataggatatggctgatgcattggagtatttttatcttctttaaccatgaaaacggcagaaatgggatcatcgatctgttcttccaggataggtacttgaacgcaatccagacaaatgcaccccatcttctgagataccttgctacagcagttgtcgtgaacaaaaggagaaggaacatgcttaaagagttgattaaagtcattcagcaggagcagcacagctacaaggatcccatcactgaattcttgggaatgcttgtatgttaactatgattttgatggtgcacnacaganactcatagagtgtgagcagggtnatattgaatgat

SEQ ID NO: 397203 - DNA, 369 bp, Oryza sativa
  unsure (1)..(369): unsure at all n locations
gctggtagtagtactcttaccctcttgcattagccttttccttcatcatacaatttatcttgagaaatcaagctgtacctccacaagttgacatgtcgacggtgacctcgtgcaccttcctgagcatccgccccacggtgagctctgctggcagtctcttatccaagaaaccggcagcgtttgtttcccttgcgtcggagaggaaatctaggcctctttcgccgtgcttcgcaattagctccaacaaaccaggggacccaaaaatagatgtgtcgccattcagcatttcacccgttgttctggtgaacccggtgcggtggacggcgacggtggaagtggcggaganaagatgaagtagctgtgggtcga

SEQ ID NO: 397204 - DNA, 367 bp, Oryza sativa
  unsure (1)..(367): unsure at all n locations
ccatttctcatcactgagctgagctcagttcagttcagttcatggaagtatatctccttcttggcttcatttgacaacttccaacacaagcagaacaaggtgatcaaatcatcctcaaggcttgtcttttttttccttctctggttatctccaatggaggctcccccttctctttccatcgtcgacgaagacggcttcgtcatcgacctctcgctgacgctgggcctgacatcgcctccgccctctccaggcggcgcgtctccttccattcctccgggaagaaggcggcggcggcggcacgagtggtggtgacaacaacagaggcagcaaagtggtggcatggtggtggtggtggtgtgtaagntct

SEQ ID NO: 397205 - DNA, 388 bp, Oryza sativa
gaaaaatcgagagagaaagagcaaaaccctaaccgcggcgctccgccccttccgccgccggattcctcctcctccttcgtccgccttcgccggcgccgccctgctccgaagactcaggccttgtcgccgcgtcgcttgccccgccgccggtttcagcagcagccacccccaccaccatgtcttctcaggtcgacaaccgtagccaatctgctggaaagcgtgcccgcaccgacggtgggcggcgtgaggacgactgggtttgccccagttgccagaacgtcaacttcgcttccgcaccaacttgcaacatgcgcaattgcaaccaatccaggcccaccgactatacggatatgcagaacttgcagcacgcggccattcccattagggg

SEQ ID NO: 397206 - DNA, 284 bp, Oryza sativa
  unsure (1)..(284): unsure at all n locations
cactagctagctagctctgatatcctacaccggccttagcaaatagccatatatacccttaaggataagctccatggcatccaagatcctcgtgtttctcttggccatcaacctcctcttcttcacgacggccaatgcctgcggctgcgcgtgcggcaaatgcccgacgncgncggccccggccctcccgncgtcgacggctccgactccaactactccgtcctaccataacaagtgccccgtgaacacgctcaagttcggggcctgcgncgacgtgctgggcg

SEQ ID NO: 397207 - DNA, 474 bp, Oryza sativa
  unsure (1)..(474): unsure at all n locations
aggaatggagagcgacgaggagatagggagagtgccggagctggggctggagcgggcgcgctcctcgcctccacgccatggccgcgtccccggccaccttcccctcctcccaccaccacgncgccgtctcctcctactgcgcaggccagcggcgccgccggggcangcccgagtnagacggagcacaagcgcctcaaaaggttgctgaggaaccgggtatcagcgcagagtgcaagggagagaaagaaggcatacttgaatgatcttgaggtgaaggtgaaggacttngagaagaagaactcagagttgggaagaaagattctccaccctacagattgaggaaccagatgctcaagacagatacttgaggattacaacttgtgagcagaagagggccaggtagcattcttagttggaagagggtcattagaggagaggttgcagcaatagtagacantttatgttcggatattg

SEQ ID NO: 397208 - DNA, 1014 bp, Oryza sativa
  unsure (1)..(1014): unsure at all n locations
aagccgcctggccccgggagtgaaccgaaccccaggaggaacgcgaggtgaaccgggcgccgganggngngcgatgatgatcagcaggcagctcgtgctgacctacctctaccngctaatctacgtctgcctctcgtcgggagtcatcctgttcaacaagtnggtactttctccaaagtacttcaaatttccctttcctattacccttacaatgattcacatggcgttttctggagtcgtaacgttcttccttgtccgtgtgtttaaggtcgttgcaccagtcaagatgacattccaaatatatnccacatgtgtgattccaattagtgccttcttcgcgtcaagtctttggtttggaaacacagcatacttgtatatttcagtcgccttcattcagatgctcaangccttgatgcctgtggcaacatttataatggctgttctatgtggtactgacaaattaagatgggatcttttcttgaacatggtcttggtcagtgttggtgtcgtagtttcatcatatggcgagattcattttaatatcataggaacattataccaagtaacaggcatttttgcggaaccctcaggctggttctgacacaggtcctccttcaaaagaaggggttaactctaaaccctatcacaagcctatattatatagccccttgcagtttcatcttcctgtttgttccttggtttttacttgaaaagccagaaatggatgtttctcaaattcagttcaactactggatattttnctttaatgcagttgctgcatttgcattgaacatatccatctttctagttattggaagaacaggagcagtcaccatccgagtcgcaggagttctgaaggactggatactcattgccctctcaaccattatctttcctgaatctattattacaagcctcaatataattggatatgctgttgctctctctggcgttgtcatgtacaattatttgaggtggaagatgcagagcgaccaacttccagtgatatcgntc

SEQ ID NO: 397209 - DNA, 567 bp, Oryza sativa
  unsure (1)..(567): unsure at all n locations
cttccattccgtcgagctcgatcgccacatccggctgctgcacagggccgtcggcaacgcggtcgtcgacgacaagtacttggtcttcggggccggctccatgcagctcatcaacgcgttggtgtacgcgctctcccccgacggcaacgccgactcgccgccggcaagcgtcgtcgccaccgtgccgtattacccggcgtacaagtcacaaaccgacatgtttgacggccgggagtacagatgggacggcaccaccgctacgtggtcaaacaacggctcgcgaaactccaccaaaggcttcatcgagttcgtcacctcgccgaacaaccccgacaccgcgttgcgcaacccgtcctcgccggctcgtcggcgatcgtcgaccacgcgtactactggcctcacctgacgcacatcccggcgcccgccgacgaggacgtcatgctcttcancgcttccaagctctccggccangccggcagcagattcggatnggcgctgataanggacgagaangttgcgaaaagagcatttcgtacgtagagcagagcatcattggcgcgttccggg

SEQ ID NO: 397210 - DNA, 379 bp, Oryza sativa
  unsure (1)..(379): unsure at all n locations
tgtttaatttcttcatggcaccctttgtgcagaaggaattgctcaaatcagacacaagtgaagctatttgagggatcactagctgtaccaatttctttccagtcacattggtgaacaaaattggtataggtactgcaactggatcagtcgcacagaactttctccaaattggattggcctcactcctgatgactacataaacatcatggaaaaaattgtatgcgatatgtgtttgatcctaggaagtatgtgatgtggatttgggtgatcttaccgtcttgttggcttttacatggcatgattgacagtgtgtaaataaaatcatttagtgctctgtaaaaatatatgttgcttgttgatgtcttaaaaaaaaaaaaan

SEQ ID NO: 397211 - DNA, 270 bp, Oryza sativa
aggctgcttctgacgttcgtgatgagtttgtatctgttactgagaagttaatggatgaattggcacaatgctacaatgtgctcccccaacttgatattaataacactatagaccaccgccccgaaggagcgcaaaaatggtttttagagaacgagaagacggttacgcagttttgccgcaagctggctgctgaacgccctcttaaggatattcgcgatgagtataattaccccaaaaagaaaggtattaaggatgagtgttcaagattgc

SEQ ID NO: 397212 - DNA, 335 bp, Oryza sativa
  unsure (1)..(335): unsure at all n locations
cagtaaggtaggatggcatcgttgatggaagtgcaggtgccgctgttgggaatgggcactacgatgggcgccctggctctggctctcgtcgtcgttgtggttgtgcacgttgccgtgaacgcctttgggcggcggcggcttcccccgagtccggcgagcctaccggtgatcgggcaccttcacctgctccggccgccggtgcaccgcactntccacgagctggcggcgaggctgggccccctgatgcacgtccggctggggtcgacgcactgcgttgtggcgagctcggcggaggtggcggcggantgatccgcagccacgaggcgaagatatcg

SEQ ID NO: 397213 - DNA, 338 bp, Oryza sativa
gccgcagcggcgcgcccctctctctctcctctccttttaactactactccccacgaggagcagccgcgaacaccacacaccacctcacgcagcagcagcggcagcaatggcgtccatcatcgtgctcgcctccgtcctcctcctcgacgtcatcgccttcggcctcgccgtcgccgccgagcagcgccgcagcaaggcgacggtgacgcccgactcggagaagctgtacgactactgcgtctacgactccgacatcgccaccggctacggcgtcggcgcgctcctcctcctcgccgccgcgcaggccgtcgtcatgctcgccagcaagtgtttctgct

SEQ ID NO: 397214 - DNA, 376 bp, Oryza sativa
  unsure (1)..(376): unsure at all n locations
cattatccgaagtttgcatacttaatgaacttgaggtgcttcagttgttgaaattagttgatcccttcaaaaaatggcagacatgataatgaggaaaaaaatggcagacatgataatgaggatgagcttgaaagtatttatctcgatgaattggtggagcagtcattccttcaagaaatttatttttgatgttcttgatgccgccgagttgaaatttcctttttctcaaattaactgaaaatagagatgaatcattgtgacactcagtagcttcctacgcttggtgatcttccgtccctcgtgtccctctattttctatggcgagtggctttntgcacgacactggaccggnccagggagttttnggagccttgtt

SEQ ID NO: 397215 - DNA, 358 bp, Oryza sativa
  unsure (1)..(358): unsure at all n locations
caaaccctctccccacctgcatcccctctcctccacggcggcggcggacaccaccgcacaatgaggagctcccctgcggcgagtggcaccacgccgtcgaacatggacagcgggaggaaatctgacagcgcccccgaggagctcaccgccgtccagggggttgagaagcacgacgagatcagtaaagttgagaacggtgggcccaacgaagaacatcctcaaaaccagataaaaaggagcctctggaggtagaaggttaagacatcaaacagaaggcagagaatgaagaagatgaggagagcgaggagacccatactatgcctggcatgctnccttaccaatgttatcgaaaatgctt

SEQ ID NO: 397216 - DNA, 403 bp, Oryza sativa
  unsure (1)..(403): unsure at all n locations
ggagaaggtagaggtgcgaatcgacaaggcgcacaacatcatcatcggcaggtagaggaggaagaggaggagagcaagagcagccaggctacaacacactactaccaccatcaccatgagcagaccacaacgacgacacaccaccattaccatcagcatgagcatatgagccactaccacatgggcccctccgacacagctgactcaccctcgccgccgcactttgtctaccattatggcgtcgacccttgataatcgcccagatagtctcttagcttctgaatcactagattgtttgttcttttgttttttccttttgtcaattgggggtgatatttttattcctctaattaacgaccgacttgctgctgataattatttaatgatctgttgtaaatgcgnn

SEQ ID NO: 397217 - DNA, 626 bp, Oryza sativa
cagagactaagttgttatcagatacaccttggaagttttctcatctcaggtacttgcggttgaaaaactttgcagattctgggatcgtggagacgaatttttttgtctcttttctcagggctgctccttttattgagaagttagagatccatttttccatgaatttattaatactggatgaatcgcatgaggaccatcctatcaggcaacaacttggacgctgtgaatacaataacctgaagaacatgcgtatcataggatataaaggttcaagagatcaggtcgaatttcttctacatgttgtggagaatgcccctgcacttgaggttttaactctagaggcagctggaatagagtaccaggaggtttcatttgtgttgaatgaagcgtggatcgacagaattactcagagtgccgatagatctgctctgattgctcaacagtatctgagggagaaacttagctcaaagacacagctttgtattaagactactagttccagatagagctagcgctctatgcaagccatgtggaaaataggccattagtgtaagggtttttatttaatattattataaacttgaaaataattgagtttatttgatttttctaaaaaaaaaaaaaaa

SEQ ID NO: 397218 - DNA, 323 bp, Oryza sativa
  unsure (1)..(323): unsure at all n locations
cgattcanacggggatgatgcccagtctcccgattaggtggtgcttctncctctaacaataggattttagtggttttattaggtgactgaggtccattttggcaacgtatttttagtagcgtggtataggaaattggatgggttcttgttcaagttgttgtgagctatgttcgtgtgtccgcctgcattcaccttaggttgttggtagtaatggatagctagtttatgtgggtagtttggcaaacgaagaccattgtaaagaagggaatataatcgaaggaaaagagaaaggtagcaatgtgttagcatttaaaaaaaaaaan

SEQ ID NO: 397219 - DNA, 280 bp, Oryza sativa
  unsure (1)..(280): unsure at all n locations
caattcattcccccgagctgagctgagctctcattccttccttctcctttccgccggcctcgcctctcgtctcctcctctcccctaccgatacgcacgctcgcttgcttgcacctcgcgcgcgagagacgagagagagacggcgagccctggcacgcacgagaagcgaatcgaagtggcggcgacaggagcagctgctgctggtgggattatccgtcgtcaacatggctcaggaggacgtcggtcacctgagcgacgtcgncctggcgctgggcctgtcc

SEQ ID NO: 397220 - DNA, 389 bp, Oryza sativa
  unsure (1)..(389): unsure at all n locations
aggacgcagcgagctcgaactcgaagcgctggaggatcatgcacaaggccatcttagcctcgagcagcgcgaagttctggccgatgcagacccgcggcccccagccaaacgggaggaacgcgccgcggtcgttggacnccctggagatcccctcggcgaacctctccggcctgaactcgtgcacgtctctgccccagatttcgcggtcgtggtggataaacagcacaggcagttcgaggatcacgcctctggggtacacgacgcccccgatctccatctccttgtacgtcttccggctgaagacgatcgccggcgggtacaaccgaagaacctcgtataaaaccatggtgaccgtcttgagtcggctgaagccttcgtactcaggtttn

SEQ ID NO: 397221 - DNA, 354 bp, Oryza sativa
ccaaaaccctagaaccgcgccgccacaatgcaggccgccgccgccgccgtccaccgcccgcacctcctcggcgcctaccccggcggtggccgcgcgcgccgcccgtcgtccaccgtgcggatggcgcttcgggaggacgggccgtcggtggcgatcgtgggcgcgacgggcgcgtcggccaggagttcctccgcgtcatctcctcccggggcttcccctaccggagcctccgcctcctcgccagcgagcgctccgggcggaagcgcctcccgttcgagggccaggagtacaccgtccaggacctcgccgcgccgggcggtttcgacggggtggacatcgtgttcttcagcgccg

SEQ ID NO: 397222 - DNA, 681 bp, Oryza sativa
  unsure (1)..(681): unsure at all n locations
tcacaggagcagaganagacgacccttgatggatttagaaaccggcggttcactgttcttgtggcaactgatgttnccgggcntggtattgatattcccgatgttgcccatgtcatcaactatgagatgcntagttcaatcgatacatacacacatcgtattggaagaactggacgtgcaggaaagaagggattggcaattcgtttttaactctggagaacactgacattttctttgatctgaaacagatgcttatacagagcaacagtcctgtgccacctgaacttgcaaggcatgaagcatccaaatttaagccaggctcagttcctgatagacctccaagacgaaatgacacagtctatgcaactcactgaagcatctactgcagaatgggccaaagatcctccagtattacaagggaacttttggaaacagaaggatctaattctagattagtacttcgaggtacaaacattatgatgattactcgttttttattatatgtctgaaaactatgccctatattgtcatgaatttaggatatgtttatgatggtttagttctggacttatgtatcttttcttattgttggtgatcaatgcaaactctactatggcccatgtagtgcattattttaccgcctaaatatatatcatattttgttaaaaaaaaaaaaaaaaa

SEQ ID NO: 397223 - DNA, 459 bp, Oryza sativa
  unsure (1)..(459): unsure at all n locations
cgctttacaactcaacccccgcaccaccaccagtccaccaccacaatcccagggcggcgccgcggccggcaatggcgggcggcggcggcgagtacctgcgccagttcgtcgaggagacggcctggtacaacgagatcttcctcagccatgtggtcccgggcgactggtggcgcgccctcccccacccgctccagtcgtggctccgcaacggcctcggcggctacctcatctacttcgcctgcggcttcctctggtgcttcgtcatctactactggaagcgccacgcctacatccccaaagattctatacctacaatcgaagctatgaagaagcaaataattgttgcatcaaaggctatgcctctctattgtgcccttccaaccttatctgagtacatggttgagaatggatggcanagtgttatgttaatatcagtgaagttggttggccatgtacctg

SEQ ID NO: 397224 - DNA, 466 bp, Oryza sativa
  unsure (1)..(466): unsure at all n locations
cgccgcggngactggaggagcgcgcaaaaatggcggcggcggcggcggtggctgacgaataccgtgctccacggcggggtcgtcgtcagcatggacggcggcttccgcgtcttccaggacggcgccgtcgccgtcgccggggaccgcatcgccgccgtgggaccgtccgccgacgtcctctcgtccttccccggggccgcggcgacagtcgacctcgccggccgcatcctcctccccgggttcgtcaacacgcacgtgcacacgtcgcagcagctggcgcgggggatcgccgacgacgtcgacctgatggcgtggctgcacgggaggatctggccatacgagtcccacatgacggaggaggactcctacgcctccaccctcctctgcggcatcgagctcattcgatccggggtaacatgctttgcggaagcaggtgggcagtatgtttcagaaatggcacgtgcag

SEQ ID NO: 397225 - DNA, 714 bp, Oryza sativa
  unsure (1)..(714): unsure at all n locations
agactgtgcaaaaaaagggcttgggcagtgaaaccagtgaagggntgattctgtgctgtnctttaatcttcagcctgatggcacaccagacccgcttagcctccatggaagctgcccagttatagagggcgagaaatggtctgcgccaaagtggattcatgtgcggtcttacgacaatgcatcaagcatgaagcaaagtgaagaatgttctgatttgagcgagaattgcgcggcttgggctgcatcgggtgaatgcaataacaacgcagtctacatgattggaacggaagatgcacccggtcagtgccagaagagttgcaatgcttgcagtttatagaacatttcgcatttggtagactcacccggtctagttggtttggatttgacaaatttgcagacggtgagcttagatggttttacagttcttttgtttattttgggtgaggtgtgtgttccaaactgccaatagccattagttggatacattttgttgttactgcaaatgctgaagacagtgttatgtaactcactgttgtgcagttcagagtgtcatgctggcaggcaactacctgttccccctttattttttttgttgtcttgcttcacagtggatttcagaacagaaaactgtgtcagcttgtctcgatgataaccaacttgtttggccctttccacaatatagaagccactttgtgctcaaaaaaaaaaaaaaaa

SEQ ID NO: 397226 - DNA, 465 bp, Oryza sativa
  unsure (1)..(465): unsure at all n locations
gcggccacgttcggcaacgccacgtacgagaggctgccgctggaccaggaaggcgaggagggcgcngtgctgtccgggtcggagggcgccgccgcgcagatggagcagcagagcagcggaggcgccgtcgtgcccccgccgatgtacgccgccgtccagcagacgccgccgcacgacatgttcgggcagtgggggnatgcagcggtggntcggccgcngccgacatcgttctagcactggcaccggttaatcaatgtctctctacctagctagttagccttccacttctttccctagttgtttgagtaggttaattaatcatttaccatgttaattaatgtgctatgtaatgcataagtactcgtgtgatcttatcgttccattttcttcagagtttgaagaatgtaaaattactgtgcgtatcaagatcggcagtggttgctcnnnnnnnnnnnnnnnnnnnnn

SEQ ID NO: 397227 - DNA, 397 bp, Oryza sativa
  unsure (1)..(397): unsure at all n locations
cgcgagtttccgcacagcgaacgcctctcgcgcgcgtgcttactggtgactggtccaagcagcaacgcaagcaaatggcgtcgcacgcgaacgcctccggggccggcggcgacgaggagatggtggaggcgagcacgctccgccaccggcacggcgccggcaaggatgccaacggcgtcggaactgagcggcactggcggcggcggcggcggaaggggaggaggaggggccctcgtcggttggagcccgcgttcgttgacagggcggtgccgtcgtggcgggagcagctgacggtgcgcgcgttcgtggtgagcttcttcctctccatcatgttcagcatcatcgtgatgaagctgaacctcaccaccgggatcatcccgtcgctcaacntctccnc

SEQ ID NO: 397228 - DNA, 771 bp, Oryza sativa
  unsure (1)..(771): unsure at all n locations
ganattcggcagagtncggcatcctgctgtgagagaaactggaccacatataaattgattcgcgcaccatgaagattgagagccgtcctaaatgggttgatgattnggtgtttgtccacaccagntatgcggctttggacaagaaccacagttttactatagtgatccagagtcaatgttttgggacattgggggtaacgccgatattcttgcaagcttagtccctgctgatttacttgagtttgctgacttctcactcgacgaacctgagttcgagcttgccattcttgaagggctggaaggtgatgatttggcatgaagatggaggtggattggtggaagactttctagaancctagctcaatctgtgaatggcctgatgccacctttcctatcaggctgtcactcgggtctaccttgtcttttggggaaagtggtgtgttttggttatgtacttatgtggccactctggtagtatgcaaaactttgcagtatgcaatgctactacctccgtcccaaaatataaccacttttagctacgaatctggacacggttgtctagattcatagctaaaaatgcttacattttgagacggagggagtatatagtagtggtagtgatggactggtggtagactggaagtatgcatgcaaagctatgcaatggcaggtagtggtaatggtattatgcaaagctatgtgataagactttgctattatatatgcaaatctgtggaaactggacggtttgctttttaaaaaaaaaaaaaa

SEQ ID NO: 397229 - DNA, 290 bp, Oryza sativa
gtctcgccgccgacgaggagatgggtcgcgtgatccgcgcgcagcgtaagggtgcgggctccgtgttcaagtcccacacccaccaccgcaagggccccgcgaggttccgctccctcgacttcggcgagcgcaacggctacctcaagggcgtcgtcaccgacatcatccacgaccccggccgcggcgcgccgctcgccaaggtgacgttccgccacccgttccggtacaagcaccagaaggagctgttcgtcgcggcggaggggatgtacacggggcagttcgtctactgc

SEQ ID NO: 397230 - DNA, 500 bp, Oryza sativa
  unsure (1)..(500): unsure at all n locations
ccccttcttatctctctcttctccaagaaaccagagctgcttgcaagtccaagctcctaggtgatgcaagctccaaggggagagggaggtctggtcggcatgcgacggtagcgtggtcgacactggagtgggaggtctggccagcgtgcgatggcagcgtggtcgccgatgtcgcctaggcagcagcaagctcctaggtgatgcatgcagcgaccctacgcgtcaagctgaccaaccaggcgatggcaccacttcttntctcgcgttcaatgtgtcgccgtggaggccggcaccgtcatggacgtcgacgcctcaccaccgggagcatgtaggggagaagtacaagaacgggtgtgttgagatttttttcaatgtttcagatagtttagtttgatgtttctttgggttggatcgaatgttgcaattggattttagatggtgttccataactttgctccttgatgcaaaccaccaatggnnnnnnnnnnnnnnnnnnnnnn

SEQ ID NO: 397231 - DNA, 370 bp, Oryza sativa
  unsure (1)..(370): unsure at all n locations
cggacnnncngngaacgcgtggtcgcgcaccaatctccgttttaaaaaactcgcccaaatttcaagggaagggaaggggaagaaggaaggcaggtgcgcgtgcgccgttgtagattgctccttcctcgtggccggagcgcgcggcggcggcggcggcgacggcggcgagatgagtcgatgagatggggatgaggtgcaagaagcacccgtaccaggcgggcggcggcgtctgcgccacgtgcctcaacgaccgcctgctcgcgctcgccgcctgcgcagaacggggcgtcgtcgtcgnctcctcctccggctgcgccaccggccgcggcggcgcggcgtttcccgaggtcggtttcgccgtacgtttccc

SEQ ID NO: 397232 - DNA, 924 bp, Oryza sativa
cgtcacgaccgtcttctacgtgtcgatcgggtgcgtcgggtacgcggcgttcggcaacgccgcgcccgggaacgtcctcaccggcttcctcgagccgttctggctcgtcgacatcgccaacgttgccgtcgtcatccacctggtcggagcgtaccaggtgtacgcgcaccggtgttcgcgtgctacgagaagtggctggcgagccgttggccggagtcggcgttcttccaccgggagtacgcggtgccgctgggcggcgggcgcccggtgcggttcacgctgtgcaagctggtgctgcgcacggcgttcgtggcccgtgacgacggtggtgtcgctggtgctgccgttcttcaacgccgtgctcgggctgctcggcgccgtcgcgttctggccgctcacggtgtacttcccggtgaccatgtacatggcgcaggcgaaggtgcagagaggcagccggaagtgggtggcgctgcaggcgctcaacgtcggcgcgctcgtcgtgtcgctgctcgcggcggtgggctcggtggccgacatggcgcagcgcctgcgccacgtcaccatcttccaaacgcagctctgaacccggatggacgcatgcagccgatgagattatgcatgtagtactactcctactacttttgttgctgtactcgtactagttgctggtgtaatttggctgtcgtgttacaagctactactactagtacaagcccctctgtttttatacctctgaatttagcaaatgggacttgaggagtatggttatcctatggacaaaactgtgtacgttattccggttgggatcgtcaagcatagcatataggaatttcgggtgaaagaattcaattatgagtattagcaccttttgtatttagaacttatttctgaaagcaactaaagttaaaaaaaaaaaaaaaaaaa

SEQ ID NO: 397233 - DNA, 766 bp, Oryza sativa
  unsure (1)..(766): unsure at all n locations
gacaccttttcagcgcatttcatatacaaaagctgttgagctattgaaaaatgtcactgataagaaattcgaaaaccaaggttgaatggggaattgatttagcttcagagcatgaaaaggtatttaaccgaggtgatatttaagaagccggtgattgtttataactatcccaaagaaataaaggcattttatatgagactcaatgatgatcagaagactgtagctgctatggatgttcttgtgcccaaggttggtgagttggttggtggaagccaaagggaggaacgtctggaccttctcaaaacaaggatacaagacgccgggttgcctttggagccatatgaatggtacttggacctccgccgctttggatctgtcaagcacagtggttttggtttgggttttgaaagaatgattctttttgccactggtttggagaacatcagagatgtcatccccttccctagatacccagggagggctgatctctaaaataaccagagaaagctggattctaaagttcttctcgctgtcctgttagctcctcaatttcaggtctacaaatgtgcactgatatatttcgtgtcagcttggttgtaatagatgctcaccatgtatttagttatttgccactacagcatatgaacgaccaatttactcatttttgcgatagttgaacattttagaagttttgttcaaagcaagatctatttgtactcgttaattgttacnnnnnnnnnnnnnnnnnnnnnnnnnnnnnnnnnnn

SEQ ID NO: 397234 - DNA, 879 bp, Oryza sativa
ctcgatcagccgcagccgcagccgcgaaccctaggcggcgtcgctggatcgggagatgagatccctctggtggtctacacccaccccgtcctgagctcgctctcgctcccgcgctgtcttcggtgagttgctggagttgagttagacaatggatctggagacggagaatcatcttgcttctttactccttgaagaggcacggagattgcagttagaggctgacagggaaggtgttcacgcgtatctgcgaaagccccaatgtaaggcatcgcctgaattcacggttcctcacagccacagttcgtggagttcaacaagcaaaccgagttgtagaggtcaataaaatgtgccgagcaagggagaaggaacttgaattggagtctaagacaaaaagaagatctattaatcgtggtgactctagaggtaaaaaacgcaggagtgatgtaagaaaccagagctcaagtccaaggatggaacaagatagcacttcttataatagttcttacttggacctggagggtgctctaggggatgatgaaatagagatgttccttcattcgagggtgaagagaggacgaggggccgttggttctaggatggatgagaccggtccatatcttaatgcttcatcacgtagtcaagacaacgtacctagtcttgatataagggtggaagaaaaatgggaactccaagtacaaggcccagagaggccactgtctttgagattccaatccacagatgattattggcatagggaaacaatggatggcgaaccatccatctctgggaaacacatgaaaaaaagaaagaaaaaggagagcaattcagagaaaaaagataaggaagagagaaggaagaaacatgaaaaaaaaaaaaaaa

SEQ ID NO: 397235 - DNA, 886 bp, Oryza sativa
attttggacgctgagaacacgcagaaacgcatcagagaatccagggaaaccacgggcgattccgccgcaagcgaggggaatccgcaccggatctcgccggaggagtcagccggccgcacggctattctacggcaccaccggatctcgcgccggagtagtcaggtcgacgcgcggcggcggcggcggagaagctggtgtggtgtggctgcgcgcggcgatccgatcgatcgaggagatggggaggggagggcacacgcatttccttgacgcgtgcttcctctgccggaagcggctcgccggcaaccgcgacatcttcatgtacagaggggacacgccgttctgcagcgaggagtgcaggcgggagcagatggaggcggacgcggcggcggagaggacggagaaagcccgccgcgccgggaagctgacacgtggggccccctcctcacgcagggaggtggagggcccacaggagcggggcaacagcgtccgggccgggtccatcctagccctatgatgtcgccgccaatgtagaagctaaatttgcctataagatctctcacctttttctttcataaaaccccaccaaatatagtcgcttttttacgtaaaaacgggtttgtgtttttgttaaaccctttggattgtttggtggcgtgttagtgtgtttgatgctgtatcaatcccgtgtgtaaagataggagaggaatttagagataataaaaatctccccaggttggtaaacagatcgttgaaaagcatgttggtctagctatagtttaattttcaaggttaattaaagtgatactcgtgattgtcctgttaactggttgcttttctatgcttgtggagtatgaaatgttgcaatctgtacaaaaaaaaaaaaaaa

SEQ ID NO: 397236 - DNA, 764 bp, Oryza sativa
gaaacatatgctctagtctcagcaatgctagggcgattggggctggaatctgtagtttctctacgtctgcgccaaggggatatcgaaggcccttctttacaaactccttcgaggacatggggattctcaaggatatgggctttggttctccatgcagctttcaaaggctggaagacgaagttccaggacatcccacctatgaaaaagtatgttatgctcctaggacttgcttgcttgactctccaccttgctcttcattacaagatgaagaagatggagactaacctcaagcaggatatgatcaagtttcgtgctgaagtaaagctggagattgaagcagcagccaacgcgatgcagaaggagatcgcctcagagcttgctaagtctgctcaatttagggcagattcagtggttgcattccagaaatgcaaggctcgtcctgatgtgtggtcggagtattactgcctaacattgctggaggccctcatgaggtccagaatcgatggcaaatagactctggattatcactcgaactgagaaaacgatgatcgtcactcggagcagattgtctggtcacttggtgccttggtggttgtcaaatctcgttgtttggttagtttctatgacagtttgtgtgtggtcataaagggatttagatcgatggggtacacgatctgcatgtaaggaaggatttttacgagtggctatactcatcaattttcccagctcaattcatcttcttattcagtaaaaaaaaaaaaaaa

SEQ ID NO: 397237 - DNA, 605 bp, Oryza sativa
  unsure (1)..(605): unsure at all n locations
ctcaaggcggatgaaatctgaaaagctggtcaagacattgtcaagccaagttgaacaacttagntcagccaatgagcggaatgcaaatctagaacgcgaactctcagaatgcagagagcgttttgaacggcttcaattgatccaaaaccgcatacttcaacatttcacctgtcctatatctcatgaagtcatgaatgatcctcttatggcagctgatggacacacctacgaagctaagtttatcagggattggttccgcagaggccataacacatcaccaattaccaatgttgaacttgaacacaagaaactcgttccaaatcgggcgctgcgttctgctattgaggagtgtcgcaaataacacaatatgatgctacttttaacctctgctacaagcatcaccaaaactgttttttgtgttaagtaacgaactgaacaactatgctttaataacgaaccatgatatagcttttcaatatgcagattcggatttgtaaactgagtttgtgtgaattaaactatgaccattttgtaataatttattacagactcttggtagaccagttgaaatgtttgctcaattataaaagaaaaaaaaaaaaaaa

SEQ ID NO: 397238 - DNA, 360 bp, Oryza sativa
agtcccgctcgtatccatggaaatgggaaaggaattattcctttagaaccatggaacccccgagcggttgtggttgtacctgtacttgcagggatacgaaaactcgctattcactcagtttctggtcaataataagattatgtaggagagatggccgagcggttcaaggcgtagcattggaactgctatgtaggcttttgtttaccgagggttcgaatccctctctttccgtttctgttaattcaccaccgaccacaatgtatcaaatcaaatagatttcagcaataagacttttatttgatagaaattcattattaaaaattaattactttggtacggcaataaaaaaaaaaaaaaagg

SEQ ID NO: 397239 - DNA, 547 bp, Oryza sativa
  unsure (1)..(547): unsure at all n locations
ggagttcaaggccatcctcttcgtgccccgccgcgcgcccttcgacctgttcgacacccgcaagaagatgaacaacatcaagctctacgtgcgccgcgtcttcatcatggacaactgcgaggagctcatcccggagtggctcggcttcgtcaagggcgtcgtcgactccgacgacctcccgctcaacatctcccgcgagatgctgcagcagaacaagatcctcaaggtcatccgcaagaacctcgtcaagaaatgcatcgagatgttcttcgagatcgccgacaacaaggaggattacgccaagttctacgaggccttctccaagaacctcaagctggggatccacgaggactcgcagaaccgcggcaagctcgccgacctgctccggtaccactccaccaagtccggcaacgagctcaccagcctcaaggactatgtgacccggatgaaggaagggcagaaggaggtctactacatcaccggcgagagcgcaaggccgtggagaactcgccgttcctggagaagctgaagaagaaggggtacgang

SEQ ID NO: 397240 - DNA, 356 bp, Oryza sativa
  unsure (1)..(356): unsure at all n locations
agccatggctccctgcctcctcctcgtcctcttcctcctcccggcgctcgccaccggccaccagcacccgtccaccctcggctcctccgccctctccgagtggcgctccgccaaggcctcctactacgccgccgacccggaagacgccatcggtggcgcgtgcgggttcggggatctggggaagcacgggtacgggatggcgacggtggggctgagcacggcgctgttcgagcgcggcgcggcgtgcggcggctgctacgaggtgaagtgcgtggatgacctcaagtactgnctccccggaacctccatcgtcgtcacggncaccaacttctgcgccccgaacttcggtctccccg

SEQ ID NO: 397241 - DNA, 259 bp, Oryza sativa
  unsure (1)..(259): unsure at all n locations
tcgccggcgggccggcatctgtgcagatagatagaatgaacattcctttcgttttctactactagttagtaacctttcattcctcatcactctgttcttcttgccgttcttgttgtccagtgcgatcaaagccggccgacggtggccggtagaggaggctgccggcctccggtcgccgccacggcgataatttttcgtggttatgatggttcggggattacaacgtgttgaaaaaaaaaaaannnnnnnnnnnnnnnnn

SEQ ID NO: 397242 - DNA, 538 bp, Oryza sativa
  unsure (1)..(538): unsure at all n locations
cttctcgtgagttcgcccgccctcgccctcgccctcgccctcgcctgggccgatccccatacatcccgcgagcgcgagnnnncgnacgcgccgccgttcgtcctgctgcttccgccgcgtcgtggtgagcacatcatccgccgccgccgccgatccccatccatccttgcgagcgatcaggggcgccgtcgtgttcgtcctgctgcttccgccgcatcctggttcgacagcattgtttgaggttcttttaaaagtgttctcaccatggatcttcgccattcacaaactccatccagtgatgacgagacaagggcacttaatgcattgcttgatgctttcagttctgccttttcgcttgatgatatagctacggcatattgcagagcaaatggtgatgtcaacagagctggtgatctattgactgaacttgaacatcctatggccaagagcaatgaagttgactcaagtgttgggactattcatcccccaagtggtaaggcaattgaagaaaacagtacagagagttcaagccaagcaa

SEQ ID NO: 397243 - DNA, 402 bp, Oryza sativa
  unsure (1)..(402): unsure at all n locations
ggtggcggcggcggcggtgccgactccggctcctccggcttccgaggcgcagccgcagaaagccgacgagggtatcgttgtcgtacgaggagatctccaagctcttctcgctaccaatcgcagaggcagcctccatcctcggtgtttgcaccagcgttttgaagaggatttgccgcagccacggcatcgtcaggtggccgtatcgaaagcttgtatctgggaagtctggtgatgacacaaaaaacgctgaaagagagaaagccaagggacttcttgaggtatctaaaggttgcaaaacagaagctctaagccgcatctggtctatcaacagtatcaccaggccgctttccaaggagtggcaaaatcttaacagggnaagttccgaaggcaggacaagtctna

SEQ ID NO: 397244 - DNA, 540 bp, Oryza sativa
  unsure (1)..(540): unsure at all n locations
cggaccgtgccgaggcctctcccgagccctctgctcggaggcttcgggccgaattgttgggtttatcccggcgacgggaagtatgccccctttggtcgcctcagctgcttcatgtcggactccacctacccgccgcctccccgcgatgtgagaggacatgcattttccacatctgccaatgctgtggcagttgggaaatcatctgatgacaaagtgaagaaagatatctccaaaaaggatgttgatgatcagatagcagatacacagatactgaaaaaccttgggaaatacttattgttgaatgatagcccggatttccgcttcaggcttatattgtcattgggcctcttagttggggcaaaggttataaatgttcaagtgcctttcttgtttaagcttgctgtcgattggcttgcagcccttgctggtgctgaaacttcacttgcatcattcacagaggctaatgctaccctattggctctctttgcaagcccagcagctgtnctgattggatatggaattgcacgatcgggagtatca

SEQ ID NO: 397245 - DNA, 290 bp, Oryza sativa
gcgcgtgagtgatgttggggcttgaagattaggcagctccggtccatggttccatgcatttgcctgatttccattcgccatctcgtggcgtctatgtccttattcctgtaattgatcccaattttgatgtagtagatgatcagatcagcatattattagatatatatgcctgttcttgtagcctagaatcctagaaacttggacagaatcctgatgatgctaaaaatcatctctgttcttctctttcttgtaaaagatagcctctttttttctccaaaaaaaaaaaaaaa

SEQ ID NO: 397246 - DNA, 256 bp, Oryza sativa
atccaaaacaccatatactattataaatgtgcatgtgttaccacatatcatctgttttatgaggaatgctcttgtaaatggtaaaactttcccctgtggaatagtgcttatatatgttcccaattttgctatttatcaccatgcacaggctgttatttttgttatggtgtcgcaataagcctggagtgttgcgaattgtgatctgctttaaccttcaggatgccattttcgtttgcaatataaaaaaaaaaaaaaa

SEQ ID NO: 397247 - DNA, 256 bp, Oryza sativa
  unsure (1)..(256): unsure at all n locations
cccacgcgtccgtcgaggaagagggcgcgcatctcgccggcgccggtgccgcggccggctgcggcgaggggtacctgttccggcggtggccgcagcactgcatgccgccgccgcagcagcagctgccggcgatcgggcaggcgagcccggtgatgtggtggtgaaattgggaaatcttttcaccccgtgtactctgttgctgtactgtagaaatcagttttcaactgnnnnnnnnnnnnnnnnnnnnnnnnnnnnn

SEQ ID NO: 397248 - DNA, 345 bp, Oryza sativa
  unsure (1)..(345): unsure at all n locations
catggagcccgacgcctcctccgccgccgccgcccaaaaccctaaccctaaccctagcacggggctgccgcccatctccgcctactaccagacgcgcgcggagaccacgccgtcgtctccagcgactggctcgcgcacgccgccgccgcggcctcgctccctccctcctccgatgccgccgacgcggacgccgcctccgacgccgcggcgctgctctcccccgggagcaacggcggcggcggcggggtgatcgaggagttcaacttctggcgccgcaagcccgaggccgcggaggccgtggcggccatcatggcgctcgccgccgtcatccgctccagcagggnc

SEQ ID NO: 397249 - DNA, 462 bp, Oryza sativa
  unsure (1)..(462): unsure at all n locations
tagatagcaaggatcatcggaggatcggcgatggcggcggcgctcagggccaccggtggccggcggctggcggcggtgctcgtcctgatgctgttcgtcttggcggcggcgctgctggaggcgccggtgatggcctccgccgcgagggtgttgcttcaaagtggactgcttccgactccgtatccgacatgcaatccagaccaatattcatgcccaccgcctactactgtgccatgattataagctgtatgccgttggttattagtttacttttaataaaccaacagcatataatgaaatagttatcgttcctacagaagtttcttctctacaacttaagatatatttcaaataaaatatttattttgcatgtgatgtttgagggccatgcaaatatgtaataccccgatcttcgngtactaccgcctggcctagtggctacggccagtggagctgaatttt

SEQ ID NO: 397250 - DNA, 624 bp, Oryza sativa
  unsure (1)..(624): unsure at all n locations
cgggatagacaagaacgggtacctcagcttcttcgccgccatgcgccgcgacagcgtgaccgtgcacccgcaaaggcgccagctactacaactgcgtccccggcgcgccgcccagcccgtacaaccgcagctgcgagcacatcacccgctgccacggctgatcgatcacaccatcgcccctcctcctcctccgccgccgccgccgccgccgctgccggtgccggcgccggcgatgatgattcgctttgtttctttgacgacgacgacgatgtgcacgcatatgcatatgcgtgctagcgttttgtcgatggatcgatcgatcaccaggttaattaaataaaaatgacatgaaataaggtgtgtgtgtgtttgttctcgtgttgttgccgtgccactgcgttctcttattattatccatgtctactgtctcattgtattagctactactgttgtccatttgtttcttttgattaattaatttgctgctaatgatgcagctattgtatttgggatttttgtccctgtaaggttttgtttgtttaatcccttctacaagaggatcgagggggatttggacaaaaaaaaaannnnnnnnnnnnnnnnnnnnnnnnnnnnnnnnnnnnn

SEQ ID NO: 397251 - DNA, 491 bp, Oryza sativa
gtcatgagaatggcacttcgatggatctaatacaagaagttaaaagaggaagagaggatgaactgcatctgagcttcatgaaacttccctaaattgtcatactttatgccggtacatgagaaatggagttttaatatatggtttaaaatgaaattacaactgcttgaacatgacgatgaggcccacagatgcctggtctacattgaggttggtatgctttggacatgtgacttcagtgaattttgaactatttggacgtgttatcttattttgatcagttaattgtggttggactcagtgtggacttggtcagtgatgtacgatcttatgtttctatctaggatttggtcgaactgctgtaactgaacctagtttgcctttctggctagatttggtgaagatgtatgcattgaccttatttattttgctatggccaatgtactgatgtatatgaatatgaccatattgtgatctaaaaaaaaaaaaaaaaa

SEQ ID NO: 397252 - DNA, 326 bp, Oryza sativa
  unsure (1)..(326): unsure at all n locations
attttcactcgcgcagatgatcaaggagacgttcggtgacatgctctacgtctctgaaactgagaacatggcggaattcccttcgccggacgagctcaaggggaagatcatcgtgtcgacgaagccgcccaaggagtacctccagaccaagaacgacgccgacgccgacgaggccggcgtctggggcgaggagatcaccgacgacaaggtggcggcgacggcgatgacgacagaagagaaatgcgcngcggcggaggaagcagtcgccgccgccgccgtcgacgaggagatgcaggaggccgagacggacaagaagacgcagcacg

SEQ ID NO: 397253 - DNA, 427 bp, Oryza sativa
  unsure (1)..(427): unsure at all n locations
ccgcactccaaccagcgcgacggcgtcctcctcctccgtcggcgtcggcggcggcggcgacggccatggacttcgggtacgtcggcgtggggcaggggagctcgtcgtcgtcgtcgtcggcgtcgtgccgagcggcggacgtggcggcgtggggatcctccacccagcagcagcagaagcggcagcggtgccagggttcttctgatgaccaagttggattgagcacaagtaattctttgcaaatgtcagaaccagagcctcgagattttgataatggagaaaatgaggaagaagattacttatctggacgaggacgattgcaatttatgatgatggcgatggatatgattatgaattttgatggcggtgactactttcaaccaacgtctttgctgataaantttgatgntttttgatttgcctccag

SEQ ID NO: 397254 - DNA, 478 bp, Oryza sativa
  unsure (1)..(478): unsure at all n locations
gaagaagaccaagaagaagaagaagaagcagcctgngccgccgccgcagccaccgacgacgacgacgacggtgctgcctgagccggtgaaggcgatcgaggcagctgccaagaaggcggcggcggcgcctccgcgcgtggcgctaacgaggaggttgacaggaggcctccgccgccggagctcaccgggcggcgcgtcgttaaggacaaccctttcctgatgcgcgaccgcgagaacaaggggaacgacggcggtgccgccgccgcggcggccagagtggcggcggagggacccgttcgaggggtaccccgagcggcggcccccgggggcatccggcggcggggtggtgctgtacaccacgtacgctccgcggcgtgcggcgcagttncgaggactgcgagcgcgcgcgganangcggtggaggcgtgcgccgaggccgtgtcggcggcgggcggatcncccgtcgtcgtggacgagc

SEQ ID NO: 397255 - DNA, 755 bp, Oryza sativa
  unsure (1)..(755): unsure at all n locations
tttcggnatcagtgcatggatgagtgacacagtggcaccagccatacaggaagtgtagatgacttgagagctgatggcattgaaacgggcggcagatattattcctcatgctgcagttcaccaaaggtgtcagattgcccttcaaaagagcttatggaggatgattattcagtttttggtagcgaagaagatgctgatgatcctcctgatgctggaactgacgaagacctaactgatgaagaaagagatatgcacgagatagaagcaggctctgttgatgaacactccaccaagtccgacgaggaatacgacgatctggcaatgcaggatgtgatggagaacggttactggtccgacgacgaacaggctgcaagcagcaccaagaactcatcgaaccaggagaagaacatccatggagcagctgatggtgatgttgttgatgatgaaggcagtggcaatgacaggtttcaccacaatctggccttcttcctgaagatgtccaagaaagtagccgccacagaactgccgtgtgcatagtgcctccggtgtcaaagcaactgttgttggtccagatgtgctctgaactcggttgttatgtatcctgatgagcttacctccatgactgtaactgtaagagaggatctgctgcttgtctaagcaatacagatcacttagaatccgtgtaatccaataactcttgaaaagatgaaataataaagggtgaataaatagtttgatacaaaaaaaaaaaaaaa

SEQ ID NO: 397256 - DNA, 615 bp, Oryza sativa
ccttgtgattagcatagccactgcagatatcgaatattgcattaagctagctagcttaattggcatcataagcagcagaagaagaagagaagagaagagaggaagctagaagatataggagaggaagaggggatgggagggaagtcgtcgttcctgtgcccgatcttcagcttcctgtcgtgcaagtcgaggaggtacgaggacgacgacgacgacggcgagctgagcggcgagtggccggcgaggtacgggagcaaggtgaggtcgagcgacgaggactacggcgcgtggtgggtcggcgagcgcgacgtcgaccgcaaggcctccgactacatcaacagcttccaccagaggaagcaggtcgccgccgcctagctagctcgatcttacacatctcgatctccaaccacacccacagctcaacgataccaatctttcattggatcgagggggactagcgtacgcgcgacggcgacggcggacgacggccgccggcgcggccatatatatgtactgcatctgttgtctcaaccggccatttgtgtaccgcaccgcatgtacgtacgtaggtctccgtttacataattaaattcttctcatatatgtatatgttaa

SEQ ID NO: 397257 - DNA, 387 bp, Oryza sativa
  unsure (1)..(387): unsure at all n locations
ggtcggcccccttcgctgtctcgtagggcctcagtgggccgtggaaaccctgttgggtacatcattgatccgaatgaggtcacagcagcaagatgagtgccaaagaaagaagaatattctgagagtggatgaatttagatttgtcttcatgtaaattatctctaggtgtaatgcaactatagatatgtttgtactagaacagtgtattttttctgttttgtggtaaaggaagtgcttgatgatagatacaacatgcttacatcttccatttggtggctgacaaagagcttgacgattacagatgcaagaatgacaggaatttttacagtgaaaaaaaaaaaaannnnnnnnnnnnnnnnnnnnnnnnnnnnnnnnnnnnnnnnnnnn

SEQ ID NO: 397258 - DNA, 409 bp, Oryza sativa
ggccgccagcccgtccttcccggacaggatcgtctcgagcctggcccggtggccgttcgggatcctgagcggctcgaggccgtccaacgccgccgtcgccgcctcgtcgctccgcgtccgccggtgccgcagcgtccccggcggagatctcttcacctccctctcctcctcctcctccgaccaccccctcctcctcccgctgcgacgccaccggcggagaggcaggcgcgacgtccgcagcaacagcagcaggagaagagggcgagaggagcacgaggcggcggaaccagcacgcgtcgtacagcgagaggacgtcctccgccgcagccgcagccgcagccggcggcagtatcgccattcgggggcaagggagagcagcagagagaggcgtgggagtcggggattggtt

SEQ ID NO: 397259 - DNA, 481 bp, Oryza sativa
  unsure (1)..(481): unsure at all n locations
gcaaaaagattcccctctttttgtgcaagcgagaccaacaaagtgatcgaaggcgcaaacgcaaggcaaagcagagagaggcgcgcgatggcggcgccgtggtggtggtggtggccgctgccggcgtggctgatgccggggtcgacggcggcgtggttcgtcgtcctcaacgtggtggtgtgcgccgtcgccgtgctgtcgtcgcgcgcgcgggagtcgctctcgccgcgccgcggcgacggcggaactcgcgcgcagggcgtcgtcggcgctggagcgcgtccgctcgtcgttctccatcttctccttcccgtcggcgagcttctacgcgttccaccccgacgccgccgagccacggacngccgacgccgcgcaaagttttcgcccggttggccgcggcggcccgccgccttnggaagcccgcaagacggccgaatttccgccggccgngttccgttccgttggcccgcgccccgaaaac

SEQ ID NO: 397260 - DNA, 594 bp, Oryza sativa
  unsure (1)..(594): unsure at all n locations
cacgcntcccgcgccgagcgggcaggtggtgtcgtccgtacgcggcgctggaggcgcgggctgacggcgctcgggtgggagccgctactacgaggacccctccctcttccagttccacaagcgtggctccctcgacctcatctccctccccgccgacttctccgccttctcctccgtccacatgtacgacatcgtcgtcaagaaccgcgactcctttccgcgtcgtcgacgcctaaattgacctatgtataggctcgcatgcatgcaaggtagacgaccatccaccttgcatgcatgcaggctatcattctctcttcgtctccgtcttcgtctttcatctttgttgtggtgtgtgtgaatttattatacttcttatgattgtgtgtgtgactgtgtgagagttcatggagagtgatgagtagtggtatacatatgtgtcgtcgctgatcgatttggtttattaccttgtgggtgggtattaattatcagcagtgtgttatatcaattgcttacttgtatgtgtatcatgtacatgagtgagtgtggctgatgcatatatatagaggtaattaaaaaaaaaaaannnnnnnnnnn

SEQ ID NO: 397261 - DNA, 449 bp, Oryza sativa
acggaaagtacatggccgcctgcctgatgtaccgcggtgacgtcgttcccaaggacgtgaacgccgccgtcgcgacgatcaagaccaagcgcacgatctagttcgtcgactggtcccccactggcttcaagtgcggtatcaactaccagccccccaccgttgtccccggcggcgacctggccaaggttcagcgcgccgtgtgcatgattgcgaactcgaccgcgatcgccgaggtgtttgcgcgcatcgatcacaagttcgatctgatgtacagcaagcgcgcgttcgtgcactggtacgtcggtgagggaatggaggagggcgagttctccgaggcgcgcgaggatctcgctgcgctcgagaaggactacgaggaggttggcgccgagtccgcggacgtggagggcgaggaggacgtcgaggagtactagacgcacgctcgttgtgta

SEQ ID NO: 397262 - DNA, 447 bp, Oryza sativa
  unsure (1)..(447): unsure at all n locations
gtggccagctgcgggagtcgacgccgatcctcgcagccgccgacgagctcttcgagggcggcaggatccggccgctgaacacgccgcacccgagcattctgcagctggtggatgatagcgcgtacgcctcgcctcggtcgccggggaggaggcggaggatcgccgccgcggaggcgngaagngtgtcgtcgtcgtcgtcgtcgcagagagggaggtcgggccgtgctgcgcctgcgtcgtcgtcgtcgagcgcctcgtctcgtagccggcgagccacgcggtctctctcaccgttcaggggaggaggaggcggcggcgccgacgacgagtacccgtcctcgccgccgtcgccgagggaccttccatgatgcgcgggttgcggcagcgggcagcccggaaagtgganggctcaagggacttgttccttcttcccggancgagtcggga

SEQ ID NO: 397263 - DNA, 439 bp, Oryza sativa
ctggctgccgatctcctctccctggcctcccgccacacctcgccgccttcgttcgctcgctgcggccgtacggttactcgtgccgagatcgtcggcgtcgtggtttcccgtgatcgcagggagaagttcctccggtttctggtggacgatggcaccggatgcgtgccgtgcgtgctgtggctgaaccaccactacctgaatgctgcgagcagttcatccagggcatcagattctgatccaactgcagagatggcgttgaggatgtcagaggtggtgagcctgggcactctgttgagggttcgaggcaggattgtattgtaccgtggtgcgatccagattgctgttagagatgttgttctggagaagggaccctaatgtggaggtgatgcattggttgcaatgtattcgcatgggccaaggaatgttacgatctgcggcc

SEQ ID NO: 397264 - DNA, 487 bp, Oryza sativa
  unsure (1)..(487): unsure at all n locations
cccacncgtccgccgttgtctccaccgccatctcccttttcgccttctccacccgccgccggtctacctcgccgtcgcccctctccgcccaccaccggtctacctcatcatcggcccacnccgcccgccgccgccccgcnccatcctnccggctccatncgccgccgctccacgggtgggatgagagagaagagaggggatgagagaggagaggatcggagagaggggaggggatgaagaggctgacgggtgggggccacgtgggtcccaccgtgagtcagctgccacgtggacaaaactggagtcaaaatcgccgagggacctactttgcactggttttataagatgaaggatgcgctacatccggtgttttgcggttaggggacgatcttgtaactcgatgacaagttgagggacttcggtgtactttttccagtattaaatggtcgacgtcacagttgggtcganaaaaaanaaaannaaaaaa

SEQ ID NO: 397265 - DNA, 462 bp, Oryza sativa
  unsure (1)..(462): unsure at all n locations
ggccgcagcggcggacgagggcgagctgaaggagacgttcgcggtgttcgacgccgacggggacgggaggatctccgccgaggagctccgcgccgtgctcgcctcgctcggcgacgactctgctccgtcgacgactgccgccgcatgatcggcggcgtggacaccgacggcgacgggttcgtctgcttcgacgagttcgcccgcatgatgatgtgtggccgcgcgtgattatatataggttattaggttttgatcgatgtacgtgatgcatgttaatcgatcgtctcctgtatctacgtgtcgttcgtttgctgttcatcgtctcactgatttcttttgttctctttgtacgtagtacgagtttcacagaagaaatgaacagaacggtcagttaggttgtttgtttgcaaaaaaaaaaaaaaaannnnnnnnnnnnnnnnnnnnnnnnnnnnnnnnnnnnnn

SEQ ID NO: 397266 - DNA, 402 bp, Oryza sativa
cggcgaccggcggcgtggtgtcggtggagctcgccggcgacgacaggagcaaggtggtggtggtgggcgaggtggactcggtgaagctgacgagcttgctgcggaggaaggtcgggccggccgagctggtggaggtcggcgacgccaagccggccaagaaggaggagaagaaggaagagaagaaacctgagaccgtcccgccgtactactactactacccgtaccaccattacagcccttacggctacatcatgtagaataccatgtgtacacataccgtccgtatgtatgtacactggtagtgtatacatcgcgtagtgcgaatattctttttgtacggtattgcaagagagattattatggtgatgttttgttttgctctcccgcgattaaaaaaaaaaa

SEQ ID NO: 397267 - DNA, 521 bp, Oryza sativa
  unsure (1)..(521): unsure at all n locations
gtgtctgccgcgttatgtctggtttctcagatgagttctataaagagatgaaggagttctattctggcgacagaatactgcccaagaaacctgtttactacaaaacagacgagcttccggagttgtggttttctgcggaacaggtttgggaaatccgaggtgcagacctcacgctatcccctgttcaccatgcggctattggtctggtccatccgtcgcgtgggatctcagtgaggatgccgaggtacatacgctctcgtccagatcggagtccagaggattgtagcacggctactgatgttgctagcttgttcaaagctcagacccggaagatggaggtcagcagcgatggccaggacacaagtcactaagccagagctgatccgaccccgctttacagtgtttttgtagatgtacagatgcagaatagtagcaagcaaacgcctttgttttccaccttctatactactgtgtaaataaatggcactagcttttcnnnnnnnnnnnnnnnnnnnnnnnnn

SEQ ID NO: 397268 - DNA, 763 bp, Oryza sativa
  unsure (1)..(763): unsure at all n locations
gggaatttcgactcctacttcaggatcactattatgccaaatctnctggcctctattttgacncaaattctggtttctactattctgacggtttaggtaaatgggtcactcaggaagaggcataccatgggcaaaaacctcccaagctaatgctgggcaatccttcaagttcacaaacaaacccaactgcttcagttgcgactgtccccacaattaaagggggccaagctccaggtttggtcgtcaagaaaccactgaatccgatgagaactgtcaaagggtgctccatccgccattgctgttaaccagagaaaaagagaggacggcaagcccaaagtgatctcaaaggaggaggaagccgcccttaaagcgcgtgaagcagcaagaaaaagaatggaggatagggagaagcccttaaatgggactatacagatcgtactaaggggcctccccataagaaatgctaatggatggattgttctgtaaaagaagatttgcgagattattagcgttgggtgtcttcaagagcgtcttctgcatcagggaagcatgtctgtagtgtacaatatctctggtaccaacaatatcctgaattggataaattccctttcctgaaactgttatctgtgaaacatgtaaagtactatacattcgtcagcatttcttttgctctttcacactggatacactgtagaaatgacgacctttgcgatcaactttacaggaaaaagaatatctttaccnnnnnnnnnnnnnnnnnnnn

SEQ ID NO: 397269 - DNA, 551 bp, Oryza sativa
ggcgtggcgggggcgcagtgggcgtggtggagagtcgggcggcgtccggcggccggcggccagaaagccactgcgggcggcgggcgccatcgccctcgcttcaccactgggagcagctccagctccaacgcgccgtcgtgctccagctctaacgcgtgccacgggcaccatgggcacggcggggcgcgaggcagcgttggcagcgtcgtcgtccacctccttgcgtggtcgagctccagctccatgcgcgccctcgcggacaccgtctcgaccacctccagcgcgctctccagctccgccacgtcgcccagccgcgcccgccgccgccgctgcagccgcctccgattctcagtccacattatgaagaaagtctgttcactactagaattacattatccattaacttcttcagaatacgaaacacaggtgatttgaagaagtaaatcagtgcaaatctgaagccaataaaatggaaaaacattcagcaaacagtgcaacttttggattcaaatgtgcttttgtttgcacctccaaaaaaaaaaaaaaaaaaa

SEQ ID NO: 397270 - DNA, 443 bp, Oryza sativa
  unsure (1)..(443): unsure at all n locations
gcattcacaccaccaaatgcagaaaagataatctcctttctctctctattaaacccacacacacacacacaccaagaaggaaggcaagcaagcacagggcaaaccagagcattggaaagcaagaagcagagcacatcaagaagcaagcaaagccatggccgcctctcggtgcttcttgcttctcctgctgctgctgctatctcccttactggcgtccgctggggaggaggaggaggaggccgtgctggccatggcggccaggctgcggaggccggcggcggcgtcgttccgggaggggtacacgcagctgttcggcgactccaaccttcgcgctccatggcgacggcaagcgggtccgcatctccctcgatgagcgcacaggcgccggattcgcgtcgcaggatgcgtatctgcatgngcttcttcagcgccacatcaagctg

SEQ ID NO: 397271 - DNA, 700 bp, Oryza sativa
agtaaattaatatcattacgatttttgccataaataaattattttttcaaaatatttgcaaaattgttatattctagtatcatagtagtactatgtaaaacgtcatgttcacgattccacaaaatttactccctccatcatgaaatacatgacgtcgttgacttttcgcataacgtttgaccatccatcttattatataaatattgtttattttgttgtgacttgttttatcgtcaaatgaactataatatttacttatatttatactaaatttttaaataaaatgaatgatcaaacgttatgcaaaaagataacggcgtcatacattttgggatgtaaggagtgtatgttttaccccacacaccgcaatgcaagctccttatttatatacaaactatgttttctacaatagtcaagatttagagccagaccattgtttcattaaaaaaagttagagccatgccatttagtagggaaaatggttttatctctcgaggggatatctccgcctttttcatgccattcaaatagcccactaaaaaggtgaaaaatataataagatagatgaatagaaatatgtcactttataaacatacaagtctatatatcctagtaagcaaatttttacatttcagtgaacaagttgtttgtaagcatcatcaaacaaagttgccctcctcgagaaaaaaaaaaaaaaaaa

SEQ ID NO: 397272 - DNA, 710 bp, Oryza sativa
aagaacgggtcatttcactaattgcttcattgtttggtggtattacaaaaggttcacgaagaatcaggttactaggaaaatttgttgagaatgaatgtgaaaagatagaccgtttgatggagttttacacaaggtattcagaaagagtgaaagctgagactgaaagacttgacagtcttgatttagatgatctagagatggatgaagatgagcgctacaatcgcaagctagaagctggtctttacacacttcagttaattgcacttattctggggcatatatggcactctggcaattcacagatgagaacaagaatagagttgcttctaagacagaacaaactgactaaggatgacgttaaggatatacttgaggagtatcatgacaacattggagatctggatgggcctgaagagaaggaaagagcgcaagggcggacaaaagagatcatagcatctttatctttgtgatgcgtactctattttgcgtcatcaccagtccaccaccctgtaaccaaaaccaatggtgttgtagctcctctcatcttgacaagacggactatcatatgatgacttgtgcgtagcgttggttgcgttgcagggtattctttttgtaaactagtaatataactagctgggtggccccgcgcaattgcgcgccttagcattcatacataattatcggtttttttacaaaaaaaaaaaaaaaaa

SEQ ID NO: 397273 - DNA, 709 bp, Oryza sativa
  unsure (1)..(709): unsure at all n locations
ccccagtcaagacgttgtaaaacgacgggccaagtnagcggcgcgtaatacgactcactatagggcgaattgggaccgggccccccntcgaagtcgacccaagcgtccgcttgcgggagaagtccggatctcttcaatccaaggctataaataggaccccctagtcctcctctttcgtttgccccctctcccgtggtctcccgtgcctcgtagcgccgccgccacgtgctccgccccgccgtcgtcgccggccgagctccatccgcgtcgcgccgccgcctccgtcgtcgccgccggtcgccgtcaccgccgtaaggtgcgcgggagggtggagaagcccggccgctctctccccgctgtcgccggtcaccggagtcccgtcgccaccgccgaccgaagccgcgccgccaatagacctcgtcgccggccgtcgtcgttcgtcgtttggttcgaggcttgtcgtttccgtcgttgcgaaggtttgtgagtgcgccggaagtattcaagaagattaattgaagatcgattattgcaaggcaagtcacacagatcctaaacacaatcctttgagcatgttgatcctatatttaaattctctatttatttcaactgtgcatttattttcgaatgtcaccgggtggtgtgaacttattcctttgttatggccaatttgcattgattactttnnnnnnnnnnnnnnnnnnnnnnn

SEQ ID NO: 397274 - DNA, 787 bp, Oryza sativa
  unsure (1)..(787): unsure at all n locations
gagatatattgcaatattttgagaattatgtgaaatgatgatttaacgtgcttggatttttgtaagctctaaaattttaagtgaggataaactatataagcatataggatattataaaaagtgaaggagaggtatattgaaatattatgtggattatgtgggatgataatttaattaacatgcttgcattttaaagttctaaaacttaataaattagcatgcttgcatgagatttaagatgtattaaatgttagtggatgatgtggcatctttgcatgttgagctttaagatgtagtgggctttaactttatagaaatataggattaattcctatagaatgtcatgatgcaggatgtcattaataatcctccaagctgttcccttttaacttttttccctgttacttgaaacttgactaaggattctcttcgtattaatgtggattgtgtcactgaccatatggtcgtatctttctttcagcgcttcgctgggacttggaatgtttgttgtttttcagtgctttcatggccatggaactcagaatgtctccaacgtgcaaattcttggttgtgatctagaagatggttatttgtttgaaacaatggaagcacttgatgttcccttagcatatacacttgtgagcttgtgttgatagaattgtaaagcttacatatgttttagttctactattattttgaanagggaaatgtgcagctggatgctaacatcggttgcaaggactgaagtgtacgtaccaatgnnnnnnnnnnnnnnnnnnnnnnnnnn

SEQ ID NO: 397275 - DNA, 292 bp, Oryza sativa
agcggattgaagagagattcttcatcgatctagtggccggtgaatcactgatcaaagagcgagcagccgccaggtttaatgattttgtgggatccctggatgtagcggctggcgaaccgcttcttcttccacaaagattcagacaaaaccgagcttggatagaactgaagaagatttggcaaacgaagaaaaaggtcaaagggtttcgtattaaaaaaatcaaaggaggttatttagtagccatcgcaggtttcattacttttcttccattcgcttaaaaaaaaaaaaaaaa

SEQ ID NO: 397276 - DNA, 341 bp, Oryza sativa
  unsure (1)..(341): unsure at all n locations
gttgcagctgtccggtgcaagcngattggagaagtttatctgcctttttctgatcattgtttacctacattcctgttctgaaatcctcatattttttacttccttttggaatagaacaagagcatcaagttcctcagctttatgtggaatcctttgtcctaagtgatttgggcagcaacagtgatggcattggtcttngcaaatggtggtgtaagtgatctgatttgtgttctttggaatataggatgtaaacatcgatgattgttcaacaatgctaaattcatccaaagaaacccataatggttttcttcaatatccgttcaaaaaaaaaaaaaaaaaaa

SEQ ID NO: 397277 - DNA, 224 bp, Oryza sativa
  unsure (1)..(224): unsure at all n locations
gactagttctagatcgcgggcggccgctcgcgatctagaactagattgatacatgggatcacctatatatttgttgatataattttttaaaaaatttgacagatgtaattatagtataattgtgatataattacactgtaacttatatgtaacttctatgaaactttcaaaaatatcttgtaatataatattggtgnnnnnnnnnnnnnnnnnnnnnnnnnnnn

SEQ ID NO: 397278 - DNA, 309 bp, Oryza sativa
ctctcctcctcacatccgacggccggcgtctgcgggcaggtggccagcgggcggcggggcagcacgcgcggcgggcggcggggctgcgcatagggcggcagcgcgccaaccatggtgagtggcggcaggcgggcggcagtgcaccggttctcctctccttttttttaataatttgtgattgagagatgtataatttcttttattacaatttgtgattcattggatggatctgagatgtgtaatcgatttgtgatgcatttaatttgtgtgtaatttttttaaaatttgtgatgtaaaaaaaaaaaaaaa

SEQ ID NO: 397279 - DNA, 604 bp, Oryza sativa
  unsure (1)..(604): unsure at all n locations
tggttccggtccggcgacttgcgntgcggcacgaggacgggtacgtgaagttgctcgaccgttccaaggacatcataatctcgggcggggagaacatccagcacaatcgaggtggaaggcggcgctgttcagccacccggcggtggaggaggcggcggtggtgggncggccggaccgactactggggccgagactccgtgcgccgttcgtgaaagctgaaggccccggcgcggcggcggcggcgaaggcgggggtggtggaggaggagctgatggcgtactgcagggcgaggctgccgaggtacatggcgccgcggacggtggtggtggtggaggaggggctgccgaagacggcgacggggaaggtgcagaagttcgagctgcgggcgcgcgccaaggccatgggcaccgtcccggcggcggcggcggcgaagtcgaagaggagcaagctctgaatgaatttgtttgcgtcagctgctgacgactgcaatgcaacttcgatgcagcatgcgtgtgtgtgcctgtggaatctcgagacaacaaccaaagaaaaaaaataaaaaaatcatgatttgttgtgatgaaaaaaaaaaaaaaaaaaaaag

SEQ ID NO: 397280 - DNA, 307 bp, Oryza sativa
aactcctccagagctcttgccatggcccccaaaatccccatcttcttcttcctcctcgccctggctgccggcgtgcagggtgagaccggcggtgtcggcggcggcggaggcaacgtggagtacaactgcgtgtacaccgtgttcgtgaggacggggtccgcgtggaagggcggcacggactcgacgatcggcgtggagttcgccggcgcggacgggcgcggcgtgcggatcgccgacctggagcggtggggcggcctgatgggcgccggccacgactactacgagcggggcaacctggacgtgttca

SEQ ID NO: 397281 - DNA, 785 bp, Oryza sativa
cctctttctcctgaggaagaggctaagttcgaggcttcggattgcctgttccgtggagcattgatcagtgtactcgctgacaacatagtggacgtgtacatgcacatgccttctgggaaggacatgtgggatgcacttgaggccaagttcggagtttctgacgccggcagtgagctgtatgttatggagcagttctatgactacaagatggtcgatgaccgttctgtagttgaacaagctcatgagattcagatgctggctaaggaacttgagaacaacaactgtgagttgccggacaagtttgtggcaggtggcattattgccaaactaccaccttcttggtcggactttgccacttctctaaagcacaagagacaagagttcagtgttcctgatctcattggctctttgggtgttgaggagaaggcgagggcaaaggacgtccggggcaaaaaggttgagggaggttctagtgccaatatggtacagaagaagaaccctcatgcatcccacaacaacaagaaagtcaagcctgatgtcaaacccaaggctgcaaccaattttaagaagaaaggcaagggaaaaggcaaagggagactgctttgtgtgtggcaagtctgggcattgggccaaggactgtcctgagcgcaaagacagggaagtctgccaacatggatcattagcgagggcggaggaacatcggggtcgggagaggttcatccttgttgatgggaaacgggtcgcttgcggctgttcatggtgttggtacctgcccgggcggccac

SEQ ID NO: 397282 - DNA, 505 bp, Oryza sativa
ctcgtccgggtcggagggcgaccgccgggcgatgctggtgtgccgggtgatcgccggccgggtgaggagggaggaggcggcggcggcggcggcggaggaagaggaggaggagtacgactcggtggccgggacgacgccggggctgtactccaacctggacgagctggacgtcttcaaccccacagccattctcccttgctttgtcgtcgtctacagggcctgatcgattagtgatcattaaccaataataataatcttagctagcatcatttccttcactcttcgttaattgcatgtaatcaatcgatcgatcgatgatgatgatgatcccatttataattaattaattcatcgttaatgtctgattattgtactatctgatcgatcgatcggtattgactagtgatcagcgtatcaatcaatttgtacaatcagatagatgtttgttagtttcttctactgaaggaggagtacattattgcatactagagctaaaaaaaaaaaa

SEQ ID NO: 397283 - DNA, 890 bp, Oryza sativa
agattccgccgcgaaatcatccacccatggccgtcgacggcgagatgcctgccttggagtcccagttcaatcagtgcgccatcacggcggaggaggaggcggcggcgttgcccgattcgacggagccgccctgcaccaacgtcgccagccaagacgaggaatcgggttccgccgccggcgagtccgaatccgaatccgactccgacgatctcgacgaggtgatcgccgacatcctggaggggggtgacgacggcggctctgccgactactacacggggcctctactaccggagggcacgatgctgctgacgaagacgttggtcgacaagatcctggcgctgcgccggaggaggttccccatgccgccagccacgggcggcgagcgattgtggtgggtgtcgccggagttccgcgaggagttaattgccgccgagctcgcggcggcggcggtgttcgacgcgtcgcaggacaagttcgtggagtgccaggccatgatcgcggagaagcgccacccggagcacgggtacgcggtcgtcgaggaaaccggctaggtgatggccaccatttgcagggcgttcttcggcagatacaacgagagcgacgacgatgacgacgatgatctcttttgtggctgcgttgatgcgaacgaatgtaaatgcggtggtgatgattgggcggacgaattcattgatgaggaagatgatgattgcagtgaggatgtggatgagaaggaggaggagaaggatgaaagttgctgtcaaaggatgatatatcgtttgagatgataaaatattttccttctttgtttcggttctatgagttctagggaggattagaggcatatattttctcttatgttagttgactgtccaaaaaaaaaaaaaaaaaaa

SEQ ID NO: 397284 - DNA, 710 bp, Oryza sativa
  unsure (1)..(710): unsure at all n locations
angccanggttttcccagtcacgacgtttttaaaacgacggccagtganccncgcgtaatacgactcactatagggcgaattgggtaccgggccccccttcgaggtcgacccacgcgtccggattcttctctcctcctctcatggtctcttgtggcacatggacactgctcgtccagtccatcccttgcgtgtgcatggcgagagcatccgcggcctcctcctcctcctcctcctgttcgtcgtgcagtgctcgctgctcagttgctgtttggcgcatgccgccgccgccgccgacgccgtcgacagggacgaccccgttgtgacggcgacggccggccggggccggcggtttctcccatcgccggcgctgccgtgctcactccgtgcaggttgaatgtggcggctcatccgtggagcaaggagaggaggaggagcagaagaagaagaagaagaagagccgccacgttgatggccgtgagcaagcatcaggtgcccaccggcgccaacccggactccaattagctaggcagtaattaattagctaattaacctagtaaagaacactgcgagagctctatttgcccctgccatgcattctgtgagatgtgatgagatgtcatgagcgatctaccgtgtatgtatgtatgttttagcttgttgagcctaatatgttattttcgtcttatttnnnnnnnnnnnnnnnnnnnnn

SEQ ID NO: 397285 - DNA, 603 bp, Oryza sativa
  unsure (1)..(603): unsure at all n locations
cccacgngtccgcgcaaaggaaaggcacccaagaaccaaaccaagtcgaagcagcgccatttcatcgagccgtcgcgacgcgcagaaacgaagcagcagagagatcatggccatggagaggttcttgacatcgctggtcttctgcgagtgcgaggcgcctggcatggacgtcttcgcctacgccgccggcacgtcgctgacagccgccgtgaacaaggtctccaccgccagccccggcggccgtgtcgtcgggccggcggtctcggcggcggcgccatcatcggaggctaagaaggacgccgccggcaaggcgccgcggcggctgctgcaggcggcgtactctccggcgttcgatggcctcaacagcttcgagaccatcgtgatgcactgatgatgatcattgatcacccggaatgattattgccttcgtttttgtgtttaagctatagcaagtactactaatattctttcatttgattgttgaatataatcaatttttaaccatgtagtattgtaaaaacatagattatctttgttactgatggccattgtatatgattggtactgaaggataaattttagagatcaaaaaaaaaaaaaaaa

SEQ ID NO: 397286 - DNA, 468 bp, Oryza sativa
  unsure (1)..(468): unsure at all n locations
gttcgagctacaaaaatttcttaagcaagcttacggattgtttctgatgagtttagcaactctatggaaaccaagcataaggtgcttcctcatctgaccagttccaaggaggagaagtagccaagttaggtagaacaatcccaaaactggcaaacttcttttactgtatatatatatatactttcctttttagcattttctgtaaagtcccagttctgtattgcaattggcatggttgtgttcatcagaatattgaatgtcaaatcgaaaggaggcgccaacctatagctatcaacgacatggacaccatggttcagattcataaatttggggatcatggatgtctaggttcagaaatttttggattttaggcaacaaattttgtagaatttccaatttagaaaaacacattttgcattttgttataatgtaataaaataccnnnnnnnnnnnnnnnnnnnnnnnnnn

SEQ ID NO: 397287 - DNA, 535 bp, Oryza sativa
  unsure (1)..(535): unsure at all n locations
gaagctagatgacccttcatgtttgcatgctcctacagcaccacctatggatgaaaactttatgacatttgtttgtggaagagctggaattcctcattctggacctgagcaagctgcatccaatttgtttgatttcagcccagtgaggatgaaatttgagtctccagctatagacatacagcctgctgaggaaaaagtatataaatgcttgaagaagcaatttttagcatggcaaaacgatttcaagccataccaagacttttgtaacccatatcacatacaaaagccaccgcagtaggcctttgcttatgctgatacttgtaatattgcattagaaagacttgggtttcgggaaagtatttctttcctgatctggagtatgcccctatatttgcatattatcattttgggtatttggatcaggtaggatgaacccacttgacttttgaatcattttgtaagctttagctaacatcttgcaatgctttatggtttcaatttgaagctnnnnnnnnnnnnnnnnnnnnnnnnnnnn

SEQ ID NO: 397288 - DNA, 312 bp, Oryza sativa
cgagtcgagatggggcagcagcagcagcaggagaacctcaccctcctccccatgtcctcctcctccgccgccgccgccgccgacgccgcggctgcgtcttcaccggcggcgtcggctgggaggctgttcacggcggggctggtggcgtcgtggtacgcgtccaacatcggggtgctcctcctcaacaagttcctcctctccacctacgggttccgctacccggtcttcctcaccgcctgccacatgtccgcctgcgccctcctctcctacgccgccgccgccgcgtccgccgcgcgccgcgggtgcgcggcc

SEQ ID NO: 397289 - DNA, 655 bp, Oryza sativa
ataaacctgatcctgaagacttgcaacatttcttggagtttcaagtgcccctacaatgggcgcctttgttcaacgagcttatccttgggcctcaaaagagaaaaggctcctatccttcattgcagttcagatttcttggtcccaaacttcaagttagcacttctcaggtacttgattgttacattgcacaatctttttttttaaaaaaaatttcttctttcagtttacaattcaccgtaacttttgaagcaccattatgtcagtaaacacgcactcgaaggtgcgaactagcagtggtggtgtgtgcatgtgcgtctgccctgtaaatgcaaagaaaaaggaaaacgtaaaactcgaggttcaagtctatttacattggtcttgtgttgggtccaggtatctagttctcataagcctgtagtaggcttacggttatacctggaggggaggaagtgcaaccggctggccatccacgtccagcacctgtccagcgcccccagcatgctcggggactcgctgtcgtcgtccatgtcggagtggcgcgagtcggaggaggtgggcgccgggtacatcgagcccatccagtggaagagctactcctgcgtctgcacgtccaaggtggactacaacccggagtggctcaagcgcgtccccg

SEQ ID NO: 397290 - DNA, 740 bp, Oryza sativa
  unsure (1)..(740): unsure at all n locations
gcaggatanaagctggtgtacgagtcggagaagtcgtcgtgggcgggggtggacaaggtggtgggctgcggcttcgagccggcgaacggagaggtgttcttcacggtggacgggcagctggtccacgccgtgagctgcaacgccgacgcgttctccaccccgatgtacccggtcctcgcctccagcttcgacgtgatggcgctggtcaacctcgggcagggcaagttccggtacgcgccggcgaacgcgcggcgcacggcgaacccgtgcttcctccgcgccgcgtcggcgggtggacgacggccggagcggcggttcgctgggcctcgacttcgacgacagcggcgacctcttctccatgggccgcgtcgactccggctggctggagacggcgtcgcggatgagcaagagcaggaaggagaacggcggcggcggcggcgcgtcggccggcgacccggacgccgactccgacctgttcgagatctcattacgagactgacataagcaatgatgagagggacaggtggctcacttgtcaaacaggaattagcagcagttaatggctgattctgacaatatgcttaggagttaggacatcgcggctgcagttttccatggatgtttgtatcttctagatgttgttacctagatgtaaacatgtaaaaaggtcaaaagattaaaaggatggaaaaggttgtcttatatagtgagcttctgatttatttaaaaaaaaaaaaaaa

SEQ ID NO: 397291 - DNA, 892 bp, Oryza sativa
  unsure (1)..(892): unsure at all n locations
ccgcgatcccctcctccactcccccccgcgcgctcccatcaagaggagagagagtgagaggaggtagctctgccaccggagcggctgcggggagcggcggcagtgctcctccttccggggagatcggggtcgctggttggatccaagaaacggggagggggatttgctggcggggaggagccgagtagggagatgagccgggggcggtcgccggagccgctggatttcttcatctggacagtcgaggatgttggattatggcttgaagagataaaccttggcagctacaggcaagtttttgaggaaaacggtgtcaatggagagtatcttgaaagcctgtcgatgtttactacagaacagattctgcggtttatcaggaggtgccatatgaaatggggagatttcattacattgtgcaaagagttgaggcgcatcaaagtggtctgcctgaaaggggagcaagaagtccgcaggccatggtgggcgccgtcatgcctatcggtggtgttcgtgagggcggccaagcggaaccggcagtcccgagtcgtctccctgaagctggagccctagtacccatccaccgcctcaaatctttgcgcattcgccgttctaccccgccttccagctcctcttggtggaggcggcactgcaaaccnacaccgttggtgtgctagttcccagtgatatgaaaggtcttttgctgtgaagagcagaagtatgctgctctactatgttcaaccggtcctcttatccttttttttcttgatctgttttaatcatgatatatagggtttggaatagtaaccttggtgtagacaaacaagatacatatattgtgcagatggttccccttaaaagtttctgctgcttgcaagtcaaaaaaaaaaaaaaa

SEQ ID NO: 397292 - DNA, 430 bp, Oryza sativa
  unsure (1)..(430): unsure at all n locations
accggcgtcggcgtcgtcgtcggcgtcaccggaggaggaggccccggcaatcgcgcanaaggggttcttcctccacccgtcgccgaggagcgccganccgcctcgcctcctgccgctgttccccgtcacgtccccgagggtagcctcctcctcctcctcctccgccgccgccgccgtcgccgtcgcctcgccgtcgttcgagtgancgagctatgcacgtcggcgaaccgcgtcgcgctgcttagattatttatgatatgagcactgctcggtagtatgtactgttcgtactcgttcttggtgcttaattgctgtaatttttttctcacttcattgagcgntttgctcncgaagaaacaacggaaaagaaanacatnttgatcgtcagttctnnnnnnnnnnnnnnnnnnnnnnnnnnnnnnnnnnnnnn

SEQ ID NO: 397293 - DNA, 235 bp, Oryza sativa
ggcacgagtggacttgagaacacagtcaatcagtaaattcggaggtaacttataaacctcggagcaagggttgtgtctacagttacgccggccgaaggccaaaggcgatgtggaaggagcagtacagaagttctttctgaatttacaagaaaacacgaaatgatactcctgagaccaaattccagactaaaaaaggacgtgccaagatggagatgagtggatcatccctcgtgcc

SEQ ID NO: 397294 - DNA, 390 bp, Oryza sativa
  unsure (1)..(390): unsure at all n locations
ggcangnncagaaactggggatgtattacatccaaagaatgaatatatggatccatatgccgctgacaagatagtttctgcaggaattaagaaagttaagattagatctgtattcacttgtaagtgtaaagttggtgtatgtgctagatgttatggcatgaatatggcaacagctaaaaagattgatattggagaagctgttggaataatagctgctcaatcaattggagaaccaggaacacagcttacaatgagaacattccatactggtggagttgcaggagcagatattactcaaggtttacctagagttgaggagttatttgaggctagaaaaccgaaggggcttgcaatagtaagtgaaattgctggtactgcgagaacnnnngc

SEQ ID NO: 397295 - DNA, 417 bp, Oryza sativa
gaggcacctgatgaaaagtccccccttgagagtaaaaaccggttcaagatcaagctcaactttatcggcaaagatcgccatccactgtggaagcgtgcaccaaaggaggagaaaaaatcatcaccgaaagacgagaaaagatcgtcagaggaaaggagcacgaaaattttctcaaaccttcttgacaagaaggtttccatattctccaagaagaatgcaaaaccaacaacagaggtaccgccaccacctcccccttcatctgcccctggaccattcgatgatagtgagtggacgattttgtagatgcaaatcgtggatgtttcctttgtacaatttgtagagtggtgccacaagatgtcgggaataagctcaagctgtaaatactccatccaattcattaaccaatctgaaataaaa

SEQ ID NO: 397296 - DNA, 572 bp, Oryza sativa
  unsure (1)..(572): unsure at all n locations
atattttcttatctcacttttctttcttcacaacaaaagccaagcatcaggaattatacaacacaacactctagatgagaagctaattcatgttacagttacacacaccaatggaagaggaagaggaagaagaagaagaaagaaatattattnnggggggagatctacaatgctgtgtattgtgactgaccacaccctgctaacctgggtacctgtggnntctgcagagcacctagatattgtcctcatttcatacagctcatccagctgcctgcctatacaaaacnctccggggtatcatctaaatcttttgtactacaacgtgtgtgaggagcatagatcaagatcacctcagggagttcttcagggcgcgcaccgtcatcaccagctgctgcctctcgccttcgacttccgcgaatttcaggcttatctccgagtaccgcccgtgcagttctttgagctcttcctccagtgcagtgttcctctccttcaggatttccagctcctttaccgactgatcatgagctgcatccctcctgtcatgcccattgcagtcaccatttgcattgtgt

SEQ ID NO: 397297 - DNA, 638 bp, Oryza sativa
cttctacgccggctgggtcctcgccatgacggccttcatcgcgctgttcctcccggagaccaagggcgtcccactggaggccatgcgcgcggtgtgggcgaagcactggtactggaagcggttcgccatggacgccaagctggacgcccaagtgaactgcctctaagactgtcattgttacagcggtgtgcgcgcgcggaaaacgattctaaactctcgacgagacatccctgtgtctatatggtatcaaaacagttatgaaaattttaacttgcatgcatgccatctaagaaacgagggacttttccaggagagtttagaagaattcagtgtgtgcgagctcatccatgtcttggttggcatgcagcttatgtgtcagtgtgacagtgtgtgacttcattgttctgctgaaatcttcaaactgtggtttcggttgacaagcatgcatgtggtaaacaatgtgtcaagttgtaaacagatatagcttatggccaactgaacatgtcggcgtgagttggcaataagagcgtccatggagtgtacaccaaccagctagatgcgtgtttgcatgtttttgttgattgattaatctgtaaagggaaagaaggagatgaatgttgttgattaaagattgctca

SEQ ID NO: 397298 - DNA, 518 bp, Oryza sativa
ctccccaaagtcatcaactttgatgctcaccattcattcaatctagttattatctgctgggtactctctggtcgcacctgcgtggcttcgatttacttgcgactaattcaactcagattctctgaagatcagggaggctaatctcgcagctgaagatgggagagatagtcagttatgcggtcgttcatgagacagtgaacaaaatcatatctgggttggttgacaagtatgagcgaaaatcaagtgcggaggagcagatggagaggctggagatggcgcaaatcaagttggagattgctcttgagacatccaataagtggcagatcactagtgggccgttattacggtggcagaagaagctaaagcgtgctgctgaagagtgtgatgacacattacgcaagtgtaggcagcgtgtcgaggaagaagaggaggtggaacagcaagtaaggaattcatcctttcctaagcgaattgcccatgccaccaagtcaatgatatcatccatctttcacggcaat

SEQ ID NO: 397299 - DNA, 430 bp, Oryza sativa
  unsure (1)..(430): unsure at all n locations
cgacctcaaggaccacntgggcnaagcatggtacaaaccggtacatcacccatccgntagcntgctgatgaacgcggatgtgangtcaanctggaaagaaggggaagatcaggaaaatcttgcttctcctgaattccctaaaccctttgctagggccagtctttgtaaggtttncattggtttgtagcggatgtaggtagaattttgtgtttaaagttctgtaggttcttctctcccgttctgaactctgaattttctcgtggctctagaacgctgcagcccacgagaattaaaaaatgtaaccgtagtctgcaggtattcatcgtcagatcattgtatagtttgacanccagatttntgtggtnnnnnnnnnnnnnnnnnnnnnnnnnnnnnnnnnnnnnnnnnnnnnnnnnnnnnnnnnnnnnnnnnn

SEQ ID NO: 397300 - DNA, 636 bp, Oryza sativa
gcccctagcggctagccgctagctcaacacggcaacagcgttgtacgcgtgcgcccctcccccaggcggcagggcactgcggcagacgtccctcctctccggtcgccctctccaccgtcctgtcccctcctttcccctctcttccggcggtgcagaggcgcggcgggacagcgcccgcggcggcgcggcggcggcgcacgttcgcagaggcgtggcggcggcgcaccggcacagcacacaagctgagagcgtctctgagacgcacgtcgaggagaaactctgagaggggtcggggcgggggatgatttccacccgtatgtccactcggggccgggggcgggtggagagtttgggggtcgggggcggggccgttccagcccaacccgtccctaacccgccccgttgccatccctactgtcgccaccgtcggcttcattgtcttgctcatcggattggaagaataagtgaagtagggacttggttactttttggtgtccttttggagtccttattttcaggatcactgtgtaacttattttggagaggtttttctgtaaatcgtgttgtacgtctatctgcctgttctatcgtagcctaccaaatctaactttctttgagaaaaaaaaaaaaaaaaaa

SEQ ID NO: 397301 - DNA, 697 bp, Oryza sativa
  unsure (1)..(697): unsure at all n locations
aggacattgtggagttcggcgagccgttccgcttcggcctggaggcggctccaagcccgagctgctgctcgccatgagctgcctcgccgcgcgcggcaacccggacgccctgctcatctgcaacggctacaaggacgacgagtacgtctcgctcgcgctcatcgcgcgcaccatggggctcaacacggtcatcgtgctcgagcaggaggaggagctcgacattgtggtcgacgctagccgccgcctcggcgtgcgcccggtggtcggcatgcgcgccaagctgcgcaccaagcacgccggccacntcggctccacgtccggggagaagggcaagttcggcctcaacgccgcgcagattctctccgtcgtcgccaagctcaagacccttggtatgctcgactgcctccagctcctgcacttccacattggctcccagatcccgaccactgctctgctcggcgatggcgtcggggaggccgcgcagatctactgcgagctcgcccgcctgggcgcggccatgcgcgtcatcgacgttggtggaggcctcggcattgactacgacgggagtcactcggcgcagaccgacatgtccgtggcatacagcttggaggagtacgcgcggccgtggtggccgccgtcggccgcgtctgtgaccgcaagggcgtcgcgcatcccatcatctgcagcgagagcggcc

SEQ ID NO: 397302 - DNA, 733 bp, Oryza sativa
gggtgcccgtcgtgccacccgccctacacgccgccgacgccacggccgccgccaactccgccgtacgttccatctccaccaccatacgtgccaccctacatcccgccgccgacgccgccatacgttccaccctacatcccgccgccgacgccgccgtacgtcccgccgccgacgccgccgtctcctccgccatacgtgccgccgccgacgccgccgtcgccgccgccgtacgtgccgccgccgagcccgccggcgacgaagacgtgcccgatcgacgcgctgaagctgaacgcgtgcgtggacgtgctgggggggctgatccacctggtgatcgggcagaaggcgagggcgaagtgctgcccgctggtgcagggcgtggcggacctggacgccgcgctctgcctctgcaccaccatccgcgcgcgcctcctcaacatcaacatctacctccccgtcgcgctcgagctgctcatcacctgcggcaagcacccgcctcccggcttcaagtgccccccgctctacggcgcctgaactgaacaaacgaagcagcagctagcaaagcttcgtcgtcgtcgtcaatggcggaggctactatactacaccctcgctagctagctatactgtgctacctttactctctcgatcgtactcgtgtctgcgatttgtgttgtattaatgtactacctccggttttaatccaagtgtagtttaattaaaaaaaaaaaaaaaaaaa

SEQ ID NO: 397303 - DNA, 644 bp, Oryza sativa
cgatcgattcatcatcaacaattcacaagaactccatcacttacagtgcaaatcaagctgatttcatcagacaaatttcactaataactagcttagctgccgtagagccgtgtgcgatcaagatcgtatcatccatggcgttctacaagtacggcttcgccttcttggccggcaccggcttcggcgccgcgctcaccagcctccgccgcgacggcgacagctgctgccccatgcgccgccgccgccgccctgtcgccgccaccaccacgacgacgacgaccagctggtcgacggcgacggcgacggcgaggctgcaggggaagagcgagacatgaaggagagcaagagggcgacgacgacgacgaatccgaaggccaagaaaggcagcaacaaggagaagaaggcagctgctagtgttgctagggaggaggaggatgacgatgatgaataggattaatttgagttgattattaattaagttcagtttgagttcagctattatatatttttaggtgcttgattccgttgctgtgccagtttaattgtgcttgtttagctctgtactcgttatcctgttgtgtgtattgacaaaaataagagaatatacatatatacctctctgttgttaaaaaaaaaaaaaaaaa

SEQ ID NO: 397304 - DNA, 325 bp, Oryza sativa
  unsure (1)..(325): unsure at all n locations
gggacaagtaaataaacatgattataaagtatatcacgtactctggaagaaaaaaaagagagagaagtgatgtgtattcgtcttgatatgctcgctttggtttcgcattgttcttgtttgtcctagcttaggacaaagattaaagtaaagcagttcgagttatactaacaagcttcctgaatatgggaaacacgcaagcattccccttcttttctatctatccacctcactgaatttggattgttctttatcagttaataaagatggcacgaaaagttgcagtttnnnnnnnnnnnnnnnnnnnnnnnnnnnnnnnnnnnnnnnn

SEQ ID NO: 397305 - DNA, 336 bp, Oryza sativa
caatggcgccacccctgctcctcctcctcgcttctctcctcctcgtcgcagcgcggcgagccctcggcctcggcctcggccagtggcagcccggccacgccacgttctacggcggcggcgacgctccggcacgatgggtggcgcgtgcgggtacgggaacctgtacagccaggggtacggcacgagcacggcggcgctgagcacggcgctgttcaacaggggcctgagctgcggctcctgctacgagctccggtgcgcgggcgaccaccgccggtcgtgcctccccggcggcgccaccgtgacggtgacggcgaccaacttctgccccccgaacta

SEQ ID NO: 397306 - DNA, 462 bp, Oryza sativa
cacacgcgcccgggggatttggaaattggaaatttcagatcccagatctcgtctcgccgatctcgccctccgctaagccatgggttcggttgtggatgctccaacagttgtggctggacaggaggaggtcactgacaacatgttgggtgacaagaaagttacagttgtatttgttctaggtggtcctgggagtggaaagggcacacagtgtgccaacattgttgaacactttggattcattcatcttagtgctggagaccttttgcgtgcagagatcaaatctggctctgagaacggaactatgatcgagaacatgataaaggagggaaagattgttccatctggaggtaactataaaactcttgcaggaagccatggattaaaagtggaaatgataagttccttattgatgggattttccaaggaacgaagagaatcgtgctgcatttgagaacgttacaa

SEQ ID NO: 397307 - DNA, 359 bp, Oryza sativa
  unsure (1)..(359): unsure at all n locations
cgcgaagtggtgctgcgatcgcaagtacgagcttgtcagctacgagcctacgacgcgctcccggccttcctcaagcacaacgagttcatcatcgactactaccgcagcgagtggcccatcaagcaggcgctcctcagcgccttagtcgtccacaacgagaccatcttccagacgtaattaagcactcgatcgatcaaaagcacgtatattagctaaagacgatactctaccagtagagaaactatcttttatcggtcgaccaaattccataatagttcttgttgcaataaaaaccaggactaaaaaacatctttagtcccgattcaaaaggttnnnnnnnnnnnnnnnnnnnnnnnnnn

SEQ ID NO: 397308 - DNA, 267 bp, Oryza sativa
tagcgtggtcgcggccgaggtacgcgccgcttctgctctccatgctgccgaggggccccgtgacgccgtccggccccagcggcggcaccaacggcgacggcaactgaggaatggaagccatggaaaagcgcccgattggagatcgaggtgcagagggggatctgctggttcaattcataaatcatagatgccacggataccagccttttccttaatttctttctttattttttttttcgtgatgtacctgcccgggcggccgctcga

SEQ ID NO: 397309 - DNA, 223 bp, Oryza sativa nipponbare
gtgcgacaccacgcgtacgagtgacgatggcatccttgacgattacctagaagaagtcacaaaggatgtggtgcgaatacatacgatgatgcaccaacgttatcatggggacgaccacgacgctgatgctgaacgcgaggaggttcgggctgtcgacctcggcgaacaggaagtcgaccgtgggactcgagatggaggcgcgcgaattctggctgaaaacctg

SEQ ID NO: 397310 - DNA, 390 bp, Oryza sativa nipponbare
ccatcgcgtccgtgtactcgtgtgttctgatccaagctactgtgtcttttctatagtgagagcttctcaccaagcgagccttctagacagagagagctacccccggggggatcgatctcgccagaggactccacccgccgggccttgcgtgcaaggagatccaaacgaccgcccgtcggtgcgaccaacggaatataaaggaggctgtctctacggcagctagactgtatagcgaacgctatggctaccgcgtaagtaccttatagccaacatatagctggtaccctgcgacatacatagacaagcctcatctggaaactggcgacaaacatattatgccaccgtatgctctgaactgtctagcatctatgcatattgaatatactatgc

SEQ ID NO: 397311 - DNA, 221 bp, Oryza sativa nipponbare
ccacacggccgcaccatctgtctcaactatgacagtttactgcatcaatgggcgccgccaccatggcgctatcctccccggtgatggcccgcacggcgccatcaacatgctccagactcttcggagaggcacggatcaccatgcgcaagaccgccgcgaagaccaagccggccgcgtcctctaggagcccgcggtacggcgccaaccgcgtactttaccta

SEQ ID NO: 397312 - DNA, 320 bp, Oryza sativa nipponbare
ccacgcgtccggtcacagactcgaaagcatgatggctagattggaacccagaaaaccagagctggatgcctgaattgatccctacaagcaatatgcagatgcagtgacagaagatgtgacgacctacctgattaatgaggacaaagaaggagaggtgctacctgttaaatagatcatgtatgaaggtgtagagaactcctacccagtgtacctcgtggacgaaagatcacgcgttaccagcgtgccttgaggaagaaatctgacatgtactcatactggcatcaaaatggactatggcccagacactgacttcgggcatg

SEQ ID NO: 397313 - DNA, 200 bp, Oryza sativa nipponbare
ccacgcgtacgtccacgcgtgcgcgcaagaccagagtaccttactttaccacttgggcgctatgggtaactatgtattatcagcacagagtgagaatgcagatacactaactatcccgacaaagtaggattcacgcttgaagattgaaccacggcatctagctgtcacacttgagacagaatctacgccacgggtttata

SEQ ID NO: 397314 - DNA, 375 bp, Oryza sativa nipponbare
ccacgcgtccgtgatgtcagatatatggcgattggtacagcaggtgaaagttagacgcagggtgacagctactggtgctacttattttatgcgtgtatacacaagacagagcatgactgaatatgatcctcgaatggtaacaacaacctgtttgtatctggaatcaaaggtggaagagagcacaaggcaagcgcgacttattgtattttacataaaaaagatgtgggcttctgatgagaagtaccgaatcgaaatcaaggatatgcttgaaatggaaatgaagatcatggaggcacttgactattacagagatggcaaccagccatattaacctattttacagatattgcacgatgctggcgtaacagatctgac

SEQ ID NO: 397315 - DNA, 300 bp, Oryza sativa nipponbare
ccaagcgtccgatgagagagctcggtgagctgcacagatggccctctccttgatggcgtcaagggccaccaccgtatgtcccttgcaggggcttaagtccaccgccggtatgcccgtcgcccgacggtccggcaactccagcttatgcaacgtcagcaatggcgggaggatcaggtgcatgcaagcgtggccgatcgaggacatcaagaagttcgagaccctctgctacctgtcaccgatcaccgtggaggaccttctgaagcatatcgagtacctgctacggtccaagtgggtgccctg

SEQ ID NO: 397316 - DNA, 288 bp, Oryza sativa nipponbare
tcactgcgtccgcccacgcattcgagcgaatttcctgctgcgcttgctgccagagttgcaggagctacctggcgaactctatgatcgtgttctgggagtacggtgcaaaccactacaatgcgatgctgatacgagggtacagcgcggaccaagctagcacgtacacgtgaaacatagtggacaccatgtccaacggcgtcgagaagctcatcggcatgggcgccgttgacgtcgtatttacctgagtgtttaccataggttgtttagctatgtatatgacaatctacg

SEQ ID NO: 397317 - DNA, 239 bp, Oryza sativa nipponbare
ccacgcatgcgccacgcgtacggacggaaccgacagcaagacggatgtgccagaggtcgtgacggcaacccaggacgcgtggtccaaagttgaggacaagtacgcctttacagtgatatacgtggcctcgctggtatggctatggactgacataggcgccatcaaggtcatctacaggctatcacttttgcacggcgtgctagagctcgttggaatcaggtatacagggagggttacat

SEQ ID NO: 397318 - DNA, 333 bp, Oryza sativa nipponbare
tgcccgaataccgggagagacccacgcgttcgatagagcaaagaatgagagagctcgttgagctgcacaaatggccctctctgcgatggcctcaagtgccaccaccgtatgtccgttgcaggggcgttaagtccactgccggtatgcccgcggcccgacggtccggcaaatccagctcatgcaacggcagcaaaggcaggaggatcagaagcatgcaagtgtggccgatcgaggacatcaagaagtgcaagaccctctgatacatgtcaacgatcaccgtggaggaccgtctgaagcatatcgagtacctactacggtccaagtgggtgacct

SEQ ID NO: 397319 - DNA, 219 bp, Oryza sativa nipponbare
catacgcgtgcggggtctgcacagccctatacctaatcttagaggaatgcctacagaacgtaatctagaggcacaagcgtctgggcaccggaactagactgaccgtgaaggcttggtgactcacgaactgcacgcagaaggaggagtggttcacatacaccgtcaccggagtggtagtgccgcctgacatcgacagagcctagatcgtgaactacgcct

SEQ ID NO: 397320 - DNA, 357 bp, Oryza sativa nipponbare
agcgacccacgcgtacggggacgcgtggtaagaaagcatactcaacacatgggattaactgatcactcacttagctaactagaatactgcgaccatgtcagacaagtgcggcaactgggactgagctgacaagagccagtgcgtgaagaaaggaaccagctatggcgtgaggatagctgaagccgagaagagccactttgaggaggtcgccgccggtgaggagaacggcggttgcaagtgcggcaccagctgctcctgcaccgactgcacgtgcggccagtgaagtaactaagcaaccgagcactcgccgacggcgagtcatctacctgaagtaggccacagtgcaaaccacccata

SEQ ID NO: 397321 - DNA, 338 bp, Oryza sativa nipponbare
ccacgcgtccgtgcgaagctggagcacaagaaccttgtcagcctcttcggtgcgtgcttggagcaacaggagcggttgctcggatactagtttgttctagaccggagcctcaacctgattcttttagatactgcaaaaagagagcaggtggactgggagaagaggtacacgatcataaacgggatcacttgagggctgcactacctgcactaagagtgtgagataaagggatagcaccgagatctaaaggcgagcaacatgtcgctagacgtgaatgtgaaccccgagattatagactttgggctggcgagaataatgggatgagatcatacccatgc

SEQ ID NO: 397322 - DNA, 203 bp, Oryza sativa nipponbare
ccacgcgtacgaccacgcgtaggaccacgcgtacgccaatagaagaagagggagagcagcatggacactccactagtagaagccgagcgaccggcttatctatccatatcttccggtcgagttcatgggtgatctgtgtcgttctccaccttctcctgacaggttctaggtgtagcttgccactttcaacagcaaagtgtcat

SEQ ID NO: 397323 - DNA, 200 bp, Oryza sativa nipponbare
ctacgcgttcttccactagcgcactagtagcgacacatgtggtacttctcccattgctactgccaccgaggaggttgccgctgcggctgctgcctcctacaagacgccaacgacgctttcgacagacctaatacaggagacgaacgaagctctgaaggcaccgaagccaaaagaggcgccgaaggctaaggaaggggaag

SEQ ID NO: 397324 - DNA, 347 bp, Oryza sativa nipponbare
ccacgcgtgcagaagatgcacgaccggtgctagcagtgtaatgggatcgaccggcgagttgcaccgctgctgtgaaggggcgcagcctgcacattcaggctcctcgccgtgttgagttgcgcgttcgtgcggcggctacagctgtggcatttgaggctgcggaagtggactacagctctaacatctcggtgattccgacggaggcctgcaacctcatcaggggagaggcgtacaacgtgcagatgtacccagaggccaagctgtcatcatcggatgctgcagctgctacttatgctacggcggaggaagtacacagggactacctatggtacgacgagcccaccacg

SEQ ID NO: 397325 - DNA, 350 bp, Oryza sativa nipponbare
ccacgcgtccgctcacacatccgagctcatcgacatctgtgtcaactatgacagtttactgcatcaatggccgcggccaccatggcgctatcctctccggtgatggcccgcgcggcgccgtcaacatgctcaggactcttcggagaggcacggatcaccatgcgcaagaccgccgggaagcccaagccggcggcgtcctctaggagcccgcggtacggcgccaaccgcgtactttacctagggccgatctccggcgagacgacgagctacataaccggcgagtttccgggcgactacagacgggacaccagaacgctctactgcgagccaaagactttcggcaagaaacg

SEQ ID NO: 397326 - DNA, 401 bp, Oryza sativa nipponbare
ccacgcgttcgcagaagcttgctcagctgcctgcaacctctattgagggtgatgagaagggagggtacattgtatttgacaactcaactggtaacaagcctgacttgattgcgatgagcactggctctgaactagagattgtaacactgctgctgatgagtagaggaaggaggggaagactgtccgtgacatgtcatttgtttgctgggagcttttcgatgaacagccggctgtgtacaaggagagcgttctccctgaggctgttactgcaagagtcagccttgaagcaggctctactcttgtatggcagaagtacatatgaagcaaaggccatgttattgacatagacaaaatcagtgcaagagctcctgctggaaagatctaccagcagtatggcatca

SEQ ID NO: 397327 - DNA, 221 bp, Oryza sativa nipponbare
caacgtgtacggccctataatcttatgcatgcactacactacaaggcgctacactatcaggcgggcattgagtggagaggcagcatcctaccggacggcaatggcggcgacctcgtgcgtgttgcatcagtgcacgggccgagacggagcgcgcgtctcctctgcgtccccggggacacggacccaccttctgttttgccgcgctcagaagcaggactact

SEQ ID NO: 397328 - DNA, 357 bp, Oryza sativa nipponbare
tccacgcgtccgccacacgcgtccgagcggcactctcctcggacccagacgcgttcgcgaggaacaggtcgctgcacgtgattcactgacgccgggcgatgctcggaacgctgggctgcatcacgccagaggtgctctagaagtgagtgcgcgtccacttaaatgagcccgcgtgggtcaaggctagctcccagatcttatcctacggcaggctcaaatacttctgcaaccgcaacctggtgcacgcccagagcatgctctccgtgctgggattccaagtaatcctcatgggcctcgtcgagggctaccgcatcaactgcctcgccggcgttagttacagccactacctctaccccg

SEQ ID NO: 397329 - DNA, 260 bp, Oryza sativa nipponbare
cgacgcgtgcgcagagatcaggtctaacagtgagagtgaggtgctcaaaaatcagcgctgaagctgaggatggcaacatccatgatcaccttgccgctggtggcgcccgcccgggccaagggcctatcgtccatctcccggcggggatcctccttagccatcggctgtagcggagggaagaagatcaagaccgacaagccctaccgtattggaggtggcgtgtcagtcaatattgatgcatatggcatgaagagcacggg

SEQ ID NO: 397330 - DNA, 393 bp, Oryza sativa nipponbare
ccatcgcgttcgcggacgcgtgggcctgtccggcaactccagctcatgcaacgtgagcaatggggggaggatcaggagcatgcgagtgtggcctatcgacgacatcaaaaagtgcaagaccttctgatacatgtcacacgatcagcgtggaggaacgtctgaagcatatcgagtacctgctacggtccaagtgggtgacctggctaacgacaaatacggtcggatctacgtaccgagagaacgacaccatgcggcagatactacaattgcaggtctggaccatgtggaagctctccatgtgctggagcactgacaccacgcaggcgctgaaggagctcgacgaagccaagaatgcgtacactgatgcattctgccgtatattaggtttataca

SEQ ID NO: 397331 - DNA, 216 bp, Oryza sativa nipponbare
acgacccacgcgtccgcggagaggagcgaggaggacgcgcggcgactttacacggagtggaagggcaagcacggcaagagctacaactccgtcacaaaggaggagccatggtacacggcatataaggacaacctgcggtacatcaactagtacaactccgcctccgacgcttgggtgcactcattaaggctgagtctcaagcgatttacctacctc

SEQ ID NO: 397332 - DNA, 319 bp, Oryza sativa nipponbare
actggcacgatcccacgcgtacgtgatgttgcttgacttacaccttgtgccctcatctactgctgcggaatctacagtgtcttacctgaagatgaaaggtgattaccacaggtaccttgtggtatttaagactggtgccgtgagaaaggtagctgctgtaagcacattggtggtttacatggctgctcaggattttggtttggcgtgtcttgctactactcatcccataaggattggactgtcacttaactactctgggttctactactagattataaactcttcagacaaggcttgctaccttgctatgcaggcgttt

SEQ ID NO: 397333 - DNA, 312 bp, Oryza sativa nipponbare
  unsure (1)..(312): unsure at all n locations
ccactgcgtccgggtggccgtcgaccgcgcgccgtactctgcgcaaggtggacctcgaggcgtacccgggctactaccagatgttagcctccctacaggacaagatcttgtgccacttcaccatccccaagctcgggaacgaggagacgaagctccttnacacggcgagcggcgacgagtacatgccgacgtacgaggacaatgacagcaacttgatgctacccggagacgtcccctggaaaatgaaaggggagacccgcccacgtcttcgcctcaagaaaagctctgaagcagacaatttagcaccaagat

SEQ ID NO: 397334 - DNA, 169 bp, Oryza sativa nipponbare
aagcgcctagcacgtaccgtaccgaattccaaggtcgacccactcgtgcggccacgcgtaccgaagaggcacaataagtataaatgatggctggtgctcctagagcagtctaagattgaataatatatgctactttgagagcgctaaaaaaaaaaaaaaatattaaaaa

SEQ ID NO: 397335 - DNA, 86 bp, Oryza sativa nipponbare
ccacgcgtccggaaggggtaccgcatcgcctgcgggccggtcggtgaggacgtctacccgttgtaccccagcggcgcctttacccg

SEQ ID NO: 397336 - DNA, 257 bp, Oryza sativa nipponbare
aggctagacacacgcgtccgcccacgcgttcggcaagcaggccaccggcggcggcggttgtggtaggcccagccgtaccaccgagcgctgcttttggaaggccaccggatgcgaccgatccatccgatgaagaggctaccctaatcgcatgatcgggctcaataagacgctcggatactacgagggccgagcccctaccggcaccaagaccgactgggtcatgaacgaagtctgcctttgcgaatgcgacaccatta

SEQ ID NO: 397337 - DNA, 113 bp, Oryza sativa nipponbare
atcgtccatatcccggcggagatcctccttagccatcagctgcagcggagggaagaagatcaagaccgacaagccctaccgtattggaggaggcgtgccagtcaatattgatg

SEQ ID NO: 397338 - DNA, 219 bp, Oryza sativa nipponbare
ttgacagaaacaaaattaagctagataagcactgattccacgcacaatttacatgatcattacatcgtccatcacacaggcactcatgcatcgattacacataggagtattgattcgtgtgactagcttaatgaatttgattagccgatgatctggtccaggacgccgatgttcttgaggcctgagacgacgccgacgcccatgatgtggccgacggcg

SEQ ID NO: 397339 - DNA, 315 bp, Oryza sativa nipponbare
taacacacgaaacaaggtgggagacatcatcgaatcagagatgaacaattaaacaaggctatatatgacgatgacggcttagttgccaccagactcctcgcagcccgggggcttgtaggcgatgaagctgatgagctgcacctgcctgacgttgtcgaagccgatgatacggacgaatgcatcagggtacgccttcttggcctcctcgagctccttgagcacctgggtggcgtcagtgcacccgaacatgggcagcttccacatggtccagtacctgccatcgtagtattcgggggatctgtggtctcacggaga

SEQ ID NO: 397340 - DNA, 130 bp, Oryza sativa nipponbare
cacagaaaatggcccgtgtctgcagctgtgtttcttcttcgacagtcatgcgttcctctgtcgaagggaacacgtacggcaccaatccgagcacagattatgtatagcatttgccggacagcaatggggc

SEQ ID NO: 397341 - DNA, 366 bp, Oryza sativa nipponbare
aaagcactaattaatccttccatgccacaatataaacaatttagactacatatttacactatacatagccagaaatggttatattttgggatcgagggagtatttgtttccgatctaatagagatgagaaatccgctaatcagaataacaccacggataagtacctagaccattagttgggaaacgaataaaatcattattgcaaaaacatcatcttcttcttcatcttcttagtgtacacaacaccaactcgatcatcatctcgtcgcactaaacccatcttccccaacccaaagacaacgaactcgctggccacaaatccatccaaccacaattaaccactgctaagctacgggcccccacttt

SEQ ID NO: 397342 - DNA, 402 bp, Oryza sativa nipponbare
caagtcccacttcaactacaacccaatctgcattacaggatgggagtctaaaacgactgcagtttcagcgtttttgaggcctgcagagacactgggctcgcgttgcagcaaaagattaggcggcggcgcccacggtggcgccggcggtgagcctcgacgagccgtagagagtctcctcgaaccggatgatctcgttcttggaaccgtaggccacttgagtccgctcgtcgaggttgttgatcaccttgtccagcaccgactgtttgccgtcgctgctgtacccgccggctttctctatcaagaaacccaacggcgccacctcgaacaggagcctcagcttggccttggctgtcggagacgtcacgttggtgaagatgcccttcttcttaactatgatctggt

SEQ ID NO: 397343 - DNA, 452 bp, Oryza sativa nipponbare
  unsure (1)..(452): unsure at all n locations
atagtagaaagcaaccgtatttctttctacattgaaatatagaagagtgtacattgaaatgtgtcaagaagagatgtaggagcaccctcatggagagggatttttagaagttccattgcatggtttcacaagttatgcaatgaccatcctactttcttctagctgtaatatttccaaaactagttacaagaaatgcgaggatgcccattgtcattgatatggtatggtgatgaagagattcacgaaatatgaatgtggagctcattaaacttttgccgcttcagtaggtgcaccggccctctcagcaataatctgctcatagagatctctaatcttcagtcctacgatagtttggaagagacctgttccattgttgctgccgnggaagtctgcatgctttagcatttgctgggtcacctctccataaaatttggttgagaggttgcttaaat

SEQ ID NO: 397344 - DNA, 355 bp, Oryza sativa nipponbare
gccatgccaatacgtcgttcagacttaattccagtttgctactacattcataccagccttcctgtgctcattattctttttctaagcacaaaaatgttcaatcagccccgaacaggacaggctaacaatggataataatatgtatgtagtggctacatttcttcaggattcagtttccacgacgatgggaaatttcatttagttaccattgatctgatgaaaagccttgcttccaagaaccaactccttgaagcgaactatgcagcccattgcacgctcgaattcgctgctctccagagcaaagctgaaccgacagtgatccggtattcctgtccatgagctgctgtttatgcac

SEQ ID NO: 397345 - DNA, 382 bp, Oryza sativa nipponbare
aggataccaactcactagttcagtttcactagatagaaggcataccacatgacacagcactgcattcttaattacgtacacaccacaagactggagaggaaggactacatcatcgtacacacgccatagatgtctcaaaacatctttattcttagcacttatttaactaggatgcatttcttcagtctcaggtcttagatcacaaactcagaggaaacacaaagttacagtgacaacaactcatcacttgtaactggatcaaactactagcttagcagtactaggcccttccatctccttggtttcgtcaggagggtgcttgcttcacttgccgcagttgcaggggttgcaggtgcagttgtcgccgcacttgcacctcgtc

SEQ ID NO: 397346 - DNA, 389 bp, Oryza sativa nipponbare
ccgcaagaatttttcaggatttcatttgctatagaaactaaatagtgccaaagccatgtttttttttacacatcaaaaacacatacagatacagaccattcccaacccgttgggatcttcattgtaaatgatttgcctcgcaagctgctgcaacaggaacagctgtatatagttcggaattctgaattaaatcgttcgttaggggcaattctgaattctgatactatatatatatatggctttgaaatataaagttctccaaggaaggtgacacatatttcctgttggacgagcataaggggatttgacgctcagactgataacaactgaactagggcttagtctgctttaggcctttgaaggcaggttgttcattacaggggctattt

SEQ ID NO: 397347 - DNA, 448 bp, Oryza sativa nipponbare
tggataaatatatatagctcggagcttccatatatttgattcacatatgcctcacccaacaacatatagtcgtagcagataccactcttacatcaagtcagagagagatcaggtgaaacaaaaacaaaagcagagcacggccggtaaaatcaaaagacgatgaacaaactgggaacacacgaaacaaggtgggagacatcatcgaatcagagatgaacaattaaacaaggctatatatgacgatgacggcttagttgccaccagactcctcgcagcccgggggcttgtaggcgatgaagctgatgagctgcacctgcctgacgttgtcgaagccgatgatacggacgaatgcatcagggtacgccttcttggccttctcgagcttcttgagcacctgggtggcgtcagtgcacccgaacatgggcagctttcacatggtccagtacct

SEQ ID NO: 397348 - DNA, 341 bp, Oryza sativa nipponbare
ttggagcggaaactgaaaacatatttcattattgtgtggattaaaatgggtacatgagcggctcatcagcaataatagtattttgtctgctttgagccaggggataagatggaaataatggagggaccagtctcaaaacgttagcaacctcctcttcactggcatggctgccgacagatgcagtcctgctgctctctgatttacagaaatcttctcgaaaatggtatgaaattagctgctgctcccggtgatttcattgtaggtgctcttgattttgctcaccaaaacttccctgtctggctggaagatgaggttccggtatgtaaaccaccctgtatacc

SEQ ID NO: 397349 - DNA, 398 bp, Oryza sativa nipponbare
ttggagcggaaactgaaaacatatttcattattgttgaattaaaataggtacatgagcagctcatcagcaataatagtattttgtctgctttgagccaggggataagatggaaataatggagggaccagtctcaaaacgttagcaacctcctcttcactggcatggctgccgacagatgcagtcctgctgctctctgatttacagaaatcttctcgaaaatggtatgaaattagctgctgctcccggtgatttcattgtaggtgctcttgattttgctcaccagagcttccctgtctggctggaagatgaggttccggtatgtaaaccaccctgtatacccgattccaacgagctcaagcacgccgggcaaaagtggaagcctgtcgatggccttgat

SEQ ID NO: 397350 - DNA, 302 bp, Oryza sativa nipponbare
gggggctaaaaaactggagcagatggggtattacacttgaatggttaaacacttgctcagggggttcagttcagttttcagttgtcatgggcagtttgagctccttccagggcctccatagtagaagtatgtgccccagtcggcattgttaccgttttgcacgtcgtagcagttcgattgctcagggaatgtgcccacccccttgggggctttcaggttgttggtgctgtccaccacctgtatgttcttgaagtagcttgacttgctgaacccttccttcgggaagggaccggtgcccattt

SEQ ID NO: 397351 - DNA, 461 bp, Oryza sativa nipponbare
ccagtcggacgctaactgataggtgataaaacagctggaaccaatgacatattgttgtatctaattctaatttgacatggagccagcatacgagatcatcgtgaaacaaaggcctgatcggagcgcggacggttagatccaatgatgatgaagatacttggaacacacaagacaaggtgggagagcatttgggatcaaggctgaacgatttaacaaggctgtatatgacgctgtcgggttagttggcatctgactcctaacagtccgggggcttgtaggctatgaagctgattagctgcacctgcctgacggagttgtagccggtgatacggacgaatgcatgagggtacgcgttattggtctactagagcttcttgggctcctgggtggtttcagtgttcccggacatgggcagtttccacatggtttaatacctgccattcaagaattctggggatttg

SEQ ID NO: 397352 - DNA, 305 bp, Oryza sativa nipponbare
aaaacacatgcggctcgggccctttgtataaatatatatagccggagcttccatatatttcattcacatatgcctcacccaacaacatatagtcgtagcagataccactcttacatcaagtcagagagagatcaggtgaaacaaaaacaaaagcagagcacggccggtaaaatcaaaagacgatgaacaaactgggaacacacgaaacaaggtgggagacattatcgaatcagagatgaacaattaaacaaggctatatatgacgatgacggcttagttgccaccagacttcttgcagcccgggg

SEQ ID NO: 397353 - DNA, 390 bp, Oryza sativa nipponbare
agggaatgatgattaatttaactgttcactgttgtatacatcgagggtcaagattgattaagtgagagctgcagtaccttcacaaaattatactccttactccttagcatagagctgatcgatggagcgtataaaaatttaactttacatacagagaccaaattatatgcaataggagtaatttgccgctgttccgttctgccaaactgcaggcagaaccatcgctgctgagaattgctttccttccttcgttcgttgtgcttcagatcctggacgggatgagcggcgtcgaattcgacaggtacgccggcgacgacggcacgccggagccgagcttcaccgggtagccgatgtccttgagcaccatctccactccactcagggcaccca

SEQ ID NO: 397354 - DNA, 393 bp, Oryza sativa nipponbare
aaacaatcgtaactagccttatgtaacttcatatcaaagatgtatcatctcatttatagggaatgaacacaagtggtttataagctaagaactacgatataaattttctcgaaaatcggtaaaatacagaggggattctgatcctcgtctcacaattctccacaataatcatacagaacttttggaagccggatgtatagcaactctgcgcctagtcaatcttcacagatgagtaaatcaatctcgtgaaccacaagcaggcacagaaaccaattgtgccagtgagcacgaagaaagagaatgaggccagaagcatgtagccgaagtacagaatgcctgacaccagtttagtaatctgcagcttggtaaagaagtagaacccaacatacagga

SEQ ID NO: 397355 - DNA, 396 bp, Oryza sativa nipponbare
ttgcgctctcaaagtagcatatattattcaatcttgatgaaagagggacacaagccatcatctatagtgatggtgcctcttacaaacttcaacacacggataacaagcatacactcaagagtcaagaggtggctaggttttgtgtgtacaatggaacacgcaggcatgtacacaaccaagtatactccaccccaaactatagtctttgcaatggttttggcagttgctcagaaaccatgaatcttgatgtgttccttcttcacaatgccggcctgaacaagaaaatttgatacgttcttcctctgatcaccctgaagttgaatgacctggccaagctctgggtcctggacaacagtaccattgcagcaaaactctttcttgagatctttgaggatc

SEQ ID NO: 397356 - DNA, 481 bp, Oryza sativa nipponbare
  unsure (1)..(481): unsure at all n locations
aaggcaaagctgcgagcgccagatcatcttattactacagcttctgggcgatatgctacagtagcttcttcctcccttgcaaaaagaaacccaaaccttatctacaacgcaacacacacaccggacacagagcgctcgatcgatcgaagcagacgagacgacgatggcgaactactactaggtaagcgacaacacctaggctatacagggatacagcgcgcggcggcgacgggcggcgagacggcggcgatgatcaggcgctggccttgttggccttcttggagatggcggagcggatggatttgggcggctgcatcggcttcgcgggggcggccttcctcgccctcttggcgcgggctgggcgggcggggggaaccggcttnttcggcttcgccgacgacgcgggcttcttggcggcggctgcngaggggcgcggggtccttttcctcttggcgccggcgacgacgcccttggccggctt

SEQ ID NO: 397357 - DNA, 405 bp, Oryza sativa nipponbare
tcgaccttggtttttcttttttcatgcggccaatatacacacgcgattgcactactgttccaaattaaggaaccttgtttcttttcttttttacccatctcatacataatcacgtagaaacaccagagatccattcagattacattgcatccatccaagatgagaatgatcagaagaagtttgggttgtatccgttgctgcaggtggcgaggatgtagtaggcgacgatgtggccgagggagccccaggcgaggacgtcgacgaggttgaagccgacggggtcgttggaccggagcaggccggcgaactccttggcgcgctcgtcgccggcgtgaagtgcgtcttgccgttctgctccggcacctgcttcgccacgttctcccgctggaagttgaagaacacgaa

SEQ ID NO: 397358 - DNA, 337 bp, Oryza sativa nipponbare
aataagtgcaaaggtaactgttttatttatcggacaaacagctatggagtggtatgatacttctcagaaaaaaaaaactaatggccagaaatctcagaaacaattatgatgttgtgaacactgaagttaggctcatggttcaggttgcaacttctcacattcttctcttatcgactgaaaaaggatagatgaaaggtacctctcaccaaagcttggaaacacaaccactaccaactttccagcattttctggtctttttgcaactttaatggcagctgctgctgctgccccagatgaaattccaaccagtaatccttcctgaagagccaattgcttt

SEQ ID NO: 397359 - DNA, 407 bp, Oryza sativa nipponbare
ttgttagctccaattcatctatagtcaatctaatagcgcattcagtgcaatagttacatgctacactgttaatatctagtcccacctgtcatagacacactgcgtcttggagtccgtgctacagctggctacaaatctgtagcccgttgctcttctgtctcttgagttatcttcgtaaaatatgtttggagctggcttatagcctgccattgtacctgctctaacgcagcaaagtgtgatgaatgttggtgttgatgatgggatcatgggaagttaccatgagataacagaggtattggtcgatggggtaagtgtgttatttgtatgtgaacatctatatgattgtcaatcattttgaggagctagactagcctgccttattaacaaggagatatgctcccttacat

SEQ ID NO: 397360 - DNA, 382 bp, Oryza sativa nipponbare
gggaaacgaataaaatcattattgcaaaaacatcatcggcttcttgatcttcttagtgtacacaacaccaactcgatcatcatctcgtcgcactaaacccatcttccccaacccaaagacaacgaactcgctggccacaaatccatccaaccacaattaaccactgctaagctacggtcccccacttcacttgccggggacgaagttggtggcgtacgcccaggcgttgatgctgacggggtcggcgaggtggtcggcgaggttctcgagggggcccttgccggtgacgatggcctggactaagaagccgaacatggagaacatggcgaggcggccgttcttgatctccttcaccttgagctccgcgaacgccttggggtca

SEQ ID NO: 397361 - DNA, 422 bp, Oryza sativa nipponbare
cgccgccttttttttttttttaccaggaaccggcgtttatttgaggcaagcactgcccaaaatctggcaaaagtgctgaaaccttagacatagtacacatccatggcaaacatggatgccaaatgacaactacagaaaattatcaaattcgaatgcagctgacggcttctcctgctgaagatgcatattttcccctacattacttggatgtgctctctccatcgacagccaatgggacggcgctggccaggctgcggtatttcagagcatagaacatctcaatgtaacggcgagtctcgcgcctctcaaggttgcttacgtacttccagaatccgtatacaccagtcaaggtcatcagcctctcagagtacagcttccaggtgtacttctcgtaaatcctttgcagacctccctgggaaata

SEQ ID NO: 397362 - DNA, 342 bp, Oryza sativa nipponbare
  unsure (1)..(342): unsure at all n locations
aaacaagctaattttataattaattcacaacaccatatttcattgagcaggttcagaacctgcacagaaatacacactaccggtacagatctcaccctctctccaatactcgtacatccatccacgcggtccacacgaatacgtacatttatacggtacacgtacgtacatctactgcaccgggtacacacacgcacactctnctgcagagacgcgcatcggcgtcaacctagctagcttagctgaaggcgatgcgtcgccatggcagcacggcggcggcggcgctcacttgccggggacgaagttggtggcgtaggcccaggcgttgttgttgacggggtc

SEQ ID NO: 397363 - DNA, 475 bp, Oryza sativa nipponbare
ttttacaagtaaatcgtagtaaattcaaccacaacgatacaggatcatccaacaagtaaggctcatgactgttttttggagttacatgaaatggttcactgaatgtttcttggctgaacatgaaataaaatgacactgctgaaagactagagtgcagtgtgaagcagtaacatgttcaacttcattgtagctcagtcgcgctcacttatggctgataggtgctgatcgatctcctctgtcgtgagtgctctgaaaacacgatcatctttcctcacaacaccgagctcaatctcgggggccttgaaatcttcctgaagaactgattgtaatgcagaaattgcaatctggacagtttcctcgtaagagaactgtgggtcatccttcattttcttctccagaaaatttattgctttctgctccttaagaccggtgctagttgccttatgtccaaagaagtgacctgctcggttacatt

SEQ ID NO: 397364 - DNA, 415 bp, Oryza sativa nipponbare
tttgcatgcaggggaaatcgatggatcgacctctctccttaacttggtcttaatggtcatgtacaatcaaagaaacacacacgcacacacacatgcgtgcactgcatctctctgagcaacgaactcgattgatttgattttgattcgctagggattaaagagaagctgagatagagatttcgacgatcatgcgacgctgaaggagctggctgcgctctcgacgaacttcctggcgcccttgaaccacctcttgtcgccggcctgcgccttgcagatgtacagcttgccgtcgttgacggtggccgtgatcagctggtgcttgccgccctcgtcgccgtccgccgtcctcgtcagcaccgttacgctgtagtactgcttccctcccaccaccggcgccgagctctccaggatgttc

SEQ ID NO: 397365 - DNA, 379 bp, Oryza sativa nipponbare
ggaaccaaatcttcagttcagattcatcgaattcatttaaacaggagagtcgctggcagaagccaacacaaagcagaaattccccccgaatcccatcgaaaccctagctgctacaccaccaccaccacccggacgccaccaggaaggaaggaaggaaggaatcagccgccgaagccgtagagggtgcgggcctggcgcttgagcgcgtagacgacgtccatggcggtgacggtcttgcggcggacgtgctcggtggaggtgacggcgactggcatgacgctctcgaggaagatcttgagcacgccgtgggtctgctggtagatcagcccggagatgcgctttacgccgtccctgcatggcagacttcggatcgtgggct

SEQ ID NO: 397366 - DNA, 396 bp, Oryza sativa nipponbare
actctccaaattcaagtatcaagtgtagtatatcatcgtcatgcagagtacagtgttacatagattaatcacaatgcagtttgattaagcagtgggcatcatcacatcgcattcagaggaaggctatcttagattacagatgaatatgcagacacccagcttggtgttacatacatagactggatttgggtgaaatttagccggcgagggcgctggtgttgtagacgaggagggcgccgccgccgaggagcccggcgagggtcacggcccagatcagaagcccggtggttccaccaacgtaggtgtcaccggtgggagaccattccttcggcgagtagattgggctgtagccgtcgacgtttgcgccgtacttgtcaacgaattggtacacaccct

SEQ ID NO: 397367 - DNA, 396 bp, Oryza sativa nipponbare
atcattgttaaaactttttctttccattttaaattatctgcaaagtgagaaagtgacactcccaagttacaacagcacaccatccatatatccatgcaggcagcctgtttgtgcccttgtgcagatgcatttcatttatacaagtagaaggcactcaaatcagccaccacatgaacacacacatgttccatcatcgatcgatctacacatgcatcacccggtcatgcacttacaaacaaaagatctacttgaagaagtacgggaggtcgagcacgtagaggaggaagtaggcccagaggacgccggagatgccgccgaagaagaagccgccggtgaacttggcccagccgtcggcggtctgcagcttgtcggcctccttcttgcgggcggtgagcg

SEQ ID NO: 397368 - DNA, 447 bp, Oryza sativa nipponbare
  unsure (1)..(447): unsure at all n locations
gcgcgtcgaggagagagagagagagaggaggaggaggaggagagcggcggcggcgatggcggggaaggggttgaacgcgacgggggagttcttccggcggcgggacgactggaggaggcacccgatggtggggaaccagctgcgccacgccacgccggggctcggcatcgccatcgtcgccttcgggatctacctcgtcggcgaggccgcctacaaccgcctctaccgcccctccggcgaccaccaccaccactagatcgcgtcggcggccacgcgcggagacccgcgccgtctccccgaggtgaagtggttggagcaatctttaccaagcaccaatgttgttgatcttttccagtttgagttcataaggtctgccatgaggcccatgaccatcatgtaattngcaaccagggagacatgaatcatgtacttttatatcaatgttct

SEQ ID NO: 397369 - DNA, 354 bp, Oryza sativa nipponbare
cattcaagtacttctacccatgctccattttcattcacagccgcgcctatttgggaaaacacggtatcctcgagtgtgtcatgttacaactttttataacttatacaaagtgtacatgtctcaactctagattcagtgagacagaaggatccctcctccttggttgaatgcaggatctgatacatcacataactttaccgggcacttccttcaatcttgtcttcaacctcacagtagagctccctgagcttttccaaggtttcctgtggtgtctcccaggagcctctgccactggcttctaggaaggtttgaactagcttcctgaatgaattggggttgttgttcatgagcctc

SEQ ID NO: 397370 - DNA, 351 bp, Oryza sativa nipponbare
gtataaatatatatagccggagcttccatatatttcattcacatatgcctcacccaacaacatatagtcgtagcagataccactcttacatcaagtcagagagagatcaggtgaaacaaaaacaaaagcagagcacggccggtaaaatcaaaagacgatgaacaaactgggaacacacgaaacaaggtgggagacatcatcgaatcagagatgaacaattaaacaaggctatatatgacgatgacggcttagttgccaccagactcctcgcagcccgggggcttgtaggcgatgaagctgatgagctgcacctgcctgacgttgtcgaagccgatgatacggacgaatgca

SEQ ID NO: 397371 - DNA, 285 bp, Oryza sativa nipponbare
tttttgatggattaatatggcaatgaccttatcttgttccaatatgaatttgcaggtccgtcgaactggcatctaggagcttaggagcaaacctagctgaattttacatatacattcagaagcaaatttggcagttctggaaccaactgaacccgtttttttagattttatgtacacgagaaatctattataaaagcagatatacttagtgcgcaaggttcgccgccgagctgcgcaatcgtcttcgtcagttaccagctgatcatttgatgatgcaaccacgct

SEQ ID NO: 397372 - DNA, 307 bp, Oryza sativa nipponbare
gaatcatacgtaagagcttgctgatacaatatcaacatggaggggggattgccgggtcatatgaacaaacataagaacaccgaaaccccatatggccattatgccgatcctagtctagcttggcgaggacatcgccaagagcagatttggtcaacgtgtagtacttctccgcctcttcggggctcttgatcttggctgcatggtcaagcccgtcaatggtggctaagagcttgccggtgaggtccttgaggccctgtttctcgttcttgggcttggagttgatgactgatttgaggactgagcgcag

SEQ ID NO: 397373 - DNA, 325 bp, Oryza sativa nipponbare
gaatcatacgtaagtgcttgctgatacaatatcaacatggagggtacattgccggttccatatgaacaaacataaaaacaccgaaaccccatatggccattatgccgatcctagcctagcttggcgaggacatcgccaagagcagatttggtcaacgtgtagtacttctccgcctcttcggggctcttgatcttggctgcatggtcaagcccgtcaatggtggcgaagagcttgccggtgaggtccttgaggcccttcttctcggccttgggcttggagttgatgacggttttgaggtcttaacgcaggtaggaggccctgaggc

SEQ ID NO: 397374 - DNA, 318 bp, Oryza sativa nipponbare
gacgacaactataaatattgctcaataaaacactatgtggagacagcgacacacgagagtcatatccagaggaaaacaatcagcccagacggaccactagcaccaaatgcaaagcactgggaagaactaattcgaccgctaccaccctagtaaaaaccagagaagagagaggaaggggggacaggaagaaaaacattctagtagaacaggagaggaatccatccatcatggtgacagcagcatgaggcatctaaatcgatggtctccaataacatgcggagccatcgatcgatcgatcttcccattatactggccctc

SEQ ID NO: 397375 - DNA, 506 bp, Oryza sativa nipponbare
acgcgtacggcagctgggctcctgctagagcggccgacctgcggtcgtttttttaattcacaacaccatatttcattgatcaggttcagaacctgcacagagagtacacactaccggtacagatctcaccctctctccaatactcgtacatccatccacgcggtccacacgaatacgtacatctatacggtacacgtacgtacatctactgcaccgagtacacacacgcacactctcctgcagagacgcgcatcgtcgtcaacctagctagcttagctgaaggcgatgcgtggccatggcagcacggcggcggcggagctcacttgccggggacgaagctgggggcgtaagcccaggcgttgttgttgacggtgtcggcgaggtggtccgcgagggtctcgagggggcccttgccggtgacgatggcctggacgaagaagccgaacatggagaacatggcgaggcaggcggtcttgatctcctttaccttgagctccgcgaggcct

SEQ ID NO: 397376 - DNA, 340 bp, Oryza sativa nipponbare
ccaaattcaagtatcaagtgtagtatatcatcatcatgcaagtacagggttacatagattaatcacaatgcagtttgattaagcagtgggcatcatcacatcgcattcagaggaaggctatcttagattacagatgaatatgcagacacccagcttggtgttacatacatagactggatttgggtgaaatttagccggcgagggcgctggtgttgtatacgaggagggcgccgccgccgaggagcccggcgagggtcacggcccagatcagaagcccggtggttccaccaacgtaggtgtcaccggtgggagaccattcctccggcgagtagattgggct

SEQ ID NO: 397377 - DNA, 324 bp, Oryza sativa nipponbare
tgcaggtatcaagtgtactatatcattatcatgcaagtacagtgttacatacattaatcacaatgcagtttgattaaccagtgggcatcatcacatggcattcagaggcaggctatcttacattacagatgaatatgccgacacccagtttggtgttacatacatagactggatttgggtgaaatttagccggcgagggcgctcgagttgcagacgaggagggctccgccgtcgaggagcccggcgagggtcacggcccagatcagaagccaggaggttccaccaacgtaggtgtcaccggtgggagaccattcctccgtcgag

SEQ ID NO: 397378 - DNA, 331 bp, Oryza sativa nipponbare
gtgagataattaattcatatactgtacctgttgctatataagagcaagttcaatagtatagccaactactagctccaattcatctatagtcaatctaatagcccattcatacaatagttacatactacactattaatatctagtcccacctgtcatagacacactgggtcttggagtacgtgctacagctggctacaaatctgtagcccggtgctcttctctctcttgatttatcttcggaaaatatgtttgtagctggcttatagcctgccattgaacctgctctaacgcagcaaagtgtgatgaatgttggtgttgatgatgggatcat

SEQ ID NO: 397379 - DNA, 358 bp, Oryza sativa nipponbare
ggagtggatcaacgcgtcaggggatgcattcgtaagaaagtataataatcaaatgggataacctgatcactaactgcgctaattaaaactgtgcccatgtgagccaagggcggaaaaagggaccgagctatcaagacccaatgcttgaagaaaggaacaacctttggcgggaggttacctgaagccaggaaaacccactttgaggaggcggcccccggtgaggataaccgggctggaaagggcggaaccgaatgctcctgccccccctgcaattgcggccggcgaggtacctacctaactgagccctcactgaaggccagccacttaacttaggtaggccacagtaaaaaccacccct

SEQ ID NO: 397380 - DNA, 334 bp, Oryza sativa nipponbare
catgaaattttcggaaggaccaatgcgtgctacgcatcacacatgctgacgtacgaatcgatgctcagcacattataggccgacgtcgagatctgatacaagcagactataacagtgaccggctagctgagcaatgtcctgtgctacaggtacacattgaagctgacatggcctgagctcgccatcaacattgtcatccagggtaccacagtgatcctggaccgaacaagggcatgatagctgatccaggccagggcgaagaaagtcataattactgcttcggcgaaaggtggggacattactacctacgagctgggagtaaaataaggaaagt

SEQ ID NO: 397381 - DNA, 288 bp, Oryza sativa nipponbare
aaatccgcagaaccctagcgcgtcaccgatgtcgaaccccagggtgttctgtatacgatgacgcatctggggacctacgacgggccggatcctgatggaactttcgcgaagcgacgtgaccgggacaggggagaacttacgagcgctatgcacctgcaatacaggggtggcccctagcagcaagtggttccactataaaggtggcacgttggacagtttaatcccggaatcaatgcgccaggggagtcactttacccgcggaaacggcccggcaggggagtcaattta

SEQ ID NO: 397382 - DNA, 407 bp, Oryza sativa nipponbare
ccacgcgtccgtcaactgcaggtatgccagtgtcccgacggtcgggaggatcaagtttatgcaacgttagcaatgggaggaggataagatgcatgcaagtgtgtcctattgagggcatctaaaagttgaggaccttctgatacatgtcacggatcaccgtggaggaccttgtgaaccatatctagtgcctgctacggtccaagtgggtgccctggctaacgataaatacggtcggatttacgtaccgtgagaacgacaccatgcggcggatactacatatggcaggtactggaccatgtggaagctgtcaatgttctggtgcactgacacaacgcaggcgctgaaggagctcgagcgaggcaaagaatgcgaacactgatgcattctgccgtataataggtttatac

SEQ ID NO: 397383 - DNA, 389 bp, Oryza sativa nipponbare
  unsure (1)..(389): unsure at all n locations
ccactcatccgcggtcgcctggaccgagctaccgagctaatccagccatgctcagcagcgcactcttcaccccctgcaaccctactcagctgagcacgtgtcgtgcctccgtgagcacgcccctcaaggccctgcgattatgacatgagcgcgtgccagggacatccacgaccatcacatgccaggcctggagcagcatcccgtgcgaacgcgtctcgtacatgggcaagtgccagttgataaacctggtattgttgggcgctatgtcgcttcctacattcgggatgcttgtgccatacggcgccttgttcatgcccgccaggaccaggaacgccagcacntgccaggtcggcaaggacaaactagacaacgacgtgatcaccgaggag

SEQ ID NO: 397384 - DNA, 373 bp, Oryza sativa nipponbare
ccacgcgtacaaggactcgtggaggacgcgtgggccagtagagaagtgcatcacctacgcctagatggacaatagcaccgtatacgacgtgtggctcatctgatgctgcactcgtataccccgagtgcagtatgtgctacagtacttcttcaacaggacggagctttccgagagcatcaacccggacgaggccttaccgtacagggccaccaggcaggccagcatcttcacctgctagggcaaccagaaggttcaggacctgttcctactggacgaggcgccattgtcttacgtgctcgagacagccggaggcttcatgaccgggctgatcccgagtaacacaactattccgaccaagaaggaggaggtctta

SEQ ID NO: 397385 - DNA, 227 bp, Oryza sativa nipponbare
gctgtgacgagcacacgcgtgcgcacacacatccgggtatgaagtgatggtggagtacatgtaaatggttgcgaacactgcctatgtggaagagctcactggagtggaacgcaacctcttggctgctgctgacaagaatgttaatgcagcccacagagcgtgctggcgtattgccttatccatcgtacaaactgaggaagggcgtgccaatgaagaacatgttactc

SEQ ID NO: 397386 - DNA, 339 bp, Oryza sativa nipponbare
caaggcgtacgctatcaggcgggcatggagcggagaggcagcttcctacaggacggcactggcgtcgacctcctgcttgttgcatcagtgcacgggccgagtcggagcgcgcgtctcctctgcgtccccgagaacacggaccaacctgatgttttgcggcgcccagaactaggactactccgacgagtgacgccgggcggggctcgcactgctggccccagcgacggcggctacggggatgaaggtgacgccctccgacagggcctaacgaaaggcgggttacttgtttacaaagcccaggactaacacggggttaatcggctacagcggaaaggggtt

SEQ ID NO: 397387 - DNA, 377 bp, Oryza sativa nipponbare
cgacgcgtccggatcgagtacctgctacggtccaagtgggtgccctggctaacgatcaatacggtcggatctacctaccgagagaaccacacatgcggcagatactacatatggcagggactggaccatgtggaagctgtccatgttctggtgcactgacacaacgcatgtgctgaaggagctcgaggaggccaagaaggcgaaccctgatgcattgggccgcataataggtttatacaacacaaggcaggtgcctgtgatgagcttgatggcctacaagcccccatgctgctaggaggccggtggcaactaagccgctatcatcatatgatgcctcgcacaatggttcatgtgtgattcgatgatgcatcccacct

SEQ ID NO: 397388 - DNA, 416 bp, Oryza sativa nipponbare
tcccgtgcacgtacccacgtacgtacgaagcacgtatctctattttccacatacgcgactagtgagcagcagctgtggtattctcccattgctactgccaccaaggaggttgccgctgcggctgctgccgccgacaaggcgccaacgacgccttcgacacccctgatacaggaggcgaacgaagctctgaaggcaccgaagccaaaagaggcgccgaaggctaaggaaggggaagagaaaaaagcgaaaggtgacaaagagaaagaaaacgccaataaggagaggcaccccagggcgactacatcccagatcggcgaggccacaccacccgccctactcggagacgatcaaggaggatatcatggcgctgcaagggaacagtacagggggatccagcacatacgcgatctccaagt

SEQ ID NO: 397389 - DNA, 354 bp, Oryza sativa nipponbare
accagcacgaccaactcctgcggggaccgtgaccgcgaccagcacaacctactgaaggaacatggagtgcaggaggcacacgattgacagggtgactcaggacagcacgggtatggccagcctgtctgcccatgtaaagcgccgacctgaccggttgcacacaggatgtggtggtccaaccaaaccagtgttctacaacagggctgacaccactgcgagcattgctctgagaatgcaatgccgaggctgcagcctttactgatagcacgccacaaagaggtgcaggcatcatctgattggtggactcactactggctacggaacatgtgtttttttaactacctacacgatact

SEQ ID NO: 397390 - DNA, 300 bp, Oryza sativa nipponbare
gagacccacgcgttcgccactcggtcggtgacaggagagaggcatgctggacgctctgtgcctcaattggcgccagctataacgaggcaccatgatgtctctggagacatgctgagcaatataaagggctctatggcaggaaatgctctgaacgaagatggacacgagcacctgggcatagatcaaacatacgtggaccaaggggttgatttgtgatcaaacatacaggctgctgcatgtttactgtgactacaagacctttgcgcatactatgtgcacagtgtgataagattcttgaca

SEQ ID NO: 397391 - DNA, 234 bp, Oryza sativa nipponbare
ccacgcgtgcgaaggaggagcatggattgatgatggttgagtgcatatcgattgctgacaggataatgatggagaccatcgccaaggatgtcaccaacttgatgagggaacactgcgttggtgtacctcaaccgcatgacggatgcatgcatccatcccgtagcggccaagctagaatccatggcgccatgctcaatcatgcaggataggatgggctacatcaatgaacactga

SEQ ID NO: 397392 - DNA, 399 bp, Oryza sativa nipponbare
acacgcatgcgcgcccaaggagtaagtgtccaagatgcccacgggctgaacctgcataatgcgcaagggccccaacctgttgaaactggcctggaaggaacagtgactgtccctgggcaccagtatccggtctaagtacaagatcaactaccagttctaccgcgtattgaccaatggtaaggtgcaaaagctacaccccaaggacggggtgtaccccaagaatgtcaacgcctgcaggcaagccgtaggccaaaacttgcgaagtatagggaagagcgcgagtcccatatagggaaagttcaccgtgaagaacgttttctacatatagacctattaatcacctgcgtcttgtgtgagagggacctattaattactagtgtgttgggtggatgtacatgt

SEQ ID NO: 397393 - DNA, 373 bp, Oryza sativa nipponbare
agagaccgaaattcacgaatatacccacccgtgctaacaaagaagaagaataggatgccgaccggtgctatcattgtaaggggatcgacctccatattcacccttgctgtgaaggggcgcagcctcgacattcaggctcctcgccgtgttgcgttgcacgcttcggcggtggactacagctgtaacatctgaggctgtccaggtggactacacctctaacatctcggtgattccgacagaggcgcagcatatctcatcaggcgcgactcttacaacgtgctgatgtacctagaggctcaagctctcatcatcgaatgctgcagctgctacttatgctacgacggaggaacccaacagggactacctatggtac

SEQ ID NO: 397394 - DNA, 377 bp, Oryza sativa nipponbare
cacggcccacacgtacgagaaagtatactcaacacatgggagacactgatcactcactgcggtaactgaaactgcgaccatgtgagacaagtgcggaaactgggaccgagctgacgcgagccagtgcgtgaagaaaggaaccagctctggcgtgaggatacctgaagccaagaagagccactttgaggaggccgcccccggtgaggataaccggacttgcaagggcggaagcagatgctcctgcacccactgcactcgcggccagcgaggtaactacctaaccgagcactcaccgacggcgagtcacctacctgaattaggccacaatacaaaccaccgatatgagtgaggcgtgtgtgagcgctgaatatagctga

SEQ ID NO: 397395 - DNA, 353 bp, Oryza sativa nipponbare
ccatgcttgcggtaggatccaggcatggcttcccaggtctccgccgccacatccgtgccgcagttacatggactccggacctactgctgttctacgtccatggggacgctggcatcggtgacgatgaccaagaagaggtcccagggcatacggtgcgactacataggatcatccaccaacgttatcatggggacgaccacgacgctgatgctgatcgcggggaggttcgggctggcgccctcgacgaacaggaagtcgaccgtgggactgaagatggaggcgcgcgaatgctggctgcagacctgggatcccgccgggttcacgctagcatacacgctggcctgcggcgccgt

SEQ ID NO: 397396 - DNA, 293 bp, Oryza sativa nipponbare
ggagcaacgcgttcgaaagaccaaccgaaccgccggcgcatcgccatagcaagaacgatggccgcgtcggcgctggaccagaccagcaggttcgtcgggaccgccactcggcgggatgagctagtacgccgcgtaggggactgagcgggccgcataacaatgcgcctgaccgtgaagagcgcgcgcaacagcatctggtatggacctgaacgccctaagtacttgcgccagagctcggggcagactccatctgacacgcccggagagtatccgccagactacggacgggacac

SEQ ID NO: 397397 - DNA, 362 bp, Oryza sativa nipponbare
ccacgcgtccgcccactcgtccgcccacgcgtccggaaaagtatccgtgataatcaatcccaccacgaggaagaccatcaccgagtttggttgctcggaggagttgcttactcaggtaggatagttgcttgggaagcatgcctactccgggcagacagaatccgagggaggctttgaatgctacgcgccggcgagggagaacatcctgaatagctcgtagccggtggtgggagggaagcagtactacaccgtagcggtgctgaccaggacgagcagacggacactagggcagcgagcactagatgtttacggggaccgtgaacgacagaagactgggcatatgggaggcacaagccggctac

SEQ ID NO: 397398 - DNA, 362 bp, Oryza sativa nipponbare
ctcactacagggtaagcggaagcgccgtgccgtccgcgggcccgaattccgaaaatctaggcacgcctcacgggtcctaaggaggggccacgtcagctaccctaacgggtcctggaaggaaccgtactggttgatttaccggaacatggcaataattggcttgaaggggtcccgggcgctttcaaggaactgattgtaactgtccccgggggtgttatccgttgcggcgatagcagacatgacttgggacttcctatggcgctggcacgggcggaacattccggtgcccatggccatggccacacgggtcctcgtaggctccaggtgtgccattgacatgggcgcccccacactaggggggt

SEQ ID NO: 397399 - DNA, 365 bp, Oryza sativa nipponbare
ccacgcgtccgtccacacgtccgcccacgcgaacgctcggcgtaatcgcgatcgacgtcgttgcgaacgctcgggactcgtgccaatcacctgctgctcgaccaccgacacctggagcgaatacgaagggctcgatcgatggcagctgcggcagagaagaatatgatcaccctgaagagctcccacggggaggagttacaggtggacgaagcagcggcgacggatgcgcagacaacccgacacatgatcgaagacgactgtgccagctactgtatacggttatccaacgctgactccaagatgctctcgcaggtcatggtgtactggaacaaggacttgctccccgtgcacgctatagaagatcc

SEQ ID NO: 397400 - DNA, 191 bp, Oryza sativa nipponbare
gactcactataggagatagcgtgtacgccgtgcacgtccgcggtcccgaatccgaggatcgaccgcacgcgtccgtgttcccgatgactgaccagctcagttggcatgattgcttgtgtaataaccacacttgtcgacactgattctcttgagaacaaggccgttgaagaaacaccgcctgccctccagaa

SEQ ID NO: 397401 - DNA, 317 bp, Oryza sativa nipponbare
acaaccgacgcgtccggagcatatagctggggagagatagggctccactggaggggaaacttggccactgcttatgctcccatggcaagccaactgatcaagatcaggctgtagtgctacaagcccacggggctgcatggagcttcattgacaaggaggacccaatttacaatgaagggcatccaatcaaagacgccaacttactaggtggcgcggacactcaatggcgaccccttcatctgaagcctggagacgctcttgacctccaggccgatggtagcgtggtacctctccaacttcccggcgtaccggaccgc

SEQ ID NO: 397402 - DNA, 257 bp, Oryza sativa nipponbare
actaggcaaaccacacgaatacacgattgattaatttcactgagaatagcacgggtacatcacatcacacaaattcatacgttgatacacgcatagtcgccgaagcgaccagctgcttaattaatcgataacacacgggtttaattcagcaataatcagcacacacacaaaccacactcatatgggtggtttttattgtggactaattaagggaggtgactcgccggcggcgagtgttcggttgcttcgtgacttca

SEQ ID NO: 397403 - DNA, 258 bp, Oryza sativa nipponbare
tgggctgccgaaattcgaaacctcatgacttcagacttcagaattcggacaaaacagacgcatgtggcacaaacacacagacagaagaaagtaaaacaagactcgaaaagaaaaaaatcctgaagtctgtaccaaagttcagtattacacctcacagaaaatggcccgtgtctgcagctgtgtttcttcttcgacagtcatgcgtttctctgtcgaaggggaacaacgtacgggcagtcaatccgagcacaggatata

SEQ ID NO: 397404 - DNA, 404 bp, Oryza sativa nipponbare
tgacgcacgctgcacggcatgacgtgagctctgtatcactcgtagagcgctttttttttttttttttttgatcccaaatgtgctcattgattgatagcgatatcatagaagcagcgacgcgaattaagatttaaaaccaaccccaagaaggatcgcacatccaactccaccgaatcgatccaagaactccgcctaatccaaccaaaccatgggcgatctcatctcaccaacacgacacgaactcataaaaagactaacaccaccaccacctcctacttatttagggactcgacgactcaagacgactgatactggcgaaaggcgaaggggaacagcacagatctaggagagctggccgcagtcggcgatgacgaccggcttggcggtgctcccgccgcgggatc

SEQ ID NO: 397405 - DNA, 433 bp, Oryza sativa nipponbare
tttaaatatatatagccggagcttccatatatttcattcacatatgcctcacccaacaacatatagtcgtagcagataccactcttacatcaagtcagagagagatcaggtgaaacaaaaacaaaagcagagcacggccggtaaaatcaaaagacgatgaacaaactgggaacacacgaaacatggtgggagacatcatcgaatcagagatggacaattaaacaaggctatatatgacgatgacggcttagttgccaccagactcctcgcagcccgggggcttgtaggcgatgaagctgatgagctgcacctgcctgacgttgtcgaagccgatgatacggacgaatgcatcagggtgcgccgttttggcctgctcgagctccttgagcacctgggtggcgtcagtgcacccgaacatgggcagcttccacat

SEQ ID NO: 397406 - DNA, 352 bp, Oryza sativa nipponbare
  unsure (1)..(352): unsure at all n locations
ctatcgtcctatttcttgcgtgcagccatgtcagctccgncaccctggtacatattggcnatganagggttgcaggcgctctagaggtcgttcatcttgtactcgaactcctcgagctcggcnngctggttgctgtcgagccagctgatggcaccagcaatggcgtgctcgatcttcttcttgtcggccttatgcgaggttggacgcgatcttggcgtcctagatggtgtaccgcatgttgtaggcgtagctctcgagcgagttcttggcgtcgaccttcttcttgtgctcctcgtcctccgccttgtactactccgtctactgcaccatcttctcgatatcctccttgctc

SEQ ID NO: 397407 - DNA, 308 bp, Oryza sativa nipponbare
  unsure (1)..(308): unsure at all n locations
tgagacaaacaacatcaaagagggggccggcgactttaaaaaagacacaagaaaacactatataaagacaacccacncgaggagnncatgtcaaagaaaacaattaacccnactgccactacactaaatgcaaagcagtgggaagaactaaaaaaaaggttaccaccctagtaaaaaccaaaaaaaagagaggaaggggggacaggaagaaaaaatagaaattngaacaggaganaaatccatccatcatggtgacagctgcatgaggcatctaaatcgatgggctccaataacatgcggagccatcg

SEQ ID NO: 397408 - DNA, 345 bp, Oryza sativa nipponbare
  unsure (1)..(345): unsure at all n locations
tattttttaagtggcaaaccccaacttttttcagtttctgaattctggatggatcatatcagattcatgacagcatcgtacaatctgtgcaagcattggtgcatcgtncngtggagagggagaggtgtctacaatggcggctgggccattcacgagcccggcgtgaacttggtggcgtagacccaggcgttgttggcgacggggtcggcgaggtggtcgagcaggttctccaaggggcccttgtctggtgacgatggcctggacgaagaagccgaacatggagaacatggcgaggcggccattcttgatctccttgaccttgagctcggcgaaggtgacggggtc

SEQ ID NO: 397409 - DNA, 283 bp, Oryza sativa nipponbare
atagccggagcttccatatatttcattgagatatgcctcacccaacaacatatagtcgtagcagataccactcttacatcaagtcagagagagatcaggtgaaacaaaaacaaaagcagagcacggccggtaaaatcaaaagacgatgaacaaactgggaacacacgaaacaaggtgggagacatcatcgaatcagagatgaacaattaaacaaggctatatatgacgatgacggcttagttgccaccagactcctcgcagcccgggggcttgtaggcgatga

SEQ ID NO: 397410 - DNA, 333 bp, Oryza sativa nipponbare
  unsure (1)..(333): unsure at all n locations
attatatgtgtgtaaatattatattatnggaaatcattttgaggagctggggtagcgtgccttattaacatggagatatgtaccattacatgangattaacatattanncagtttctacatggaattaaggtagnggaacaaatgatgaatgatgatngaagactgcaattctccatggattggaatgggatcaggtggccttgcagaaatctccgcccagatcgtcgcacgcctcctcgcggaacaccgtggtgggctcgtcgnaggataaggagtccctgtcgacttcctccgtcgccgcacgagaaacagcaacagcagccgatgatgag

SEQ ID NO: 397411 - DNA, 338 bp, Oryza sativa nipponbare
  unsure (1)..(338): unsure at all n locations
taatagatagcttctagntttatttcaaaggtacaaatatcacaagggatatacaatatttgatgctatagtgaatacattctgtaacnatcatacatgtgcnnaaaataaactatcaatgtactctaancttaatcctttcaccatttcgtanggctcaatnnntattatacattttttttgcatgagtgtatgacagagcgagcttaagctccaagtgttgaagaatcatacacaacaatattttggtctcaagcaatgcgaagttttggccaatacagattctcgggccccaactaaatggtaggaacgcgcctggatccttggatgccttggaa

SEQ ID NO: 397412 - DNA, 463 bp, Oryza sativa nipponbare
atgctgcttgctcttatttgggagtttgatttcacgccatttatggttctgatcgttacaatttctgaatgatggtatatgatatccttgttccctccatacctactatatctcataatacttcagtactaagtagttcattttcttgattttcactccaaccattttccaccacaaacaggtaccataatgactatatctaagcatcgagtaaagccttctccaatacctgacagctggaagttggctgaaaattttacaactgcagttgtccttggtggatagttggcaaagatgcatgttatattcttcagagctgcatacaagtccaactatttcaccaggctgtcattgctttggtagctcttcctcatcaaaccaccttgggggatcatatccatgaccaccaagaggattacagcggcatatacgccaagctgtcaagattgtaccctttgcaaca

SEQ ID NO: 397413 - DNA, 333 bp, Oryza sativa nipponbare
  unsure (1)..(333): unsure at all n locations
gtatgtaaatattatattattgtaaatcattttgaggagctagactagcgtgccttattaacaaggagatatgtaccattacatgatgattaacatataaatctgtagctacatggaattaaggtagtggagcanaggaggaaggatgatagaagactccaattctccatggatgggaatgggatcaggtggccttgcagaactctccgcccagatcgtcgcacgcctcctcggngaacaccgtggtgggctcgtcgtaggataggtagtccctgtcgacttcctccgccgccgcacgagaaacagcaacagcagccgatgatgagagcttgg

SEQ ID NO: 397414 - DNA, 324 bp, Oryza sativa nipponbare
  unsure (1)..(324): unsure at all n locations
caccaaacatatactacaatattataagaagagattatatcgcaccatcgatcgattacaccatcatcaataactgaggagcagcctgacagatgantaaaattacatgtgcatccacccaaaacacangtaattaataggtcgattatgagagaagaagaagaagaagaataagtctagatgtcgaagacgttcttgtgggtgaacttgacctcgatggggctgacgtttttgaggatgctgcggaagttctggccgacgccctgcctgccggcgttgaccttctccgggtagacgccgtccttggggtggaggtactgcacc

SEQ ID NO: 397415 - DNA, 341 bp, Oryza sativa nipponbare
tttaaacaaataccagcattttgcaaaaccaaaatttcattgtcgacggattcagatatgctctaggcatcatattacatgagtacgtgtgtatagccggagatcttgcattcacgtgccctgtctcaccgtcaccgaacgatagaccgatagttgtagtagtactcttgcaacaacggcaggtcggagcgcgagagaacaattacgtgcagcttaacacggacacacaaaaaaaaaaagaaaaagaaagaacatgcacgaaggaacgaaagcgcttagttgccgcctgactcctcgcaacccggtggcttatacgcgatgaagctgattaactgcacctg

SEQ ID NO: 397416 - DNA, 265 bp, Oryza sativa nipponbare
  unsure (1)..(265): unsure at all n locations
tgccccctcattttttttttttataggaactaaaaatagacatataaatgtcaatgtttaaataatagggacccggaatagactnatggtagcgtagtgtatataccacatgacaangaagagggggtgtnnttatactttgattagctattcatatgnatcagcccaataggagggaggaaaatttagacntatncngagagaggagtacgatggcccatcgtgccttcgggccggcccggcacggaccgaggcgtgttgggcc

SEQ ID NO: 397417 - DNA, 333 bp, Oryza sativa nipponbare
  unsure (1)..(333): unsure at all n locations
tttctcagactgcatcattcaatttatacacatcaggtatancatacggggatgtctgttcttatgtgttattcagaaagaagcaaccaaagaggtntgtccgnnaactatctactataatatataaaaccatacatgttaggtttcaacttatgaaatatacannctaatttatattatctgaagagtgatctacatacactcttgatgcagatttagcgaacccgatcctgtcttttgataagtcgaaaaccgtatgataagcacccatgaagacattttcaagaatccaaagaggaccgcgtggtggaggtatgtcgaacgccatgaacc

SEQ ID NO: 397418 - DNA, 291 bp, Oryza sativa nipponbare
  unsure (1)..(291): unsure at all n locations
attatttttttttttttttttttntttattatttttttttttttntatttgggctggggaaaccatatgtatttcacgattgattaatttcactggaaanagcccggnntcattacattacacaaatttatacgttgatacacgcatatgcgtcgaaccgaccagctgnttaataaatttataacacacgggtttaattcagcaattatgtgcccacacacaaaccacactcatatgggttgtttttattggggactaattaaggggggggactctccggcggcgagtgtt

SEQ ID NO: 397419 - DNA, 331 bp, Oryza sativa nipponbare
  unsure (1)..(331): unsure at all n locations
atatcaaacgctctagaaaagattcatgttatgaaanacgtggggtaccacgtatgttctaatggtataattaattaattgagtatantctctacatttnntttgtatttaacttgtaactgtgacnancacactgttctacagtgtgcctcgatgtactancnnnntatttgtagttgnagtacgtagcancagcagcagcatgttcactgtcttgattggattggatcggatttgtatacgtagttcttgacgaacatgccctccttggcctcggcggcctcgccgtcgctggtgtacttgccgagctgcgccagcgatgttgccttgg

SEQ ID NO: 397420 - DNA, 384 bp, Oryza sativa nipponbare
  unsure (1)..(384): unsure at all n locations
agcttggatcctctatagcgatcgcccttttattttttttttagacagatacaaaattaagctagataagcactgattccacgcacaatgnacatgatcattacatcgtgtcattacacaggcactcatgcatcgattacacataggagtnnngattcgatggactagcttaatgaannngattagccgatgatcgggtccaggacgccnntgttcttgaggtcgaggacgacgccgacgcccatgatgtgactgacggcgccgcaggccagcgtgtcggcgagcgttgacccggcggggtcgccggtctgcaggccggagtcgcgcgcctncagcttcagccccgccgtcgacttcctgttttgcgaccgcgccagcccgaac

SEQ ID NO: 397421 - DNA, 340 bp, Oryza sativa nipponbare
  unsure (1)..(340): unsure at all n locations
ccaaacagatgtggccatcatatatgtatatgtagcacagtttgattcctctttgctagtcaaaagatggtatcatcaatcaataatagttacagtattgattccatggagtagtaggattacaacaattaaggacgatgaagagaaaggggtggctggtgatccacatagagaggcaaagcagggggtggcttagttacaacttacaaacgaagctctgatcgatcaagtctgatttgattgatgcanctgaagaagaagaggaagaagacgacgatgatgatgcaatcagctgctgacgtacttgtcaataatggtggcaggggtggttttggggacg

SEQ ID NO: 397422 - DNA, 364 bp, Oryza sativa nipponbare
  unsure (1)..(364): unsure at all n locations
taactaagaccagtttgatttcgtgtttgatacaaaaattaagatggacggattcacaagagagcaccctctacttaagctttacattacaaggccaaccagcagctncctgccggtcgaccactgcgtgcgcacgcgcgcgcaataattaaccaatcacacacagnncgcacgcacataagaaccacccatagccttcacgtacgcccggacgcacgcaccggttcgtgccaagctcaagggtagatggttctcgggatgatgatgtcgccgatgttgttgtgccacgggtccgagaggtggctggccaggttctccagtgggccggtgcccgggtacgccgactgttggcgcagaaacccac

SEQ ID NO: 397423 - DNA, 306 bp, Oryza sativa nipponbare
  unsure (1)..(306): unsure at all n locations
acaatgtcctctccgcttgtcgaaatgcaaatagcgggagctgtggatatgancatgaggtcacgagaacagaggaaggaacaaaggcttaaaattnnaaccataaacaggccgatcgagtttgcattactagatacacacattgcagccttccttncctntctcgaagagatggatatatcaacccggccacgcacaaaagatttgttcattccctactcgagctgcgcgatagtaagccccttggatcttgacatccttgggcaccttggcgccgaggtctgtgtccgacggctgcacgctctc

SEQ ID NO: 397424 - DNA, 298 bp, Oryza sativa nipponbare
  unsure (1)..(298): unsure at all n locations
ttgaatcatacgtaagtgctngctgatacaatatcaacatggggggggcattgccggttccatatgaacggacataaaaacacggaggccccatatggccataannccgatcctagcctagcttggctaggncatagtcaatagcagtttgggtcaacgttgtnnnctnntccgaacagggggggctcttgatcttggctgcatggtagagcccgncaatggtggcgaagagcttgcctatgaggtcctngaggcccttcttctctntcttnncctttgagttgatgacggttttgag

SEQ ID NO: 397425 - DNA, 328 bp, Oryza sativa nipponbare
tgaccttggagaggatcttggagttgacgttggggagcgggatgccgttgtcggtgcagtcgtcctcgatcatgtggcggatcgtctgcgactccatcgtcaccgtctcctccacctcgaactcctccccgtcggagctcttcagggtgatcatcttcttctctaccttagagcgccatcgatcgagccctccgaaatcgctcgcggtctcggtcgtcgccgaggaggagaattgcacgaaaccctagctttcgcagcggcggcgatggggattgcggcgagcggacgcgtgggcggacgcgtgggcggacgcgtgggtcgacccggg

SEQ ID NO: 397426 - DNA, 362 bp, Oryza sativa nipponbare
ccacgcgtccggcgaggagcgccggcgatggaggtgaagtgccgtcggctggaggggaaggtagccgtcgtgacggcctccacgcagggcatcggtctcgccatcgccgagcgcctcggcctcgagggcgccgccgtcgtcatctcctcccgcaagaagaagaacgtcgacgaggcggtcgtgggcctcagggcgaaggggatcaccgtcgtcggggtggtctgccatgtctccatcccggagcagcgcaagaacctcattgacacggcggtcaagaattttgggcatatcgacatagttggtttcaatgctagtgcctattctttcggtgattacatattagaaaatgatgagtctttcct

SEQ ID NO: 397427 - DNA, 411 bp, Oryza sativa nipponbare
ccacgcgtccgccaagcccatggttgtggagaccttctctgagtaccctcctcttggtcgttttgccgtgcgtgacatgaggcaaacggtggctgttggcgtcatcaagaacgtggagaagaaggacccaaccggtgccaaggtgaccaaggctgccgccaagaagaaatgatcctcgttcaagtggtagttttgtgcacggccatggcactcgttgcattgaccgttattatcatatgctcgctgtgtgcactgtgtcgtttaaaactctctattttctgttcggtttaaacttgttctgagcctgattattgcccttcggctgttgtggaatgcgggtatttacattgctaattcctatgtctttattttggcttgtggcattcgcttgttctactgctattgaaaact

SEQ ID NO: 397428 - DNA, 411 bp, Oryza sativa nipponbare
ccacgcgtccgatcagagatcaggtagaacagtgagagtgaggtgcagaaaaatttgagctgaagctgaggatggcaacatccatgatcacctcgccgctggtggcgccggcccgggccaagggccttccgtccatctcccgccggggatcctccttcgccatcgtctgcagcggtgggaagaagatcaagaccgacaagccctacgggattggaggtggcatgtcagtcgatattgatgcatctggcaggaagagcacggggaagggtgtgtaccaattcgttgacaagtacggcgcaaacgtcgacggctacagcccaatctactcgccggaggaatggtctcccaccggtgacacctacgttggtggaaccaccgggcttctgatctgggccgtgaccctcgccgggc

SEQ ID NO: 397429 - DNA, 418 bp, Oryza sativa nipponbare
cgctacgacccacgcgtgttgtctgcccacactcctttcttcaccttagctctgaattttatgttgttttacaaaggtgactatgtttgtgcctctggaacatagctaactcatctcatctgtttcattttggcaggtccctgatagcagcttacttgttggtcctgaatggttacaagaatgtgttccatctggatggaggactctacacatggttcaaggaaggcctaccggctgttgaaggagaagaataagcaattaggacatattacttgtaattagtgcatcagtattcatgaacatggaggtgtgatgagttgtaacgaggcatcttctcggataaatagtgcactaattggatccctttctttttctttcccaaaaggatatgcgctcttttaccattttgctatttgat

SEQ ID NO: 397430 - DNA, 320 bp, Oryza sativa nipponbare
ccacgcgtccgcccacgcgtccgatcaaaagcacacccaagagagagtagtggtagttccagagcggtctgcttgcgaagttgcgatgcctgccatggccaagcccgcctcccgcgctgccaagcccgcgtcggcgccgaagaagcagaaggcaaagccctccgccgccgccggtggctcctcccacccgccttatttcgagatgatcaaggaggcgatcacggtgcttaaggagaggaccggctcgagcgcgcacgccatcgccaagtacatggaggagaagcacggggcgtcgctgccggccaactacaagaagatgc

SEQ ID NO: 397431 - DNA, 348 bp, Oryza sativa nipponbare
ccacgcgtccgccacgcgtccgcccacgcgtccgcccacgcgtccgtacatgtataggtaccaaaaacctaacaaacctcaagaagacatttatcatgcatatgcatccatgcatgaacatgagaaaaatgttttcatcctcgagaaaatatcccttcgatttttacatgtcatctaaatagttattaatttttttttaaaaaaataagataggttaatataaaatatatcactctcatgtacatatatgataatctcgtgtacatgtagaggtgaccaagggttctgcagcgaggagtgccggtggcagcagatcgccgtcgacgaggcgcgggagcgggaggcggt

SEQ ID NO: 397432 - DNA, 408 bp, Oryza sativa nipponbare
ccacgcgtccgcccacgcgtccggcgctcgcggcgtcccgcattccggccaccgcccggctgcacagcaaggcggcgtccaagcagagggtggacttcgccgacttctccggactgaggccgggatcgtgctccatcagccacgccgcgagggaggcgtccttctccgatgtccttggctcgcagctcgtcgccagggctaccggagagaacgccgtgagggcgccggctgaggcgaagctcaaggttgccatcaacggcttcggccgcattggccgcaacttcctccggtgctggcacgaacgcgagaactccccgctcgaggtcgtcgtcgtcaacgacagcggaggcgtcaggaacgcatcacaccttcttaagtacgactcgatgctcggcacctttaaggccg

SEQ ID NO: 397433 - DNA, 316 bp, Oryza sativa nipponbare
ccacgcgtccgcagaagagaggtctgccccgtggtcaagccgtgccgcgtcgtcgtctccctcgcctttcccctccgctccgcttcgccgatcaagcttgcattgagacaaagaaatcagctttcatctgtttgagaccaatcaaactcaactagcaaatttcatgtctgatctcgacgtccagcttccatcagcttttgatccgtttgcggaagccaatgctgaggactccagcgttggtgctggatcaaaggactatgtacacgtgcgcattcagcagcgcaacggaagaaagagtctgactactgttcagggc

SEQ ID NO: 397434 - DNA, 140 bp, Oryza sativa nipponbare
ccacgcgtccgcccacgcgtccgcggcgcgtgggcgaactgcgtacgttaattatattgctaaatatgagtattatattagtgtcctcatgagttgtctattttttcctctgcaagttagatgtatcaattaattttgcg

SEQ ID NO: 397435 - DNA, 57 bp, Oryza sativa nipponbare
ccacgcgtccgagcaaagaagagagagcttggtgagctgcagagatggccccctccg

SEQ ID NO: 397436 - DNA, 252 bp, Oryza sativa nipponbare
ccacgcgtccgctcgcacttatagcaacgcgaacacctgcctttagtggagcacactcggcaaatcttctaaatgaaccagccatattagcggcccgacgtggtcggacagcaatttcctcaaaggagattgatgattcaattgacagaatagtggctggtatggaaggaactgtgatgacagatgggaagagcgcggcgtcttgttgcttaccatgaagatgggcatgcaattcgaggaactttgactcct

SEQ ID NO: 397437 - DNA, 421 bp, Oryza sativa nipponbare
ccacgcgtccgcccacgcgtccgacgtcttgtccgctctcatcacatttgtgtttgctgaggtcctcgaaggagtgaacctgtcgttgctttcacgagtaatgtcgtcgaggctcgcgcgaggaacctacaacggcggcctcctgtcgacagaggccgggacgctggcccgtgtagttgcagacgcgacgattaccgcggcgggttatctaggcccggacctcctgctcaacatcactctgctgccacctcttgtcatctgcatagcctccctcgttgcaacattctgcacatacaacaccctgtactaaggaagttgcctctctctgcacactgtagagccggttaaactttattcatgctcacattgggttgtattttacatgtatctgcatgcggtagcattctttgtttgtacaagt

SEQ ID NO: 397438 - DNA, 416 bp, Oryza sativa nipponbare
ccacgcgtccgcccacgcgtccgctcgaaatcaaaagcacacccaagagagagtagtggtagttccagagcggtctgcttgcgaagttgcgatgcctgccatggccaagcccgcctcccgcgctgccaagcccgcgtcggcgccgaagaagcagaaggcaaagccctccgccgccgccggtggctcctcccacccgccttatttcgagatgatcaaggaggcgatcacggtgcttaaggagaggaccggctcgagcgcgcacgccatcgccaagtacatggaggagaagcacggggcgtcgctgccggccaactacaagaagatgctctccatccagctgcgcgggttcgcttccaagggcaagctcgtcaaggttaaggcctcctacaagctctccgacgccgccaaggactcgc

SEQ ID NO: 397439 - DNA, 332 bp, Oryza sativa nipponbare
ccacgcgtccgcccacgcgtccgcccacgcgtccgctccttcctcccctccgcgctctccgcccgcaaggagggagcggtgaaggactcggcgttcttgggcgttcgtctcggcgacgggctcaagctggagaccagtgctctcggccttcgcaccaagagggtgagcacgtcgtcggtggccatccgcgcgcaggcgtcggcggcggtgtcgtccccgacggtgacgccggcgtcgccgtcgggcaagcagacgctgcgcaagggcacggcggtcatcaccggcgcgtcgtccgggcttggcctcgcgacggcgaaggcgctggcggagac

SEQ ID NO: 397440 - DNA, 422 bp, Oryza sativa nipponbare
ccacgcgtccgcccacgcgtccgcacggtaccctcctctctcctcctccgaccaccatggccatggccacgcaagcctccgccgccaagtgccacctcctcgccgcctgggcaccggcgaagccgcgctcatccaccctctccatgcccacctcgagggcacccacctccctcagagcggcggcggaggatcagcccgccgcggcggcgacggaggagaagaagccagcccccgcggggttcgtgccgccgcagctggaccccaacacgccgtccccgatcttcggcgggagcacggggggactcctccggaaggcgcaggtggaggagttctacgtcatcacatggacgttgcccaaggagcaggtgttcgagatgcccacgggcggcgccgtcattatgcgcgaggggcccaacctgctg

SEQ ID NO: 397441 - DNA, 406 bp, Oryza sativa nipponbare
ccacgcgtccgcctttctgaacacagcaccaccccttctgctgcatctcccacctccctctgaattgtgggcctgaggcgatggcggcgctcgccccgtccaagatgctcggcacccggctcaacttcgccggctcctcccgctacgccaccgcggcaccgaccaccggagcgcagaagatcgtctccctcttcagcaagaagcccgccccgaagcccaagcccgccgccgtcacctcctcgagccccgacatcggcgatgagctcgccaagtggtacggccctgacaggaggatcttcttgccggagggtctcctggaccgctcagaggtgccggactacctcaacggagaggtccccggagactacggctacgacccttttggcctcagcaagaagccagagga

SEQ ID NO: 397442 - DNA, 417 bp, Oryza sativa nipponbare
ccacgcgtccgctaatcatagcaattctaaatgatggtaccatcatgactatatcaaaggatcgggtaaaaccatctccactacctgacagctggaagctggctgagatttttacaactggagttgtcctcggtggatacttggcaatgatgacagtaatcttcttctgggctgcatataagacagactttttcccgagaatatttcatgttgaaagccttgagaagacagctcaagatgatttccaaaaacttgcctctgctgtttacctccaagttagcaccatcagccaagctctcatctttgtcacaaggtcccgcagctggtcatttgttgagcgccctggatttctgctggtctttgctttcttggttgcacagctgattgctacactgattgctgtgtatgctgactggg

SEQ ID NO: 397443 - DNA, 399 bp, Oryza sativa nipponbare
ccacgcgtccgcaaatcttttgcatattcacgataatgaagcttttgattttactacaatatgtgttctgtaaacaaatattaatttgccttgagtttgattattactggagtcatatgtactgtgtactgtgtaaatatgggggtgcagatgagctgatcaagacggccaagtacatcgcgacgccggggaagggcatcctcgccgccgacgagtcgacgggcaccatcggcaagcgcctggccagcatcaacgtggagaacgtggagcccaaccgccaggcgctccgggagcttctttttacgacgcccggcgcgttccagtaccttttcggcgtcatccttttcgaggagacgctctaccagagcaacgggcgcggcacgccgttcggtgacgtgc

SEQ ID NO: 397444 - DNA, 423 bp, Oryza sativa nipponbare
ccacgcgtccgcccacgcgtccgagaaagcataagcaacacaagggattaactcatcactcacttagctaattaaatcttcgaccatgtcggacaagtgcggcaactgcgactgtgctgacaagagccagtgcgtgaagaaaggtaccagctatggcgtcgtcatagttgaagccgagaagagccacttcgaggaggtcgccgccggcgaggagaacggcggctgcaagtgcggcaccagctgctcctgcaccgactgcaagtgcggcaagtgaagtcacgaagcaaccgaacactcgccgccggcgagtcacctaccttaattagtccacaataaaaaccacccatatgagtgtggtttgtgtgtgtgctgattattgctgaattaaacccgtgtgttatcgattaattaagcagctggtcg

SEQ ID NO: 397445 - DNA, 276 bp, Oryza sativa nipponbare
ccacgcgtccgacggcgcgttcgacggctgcgtggagttccgcgaggtgctcgccgcggaggagctcgacgccgacgccgacgtccaccccgacgacgtcgtctccctcccctactcctccggcaccaccggcctccccaagggcgtcatgctcacccaccgtagcctcatcaccagcgtctcccagcttgtggatggagagatccctaacctgtacttcagtaaggatgatgttatactatgcctgctgccacttgttccacatctactttgctc

SEQ ID NO: 397446 - DNA, 147 bp, Oryza sativa nipponbare
ccacgcgtccgggcggacccggcgccgcatagcgggaggatcgtggcgaggttcgggttcggcggcgggaagaaggcggcggcgaagaaggcggcgaggccgtcggcgccgacgacggacaggccgttgtggttccccggcgcggtg

SEQ ID NO: 397447 - DNA, 417 bp, Oryza sativa nipponbare
ccacgcgtccgcggacgcgtgggagaagacccaaatgtggagccacctgacctgagtgtggacaggatgatgatgaggcagcaggtgagggacttcctggggatcctgagccccagggagaaggagatcatcgagcaccggttcgggatccacgatggcgagccgaagacgctacatgtcatcggggacatgtttgggctgtccaaggagaggatcaggcagctgcagaaccgggcgctggagaagctcaagaggagtgcatccttgcaggggtttgatgtctactttgatttgctaacctgaagaagaaaggccaagcagctcatttggtttcagaaactttcagtcaagttgtccatacaaaacagcagaaacacatacacactgtagctttctagacctattatacatatatac

SEQ ID NO: 397448 - DNA, 417 bp, Oryza sativa nipponbare
ccacgcgtccgcaaaaaaccaacccaaccgccgccgcatcgccctcgttagaacgatggccgcgtcggcgctgcaccagaccaccagcttcctcggcaccgcccctcgccgggatgagctcgtccgccgcgtcggcgactccggtggccgcatcaccatgcgccgcaccgtcaagagcgcgccccagagcatctggtatggacctgaccgtcccaagtacctgggcccgttctcggagcagacgccatcgtacctgaccggagagttcccgggagactacgggtgggacacggcggggctatcggccgacccggagacgttcgcgaggaacagggagctggaggtgatccactcgcggtgggcgatgctgggggcgctgggctgcgtcttcccggagatcctgtccaagaacggggt

SEQ ID NO: 397449 - DNA, 387 bp, Oryza sativa nipponbare
cgtccgcccacgcgtccgtgcaggttggctgtgaagagtaagggcgcggagaagcccgccgccaagggcaggaaggggaaggccggcaaggaccccaacaagcccaagagggctccctccgctttcttcgtttttatggaggagttccgtaaggagttcaaggagaagaaccccaagaataaatctgtcgctgctgtaagtttttcttttttgtttcccctctcgttcgtaaataaaaactccactactagagtctctggcttacaattacaattattattattagttgcaccgcttattagatgttgtatcatgattcgtggattttattttttcaaaacaaaaaactcaggtaggaaaagcagccggtgataggtggaaatccct

SEQ ID NO: 397450 - DNA, 327 bp, Oryza sativa nipponbare
ccacgcgtccggggccacccacctcagcgacccgctccacaccaccatcttcgacaccttctcctcatgctcttaatttaagctctttcgcgcgcaattcaaacgggatcgatgcgttggtgtgcgttcgcgcgcgctgtttagttttgtgatgacgagcgagctgggagggtatggagagaggagaggtcatccttttgttgattactacttaaattaggaaagctgggttggtggttaatggcgacttgcatggtggtgatttgtaatataagaacacccaagatgatgaattaatgcatccacttgtacatcgatcgatcgaaa

SEQ ID NO: 397451 - DNA, 418 bp, Oryza sativa nipponbare
cccacgcgtccgcccacgcgtccggattgagggcattaagaagttcgagactctgtcgtacttgccgccattgacagtggaggaccttttgaagcagatcgagtacctgctccgatctaagtgggtgccttgcttggagttcagcaaggtcggattcgtctaccgtgagaatcacagatcacccggatactatgacggtaggtactggaccatgtggaaactgcccatgtttggatgcaccgatgccacccaagtgctcaaggagctcgaggaggcaaagaaggcataccctgatgccttcgttcgcatcattggctttgacaacgttaggcaggtgcagttaatcagcttcatcgcgtataagccaccgggttgcgaggagtcaggcggaacttaacgctttcgttccttcgtgcat

SEQ ID NO: 397452 - DNA, 424 bp, Oryza sativa nipponbare
ccacgcgtccgaaagcataagcaacacaagggattaactcatcactcacttagctaattaaatcttcgaccatgtcggacaagtgcggcaactgcgactgtgctgacaagagccagtgcgtgaagaaaggtaccagctatggcgtcgtcatagttgaagccgagaagagccacttcgaggaggtcgccgccggcgaggagaacggcggctgcaagtgcggcaccagctgctcctgcaccgactgcaagtgcggcaagtgaagtcacgaagcaaccgaacactcgccgccggcgagtcacctaccttaattagtccacaataaaaaccacccatatgagtgtggtttgtgtgtgtgctgattattgctgaattaaacccgtgtgttatcgattaattaagcagctggtcgcttcggcgactatgc

SEQ ID NO: 397453 - DNA, 419 bp, Oryza sativa nipponbare
ccacgcgtccgcccacgcgtccgcccacgcgtccgcccacgcgtccggtgccttaccacgacagggtggcatcgaagctgaactgggagatgggccacctaggttactgacgtactcacttacagctgcagcaaattgccagacagcaatggcgatcgatcgatcagaagacgtaggaggaggaggaagaagaagaagaagaatcaagtcgatcgactcatcatcaagaagctgggaaagatttggttgatgcagctagaaagccaagaacgagagtgtggcgtgcgtgcgtccattttgtatatgtttgcttcgatcaggggcagcttgaatactgtagtaacttggatgcttgatgtcctcttgatcttctacctagctaccgagataagaactagtagtagtagtagtagtagtag

SEQ ID NO: 397454 - DNA, 406 bp, Oryza sativa nipponbare
ccacgcgtccgaagaaagcataagcaacacaagggattaactcatcactcacttagctaattaaatcttcgaccatgtcggacaagtgcggcaactgcgactgtgctgacaagagccagtgcgtgaagaaaggtaccagctatggcgtcgtcatagttgaagccgagaagagccacttcgaggaggtcgccgccggcgaggagaacggcggctgcaagtgcggcaccagctgctcctgcaccgactgcaagtgcggcaagtgaagtcacgaagcaaccgaacactcgccgccggcgagtcacctaccttaattagtccacaataaaaaccacccatatgagtgtggtttgtgtgtgtgctgattattgctgaattaaacccgtgtgttatcgattaattaagcagc

SEQ ID NO: 397455 - DNA, 418 bp, Oryza sativa nipponbare
ccacgcgtccgcccacgcgtccggctgctagcagtgtcgttggattgtcggccgtgttgcccgctgctgtgaaggggcgcagcctgcagattcaggctcctcgccgtgttgcgttgcgcgttcgtgcggcggcggcggcggtggcagtggaggctgcggaggtggactacagctctaacatctcggtgtttccgatggaggcgtgcgacctcatcggcggcgaggcgtgcaacgtgcagatgtacccagaggccaagctctcatcatcggctgctgttgctgtttctcgtgcggcggcggaggaagtcgacagggactacctatcctacgacgagcccaccacggtgttccccgaggaggcgtgcgacgatctgggcggagagttctgcaaggccacctgatcccattcccatccatg

SEQ ID NO: 397456 - DNA, 331 bp, Oryza sativa nipponbare
cgacccacgcgtccgtacccaatcgccgcctaatctccctcgatagatcgatggccgcgtcggcgcgggaccagaccaccagctgtctgcggcaccgccccttgccgggatgagctcgtccgccgcgatcgcgactccggtggccgcatcaccatgcgccgcaccgtcatgagcgcgccccagagcatctggtatggaccagaccgtcccaagttcctgggccctgctttcggggcagactccttttcacctgtccggagagtttccggtagacttcggttgggacacggcggttgctaccggcctacctggagacgtcttgcttggatca

SEQ ID NO: 397457 - DNA, 419 bp, Oryza sativa nipponbare
ccacgcgtccggatccatcgacgcgcgagcgctttgcttagattccttcgtcgccggcgaatccgtccccttcgcgccgcccgcaatggcgaatgcagcatctgggatggctgtggacgatgagtgcaagctcaagttcctggagctgaaggcaaagaggacctaccgcttcatcatttacaagatagacgagaagaagaagatggttgtcgtggagaaggttggcgagcccgtactgaactacgacgattttgccgctagcctccctgccaacgaatgcagatacgccatattcgactacgatttcgtgaccgaggagaactgccagaagagcaagatattcttcattgcatggtctcctgatacatcgcgcgtgagaagcaagatgatctacgcgagctccaaggacaggttcaaga

SEQ ID NO: 397458 - DNA, 416 bp, Oryza sativa nipponbare
ccacgcgtccgggcggccacggctgtgaccctgccgtcctcgccggcccccttccccgtcaccaccaccggctgcttctcccgtaacgtccgcctcctcctccgctccccgcctcctcgccgagccctccgcgtcgccgcctccgccgcggccgacgcgccacccaagccggcgccgccgccgacctcgccttcgggcatcgtcctcgtcgaccccaccgaggcacagaaggtgcaccgcctcaaggctgtatacgaccagaaggtggtccccctcatcaccgaggagttcggctacaccaatgtccaccaggtgcccaaggttgagaagattgtagtgaattgcgggttgggggctgaagccggtaacttcaaggggctcgaattccgcatgaaggacccttgcatgatcaccgg

SEQ ID NO: 397459 - DNA, 419 bp, Oryza sativa nipponbare
ccacgcgtccgacctcaccaagcagaaagctagagagctagcaatggcgcccaccgtgatggcctcgtcggccacctccgttgctcccttccaggggctcaaatccaccgccgggctccccgtcagccgccgctccaacagcgccggcctcggcagcgtcagcaacggtggaaggatcagctgtatgcaggtgtggccgattgaaggcatcaagaagtttgagaccctgtcgtacctgccaccgctcacggtcgaggacctcttgaagcagatcgagtacctgctccggtccaaatgggtgccttgcctcgagtttagtaaggtcgggttcgtctaccgtgagaaccacaggtctcctgggtactatgatggcaggtactggaccatgtggaagctgcctatgttcggatgcactgatg

SEQ ID NO: 397460 - DNA, 382 bp, Oryza sativa nipponbare
ccacgcgtccgcacaagaaagcataagcaacacaagggattaactcatcactcacttagctaattaaatcttcgaccatgtcggacaagtgcggcaactgcgactgtgctgacaagagccagtgcgtgaagaaaggtaccagctatggcgtcgtcatagttgaagccgagaagagccacttcgaggaggtcgccgccggcgaggagaacggctgctgcaagtgcggcaccagctgctcctgcaccgactgcaagtgcggcaagtgaagtcacgaagcaaccgaacactcgccgccggcgagtcacctaccttaattagtccacaataaaaaccacccatatgagtgtggtttgtgtgtgtgctgatttattgcttaattaaa

SEQ ID NO: 397461 - DNA, 423 bp, Oryza sativa nipponbare
ccacgcgtccggctatgagaatgactgggatgtggtcaaacgtgggtgggatgcccaggtgcttggcgaagcaccctacaaattccaaaatgcagtcgaagcagtgaaaactctaagagcagagaccaaggctagtgatcagtatttgcctccatttgtgatcgtggatgagagtggcaaatctgttgggcctgttgtagatggtgatgcagttgtgactttcaatttccgagcggatcgtatggttatgcttgccaaagcactagagtatgcagactttgacaaatttgatcgtgttcgtgtaccaaaaatccggtacgctgggatgcttcagtatgatggtgagttgaagcttccgagccattaccttgtctccccaccagagatagagagaacatctggtgaatacttggtaaagaatgg

SEQ ID NO: 397462 - DNA, 424 bp, Oryza sativa nipponbare
ccacgcgtccggggcattgatggagtaaagaaggagcgacaagcagtcaggtctaaaattaaggtcctggaggatgagctaaaggctattgacatggagatgggttcgcttcaagaagatttaactgctgccaatgccagaaaggacaaggcacatgaatcattggtccaattgagacatgcacgagatgcctataacgcatcattccatcaaaaccgccaacttctgagcaaagctagggatcttgcttctaggagtgagcttgcacaagtgcaagagctctacaagacacaggttgacaaattcgtggcagaatggtgcaacagcaaggccttcagagaggactacgagaaaaggatcctctcctccctcaacagtcgacagcttagccgagatggccggatgaggaatcctgatgagaaac

SEQ ID NO: 397463 - DNA, 417 bp, Oryza sativa nipponbare
gacccacgcgtccgcggacgcgtgggtggttgtctctacattggcacaggatgcttccacagaagagagatcctttgtggtaggatattcagcaaagactacaaggaaaactggaacagaggaataaaggaaagaggaaaagagaacataaatgagattgaggagaaggcaacatctttagtaacttgcacttatgagcataggacacagtggggtaatgacattggagtgaaatacggtttcccggcagaggatatcattactggattggcaatacattgcagaggatgggagtcagccttcataaattctaaaagagcagcatttttgggtttagcctcatcaacacttgcccagaatatactgcaacataagagatggagtgagggtaatctcacattttttcttcgaagtact

SEQ ID NO: 397464 - DNA, 413 bp, Oryza sativa nipponbare
ccacgcgttcgatttctcttgagaccgtagagagagagagaggcgccaaccatggccggcatcatccacaagatcgaggagaagctccacatgggcggaggctagcacaagaaggaagacgagcacatgaaggagggggagcaccacaagaaggacggggagcacaaggaaggcgtggtggagaagatcaaggacaagatcaccggcgaccacggtgacggttgctagcacaaggagaagaaggacatgaagaataagaaggagaagaagcacggctaggtgggtcaccaccacgacggtcacagtagcagcagcagtgacagcgactgagccggcgcgcccccacaccggctccttgcgtgcgttcatgcaggttgatgcttcagatgattggaggatttcgtatcaggatt

SEQ ID NO: 397465 - DNA, 421 bp, Oryza sativa nipponbare
ccacgcgtccgcagcagcagcagcagtagctgagcttgaagcagcagagcgaggtagacatggccgccgccaccatggccctctcgtccccggcgctggccggcaaggccgccgcgaaggtgttcggcgaggggcgcatcaccatgcgcaagtcggcggcgaagcccaagcccgccgcgtcggggagcccgtggtacggcgccgaccgcgtgctctacctcggcccgctctccggcgagccgccgagctacctgaccggcgagttccccggcgactacgggtgggacaccgcggggctctccgccgacccggagacgttcgccaagaaccgggagctggaggtgatccactccaggtgggcgatgctcggcgcgctgggctgcgtgttcccggagctcctcgcccgcaacggcgtcaagtt

SEQ ID NO: 397466 - DNA, 425 bp, Oryza sativa nipponbare
ccacgcgtccgcccacgcgtccgcccacgcgtccgctgagctgaacaccgcatcagcagcagcaagcagctaatcgcgcacgtacgcacaccgcgacccggggcgagatggcgcagtcgatgctggtgtcgggagccaatggcacggtggccgccgcgagcaccagcaggctgcagcccgtgcggccgacgccgttctcgcggcagcttcgtcgacgaccagccggtgacgggcctcgacaaggccgtcatcgccccgggcaagggcttccgctccgcgctgggcctcagcgagggcggcccgctgttcggcttcaccaaggccaacgagctgttcgtcggccggctcgcgcagctcggcatcgccttctccatcatcggcgagatcatcaccggcaagggcgccctcgcgcagctcaacatcga

SEQ ID NO: 397467 - DNA, 421 bp, Oryza sativa nipponbare
ccacgcgtccggctcgtctccgcctcctcctccaccaccgccgtcgcggcgctccccggcgccgccagggcctccggcttcctcggcggcgccggcaggagcggcaggctgctgctgaggcaggccgagtcgtcgtccgcgcgggcgtggttcgccgtgcgcgccgaggctcccgacaggccaatctgggtccccggcagcaccccgccgccgtggctcgacggcagcctccccggcgacttcggcttcaaccccctggggctcggatcggacccggagagcttgcggtggaacgggcaagcggagctggtgcactgccggtgggcgatgctgggcgcggcgggcatcttcattccggagttcctgactaaagatcgggatcctcaacacgccggctgggttcacccgcggcgagcaggaa

SEQ ID NO: 397468 - DNA, 415 bp, Oryza sativa nipponbare
ccacgcgtccgactactactagccagtaagctagctaactaactacgtggctatggcccccaccgtgatggcctgctcggccacctccgtggctccattccaagggctcaagtccaccgccgggctccccgtcagccgtcgctccaccaactcgggcttcggcaacgtcagcaatggcggaaggatcaagtgcatgcaggtgtggccaattgagggcatcaagaagttcgagaccctatcgtacctgccaccactcaccgcgggggatcttttgaagcagatcgagtacctgcttcgatccaagtgggggccttgccttgagttcagcaaggttggattcgtctaccgtgagaaccacaggtctcccggtttctacgctggcaggctttggaccatgtggaagctgcccatgttc

SEQ ID NO: 397469 - DNA, 421 bp, Oryza sativa nipponbare
ccacgcgtccgcccacgcgtccgaaaagaaagcagaggccagggaagagccaggtagagccgagagagggtccacgactgacatggccgccacggcgtgctccacggcgcctcttctcggtggagctcgcctccccgccgtcggcgccgccttgccgccgccctccgttctcctcctcccccagcgcaacttcccctctcctctccgcctccatgacgcaccgaggctatctctgctccgggcgagggcgtcgtccgacgacacctcgttctccgccgtgaccggcgacgagctcatcgaagacctgaaagctaagtgggacgccgttgagaacaagtccaccgtcctcacgtacgccggcggcgccatcatcgtcctctggctgtcgttcgtcatcgtctgcgccgttaactccgtgcct

SEQ ID NO: 397470 - DNA, 418 bp, Oryza sativa nipponbare
ccacgcgtccggcaccaggacacgtgacaccaacctgttggggaagtgtgagctctctgtaatgcctcctgctcccaggggtgttgcacacatcactgtttgcttcgacattgatgccaatggtatactgaacgtgtctgctgaggacaagaccaccgctcagaagaacaagatcaccattaccaacgacaagggcaggcttagcaaggtggagattgagaagatggtccaggaggccgagaagtacaagtcagaggatgaggagcacacgaagaaggtggagtccaagaacgcgctggagaactacgcctacaacatgcgcaacaccatcaaggatgagaagatcgcctcgaagcttccggaagcggacaagaagaagatcgaggatgccattgaccaggccatccagtggctggac

SEQ ID NO: 397471 - DNA, 290 bp, Oryza sativa nipponbare
ccacgcgtccgagccggcgcacctgttcctcgacgagctcggcgtcgcgtacgacgagcaggaggactacgtcgtcatcaagcacgccgcgctcttcacctccaccgtcatgagccgcctcctggcgcgccccaacgtgaagctgttcaacgccgtcgccgtcgaggacctcatcgtcaaggagggccgcgtcggcggcgtggtcaccaactgggcgctggtgtcgatgaaccacgacacgcagtggtgcatggaccccaacgtgatggagtccaacgtgggggggagct

SEQ ID NO: 397472 - DNA, 405 bp, Oryza sativa nipponbare
ccacgcgtccgcaccacaccactcgaatcgaatccaccacacggtaccctcctctctcctcctccgaccaccatggccatggccacgcaagcctccgccgccaagtgccacctcctcgccgcctgggcaccggcgaagccgcgctcatccaccctctccatgcccacctcgagggcacccacctccctcagagcggcggcggaggatcagcccgccgcggcggcgacggaggagaagaagccagcccccgcggggttcgtgccgccgcagctggaccccaacacgccgtccccgatcttcggcgggagcacggggggactccttcggaaggtgcaggtggaggagttctacgttatcacatggacgtctcccaaggagcaggtgtttgagatgcccacgggcggt

SEQ ID NO: 397473 - DNA, 423 bp, Oryza sativa nipponbare
ccacgcgtccggagctccccaatcagtgttgctgatcgtgctcctaatgttgttgcaatcaatgtaagcccaattgaatatggccatgttcttctcattccccgtgtactggaccgcctgcctcagaggattgaccaggagagcttcttgcttgcactgcacatggctgctgaagccgcaagcccatacttcaggcttggctataatagtttgggtgcctttgcaaccatcaaccacctccactttcaggcatactacttgacagtgcctttccctgttgagaaggcagctaccaagaggattttccttgctgagggcacaatgaatagtggagtaaaggtgtccaagctgatgaactaccctgtgaggggactggtttttgagggaggcaactcactgagcgatctggccaatgtggtttcc

SEQ ID NO: 397474 - DNA, 424 bp, Oryza sativa nipponbare
ccacgcgtccgctcaaagatgaaaaggatgtttattttgcctttggaagtgtccaggaccatggggccagtaaagccagtaagggaatgcacgcatcaaaattttgcctaaacattgcaggggacaccccttcttccaatcgcctgtttgacgctatagtaagtcattgcgtccctgttatcatcagtgacgacatcgagcttccttatgaagatgcattggactattcgaagttttctatctttgttcgctcatctgatgctgtaaaaaagggttacttgatgaggctgattagaggagtaagcaagcatcaatggacaaggatgtggaataggctgaaagaagtggataaacattttgagtattaatacccatcacagaaggatgatgcggtccaaatgatctggcaagcattggctagaaa

SEQ ID NO: 397475 - DNA, 424 bp, Oryza sativa nipponbare
ccacgcgtccggggaggaggtcattgttgaccttgttgggcagtgccgatcttatcaaggtcgagtcatggaccttgttagcaatactggtgatgagagccttctatttcaagctctcggtttaaatgatgaactgcagcgtgttcttcagcgtcatgatgacatcgcaaagggagtgcctcccggttcaggcccagctcctgctgctgctaatgtaaaccgaggaacagcccctcctaggcctactggggtttcattttccccacttcttaatgtgcaccatgaagacgatgagccagaagacgagttctctgttctttcccgcaggtctgcaagggatggcacagcagcacagggcaatctaccttctgctccaaaaagtgaaaggccttacccaagcccacttctttcttcgccaccatca

SEQ ID NO: 397476 - DNA, 390 bp, Oryza sativa nipponbare
cgggctgacgccgtgcaaggagtccaaggcgttcgcgaagcgggagaagcagtccatcaagaagctccagtcgtcgctcaagaagtacgcgccggactccgcgccggcgctcgccatcaacgccaccatcgagaagacgaagcgccgcttcgagaactacggcaagttcggcctgctctgcggcgccgacggcctcccgcacctcatcgtcagcggcgaccagcggcactggggcgagttcatcaccccgggcttgctcttcctctacatcgccggctggatcggctgggtcggcaggagctacctcatcgccatcagcggcgagaagaagccggccatgagggagatcatcaacgacgtcgagctcgccgtcaagctccttccgagggg

SEQ ID NO: 397477 - DNA, 226 bp, Oryza sativa nipponbare
ccacgcgtccggtgacgactaaggcggacaagacggtgggggtggaggtgatgtaaccccatgcgtgccgtgtctgatacgcttgcgatcgactcattctaccgtatcctttacgtttaattgatacacctttcagttgtggtaaatggcattgttaatgctttgttagactttgtttaaaacctctacgatgttttatcaaaactggatatggtatgataacatg

SEQ ID NO: 397478 - DNA, 428 bp, Oryza sativa nipponbare
agttccggggtcgacccacgcgtccgcccacgcgttcgatcaacactcctgttaaggggactcctcttacactggtcttgcttgggaagtccaaaaatgcgctgctctcgacttttttgttcctggaccaatttgtatggttgggaagaacagggatatacaagaacaaggagcgcacataccggattgtaaggatatccctctactgctggatggcctcttcagtctgtgcagggctagttgagcttggagagcttaagaggctatcaaaatcaatgaggaagctggcgagagagctgagggatactgacaaatatgagaatgaccagtacaagagcaagatgaaacagtcggatgaacggctgctagcactggtgaaggcggccatggatgttgtggtggccgtagggctttttcagctgtcaccc

SEQ ID NO: 397479 - DNA, 413 bp, Oryza sativa nipponbare
ccacgcgtccgcccacgcgtccgcccacgcgtccgcccacgcgtccggaaagcataagcaacacaagggattaactcatcactcacttagctaattaaatcttcgaccatgtcggacaagtgcggcaactgcgactgtgctgacaagagccagtgcgtgaagaaaggtaccagctatggcgtcgtcatagttgaagccgagaagagccacttcgaggaggtcgccgccggcgaggagaacggcggctgcaagtgcggcaccagctgctcctgcaccgactgcaagtgcggcaagtgaagtcacgaagcaaccgaacactcgccgccggcgagtcacctaccttaattagtccacaataaaaaccacccatatgagtgtggtttgtgtgtgtgctgattattgctgaattaaac

SEQ ID NO: 397480 - DNA, 399 bp, Oryza sativa nipponbare
ccacgcgtccggcttgttgagggtttgaagcgtctggcgaagtctgatcctatggtgctctgtactattgaggagtctggtgagcatatcattgctggtgctggagagcttcaccttgaaatttgcttgaaggatctgcaggaagatttcatgggtggtgctgaaatcattgtttccccacctgttgtttctttccgtgagactgtccttgagaagtcgtgccgtactgttatgagcaagtccccgaacaagcacaaccgtctctacatggaagctcgccccttggaggagggattggctgaggccattgatgacggtcgtattggcccacgtgatgatcccaaggtgcgctccaagatcctgtctgaggagttcggctgggacaaggatcttgcaaag

SEQ ID NO: 397481 - DNA, 386 bp, Oryza sativa nipponbare
ccacgcgtccggcaacaccaggtctgcgccatgactctaatacattattccagcattcaaaggagcattgcttgatgggcataaaaggaactgtccggcgcagcactgatgggcatattatccatgcaaatattgatactgatataataatagctgaggaacctactgatggttcaacaaaaaagccagaagacatgtataggatcatcgagcattttgctcttggaaggaggcgcctcgaactctttggtgaggaccataatatccgtccgggctggctaactcttgggaaaggcttatcttcatcaaacttccataaagaggcatacatcaagaacttcatggacagggatggaaaaatatggcagggaggcggcgggcggaat

SEQ ID NO: 397482 - DNA, 426 bp, Oryza sativa nipponbare
ccacgcgtccgattactacttttaccagattctcaaaaacaaggtggaagatctagcagttgctcgcggtaagaagggtctaggggatggtaccgttgggatgttctcctggcttggtattgcagctgttgctgggtcaatcaatgttcttcttaccaatccaatatgggttctcgtgactcgtatgcagacacatacgcaagcagaaaagaagatcatggagtctaaaaaggagcttttgctgaaggatgttgctagggccaattcaatagaggtctcaattcttaaggataggttgtataaacttgattctgaaaagcctcgtccatatgggacaattcaagcggtccgggaggtctaccgtgaatcacgcataagaggattctggaaaggacttattccgacactaattatggtatgtaatcc

SEQ ID NO: 397483 - DNA, 419 bp, Oryza sativa nipponbare
ccacgcgtccggccggcgatcctctacactgggatcgaccgccccaacatcaactaccaggtgcagaatatcgcatttcccaagaatgcgtcagacccgctccttcgtgagtgggtcaagccggcctacaacccggtggccacgccggagcctggtatgaacgcaacgcaattccgcgatccgacaacggcctggtacgccgacggtcattggcggatgctcgttggtggcctgaagggggctcgcctcggccttgcctacctctaccggagccgggacttcaagacatgggttcgggccaagcacccactccattcggcgctcactgggatgtgggagtgcccagacttctttccgttgcaagcaccaggtctccaggctggcctcgacacatctgtgccgagcagcaagtacgtgct

SEQ ID NO: 397484 - DNA, 397 bp, Oryza sativa nipponbare
ccacgcgtccgcggacgcgtgggcggacgcgtgggcgctggagcagcttcaaggtgcaaagaaagcagccaagtagaattatggctgtctggtgtcgtcaaatgtctccagtagaccagtctctacctctcctggagcatcctgatcgtgagacactttgataggagttaaaaacaggaactagagtgatgagggacttgatcagaggacaggctttctgaatccgtgagaacataatgtgtaatatatcttgctttttgtacagctagctgttgctcctttgctccaactgcgagcccgtggcttgtgttaaactgttgtgctaccttagcagtacacctcagaaacttcagttagtattgtcctcataaatgttttgaactgcttctcttggaac

SEQ ID NO: 397485 - DNA, 287 bp, Oryza sativa nipponbare
agcagaagaaaaggttcagtttttaataggagaaacagattacagttttcaatagcagtagaacaagcgaatgccacaagccaaaataaagacataggaattagcaatgtaaatacccgcattccacaacagccgaagggcaataatcaggctcagaacaagtttaaaccgaacagaaaatagagagttttaaacgacacagtgcacacagcgagcatatgataataacggtcaatgcaacgagtgccatggccgtgcacaaaactaccacttgaacgaggatcatt

SEQ ID NO: 397486 - DNA, 369 bp, Oryza sativa nipponbare
tatcatcatcatgcaagtacagtgttacatagattaatcacaatgcagtttgattaagcagtgggcatcatcacatcgcattcagaggaaggctatcttagattacagatgaatatgcagacacccagcttggtgttacatacatagactggatttgggtgaaatttagccggcgagggcgctggtgttgtagacgaggagggcgccgccgccgaggagcccggcgagggtcacggcccagatcagaaagcccgtggttccaccaacgtaggtgtcaccggtgggagaccattcctccggcgagtagattgggctgtagcccgtcacgtttgcgccgtacttgtcaacgaattgtacacacccttcccc

SEQ ID NO: 397487 - DNA, 207 bp, Oryza sativa nipponbare
  unsure (1)..(207): unsure at all n locations
aaaacaagactcgaaaagaaaaaaatcctgaagtctgtaccaaagttcagtattacacctcacagaaaatggcccgtgtctgcagctgtgtttcttcttcgacagtcatgcgttcctctgtcgaaggggaacaacgtacgggcagccaatccgagcacagtatatatagtatagcagttctgcccggngacagtcaatgtgtgtgct

SEQ ID NO: 397488 - DNA, 140 bp, Oryza sativa nipponbare
cgcaaaattaattgatacatctaactggcagaggaaaaaatagacaactcatgaggacactaatataatactcatatttagcaatataattaacgtacgcagttcgcccacgcgccgcggacgcgtgggcggacgcgtgg

SEQ ID NO: 397489 - DNA, 413 bp, Oryza sativa nipponbare
acagaagaacattttattgaactgtttaaggacttgtacaaacaaagaatgctaccgcatgcagatacatgtaaaatacaacccaatgtgagcatgaataaagtttaaccggctctacagtgtgcagagagaggcaacttccttagtacagggtgttgtatgtgcagaatgttgcaacgagggaggctatgcagatgacaagaggtggcagcagagtgatgttgagcaggaggtccgggcctagataacccgccgcggtaatcgtcgcgtctgcaactacacgggccagcgtcccggcctctgtcgacaggaggcccgccgttgtaggttcctcgcgcgagcctcgacgacattactcgtgaaagcaacgacaggttcactccttcgaggaccttagcaaacacaaatgtgat

SEQ ID NO: 397490 - DNA, 263 bp, Oryza sativa nipponbare
  unsure (1)..(263): unsure at all n locations
accaaacatatactacaatattataagaagagattatatccgaccatggatcgattacaccatcatcaataactgaagagcagcctgacagatgattaaaattacatgtccatccacccaaaacacangtaattaataggtcgattatgagagaagaagaagaagaagaagaagtctagatgtcgaagacgttcttgccggtgaacttgacctcgatggggctgacgttcttgccgatgctgcggaagttctggccgacgccc

SEQ ID NO: 397491 - DNA, 392 bp, Oryza sativa nipponbare
tttgatgaaaaccacttcgagacaatttactcaggtagcaaatatttctcagccacaaatccaaacacttggtccttcctatcagaagatcagaatgaacaggttttcaaattcatctcccaactcgacgataatttacacgtacatttaacacattcttccacccttctcaaactcctcccttcttcttcccgggtaagattaaaattaacttgaggccagccagcgtcgccggcggcgagatgtttacaggctgggcgtcctctcggcggcgccggagatgacggtgagcaggttgttgccgaaggggtcgctgaggtgcttggagaggttctcgacggggcccttgccggggacgtaagcctggatgaagaaccccagcatggagaaca

SEQ ID NO: 397492 - DNA, 274 bp, Oryza sativa nipponbare
tttatataacactaccatgtagtagaaagctggagcaggagggacaaagattacagcaattcggttcaagtacacgtaggtgattgcagaattgcagtcaagttaaagcgaaacaggaaaatctggaaaaaaaataatcctcttttttctttctttatggacaggctggatcacacggtgtaagactgctggatggtctcaatgtcgaggcctttgagcttcacaaccgattctacatgccccttgagcgtatggagctccctaagcctggcaa

SEQ ID NO: 397493 - DNA, 275 bp, Oryza sativa nipponbare
ttttgaagttcgattgagtatgatagacctttttactaggcaaaccacacgaatacacgattgattaatttcactgagaatagcacgggtacatcacatcacacaaattcatacgttgatacacgcatagtcgccgaagcgaccagctgcttaattaatcgataacacacgggtttaattcagcaataatcagcacacacacaaaccacactcatatgggtggtttttatggtggactaattaagggtggtgactcgccggcggcgagtgttcgg

SEQ ID NO: 397494 - DNA, 328 bp, Oryza sativa nipponbare
agcgagacacctgttataactttattaatatcaatacatgtcaggtaaagtctatgcagtgtgcatatgtgcattcacagtcacactcacttagtcaaataccaagatcgatcgatcgatgtacaagtggatgcattaattcatcatcttgggtgttcttatattacaaatcaccaccatgcaagtcgccattaaccaccaacccagctttcctaatttaagtagtaatcaacaaaaggatgacctctcctctctccataccctcccagctcgctcgtcatcacaaaactaaacagcgcgcgcgaacgcacaccaacgcatcgatccc

SEQ ID NO: 397495 - DNA, 378 bp, Oryza sativa nipponbare
gggtcgacgcacaaattggcatcgttttagctggcttcgttgtagatgctataataacgatacatcattaattcgatcatcccttggatgcggcctgcggcttacattaaatctcgatccaaagaagcaaagatgatgacagacagaaattaattaagctagaaatctcctcgatcgatcacacacacacacacaattaaggtacatacatacatgcactgctgcaactgcaactgcagggtcggtgcgtggctactacaagtgtacacatggtacgttggttggcaccatctcgatcgtgtcgttgtgctcacttgccggggacgaagttggtggcgtatgcccaggcgttgttggcgacggggtccgcgacgtggt

SEQ ID NO: 397496 - DNA, 394 bp, Oryza sativa nipponbare
aatctaacatacgcaaactgatattatcacaatgttagccgatgacaatggaaagagtaatctaggtacaagcggatcattgacggtggagacaagacattggctgcaccacaacacccaccagtggcgccaacaaggagcgctatccgttataggacgagagaaaaagtaaaacatcacgatgtgaagtgaaactgaataattctagtagacgatgatgatgatggataggctccttaggacgcccgccgcccttagcgtcttgctgctcccatcttgtccactggaaggctcactcgtcatcgtcttcatcctcttcgctgccctcgtcgtcatcctcatcattgacctcggacttggacttgtcagattcttctcgcgcctcctcttctct

SEQ ID NO: 397497 - DNA, 262 bp, Oryza sativa nipponbare
tttcgatcgatcgatgtacaagtggatgcattaattcatcatcttgggtgttcttatattacaaatcaccaccatgcaagtcgccattaaccaccaacccagctttcctaatttaagtagtaatcaacaaaaggatgacctctcctctctccataccctcccagctcgctcgtcatcacaaaactaaacagcgcgcgcgaacgcacaccaacgcatcgatcccgtttgaattgcgcgcgaaagagcttaaattaaaggatga

SEQ ID NO: 397498 - DNA, 258 bp, Oryza sativa nipponbare
actaggcaaaccacacgaatacacgattgattaatttcactgagaatagcacgggtacatcacatcacacaaattcatacgttgatacacgcatagtcgccgaagcgaccagctgcttaattaatcgataacacacgggtttaattcagcaataatcagcacacacacaaaccacactcatatgggtggtttttattgtggactaattaagggaggtgactcgccggcggcgagtgttcggttgcttcgtgacttcac

SEQ ID NO: 397499 - DNA, 300 bp, Oryza sativa nipponbare
aggcaaaccacacgaatacacgattgattaatttcactgagagataggacgggtacatcacatcacacaaattcatacgttgatacacgcatagtcgccgaagcgaccagctgcttaattaatcgataacacacgggtttaattcagcaataatcagcacacacacaaaccacactcatatgggtggtttttattgtggactaattaaggtaggtgactcgccggcggcgagtgttcggttgcttcgtgacttcacttgccgcacttgcagtcggtgcaggagcagctggtgccgcactt

SEQ ID NO: 397500 - DNA, 286 bp, Oryza sativa nipponbare
aattcatatactgtacctgttgctatataagagcaagttcaatagtatagccaactactagctccaattcatctatagtcaatctaatagcccattcatacaatagttacatactacactattaatatctagtcccacctgtcatagacacactgcgtcttggagtccgtgctacagctggctacaaatctgtagcccgttgctcttctctctcttgatttatcttcgtaaaatatgtttgtagctggcttatagcctgccattgtacctgctctaacgcagcaaa

SEQ ID NO: 397501 - DNA, 149 bp, Oryza sativa nipponbare
taaggtagagatcggctcgatcgctcacacacacacacacggggaagggacatacatacatgcactgctgcaactgcaactgcagggtcggtgcgtggctactacaactctacacatgggacgctggttggcaccatctcgatcgagtc

SEQ ID NO: 397502 - DNA, 219 bp, Oryza sativa nipponbare
gaccaaagcaaagccttttcattttgtcttctgacagtaaatacagggcgtgacaagataacaaaatcatcaaacttctaaacgaaactttgcaaaaacaatgacaattgacaaagtgagaagcaaagctcaacgtgcctaggcagcggtttgcaatcaccgtcttcccctgccctgctcatgaagtggtggcgcttaacctcttcttcggatcaccac

SEQ ID NO: 397503 - DNA, 245 bp, Oryza sativa nipponbare
aaccagggagaaccggacgaatacacgattgattaatttcactgagaatagcacgggtccatcacatcacacaaattcatacgttgatacacgcatagtcgccgaagcgaccagctgtttaagtcatgggaaacacacgggcataattcagcgatatgcaactcactcacaatccacacccatgtgggtggttgttattgtggactaattaaggtaggtgactcgccggcggcgagggttcgggt

SEQ ID NO: 397504 - DNA, 276 bp, Oryza sativa nipponbare
tttgtttttaatctgaagcaccgtggtgacgccaggataatacacatgaatttcatcataattagcgttcttattacaaggcaccgtgcagccattattatcagtacatcacaaaggcaaaccatgccttttttttttcttgcaatcaagcacagatacatgcatgagacagatcactgcatcacgtattgcacagatactaattaatcctgctacgaactcctccaatcatctgcagcatcacctgcatgcacgcacgcacggcgccggtgtggg

SEQ ID NO: 397505 - DNA, 269 bp, Oryza sativa nipponbare
  unsure (1)..(269): unsure at all n locations
tttttnggaagagaacttcacttctaaaagagtatcaacttgtttttgacatcggttacatcatagtacaggtacacaatcaacaaggcatgcagtgctccatccacaattacattccaatacaccaccaccattacagtctactccatccaaaaaggagtagtccgtcgcaacatctttcatttctcatgcacatgtacctcacactaacttattgggtagccgaattgctgcggtgcaatgcaaagttctgcctccttcttctgaca

SEQ ID NO: 397506 - DNA, 411 bp, Oryza sativa nipponbare
agaaaaactagctcagaaagccttattcactccacaagctggtcctgttgcacacaggtcaccaaagagttcgcaagaagcagcatgcttatagcttatgaaaacaacatgcttaggtaaatgaccaaaagaatctgatggcttctcatggacaagattaggctagtgagagctctccagcagggatattccttttcaccaatttctcccatgattccgtggtttcttctatgaccttcagagcatattccttgcttgtgggtttgttgcccagaccaaatctgtttgcaggcttaccgtctggtatcttgtagtccctgaaccagtctctgatggcagtcaatgttcccggaaaatgcttctcaacattattcacatcattcacaagagatgctttaggatcacccacgc

SEQ ID NO: 397507 - DNA, 267 bp, Oryza sativa nipponbare
  unsure (1)..(267): unsure at all n locations
gcacgaaggaattgttctcaagaatcttaagatggtaaatacacacaagagagaggtacggtatacaagacttagtttttcttaagtacaacagatcttccattcctccatgatcctatcagcttctacacccaaaccacacaaatcaccatgcacgagccctcttccttcactgccaaatcaactggggcttgagtagccaagcatccatgtggtgatcagtagccgatgtcagcgtcnnccacgacgaggttgccggtgatgagc

SEQ ID NO: 397508 - DNA, 222 bp, Oryza sativa nipponbare
actaggcaaaccacacgaatacacgattgattaatttcactgagaatagcacgggtacatcacatcacacaaattcatacgttgatacacgcatagtcgccgaagcgaccagctgcttaattaatcgataacacacgggtttaattcagcaataatcagcacacacacaaaccacactcatatgggtggtttttattgtggactaattaaggtaggtgactc

SEQ ID NO: 397509 - DNA, 251 bp, Oryza sativa nipponbare
aaagtcctcacaactaggcagctcatcgacaggtttattcgcacaagtattttgcagacaaatttaaacaagattgacacgataggtccaagtgatcgctgccgttcctaagagctgaagctcttacagtgccttgaggatctcctcagcaccagagattgtgaattggccaccttcctcaatgtttgcaacagtaaccttgaggttgtcagcaaggagagcaaaccgtctcgaacgaataccaagccctt

SEQ ID NO: 397510 - DNA, 275 bp, Oryza sativa nipponbare
  unsure (1)..(275): unsure at all n locations
cctatcttgtaaataattgatatatagtctcaaagaggacgttacaaattgtttcgatataaatgaactgcctatcgtttcttagagctaggaccgagcacggtcctactcctagcaattaacataactacgaattttaccaactcttcttttaccataaaaagaactgaggcggcaaagacgctctgtacaatcttcgtacccattccttngtaaaacccgtgcaatccttcataccggatcatctttatgatcgcgtcaatcgtacctgtgta

SEQ ID NO: 397511 - DNA, 373 bp, Oryza sativa nipponbare
ccacgcgtccgcatcagcagcgggcactatatgacattgtcatcatgggctacttcaagcgttgaggaggttgcctcaactggaccagggattcgtttcttccagctttatgtttacaaagacaggagggtggtggagcagcttgttaggagagctgaaagggctggattcaaggcgattgggcttacggtggatactccgggacttggcccgaaggaggctgacattaaaaacaaggttggtttggcaacatttttgacacttaaaaactttgaaaggctggagcttgggaaaatggaccaagcttgcgatttaagactggctttttaccttggccggcaaaatgatcgcacccttagcttgaaagatttga

SEQ ID NO: 397512 - DNA, 200 bp, Oryza sativa nipponbare
ccacgcgtccggaccgcctactctacctgggtccgttgacggcgagccgtcgagctacctgaccggcgagttcgccgtcgactacggatgggacaccgttgcattatcaacaccaacattgatcatactttgctgcgttagagcaggtacaatggcaggctataagccagctcttacatattttccctataaatacttag

SEQ ID NO: 397513 - DNA, 312 bp, Oryza sativa nipponbare
ccacgcgtccgcggacgcgtgggcgcgcgcggcggagaaaattaatcgatcgatcgatcgatccgattccggccggccatggcagctgctgctccggcgacggcggcggtgcggcgcatgaagctgggctcgcagggtctggaggtctcggcgcaggggctgggctgcatgggcatgtccgccttctacgggccacccaagccggaggccgacatggttgcgctcatccaccacgccgtcgccgtcggcgttacccacctcgacaccttctacatgtacggcccccacaccaacgagctcctcctcggtaag

SEQ ID NO: 397514 - DNA, 452 bp, Oryza sativa nipponbare
  unsure (1)..(452): unsure at all n locations
ccacgcgtccgggccgattgagggcatcaagaagttcgnaccctctcctacctgccaccgctcaccgtggaggacctcctgaagcagatcgagtacctgctccgttccaagtgggtgccctgcctcgagttcagcaaggtcggattcgtctaccgtgagaaccacagatcccccggatactacgatggcaggtactggaccatgtggaagctgcccatgttcgggtgcactgacgccacccaggtgctcaaggagctcgaggaggccaagaaggcgtaccctgatgcattcgtccgtatcatcggcttcgacaacgtcaggcaggtgcagctcatcagcttcatcgcctacaagcccccgggctgcgaggagtctggtggcaactaagccgtcatcgtcatatatagccttgtttaattgttcatctctgattcgatgatgtctcccacctt

SEQ ID NO: 397515 - DNA, 199 bp, Oryza sativa nipponbare
ccacgcgtccgggatcgcgctggttctcacccgcaggacgtgtccgtggaggggttctgcatgagccggtgcggcacgcacgcgtcgaacgccaaggcccgcacggcctacgtctgggtcggcaactccgccacgcagtgccccggccagtgcgcgtggccgttccaccagccggtgtacgggcctcagacgccggcgc

SEQ ID NO: 397516 - DNA, 417 bp, Oryza sativa nipponbare
ccacgcgtccgaataatataatatttacaacatataatacacttactccatcgaacaatacctctgttatctcatggttacttcccatgatcccatcatcaacaccaacattcatcacactttgctgcgttagagcaggtacaatggcaggctataagccagctacaaacatattttacgaagataaatcaagagagagaagagcaacgggctacagatttgtagccagctgtagcacggactccaagacgcagtgtgtctatgacaggtgggactagatattaatagtgtagtatgtaactattgtatgaatgggctattagattgactatagatgaattggagctagtagttggctatactattgaacttgctcttatatagcaacagggacagtatatgaaataattatcttac

SEQ ID NO: 397517 - DNA, 464 bp, Oryza sativa nipponbare
ccacgcgtccggctactggacatactctatactactagccagtaagctagctaactaactacgtggctatggcccccaccgtgatggcctcctcggccacctccgtggctccattccaagggctcaagtccaccgccgggctccccgtcagccgccgctccaccaactcgggcttcggcaacgtcagcaatggcggaaggatcaagtgcatgcaggtgtggccaattgagggcatcaagaagttcgagaccctatcgtacctgccaccactcaccgtggaggatcttttgaagcagatcgagtacctgcttcgatccaagtgggtgccttgcctcgagttcagcaaggttggattcgtctaccgtgagaaccacaggtctcccgggtactacgatggcaggtattggaccatgtggaagctgcccatgttcggctgcaccgatgccacccaggtgctcaaggag

SEQ ID NO: 397518 - DNA, 250 bp, Oryza sativa nipponbare
ccacgcgtccggaaagcataagcaacacaagggattaactatcactcacttagctaattaaatcttcgaccatgtcggacaagtgcggcaactgcgactgtgctgacaagagccagtgcgtgaagaaaggtaccagctatggcgtcgtcatagttgaagccgagaagagccacttcgaggaggtcgccgtcggcgaggagaacggcggctgcaagtgcggcaccagcttgttctgcaccgactgcaagtg

SEQ ID NO: 397519 - DNA, 307 bp, Oryza sativa nipponbare
ccacgcgtccgaagacgtccatgaagatgaagcgcaccatgctgctacttccatcctgttcttcttcctcgccggcctcgccgccgcccacggcagcacagcggacgacaccacgaccaccaccaccaacaccatacgcctcccgatcgacggagcagtggcggcgcgaaggaggacgaggccgtggaagtgctgcgacaacatcgtgaggctgccggagaggatcaacccgccgttctggcagtgcgacgacgagctggagcccgggcagtgcttccgccagtgcgaggcgtgccgggatccggcg

SEQ ID NO: 397520 - DNA, 461 bp, Oryza sativa nipponbare
ccacgcgtccgaaggacttttcaaaaatatctttacaagaaagcaacatcagactcaccatgtcatgcagataaggaccaatgtacccagccagatttggtggaggaagtctttgaggatggatgtccttccctttcaagacggctagattctgaatatccagttcggaatatgttcaagctcttcatatgtgcaatttgtcaagtagagttagagtctggtcagggtatatccatacatgagggtttgtcaaagtcaggaaagctgcgtccatgggatgggcctttcctttgccacagttgccaggaaaagaaagaagcaatggaaggaaaacgtcactcacgagattcctcctcaagaaacagtgggtcaagtgaatagtagccaagttggagtcatcttgaagaaatcatctaacagctttctgagcgataacgcattagttgcattttcccttggga

SEQ ID NO: 397521 - DNA, 470 bp, Oryza sativa nipponbare
ccacgcgtccgggccagtgctgtttcagggttatgtgctctgcttgcagtttaccctttgattatgtgaagacacagattcaaaagatgcagcctgatgcctccgggaagtatccatacactgggtctcttgattgtgccatgaagaccttgaagagtggaggcccatttaagttctacactggctttcctgtgtactgtgtcaggattgcaccacatgccatgatgacttggatattcctaaatgagatccagaagctcgagaagcgtttaggcctctaagagctggttggttcggtcatgctgtccttacctaagacataacaacagtccaggtgtacatagtcgagcaattgcttttgataaacaaaatctttagcctatatgcttccttggtgctttgagccattgacaccaaatgatcacctcatttattggtccttggatcatttcttggtaaaatttgggctt

SEQ ID NO: 397522 - DNA, 425 bp, Oryza sativa nipponbare
ccacgcgtccgcccacgcgtccgcggacgcgtgggcatccccctctccatgcccacctcgagggcacccacctccctcagagcggcggcggaggatcagcccgccgcggcggcgacggaggagaagaagccagcccccgcggggttcgtgccgccgcagctggaccccaacacgccgtccccgatcttcggcgggagcacggggggactcctccggaaggcgcaggtggaggagttctacgtcatcacatggacgtcgcccaaggagcaggtgttcgagatgcccacgggcggcgccgccatcatgcgcgagggccccaacctgctgaagctggccaggaaggagcagtgccttgccctgggcaccaggctccgcttcaagtacaagatcaactaccagtttcaccgcgtttttcccaatggcga

SEQ ID NO: 397523 - DNA, 477 bp, Oryza sativa nipponbare
ccacgcgtccgcgccgctgctcgagagcgcaatggcgtcatggcgttcacactggtgggagcattcaaggggatgtccctctcctccccgtgccattcctcctcctccgcctccttcctccgcgctgaccgtgtctcgctctccgtcggcggcggggtcgggatgggggtgccgatgacgatgccggtgcggcggctgacgatccagatggcgcacaagaagggggccgggagcaccaagaacgggagggactcccccgggcagcgcctcggtgtcaagatttacggcgaccaggtcgtcaagcccggcgccatcatcatccgccagcgcggcaccagggtctatcctggaaataatggtggaatgggcaaggatcacaccctcttttctttgatcgatggcctcgtaaagttcgagaaatatggaccagacaagaaaaaggtaaggtgttacccatacgagaaacaacctgagaac

SEQ ID NO: 397524 - DNA, 449 bp, Oryza sativa nipponbare
ccacgcgtccgcggacgcgtgggctcgagcaagaaggagagagcttggtgagctgcagagatggccccctccgtgatggcgtcgtcggccaccaccgtcgctcccttccaggggctcaagtccaccgccggcatgcccgtcgcccgccgctccggcaactccagcttcggcaacgtcagcaatggcggcaggatcaggtgcatgcaggtgtggccgattgagggcatcaagaagttcgagaccctctcctacctgccaccgctcaccgtggaggacctcctgaagcagatcgagtacctgctccgttccaagtgggtgccctgcctcgagttcagcaaggtcggattcgtctaccgtgagaaccacagatcccccggatactacgatggcaggtactggaccatgtggaagctgcccatgttcgggtgcactgacgccacccaggtgct

SEQ ID NO: 397525 - DNA, 308 bp, Oryza sativa nipponbare
ccacgcgtccgggaaaagtaatcctccagctaactagaaagagatgagctactacggtcagcagccgccggtgggcgcgccgccgccgcaagggtacccggggaaggacgcgtacccgccgccggggtacccgccggccggctacccaccgtcggcgcaggggtactcttcccagggatacccttcgcagcaggggtacccgtcgcagcagggctacctcgcggcgtacgcgcagtcaccgacgccgtagcagcagccacaccacaccatggggcctttcttcatggagggatgctcggctgtacttt

SEQ ID NO: 397526 - DNA, 394 bp, Oryza sativa nipponbare
ccacgcgtccggagagcgtcatcggcgccgtccccaagacaccctcgccaccatcatcgacaagtacgtcagcagctgattgcatcatcatcgtcgtcttcttcctcttcttcttcagctgcatcaatcaaatcagacttgatcgatcagagcttcgtttgtaagttgtaactaagctaccccctgctttgcctctctatgtgtatcgccagccacccctttctcttcatcgtccttaattgttgtaatcctactactccatggaatcaatactgtaactattattggttgcaaaacacaaacctaacaactaaatctaatataacgaaattaaaaatgaaactaaacgtatgactaaaatcacattatatactaaaaaaactaaaaggggcgg

SEQ ID NO: 397527 - DNA, 476 bp, Oryza sativa nipponbare
cgcgtccgcccacgcgtccggaaagattctagcttaagtctgcaccagttacaaggtactcgtgcccatatgttggctgcaagcggaacaaagagcacaagaagttccagcctctcaagacaatcctgtgtgtgaagaaccactacaagagaagccactgtgacaagagctacacctgcagccgttgcaacaccaagaagttctcagttatcgcggacttgaagactcatgaaaagcactgtggccgcgacaagtggctatgctcgtgtggaactaccttctcaagaaaagacaagttatttgggcatgttgctcttttccaagggcacacgcctgcactccctatggatgatatcaaagtaacaggagcatcagagcaacctcaaggcagcgaggcgatgaacaccatggtggggagcgctgggtataacttccccggtagctcatcggacgacatcccaaatcttgacatgaag

SEQ ID NO: 397528 - DNA, 440 bp, Oryza sativa nipponbare
  unsure (1)..(440): unsure at all n locations
ccacgcgtccgcccacgcgtccgggcatatacaagtcanaagtagtcatggtgatggtggccttggctgttggatctgatcaaatatccacccaagttagacgtcaagctatcatcagtggtctttccaatcttccaagcaatgtcagcgaggttttcaaacttgatactgagatgaaggaacttgcctcttccttgatcgattcagagtctctccttgtgtttggcagaggttataactatgccactgccttagagggtgctcttaaagttaaggaggttgctctgatgcacagcgaaggcatgcttgctggtgaaatgaagcatggaccacttgcactagtggatgaaaacctttcgatcattcgtcattgctacacgtgatgcgtgcttcagcaagcaacaatcagtgattcagcagcttctttctcgcaaggggcg

SEQ ID NO: 397529 - DNA, 306 bp, Oryza sativa nipponbare
ccacgcgttcgaagacaagaagcagtagcgagtccaaggcaggcatggcaggcgaaagcaaaacaagaaatggcgaagccgatatcgatcgaggtgtggaatccgagcggaaagtatcgcgtggtgagcaccaagtccatgcccggcacccgctggatccgcctccttgccgacaacgactgccgccttgagatctgcacggagacgaagaccatcctttctgtcgacgacattctcgccctcattggcgatcgctgcgatggtgtcatcggtcagctgacggaggagtggggagagtgttttttt

SEQ ID NO: 397530 - DNA, 377 bp, Oryza sativa nipponbare
ccacgcgtccggtcggacaagtgcggcaactgcgactgtgtgacaagagccagtgcgtgaagaaaggtaccagctatggcgtggtcatagttgaagccgagaagagccacttcgaggaggtcgccgccggcgaggagaacggtggttgcaagtgcggcaccagctgcttctgcaccgactgcaagtgcggcaagtgaagtcacgaagcaaccgaacactcgtcgtcggcgagtcacctaccttaattagtgcacaataaaaaccacccatatgagtgtggtttgtgtgtgtgctgattattgctgaattaaacctgtgtgttatcgattaattaagcagcttgtcgctttggcgactatgcgtgtatcaacgtatga

SEQ ID NO: 397531 - DNA, 328 bp, Oryza sativa nipponbare
ccacgcgtccgccaaatgctggtgcttcagggagtatgccggattgatggttatccgtgcttaccacagggcaagaggagactaccaccgggatgtctgtatcattcctgtgtcagcccatggtacaaatcctgcaagtgctgctatgtgtggaatgaatattgtcgctgttggaactgattacaaaggtaacattgacatccaggagttgaggaaagttgctgaagttatcaaggacaacttcggttgttaatatggttacctatcatttgacccatgtagtatatgaagaaggcattgatgagatatgcatgataattcatgagaa

SEQ ID NO: 397532 - DNA, 428 bp, Oryza sativa nipponbare
ccacgcgtccgatcagagatcaggtagaacgtgagagtgaggtgcagaaaaatttgagctgaagctgaggatggcaacatccatgatcacctcgccgctggtggcgccggcccgggccaagggccttccgtccatctcccgccggggatcctccttcgccatcgtctgcagcggtgggaagaagatcaagaccgacaagccctacgggattggaggtggcatgtcagtcgatattgatgcatctggcaggaagagcacggggaagggtgtgtaccaattcgttgacaagtacggcgcaaacgtcgacggctacagcccaatctactcgccggaggaatggtctcccaccggtgacacctacgttggtggaaccaccgggcttctgatctgggccgtgaccctcgccgggctcctcggcggcggtgccc

SEQ ID NO: 397533 - DNA, 466 bp, Oryza sativa nipponbare
ccacgcgtccgcggacgcgtccgcccacgcgccggaggccgaggagatggaggagctcgagcgcaccgccgaggagctgcagagccaggccgccgccgaggcccccgacgagtccgaggaggagaagcgcgagcgcgtccgccgcgagctccagaaggtggcaaaggagcaagcagagaggcgggcgacggcgaagcaaatgtttgatttggggcaaagggcctacggaagaggaatgtatggccgctctattgaattcttggaggctgcactcacaattattcgcccttcatcgctccttggtggggagatccaaatttggcttgcaatggcgtatgaggccaataggaggcacaaggattgcattgcactgtacaaaggagtggagagttcacatccaatgatcagcattaggcggcaggcagcggaacttcggttcatttctgaggcacccaagctgaagatc

SEQ ID NO: 397534 - DNA, 387 bp, Oryza sativa nipponbare
ccacgcgtccgcccacgcgtccgcccacgcgccgcccacgcgtccgggttcgccaagttcaagaccgagttctatgacaagaagccggagctcttcgagccgctcaaggccggccaggcacccaagtacatggtgttctcgtgcgccgactctcgcgtgtgcccgtcggtgaccatgggcctggagcccggcgaggccttcaccgtccgcaacatcgccaacatggtcccagcttactgcaagatcaagcacgctggcgtcgggtcggccatcgagtacgccgtctgcgccctcaaggtcgaactcatcgtggtgattggccacagccgctgcggtgggatcaaggccctgctctcactcaaggatggagcaccagactccttccac

SEQ ID NO: 397535 - DNA, 176 bp, Oryza sativa nipponbare
ccacgcgtccgcccacgcgtccgcccacgcgtcgcccacgcgtccggccacgcgtaggtccacacgtacgtctacgcgtagaaggccgatctgatggagtctataaaagcaaccctggcacgacatggcatagggtgcatctggggggacggttgagtgtgcccattgggaaccat

SEQ ID NO: 397536 - DNA, 451 bp, Oryza sativa nipponbare
ccacgcgtccgcccacgcgtccgcccacgcgtccgcccagcgtccgcttgtgactacacccgcttcgcttcctcccctctctaagccggggaagctaagccatggcgtccgtcaccgcccgcaccccggtcgcagccctccgctcgtcggcgtcgctcaagtctaccttcctagggcaatcctccacccgcctcgcccgcgcaccgactacgaggcgtaatgttcgggcggaggccaagggagagtggctccccggcctcccttctcccacctacctcaacggcagcttgccaggcgataacgggttcgacccgttgggtctggcggaggacccggagaacctgcggtggttcgtgcaggcggagctggtgaacgggcggtgggcgatgctgggggtggccgggatgctgctgcctgaggtgcttacgaagatcggttgatcgaccctccg

SEQ ID NO: 397537 - DNA, 475 bp, Oryza sativa nipponbare
ccacgcgtccgggaggagcttgagcttggagagagacacaatggcggctcaggctcttctctctgggaggcagctgctggggaggccattgcaatcttcagtctccaggtcttcttcctccaggaaggcacccttcatggtcagggcagaggccactccccctgccaagcaaggtgctgacaggcagctgtggttcgcatccaagcagtccctgagctacctggatggcacgcttccgggagacttcgggttcgacccgctggggctatcggacccggaggggaccggtgggttcatcgagccacggtggctggcctacggcgaggtgttcaacggccggacggcgatgatgggcgtcgtcggcatggtcgccccggagctcctcggcaagctgggcctcgtccccgccgagacggcgatcccgtggttccagaccggcgtgatcccccccgcgggcacctacacctactgggcc

SEQ ID NO: 397538 - DNA, 359 bp, Oryza sativa nipponbare
ggtcgacccacgcgtccggcggcgccggatgtcgagtaccgctgctcgtcggcggcctcgcctgggccaccgacgaccgctccctcgaggccgtcttctccacctacggcgagatcctcgactccaagatcatcaacgacagggagacggggaggtcacgtgggtttggcttcgtcaccttctcctccgagcagtcgatgcgcgacgccatcgagggcatgaacggcaaggagctcgacggccgcaacatcaccgtcaatgaggcccagtcccgccgctccggcggcggaggcgggggctacggcggcggcggtggcggctacagtggtggtcgttgaggctgcggctactgaggaggt

SEQ ID NO: 397539 - DNA, 297 bp, Oryza sativa nipponbare
cccacgcgtccggcgccgtactgggacccgcgccggcgccgctgctggacacgagcgagctgggtaagtggtcgctgtaccgtgccctcatcgcggagttcatggcgacgctcatcttcctctacgtgagcatcgccaccgtgatcgggtacaagaaccagagggccaccgtcgacgcgtgcaccggcgtcggctacctcggcgtggcgtggtcgttcggtgccaccatattcgttctcgtctactgcaccggcggcgtctccggcgggcacatcaacccggcggtgaccttgggcc

SEQ ID NO: 397540 - DNA, 421 bp, Oryza sativa nipponbare
gacccacgcgtccgcggacgcgtgggcggacgcgtgggcggacggtgggagcgaatccagcagcagaagcagcagcagcagctcagccgccgctgatggcgtccacgatcatggccccaacctcccgcgtcctcgccgccaagacccccttcctcggccatccccgccccttcaatgcccccgtccgcgacatcgccgccgccgccaccggccgcatcaccatgagcaaggagctgtggtacgggccggatagggtgaagtacctggggccattctcggcgcagacgccgtcgtacctgaggggcgagttcccgggcgactacgggtgggacacggtggggctttccgcggacccggaggcgttcgcgaggaacagggcgctggaggtgatccacggcgcgtgggcgatgctcggcgcgct

SEQ ID NO: 397541 - DNA, 231 bp, Oryza sativa nipponbare
ccacgcgtccgcggacgcgttgggagagaagagagagcgagtgatgtacacgagcgagctgggtaagtggtcgctgtaccgtgcccttatcgcggagttcatggcgacgctcatctttctctacgtgagcattgccaccgtgatcggttacaagaaccagagggccaccgtttacgcgtgcaccggcgttgtttaccttggcgtggcgaggtcttttcctgtcttcatttt

SEQ ID NO: 397542 - DNA, 461 bp, Oryza sativa nipponbare
acccacgcgtccgcccacgcgtccgcaaaagagaagaagaagaaagaagaagaagaagatgcagaccgctgctagcagtgtcgttggattgtcggccgtgttgcccgctgctgtgaaggggcgcagcctgcagattcaggctcctcgccgtgttgcgttgcgcgttcgtgcggcggcggcggcggtggcagtggaggctgcggaggtggactacagctctaacatctcggtgtttccgatggaggcgtgcgacctcatcggcggcgaggcgtgcaacgtgcagatgtacccagaggccaagctcttatcatcggctgctgttgctgtttcttgtgcggcggcggaggaagtcgacagggactaccttatctacgacgagcccaccacggtgttttcccaggagggcgtgcgactatctgggcggcgcgtttctgcaggctctcctgtcccattcccattca

SEQ ID NO: 397543 - DNA, 210 bp, Oryza sativa nipponbare
  unsure (1)..(210): unsure at all n locations
ccacgcgtacgnccacgcgtccgcaaaagtaaaagaagatgaaagaagatgaagaagatgcacacgggtgctagcggtgtctttggattgttggacgtgtcgcccgttgctgtgaaggggcgcagcctgcagatgcaggctccttgccgtgttgcgttgcgcgttcgtgctggtgtggtggcggtggcagtggaggctgtggaggcggac

SEQ ID NO: 397544 - DNA, 421 bp, Oryza sativa nipponbare
ccacgcgtccggcagctgctcccctgatccggtcagataggctcttcttgacaggatcaccatgtgtgcctttgggggaaaatacgcagatgagctgatcaagacggccaagtacatcgcgacgccggggaagggcattcttgccgccgacgagtcgacgggcaccatcggcaagcgcctggccagcattaacgtggagaacgtggagcccaaccgccaggcgctccgggagctcctcttcacgacgcccggcgcgtgccagaacctctccggcgtcatcctctttgaggagacgctctaccagagaacggccgccggaacgccgttcgttgacctgctcaacggcggcggcgtcgtgccccggatctaagggggcaagggcaccctggacatcgtctgtactcaacggggagaccatcac

SEQ ID NO: 397545 - DNA, 459 bp, Oryza sativa nipponbare
  unsure (1)..(459): unsure at all n locations
acgcgtccggtcgcaggaggctgagagccggcacaagcatccagcaagagctcccatgggaagaagaaagcgaaggtggactggacgcctgagcttcaccggaggttcgtgcaggcggtggagcagctcggcatcgacaaggccgtgccgtcgaggatacttgagatcatggggatcgactctctcacccggcacaacatagccagccatcttcagaagtaccggtcacacagaaaacacatgattgcgagagaggcggaggcagcgagttggacccaacggcggcagatttacgccgccggtggaggtgctgttgcgaagaggccggagtccaacgcgtggaccgtgccaaccattgngcttccttctnctncgccaccaccaccatcaccggctccgattcaacattttgctcgcccgttgcatgtttggggccacccgacgatggacccgtcccga

SEQ ID NO: 397546 - DNA, 360 bp, Oryza sativa nipponbare
  unsure (1)..(360): unsure at all n locations
ccacgcgtccgcggacgcgtgggcggacgcgtgggtgcagtgcaaatgcctaaggcccatctcgtatcctatgtgtatcaagttatcaagaagatggggaataatatggtgtggatatagctattggacatgttaattatccacatgataatatggcttggatataaggatctcacacgataatatggcttggatatatagctattaaagattttacctatggcatatttcaatgtgtattagtactaagtaagaatgattgcaaggtgtattaactacaaatattgcaataaaagtccctgttactacancatantaaaataaaataaaaaaatttatataaataattataaaattaat

SEQ ID NO: 397547 - DNA, 446 bp, Oryza sativa nipponbare
ccacgcgtccgcccacgcgtccgcctcgtctaccttacctagagcagcagctagctagcttaattagctatagcagccatggcggcgacggcactgagcagccaggtccggttgccgatgtccctgcgggtggcgacggcgccggcgccggcgcgcgtgtcggtgctgccggcgagcaacaagctgggagacaggctgcggatgcaggcgacgtacaacgtgaagctgatcacaccggacggcgaggtggagctgcaggtgccggacgacgtgtacatcctggaccaggcggaggaggaagggatcgacctggcttacttctgccgcgcgggctactgctcctactgcgccggcaaggtggtctccggcgagatcgaccagtccgaccagagctttctcgacgacgaccagcttgccgccgggtggtcctcacctgccccgcctac

SEQ ID NO: 397548 - DNA, 461 bp, Oryza sativa nipponbare
ccacgcgtccgggcgtgcaaaggtttcctcgggccagacggcattggtcctcgagtgcaaaggcagaagggagcagacttggcaaatcttctaaatgaagcagccatattagcgggccgacgtggtcggacagcaatttcctcaaaggagattgatgattcaattgacagaatagtggctggtatggaaggaactgtgatgacagatgggaagagcaaaagtcttgttgcttaccatgaagttgggcatgcaatttgtggaactttgacgcctggccacgaccctgtccaaaaggttactttgatcccgaggggtcaagctcggggtctcacatgggtcattccaatggacgacccaacgttcattttcaggcaacaactgttcgccagaattgttggtggccttggcggtcgtgctgctgaggagatcatttttggtgagcctgaggtgaccacaggagc

SEQ ID NO: 397549 - DNA, 169 bp, Oryza sativa nipponbare
ccacgcgtccgcccacgcgttcgcggcagagccagtccaagccaaggttgtccggcggcagtagggacagactcgtcctctccggcgccggcagcagccagtccaagccaaggttgtccgtagcctttcctttaccgctccgacctgcctcctgtttcgcttgccagtt

SEQ ID NO: 397550 - DNA, 207 bp, Oryza sativa nipponbare
  unsure (1)..(207): unsure at all n locations
ccacgcgtccgcggacgcgtgggcggcggatggcgaccccggtgcacactctgggctcagggatagggcccatgcagggcctggtcatggagatcatcctaaccttctccctccttttcgncgtctacgcgaccatccttgacccgcggagctcggtcccgggcttcggcccgctgctcacgggccttatcgtcggtgccaacacca

SEQ ID NO: 397551 - DNA, 420 bp, Oryza sativa nipponbare
ccacgcgtccgcccacgcgtccggggctaggcaatagccaaggacatggcgcagcgcaaggtggaaaacatgaagcagattgccaagaaaaaagcaaatgaggaaagaaagcgtctagaatctgagcttgagcttgccctaatggtcgagaaactacaggagcttcgctctatgagagttcaaaaaatgaagaaacaaggtcattttctgccagaagaagatgataaatatcttgagcgtgttaaggctgcagttgaggaagaggagcgccaagctgcaagtgctgctcggactgatgctgccaaggatgctattctgaccgcggaagagtctaggaaggctgtgcagtgttcaaattcaagagaagatgattctgatcaagccaaaaaggcaccaacactggaacaaaaccagagagat

SEQ ID NO: 397552 - DNA, 405 bp, Oryza sativa nipponbare
ccacgcgtccgccacgcgttcggcacgcgtccgccactcgtccgctcaagaagtacttgagcaaagaaggagagagcttcgtggagctgcagagatggccccctccgtgatggcgtagccggtcaccaccgtcgctcccttccaggggctcaagtccaccggcggcatgcccgtcgcccgccgctccggcaactccagcttcggcaacgtcagcaatggcggcaggatcaggtgcatgcaggtgtggccgattgagggcatcaagaaatttgagacccttttctacctgccaccggtcaccgtggaggacctcctgaagcagatcgagtacctgctccgttcaagtgggtgccctgcctcgagttcagcagggcggattcgtctaccgtgagaaccacagattcc

SEQ ID NO: 397553 - DNA, 418 bp, Oryza sativa nipponbare
cgcgtccgcgatgtacaatctgaaggccactctgagatcaggagggaaacaagaccgatttgtttgcttcggatgatgggacggagaaaccgagtcgaattccagtgagtgatgagctgagggagtatgcaagaactcgagggtttgagatatttgagaagatgcgctcggaggaagagaaagttcccatgaatgagtctgctctgactgcagtggctcgtatggcgatgtccatgggcaacggtgacatggcctttgatgttgtgaagcaaatgaaggatcaaggtattgcgccaaagttgcggtcatatggtcctgctttgacggcattctgcaatagcggcaatgttgagaaagcatttgaggaggaagcacatatgttggagtctggtgtcaaacccgaagagactgagttgga

SEQ ID NO: 397554 - DNA, 439 bp, Oryza sativa nipponbare
cagcctcgctgctaagaagttaacgacctctccaccaaccacaacaatcagctcaagaccaagatctccgcgctccaatccaagtacaagtccgcccgcatcatgtacgccgacttctactccggcgtctacgacatggtccgcaaccccggcaactacggatttagcacggtgttcgagacgtgctgcgggtcaggcggcggcaagttcaactacaacaacaacgcgaggtgtgggatgtcaggcgcatcagcgtgctccaacccggcgtcgcatcttagctgggacggcatccacctcaccgaggcagcttacaagcagatcactgacggctggctcaacggcccgtactgtagcccggccattctccacagctaaagcaaaatgactggaaagaacgagccattaagtaatttattactttattattaaggctggg

SEQ ID NO: 397555 - DNA, 140 bp, Oryza sativa nipponbare
ccacgcgtccgcggacgcgtgggctcgtggcagtctgttcctggcgggcccacacaccaccatggccgtcatcagctgcggtcaggtcaactccgccgcgtctccctgccttagctacgcccgtgggggtttcgggccgt

SEQ ID NO: 397556 - DNA, 77 bp, Oryza sativa nipponbare
ccacgcgtccggtcatgaggatccagtgcgacgcgtgcaggccgcggtggccacggtggtgtgctgcgcggacgagg

SEQ ID NO: 397557 - DNA, 470 bp, Oryza sativa nipponbare
ccacgcgtccggctacttctgcacagatggagaaaagtccgttctttttaggccaaagttgatcgttgcgggtgcaagtgcatatgcgcgtctttatgactatgaccgcatgcggaaggtttgtgacaagcagaaggcaatacttctagcagatatggcacatatcagtgggcttgtcgcagctggtgttgttccatctccttttgattatgcagatgtagtgactaccactactcacaagtcactccgtggaccacgtggagccatgatcttttacaggaagggggtgaaaggagtaaacaagcaaggcaaagaggttatgtatgactttgaggacaagatcaatgctgctgtcttcccaggtctgcaaggtggaccacataatcataccattactggctttagctgtgcgcttaagcaggcaactacttccgagtacagagcttatcaagagcaagttatgagtaact

SEQ ID NO: 397558 - DNA, 357 bp, Oryza sativa nipponbare
ccacgcgtccgcccacgcgtccgcccacgcgtccgcccacgcgtcgcccacgcgtccgagcataagcaacacaagggattaactcatcactcacttagctaattaaatcttcgaccatgtcggacaagtgcggcaactgcgactgtgctgacaagagccagtgcgtgaagaaaggtaccagctatggcgtcgtcatagttgaagccgagaagagccacttcgaggaggtcgccgtcggcgaggagaacggcggctcgaagtgcggtaccagctgctcctgcaccgactgcaagtgcggcaagtgaagttacgaagcaaccgaacacttcgcgccggcgaggcacctaccttaattaa

SEQ ID NO: 397559 - DNA, 420 bp, Oryza sativa nipponbare
acccacgcgtccgagaaagcataagcaacacagggattaactcatcactcacttagctaattaaatcttcgaccatgtcggacaagtgcggcaactgcgactgtgctgacaagagccagtgcgtgaagaaaggtaccagctatggcgtcgtcatagttgaagccgagaagagccacttcgaggaggtcgccgccggcgaggagaacggcggctgcaagtgcggcaccagctgctcctgcaccgactgcaagtgcggcaagtgaagtcacgaagcaaccgaacactcgccgccggcgagtcacctaccttaattagtccacaataaaaaccacccatatgagtgtggtttgtgtgtgtgctgattattgctgaattaaactcgggtgttatcgattaattaaagcagtggtcgcttcggcg

SEQ ID NO: 397560 - DNA, 279 bp, Oryza sativa nipponbare
  unsure (1)..(279): unsure at all n locations
ccacgcgtctccccacgcgtncgagcttgcggtgaacgtgcaggcggagctggtgcactgacggtgggcgatgctgggcgcggcgggcatcttcatcccggagttcctgaccaagatcggcattctcaacacgccgtcgtggtacaccgccggcgagcaggaatacttcaccgacaccaccaccctctttatcatcgagctcattctcattggctgggccgagggctgacggtgggctgacattatcaagcccggttgcgtaaacaaccgcccccattt

SEQ ID NO: 397561 - DNA, 411 bp, Oryza sativa nipponbare
cgggtcgacccacgcgtccgcacagccaacgtaccaggtggtgcagccatcaatggcgaccccttcatcggcagcctggagacgccggtgacctccagcccgctggtcgcctggtacctctccaacctcccggcgtaccgcaccgccgtcagcccgctgctccgcggcatcgaggtcggcctcgcccacggctacctcctcgtcgggcccttcgcgctcaccggcccgctccgcaacacgccggtgcacggccaggccggcgccctcggcgccgcaggcctcgtcgccatcctcagcgtctgcctcaccatgtacggcgtcgcctccttcggcgagggcgagccgtccacggcgccgacgctgacgctcaccggccgcaagaaggaggccgacaagctgcagaccgccgac

SEQ ID NO: 397562 - DNA, 281 bp, Oryza sativa nipponbare
gtgagataattaattcatatactgtacctgttgctatgtgagagcaagttcaatagtatagccaactactagctccaattcatctatagtcaatctaatagcccattcatacaatagttacatactacactattaatatctagtcccacctgtcatagacacactgcgtcttggagtccgggctacagctggctacaaatctgtagcccgttgctcttctctctcttgatttatcttcggaaaatatgtttgtagctggcttatagcctgccattgtacct

SEQ ID NO: 397563 - DNA, 297 bp, Oryza sativa nipponbare
tactaggcaaaccacacgaatacacgattgattaatttcactgagaatagcacgggtacatcacatcacacaaattcatacgttgatacacgcatagtcgccgaagcgaccagctgcttaattaatcgataacacacgggtttaattcagcaataatcagcacacacacaaaccacactcatatgggtggtttttattgtggactaattaaggtaggtgactcgccggcggcgagtgttcggttgcttcgtgacttcacttgccgcacttgcagtcggtgcaggagcaactggtgcc

SEQ ID NO: 397564 - DNA, 418 bp, Oryza sativa nipponbare
  unsure (1)..(418): unsure at all n locations
tatatatagccggagcttccatatatttcattcacatatgcctgggccagcaacatatagtcgtagcagataccactcttacatcaagtcagagagagatcaggtgaaacaaaaacaaaagcagagcacggtcggtaaaatcaaaagacgatgaacaaactgggaacacacgaaacaaggtgggagacatcatcgaatcanagatgaacaattaaacaaggctatatatgacgatgacggcttagttgccaccagactcctcgcagcccgggggcttgtaggcgatgaanctgatgagctgcacctggctgacgttgtcgaagccgatgataccgacgaatgcatcangggacgccttcttggcctcctcgagctccntgagcacctgggtggcgtcagngcacccgaacatgggcag

SEQ ID NO: 397565 - DNA, 284 bp, Oryza sativa nipponbare
gaatcatacgtaagtgcttgctgatacaatatcaacatggagggtacatgggcggttccatatgaacaaacataaaaacaccgaaaccccatatggccattatgccgatcctagcctagcttggctaggacatcgtcaagagcagatttggtcaacgtgtagtacttctccgcctcttcggggctcttgatcttggctgcatggtcaagcccgtcaatggtggcgaagagcttgccggtgaggtccttgaggcccttcttctcgtccttgggcttggagttgat

SEQ ID NO: 397566 - DNA, 286 bp, Oryza sativa nipponbare
  unsure (1)..(286): unsure at all n locations
gaatcatacgtaagtgcttgctgatacaatatcaacatggagggtacatggccggttccatatgaacaaacataaaaacaccgaaaccccatatggccattatgccgatcctagcctagcttggcgaggacatcgtcaagagcagattnggtcaacgtgtagtacttctccgcctcttcggggctcttgatcttggctgcatggtcaagcccgtcaatggtggcgaagagcttgccggtgaggtccttgaggcccttcttctcgtccttgggcttggagttgatga

SEQ ID NO: 397567 - DNA, 268 bp, Oryza sativa nipponbare
  unsure (1)..(268): unsure at all n locations
gtgtttttctgtgcttgtgatngatngatntggcaccaaacatatactacaatatggtaagaagagtttttatccccccatccctcgattaccccattatgaatagctgaagaggaggctgccagaggattaaaatatcatggccatccacccaaaccacaagtaattaatagggcgattttgggagaagaagaagaanaaaaagaagtttagatgtcgaagacgtttttgccggtgaacttgacctcaatggggctgacgtttttgc

SEQ ID NO: 397568 - DNA, 235 bp, Oryza sativa nipponbare
atatatagcgcggagcttccatatatttcattcacatatgcctgaggcaacaacatatagtcgtagcagataccactcttacatcaagtcagagagagatcaggtgaaacaaaaacaaaagcagagcacggccgggaaaatcaaaagacgatgaacaaactgggaacacacgaaacaaggtgggagacatcatcggatcagagatgaacaattaaacaaggctatatatgacgat

SEQ ID NO: 397569 - DNA, 128 bp, Oryza sativa nipponbare
acgccgaggcgctcctggaggtggtccacgaggcccctggcctcctccagggtgagccccgcgatggcgtccccgaggtacgggtccatgaagtcggcgaacaggaagtccagcttcacctccttgcc

SEQ ID NO: 397570 - DNA, 331 bp, Oryza sativa nipponbare
taactaatgaaccagattcatttattcattcatttaccattcccagcaatgttaagttacaagtttacagctaaattaacaggagatgaattcatatatggacaaacaggatatgtctctgtgattttattcattattttgtagtgctttccacagctttagccctggggaattcacctccaataataatgacctgggaaaggatttaggaggccggggtgaacttgatcgaaacactgttcacacagtgacgctcatcagtaggcgtcttgaagccttctcctttgaacacgtgacccaaatgcccaccggaagctgcacacgtgatttc

SEQ ID NO: 397571 - DNA, 306 bp, Oryza sativa nipponbare
taactaatgaaccagattcatttattcattcatttaccattccgagcaatgttaagttacaagtttacagctaaattaacaggagatgaattcatatatggacaaacaggatatgtctctgtgattttattcattattttgtagtgctttccacagctttagccctggggaattcacctccaataataatgacctgggaaaggatttaggaggccggggtgaacttgatcgaaacactgttcacacagtgacgctcatcagtaggcgtcttgaagccttctcctttgaacacgtgacccaaatgcc

SEQ ID NO: 397572 - DNA, 267 bp, Oryza sativa nipponbare
ataaacacattgagtggcagtttcaaataggcaaggcgcgaagggtgcccatttgacacatctgcttcacatcgataagtttaaaagtggattgccaacacaaacgtgatacagtattacaatgttattcagaatgacagaatacacaagcggtccatacggaacagaaagaccgaagaccatcaacacaattcagagaaacaggctggagtttccattgtccatcatgatcccatatcacacaagacttatatttaccgaccaaca

SEQ ID NO: 397573 - DNA, 281 bp, Oryza sativa nipponbare
  unsure (1)..(281): unsure at all n locations
tggtctttggtaaaaaaaatgtgcaagatataacgtgaatggagagaagaggagaagtcacgattggaaggcaaatgttcgtgaagataggcacatatatgtatcgtacaatgtcctctccggttgtcgaaatgcaaataacatcatcgggggatatgatcatcaantcactagaacagagggaggaacaaaagctaaaaattaaaaccatcaacagcccgatcgaggttgcattactagatacacacattggaggcttactttccttttttcatggatcg

SEQ ID NO: 397574 - DNA, 162 bp, Oryza sativa nipponbare
aaaaaggtaaactcttcataataatattattaagacatgagtaggtgatgtcttttgatcacactgcgatcaaattatgcatcataggcagtacaactccgcgtcaggaaaaagtagaggagatatatttcttgttattacttaatacagcattcacatata

SEQ ID NO: 397575 - DNA, 283 bp, Oryza sativa nipponbare
  unsure (1)..(283): unsure at all n locations
ttcacatccatctctctctctctcctccccccaattcattaacatgttatgcatgcatactccacaaaaaaaaaaagaagaaacaagaagagaacatcttccatcgcccaatcatcggttncaccagcctgaactcatcaagctccttgagatgccctggccctgatgaaatctatcacacgctcagtctgacancntctggatgatggtgttgtgccacgggtcagacaggtgctgcagcaggttgtcgaagggccccttctgcgtcacgttgtgctgcacc

SEQ ID NO: 397576 - DNA, 297 bp, Oryza sativa nipponbare
acgtggaacttgtggtaccggaatactggaatagacccatccgaggccctaaagcctagctgccaggaaaggtacatgcatacaacaagtcgaacaggactaaccaatgagttgaacatgggccttgtattcatctcactgttgatgattcagttggaatagacccgccctagttcctaaagcctagctggcagaaaagatacagcaagccgaacatggctaaacaaggagttgaagatgggccttgtattcatctcatagttgatgatttacattccaaacattgttatcaaacat

SEQ ID NO: 397577 - DNA, 197 bp, Oryza sativa nipponbare
tccaaattcaagtatcaagtgtagtatatcatcatcatgcaagtgcagtgttacatagattaatcacaatgcagtttgattaagcagtgggcatcatcacatcgcattcagaggaaggctatcttaaattacaaatgaatatgcaaacacccaacttgggtgtacatacatagactggatttgggtgaaatttaacc

SEQ ID NO: 397578 - DNA, 269 bp, Oryza sativa nipponbare
  unsure (1)..(269): unsure at all n locations
gcgaacaaaactttcgaactcttttttttctccttggtttctgtgtcatttcattccgatggatagcaacangcagttcaaacaccataaccaaagcgaactcaattcatggnatcataacggacgaagaacacctnacactggatggatggatagagggctattagactctagagagccattggncactataacgactcgactcgatgataagatgattctgacacggatagctaaggataactggccacgatgggccccaccaatca

SEQ ID NO: 397579 - DNA, 245 bp, Oryza sativa nipponbare
  unsure (1)..(245): unsure at all n locations
ggggtgggtgggtgaagttcgattgaatataataaacctttttactagggaaaccacacgaattcacgattggttaattttactgngaatagcacgggtccatcacatcacacaaatttatacgttgatacacccatatgtcccgaaactacaagctgcataattaatcgataacacacgggtttaattcagcaataattaggacacacacaaaccacactcttatgggtggtttttattgtgga

SEQ ID NO: 397580 - DNA, 293 bp, Oryza sativa nipponbare
gcaaaccccaacttttttcagtttctgaattctggatggatcatatcagattcatcacagcatcgtacaatctgtgcaagcattggtacatcgagcgatggagagagagagtagtctacaatggcggctgggccattcacgagcccggcgtgaacttggtggcgtagacccaggcgttggtggcgacggggtctgcgaggtggtcgagcaggttctccaaggggcccttgccggtgacgatggcctggacgaagaagccgaacatggagaacatggcgaggcggccattcttg

SEQ ID NO: 397581 - DNA, 274 bp, Oryza sativa nipponbare
gcaaacaccaacttttttcagtttctgaattctggatggatcgtatcaaattcatcacagcatcgtacaatctgtgcaagcattggtacacccatcgatgtgcagagagagtttgtttcaaatgcgactggaccattcaccagcccggtgggaccttggccgcgtacacccatacggtcgtggcgacagggtccgcccgggggttgggcaggatctccaaggggcccttgccggtgacgatggcctggacgaagaagccggacatggagaacat

SEQ ID NO: 397582 - DNA, 126 bp, Oryza sativa nipponbare
gtatacgaaaaagagctatatatctatgtataatccacgagggacacgcacgtagtacaagtagtactccatgtacatgcagaagtccatatgcatatggtacaaaaactgatctctagctctcag

SEQ ID NO: 397583 - DNA, 280 bp, Oryza sativa nipponbare
  unsure (1)..(280): unsure at all n locations
cacttcccaacaccatgctgataagtattgggcccaaattgtctggcaattacatacccccacaggaagaggtacttagcacacttagtacaaccgagatggcagtgttctttgcatacnttcattttttcattacttgcatagcangagtgttatataacatgatttgagagaggattaggagctatgtagtngtnnttgttgtcatcgggtatctccacccgtggcttcttgctttggcgtgcaccgttcgccttgtagagccccatgttgctcgctg

SEQ ID NO: 397584 - DNA, 295 bp, Oryza sativa nipponbare
  unsure (1)..(295): unsure at all n locations
tttgatgaaaaccacttcgagacaatttactcaggtagcaaatgggtctgagccacaaatccaaacactgggtccttcctatcagaagatcagaatgaacaggttttcaaattcatctcccaactcgacgataatttacacgtacatttaacacattcttncacccttctcaaactcctgccttgttcttgccgggtaagattaaaattaacttgaggccagccagcgtcgccggcggcgagatgtttacaggctgggcgtcctctcggcggcgccggagatgacggtgagcagg

SEQ ID NO: 397585 - DNA, 180 bp, Oryza sativa nipponbare
  unsure (1)..(180): unsure at all n locations
tacgcctttctttctttttttttttgatgaaaaccacttcgagacaatttactcaggtagcaaatgtggtgagccacatatccaaacactgggtccttcctatcagaagatcanaatgaacaggttttcaaattcatctcccaactcgacgataanttacacgtacattgtacacattct

SEQ ID NO: 397586 - DNA, 293 bp, Oryza sativa nipponbare
atccatgcaggcagcctgtttgtgcccttgtgcagatgcatttcatttatacaagtagaaggcactcaaatcagccaccacatgaacacacacatgttccatcatcgatcgatctacacatgcatcacccggtcatgcacttacaaacaaaagatctacttgaagaagtacgggaggtcgagcacgtagaggaggaagtaggcccagaggacgccggagatgccgccgaagaagaagccgccggtgaacttggcccagccgtcggcggtctgcagcttgtcggcctccttctt

SEQ ID NO: 397587 - DNA, 315 bp, Oryza sativa nipponbare
ttgttgaagttcgattgagtatgatagacctttttactaggcaagccacacgaatacacgattgattaatttcactgagaatagcacgggtacatcacatcacacaaattcatacgttgatacacgcatagtcgccgaagcgaccagctgcttaattaatcgataacacacgggtttaattcagcaataatcagcacacacacaaaccacactcatatgggtggtttttattgtggactaattaaggtaggtgactcgccggcggcgagtgttcggttgcttcgtgacttcacttgccgcacttgcagtcggtgc

SEQ ID NO: 397588 - DNA, 424 bp, Oryza sativa nipponbare
ccacgcgtccggccgatcgtcgagcccgagatccttgttgatggccctcacgacatcgaccgctgcgcctacgtctcggaggtggtcctcgctgcgtgctacaaggccctcaacgagcaccatgtcctcctcgagggtaccctcctcaagcccaacatggtcaccccaggctctgacgccaagaaggtgtctcccgaggtcatcgctgagtacaccgtccgcaccctccagaggaccgtccccgctgccgtgcccgccatcgtcttcctgtccggtgggcagagcgaggaggaggcgaccctgaacctcaacgccatgaacaagctcagcaccaagaagccgtggtcgctgtccttctccttcggccgtgccctccagcagagcacgctcaaggcctggtccggcaaggcggagaacattgaga

SEQ ID NO: 397589 - DNA, 455 bp, Oryza sativa nipponbare
ccacgcgtccgatttgctcggggagttcgatgaggagaagaggagctgcacgaagcggctcgacgggcacaacaagcggcgtcggaagccgcagcctgatcctctgaaccccggcaaccttttcgccaatcaccacggagcggcatgattcacctcgtacccgcagatcttctcgacggcagcgtccatgtcgccgcaggagacgaagaggccggcgaacgtggtcaagacagaagccgccgacgtgaaccaatccctggagaacctcaagacctacccgttcgtcaaggaggggatcgccaacggcaccctcaagctagcaggctgccactacaacttcctctgcggcaacttgtacttatgggagccctaaatccgaccggccggccgatcagctcgtcagtttacgccaacacttttgcataagtactacctgacgttattgtccccgatca

SEQ ID NO: 397590 - DNA, 457 bp, Oryza sativa nipponbare
ccacgcgtccggggtcaggaccggtttccccgccaagaagaaggttcagaccgagcacgcctcgctgcctttcgatgaccaatgcgccatcttggagaaggaggccgtgaaccaatccctggagaacctcaagacctacccgttcgtcaaggaggggatcgccaacggcaccctcaagctcgtcggcggccactacgacttcgtctccggcaacttggacttatgggagccctaaatccgaccgtccgtccgttcagttcgtcagtttacgccaacgcttttgcataagtactacctgaggatatcgtccccgatcatcgatgtgaacgcgtggagtactactacgtacgtaccggatggttcgatatatgtgaatgctgtattaagtaataacaagaaatatatctcctctactttttcctgaccgcgggagtgtacttgctatgatgcattattt

SEQ ID NO: 397591 - DNA, 326 bp, Oryza sativa nipponbare
  unsure (1)..(326): unsure at all n locations
ntggacggacgcgtccgaccaactgagagctgagcaggcgagcgagcggacatggcagcatcgctccaagccgcgggcacggtgatgcagccggccaagctcggcggccgggcctcctccgccgcgctgccatcgcgcccgtcttcgcacgtcgccagggcgttcggcgtcgacaccggtgccgccggcaggatcacgtgctccctgcagtccgacatccgggaggtcgccaacaagtgcgccgatgccgccaagctcggcggcttcgccctcgccacctcagctcttgtcgtctcgggcgccagcgcggagggcgtgccgaggtg

SEQ ID NO: 397592 - DNA, 326 bp, Oryza sativa nipponbare
atggggatcaaccccatcatgatgagcgccggagagctggagagcggcgacgccggagagccggcgaagctgatcaggcagcggtaccgtgaggcggcagacatcatcaagaaggggaagatgtgctgcctcttcatcaacgatctggacgcgggtgcaggtcgcatgggaggcaccacccagtacacggtgaacaaccagatggtgaacgccaccctgatgaacatcgccgacaacccaaccaacgtgcagctccccgggatgtacaacaaggaggacaacccccgtgttcccatcatcggcaccggcaacgacttcttcacgct

SEQ ID NO: 397593 - DNA, 470 bp, Oryza sativa nipponbare
ccacgcgtccgcccacgcgtccgcggacgcgtgggttcatttagagttacttaatagcctatttcttataccatatctctatcccgtgaaattctcgagccgaaagatggatgcatatgctatgtttcattttgctaaatgatatcaattaaacggtgtatcaattccataaattggatatagcaataaataaatcagcaaaattcttttattttagatagaagaaacttttcttctatctaaaataaaagaatgtacccttctatccaaatccaatttgcatcgataaaataaatccaaattccagtagtagatgaataattgcaaatttttgtgtgtacgagattagaataacttcaaaataactgacataattttttatttttcctgatcagaaaaatacatgaaaaagaaaggaggtagaaaaatttttggatttatggttaaagaagaaaaagaagaaaactggg

SEQ ID NO: 397594 - DNA, 352 bp, Oryza sativa nipponbare
ccacgcgtccgatggggtgccacccgccaggctgccgcccccaagccggtgactgtctccatggttgtccgcgctggtgcctacgacgatgagcttgtcaagaccgcgaaaaccattgcatcaccaggaaggggtatccttgccatggatgagtcgaacgcgacctgcggtaagaggcttgcgtcaattggccttgagaacaccgaggccaaccgccaggcttaccggaccctccttgtcaccgcaccgggcttgggacagtacatctccggtgctatcctcttcgaggagactctgtaccagtcaactgtagatggcaagaagattgtcgacatcctcactgagcagaaaa

SEQ ID NO: 397595 - DNA, 306 bp, Oryza sativa nipponbare
ccacgcgtccgcagaagagcgccgcctggatcctcctcgcctacctcttcatggtcaccgtcgccggctacaccgcggggcagcgcgcccgccacgtcccgcgggggaagcacatcgccgccgtctccatcctcgccggcacctccgtcaccatggccctcctcgtggcgctccgggtgttcccgttcacgccgcggtacatcatcccggtggccgggatgatggtcgggaacgcgatgacggtgaccggggtgacgatgaagaagctgagggaggacgtggggatgcagcgaggggtggtggaga

SEQ ID NO: 397596 - DNA, 466 bp, Oryza sativa nipponbare
ccacgcgtccgcccacgcgtccgggcaaacaaagtttggaaacaatatgcctcctccttgcatacaaaatcaagtacccggagaatttttttcttctcagaggcaatcatgagtgtgcatcaataaacaggatatatggattttatgatgaatgcaaacgccgatttaatgtgcgtctatggaaggtcttcactgattgttttaactgtctccctgtggctgcgctaattgatgataaaatattatgcatgcatggtggcctctctcctgatctgacacatttagatgagataaagagcttgccccgtcctactgatgtaccggatacaggtctgctatgcgacctactttggtcagatccaggaaaagacgttcaaggttggggcatgaatgataagggggtctcatacacttttggtgctgacaaagtttcagaattcctggaaaaacatgaccttgatcttat

SEQ ID NO: 397597 - DNA, 438 bp, Oryza sativa nipponbare
ccacgcgtccgcaccacccacacattctcgaagaaggagaagaaggagaggagcagccatggcgtcgtcggtggcagcggcggcgagcacgttcctggggacgaggctggcggacccggcgccgcagagcgggaggatcgtggcgaggttcgggttcggcggcgggaagaaggcggcggcgaagaaggcggcgaggccgtcggcgccgacgacggacaggccgctgtggttccccggcgcggtggcgccggactacctggacgggtcgctcgtcggcgactacggcttcgacccgttcggcctcgggaagccggcggagtacctgcagttcgagctggactcgctggaccagaacctggccaagaacaacgccggcgagatcatcggcacccggttcgagaccggcgaggtgaagtccaccccgttccagccctacac

SEQ ID NO: 397598 - DNA, 465 bp, Oryza sativa nipponbare
ccacgcgtccgggaggagggggtgaggagagatgtcgacgccggcgaggaagcggctgatgcgggacttcaagcgggtgcagcaggacccgcccgccggaatcagcggcgcgccgcacgacaacaacatcatgctctggaacgccgtcatattcggaccggatgacacgccgtgggatggaggcacgttcaagctgacactacaatttacagaagattatcccaacaaaccaccagttgttcggtttgtctcaaggatgtttcacccaaatatttatgcagatggaagtatctgcttggatatcctacaaaatcaatggagccctatatatgatgttgctgcgatattgacctctatccagtccctgctctgtgatccaaacccaaactcccgtgcaaacttcgaagcagccagactggtcagcgagaacaagcgcgagttccaaccgaaagtccgcgagattgt

SEQ ID NO: 397599 - DNA, 355 bp, Oryza sativa nipponbare
ccacgcgtccgacacgacctctcactcataagccagttacctttatccgccaggttgaggcgctgctacaggccctattcctgctatacgatgccaacgtcggcgcttatcttcatcgtcggcgccatcgggcggccaagcactacactagactatggcgcccggtgggctaggtgcttacagtgattcccgaggtatccctggtattaggaaggaagtcggcgcgttcattgtgaggcgtgatggctatccaagtgatccataccttatttaccttacagattgggccagctaaagtgtgatgcatatgctgaataccacaatcagaaatgtgagagatcgcattctggtccct

SEQ ID NO: 397600 - DNA, 460 bp, Oryza sativa nipponbare
ccacgcgtccgggtgcatgcaggtgtggccgattgagggcatcaagaagttcgagaccctctcctacctgccaccgctcaccgtggaggacctcctgaagcagatcgagtacctgctccgttccaagtgggtgccctgcctcgagttcagcaaggtcggattcgtctaccgtgagaaccacagatcccccggatactacgatggcaggtactggaccatgtggaagctgcccatgttcgggtgcactgacgccacccaggtgctcaaggagctcgaggaggccaagaaggcgtaccctgatgcattcgtccgtatcatcggcttcgacaacgtcaggcaggtgcagctcatcagcttcatcgcctacaagcctccgggctgcgaggagtctggtggcaactaagccgtcatcggcatatataagccttgttaattggtcatctctgattcgatgatgtct

SEQ ID NO: 397601 - DNA, 366 bp, Oryza sativa nipponbare
ccacgcgtccgatgagaatggagccgctgggcagcctgacccttcaggcggaaacacctacgacgacgatttcaggtcgcaatatctgcaggattacatcgaggccacacttcaatccatcaggaacgggtcgaacgtgcagggctacttcgtgtggtcgttcctggacgtgttcgagtacctgttcggctaccgcctccgcttcggcctctacggcgtcgacttcgcctcgccggagaggaccaggtaccagaggcactcggcgcggtggtacgccggctttctccgcggtggcaagcttcggccggcggcgggggcgctttgccgctgggggacctactcccagtgatcaagggttttttttct

SEQ ID NO: 397602 - DNA, 356 bp, Oryza sativa nipponbare
ccacgcgtccgggcgagttccccggcgactacgggtgggacaccgcggggctctccgccgacccggagacgttcgccaagaaccgggagctggaggtgatccactccaggtgggcgatgctcggcgcgctgggctgcgtgttcccggagctcctcgcccgcaacggcgtcaagttcggcgaggcggtgtggttcaaggcggggtcgcagatcttcagcgagggcgggctcgactacctcggcaacccgagcctgatccacgcgcagagcatcctcgccatctgggcggtccaggtggtgctcatgggcgccgtcgaggggtaccgcatcgccggcgggccccttcggcgaggtcgt

SEQ ID NO: 397603 - DNA, 466 bp, Oryza sativa nipponbare
ccacgcgtccgggacgatgacgtcaccatcaaggtgctctactgcggcatctgccacactgacctgcacatcgtcaagaatgattggggcaacgccatgtaccccgtcgtccccggccacgagatcgtcggcgtcgtcaccggcgtcggcgccggcgtgaccaagttcaaggccggcgacacggtgggcgtgggctacttcgtcgcgtcgtgccgcggctgcgagtgctgcgggaatgggtacgagaactactgcgccaagatggtaaccacctgcaacggcgtcgaccacgaccacggcggcggcgcggccacccagggcggcttctccgacgccatcgtcgtcaacgagcactacgtgctccgcgtgccggcggggctgccgctggacaaggcggcgccgctgctgtgcgccggcgtgacggtgtacaacccgatggtgatccacggcctgaacgcgccggggg

SEQ ID NO: 397604 - DNA, 369 bp, Oryza sativa nipponbare
ccacgcgtccgcggacgcgtgggcggacgcgtgggcggcaccagctgctcctgcaccgactgcaagtgcggcaagtgaagtcacgaagcaaccgaacactcgccgccggcgagtcacctaccttaattagtccacaataaaaaccacccatatgagtgtggtttgtgtgtgtgctgattattgctgaattaaacccgtgtgttatcgattaattaagcagctggtcgcttcggcgactatgcgtgtatcaacgtatgaatttgtgtgatgtgatgtacccgtgctattctcagtgaaattaatcaatcgtgtattcgtgtggtttgcctagtaaaaaggtctatcatactcatacacaaaagaaaaatg

SEQ ID NO: 397605 - DNA, 444 bp, Oryza sativa nipponbare
ccacgcgtccgcgccgccactctctccgagctctcgcctctcctcctcccccgtcttcccttcgcgcgcgccacccccacacacgcgaccatggcggcagtggcaggaggcgcagcgcgggcgctgtcgcaggcggagcaggacgtgcagatgatgctcgccgccgacgtccacctcggcaccaagaactgcgacttccagatggagcgctacgtctacaagcgccgctccgatggtatctacatcatcaacctcggcaagacatgggagaagctgcagctcgcggcgagggtgattgttgccattgagaacccccaggacatcattgtccagtcggcccgcccctacggccagcgcgccgtcctcaagttcgcgcagtacactggcgcgcacgccattgctggaaggcatacgcctggtacatttaccaatcagctccagacc

SEQ ID NO: 397606 - DNA, 307 bp, Oryza sativa nipponbare
  unsure (1)..(307): unsure at all n locations
cctgcagtaccnaatcccaannncggccgaacctaccntccanttcccctgccactacagatgggacaccgtggggctctccttcgacccggagacgggcgccaagaaccgggagctggaggtgatccactccaggtgggcgatactcggcgcgctgggctgcgtgttcccggagctcctcgcccgcaacggcgtcaagttcggcgaggcggtgtggttcaaggcggggtcgcatatctttatcgagggcaggcttgactacctatgcaacccgagcctgatccacgcgcatagcattcttatccat

SEQ ID NO: 397607 - DNA, 447 bp, Oryza sativa nipponbare
ccacgcgtccgctctgctttgcagtgagattgccaagcacttgtcacttccaccagtaaagctccattgtagcatgcttgctgaggatgcaattaaagctgccgtgaaagactatgaagcaaagaaggcgaagctagcacaaaagggtgaagagaaggctgccgaagcatgagtgccagaggttctgtcatgaagaatgttgcagtgccctgcgtactcgtagtaaagaacctgtcatgaagaagtctctgctctgcttcttgctggcgggaaatagtgtgtaacgctcacaaactctatgcagcatgtatcataaggatgaaggcaaacatttttgaataaatgtgctgtcatcttgaaagaaaaaaaaaaggtgtatgcgtgtgtatggcctagtaatgaacatatggtacggaattacggtcgcgagataaggcacattgtttc

SEQ ID NO: 397608 - DNA, 384 bp, Oryza sativa nipponbare
cgcgtccgtaccagactggtgttagggtggttgttgcgtatggtggaccaccaatacatcaacagtggagggaattggaaaggggcggggaaatccttgtggcaactcctggtcggttgatggatctgctggagagggctagagtatcactgcaaatggtgaagtacttagctcttgatgaagctgatcgaatgcttgacatggggttcgagccgcaaattcgtaaaattgttgagcagatggacatgccccctcgcggtgtgaggcagacaatgttgtttagtgctacttttccaaaagaaatacagcgcatggcttcagatttcttggcggctacatcttccttgttgaaggaagagttggtcaaagtactggacttgattg

SEQ ID NO: 397609 - DNA, 466 bp, Oryza sativa nipponbare
ccacgcgtccggcagattgagtacctgctgagctacaagcgggtgccctgtctagagtacaacaaggtcggattcgtctaccgtgagaaccacagatcccgcggatactacgatggaatgtactggaccatgtagaatctgcccatgttcggatacactgacgccacccatgtgctcaaggagctcgaggaggccaacaaggcgtaccctgatgcattcgaccgtatcatacgtttccacaacgtcaggcaggggctgctgatgagattcatcggctacatgcccccaggctgcgacgagtctggtggcaactaagccgtcatcgacatatatagccttgtttaattgttcatctctgattcgatgatgtctcccaccttgtttcgtgtgctcccaggttgttcatcggcgtttgattttaccggccgtgctctgcttttgtttttggttcacctgatctctctct

SEQ ID NO: 397610 - DNA, 420 bp, Oryza sativa nipponbare
ccacgcgtccggcaagccaaacctgatctcatcattggcaattacagtgatggaaaccttgttgccactctgctggctcacaaattaggagttacccagtgtaccattgctcatgccttggagaaaaccaaataccccaactcagacatatacttggacaagtttgacagccagtaccacttctcatgccaattcactgctgatcttatcgccatgaatcacactgatttcatcatcaccagtacattccaagaaattgctggaagcaaggacactgtggggcagtatgaatcacacattgcattcacccttcctgggctttaccgagttgtgcatggcaatagatgtttttgatcccaagttcaacattgtctctcctggagctgacatgagtgtctacttcccgtacaccgaggctga

SEQ ID NO: 397611 - DNA, 404 bp, Oryza sativa nipponbare
ccacgcgtccgcatttcttttttttgacacgaggaactcatcatgaatccactaattgctgctgcttccgttattgctgctggattggccgtaggtcttgcttctattgggcctggagttggtcaaggtactgctgcaggacaagctgtagaaggtattgcgagacagccagaagcagaaggtaaaatacgcggtactttattgcttagtctagcttttatggaagctttaacaatttatggactagttgtggcactggcgcttttatttgcgaacccttttgtttaatcctaaaaaagaaaacgagtcctttagattagatactttcttctttttttagtaaattggtatttgcttctgcaattccaattatatcaatactttactcctaatttattactcct

SEQ ID NO: 397612 - DNA, 465 bp, Oryza sativa nipponbare
ccacgcgtccgcggacgcgtgggcttgagcttgcaacatctctccttgcaaaggcaaaagaaaagggtgtctcccttctgttgccatctgacgttatcattgctgataagtttgctcctgatgctaacagccaggttgttccagcatctgctattcctgatggttggatgggtctggatattggtccagattcagtcgcgtcattcagctctaccctggaaacaacacagacagtcatttggaatggacctatgggtgtcttcgaatttgacaagtttgcagtaggaactgaggctattgcaaagaagttggcagaccttagcggcaagggtgttacaaccattattggaggaggtgattctgttgccgctgttgagaagggtggagttgcagatgttatgagccacatttcaacgggaggtggtgctagcttggagctgttggaaggaaaggaacttcctggag

SEQ ID NO: 397613 - DNA, 435 bp, Oryza sativa nipponbare
acgcgtccgctactgctataaggagcgcgccgtgcaccgcctctcacaatgtcgaccgccgccgccggcggcgctgcccagagctggtgcttcgccactgtcaccccgcgctcccgcgccacagtcgtcgccagcctcgcctccccatcaccgtcctcctcctcctcctcctccaacagcagcaacctcccggcccccttccgcccccgcctcatccgcaacacccccgtcttcgccgcccccgtcgcccccgccgcgatggacgccgccgtcgaccgcctcaaggatgggttcgccaagttcaagaccgagttctatgacaagaagccggagctcttcgagccgctcaaggccggccaggcacccaagtacatggtgttctcgtgcgccgactctcgcgtgtgcccgtcggtgaccatgggcctggagcccggc

SEQ ID NO: 397614 - DNA, 306 bp, Oryza sativa nipponbare
ccacgcgtccgccagcaccgaccatggccgccgtcacggctgcggccgtctccacctccgccgctgctgcagtcaccaaggcatcgccgtcccccgtccactgcttcctgccatgcccgccaagaaccagagccgcccaccagcgcggcctgctgctgcgcgcgcaggtgtccaccaccgacgccgccgtcgtcgccgccgcgccggccaagaaggagaagatatccaagaagcatgacgagggcgtcgtcaccaacaagtacaggcccaaggagccctacgtctgcaagtgccttcttaacacca

SEQ ID NO: 397615 - DNA, 324 bp, Oryza sativa nipponbare
ccacgcgtccggttgggtctggcggaggacccggagaacctgcggtggttcgtgcaggcggagctggtgaacgggcggtgggcgatgctgggggtggccgggatgctgctgcctgaggtgctgacgaagatcgggttgatcgacgcgccgcagtggtacgacgccggcaaggccacctacttcgcgtcgtcgtcgacgctgttcgtcatcgagttcatcctgttccactacgtggagatccggcggtggcaggacatcaagaaccctggctgtgtcaaccaggaccccatcttcaagagctacagcctcccgccgcacgagtgc

SEQ ID NO: 397616 - DNA, 376 bp, Oryza sativa nipponbare
ccacgcgtccgcccacgcgtccgcttttttgcatgcaaaagcatcaacaaaggacgaatatgacacgccgatattagcagaagcgcttcctcgggaagttgctgaccctttcgattatggaggagggaacataaatcctattggagctgctgatcctggcctaatttatgacatcgatccaaaggattacaacaaattcttcgcttgtcagatcaagaaatatgagatctgtaacattacgacattgccagcctatcacctgaatctgccttctatatctataccagacctaaggcatccaataaacgtacgacgagcagtcactaatgtcggggaggtggatgcggtttaccaatcctctatagaatcccccctt

SEQ ID NO: 397617 - DNA, 458 bp, Oryza sativa nipponbare
ccacgcgtccgcccacgcgtccggaggacatatgacttcatccatgctgataaaatattcagcttttatcaggacaggtgtgacgtaacatacattctcctggagatggaccggattctaaggcctgaagggacagtgattttcagggacacggtggaggtgttagtgaagatacaatcaattacagaaggcatgcggtggaagagccaaataatggatcacgaatctggtccattcaaccctgagaagatacttgtggctgtcaagacttactggactggacaacccactcaaaagcagtagtggcttttcttttcagcagcagatgttcccttttggtttttccaattttcgtttagctccaggttcaggttgtgtgtaaatatgaggcgatgtgattgggatagtatcaccacgatcttgtggcctggttcattggctgcattgcattcttggga

SEQ ID NO: 397618 - DNA, 175 bp, Oryza sativa nipponbare
ccacgcgtccgaatcggcgccttcctctctctcgcgtcaccggcttcttcttctcgcgatctatccaaacagagggctcgctaagatcggcatgtcggactctgaggagcaccattttgagtcgaaggccgacgctggggcgtccaagacctattcccagcaggccggaaccatc

SEQ ID NO: 397619 - DNA, 211 bp, Oryza sativa nipponbare
cgcgtccgcttgtaacaacaatctctgggagataacaaaagcttcttttggtgttttatttgggaagtcgagtcttcaggaaccagcattccaagaactgatcctactttatactgatgaggctgatcaaagcatagagagagaaaattcagacatgatgccatcgcaactgaaaatttttgaaaggatccccaaccctgatctgccagtg

SEQ ID NO: 397620 - DNA, 455 bp, Oryza sativa nipponbare
ccacgcgtccgatcagagatcaggtagaacagtgagagtgaggtgcagaaaaatttgagctgaagctgaggatggcaacatccatgatcacctcgccgctggtggcgccggcccgggccaagggccttccgtccatctcccgccggggatcctccttcgccatcgtctgcagcggtgggaagaagatcaagaccgacaagccctacgggattggaggtggcatgtcagtcgatattgatgcatctggcaggaagagcacggggaagggtgtgtaccaattcgttgacaagtacggcgcaaacgtcgacggctacagcccaatctactcgccggaggaatggtctcccaccggtgacacctacgttggtggaaccaccgggcttctgatctgggccgtgaccctcgccgggctcctcggcggcggcgccctcctcgtctacaacaccagcgccctc

SEQ ID NO: 397621 - DNA, 326 bp, Oryza sativa nipponbare
ccacgcgtccgctcaagaagtactcgagcaaagaaggagagagcttggtgagctgcagagatggccccctccgtgatggcgtcgtcggccaccaccgtcgctcccttccaggggctcaagtccaccgccggcatgcccgtcgcccgccgctccggcaactccagcttcggcaacgtcagcaatggcggcaggatcaggtgcatgcaggtgtggccgattgagggcatcaagaagttcgagaccctctcctacctgccaccgctcaccgtggaggacctcctgaagcagatcgagtacctgctccgttccaagggggtgccctgcct

SEQ ID NO: 397622 - DNA, 442 bp, Oryza sativa nipponbare
ccacgcgtccgctctcttctcatcaagcctcaatcaaaaggcttgaagggaagaagagcaactccagcaggtagaaaggccagaagcaaagatggcgatctccagcctacatgccaccacctccctgcactccccatgcaccaccaacacaagcttcaggcagaatcaggtcatcttcttcaccaccagaagcaacaggaggggtagcacaaggtacggaggagcaagaacctttcaggtttcatgctcagtcgacaagccagtggtgattggccttgcagcagactcaggatgcgggaagagcacctttatgcgccggctcaccagtgtggttggtggtgctgcaaagccacccaagggtggcaacccaaactcaaacacactcatcagggacccgacaacggggatatgcctcgatgactaccattccttggacaggact

SEQ ID NO: 397623 - DNA, 382 bp, Oryza sativa nipponbare
ccacgcgtccggttttagccctagacttcattgaaagtgtgattaagaagaatgagaacataaatgggcatcacaagaacataacctttatgtgcgctgatgtcacgtctccggacctgacgatcgaagataactctattgatctcatattctcaaactggctactaatgtacctttcagatgaggaggtcgagaagctagtaggaagaatggtgaaatggctgaaggtaggtggccatatattctttagggagtcatgctttcaccaatctggagattccaaaaggaaggtgaatccaacacattaccgggagccaaggttctatacaaagatatttaaagaatgccattcctatgataaagatgggggtttctttgattc

SEQ ID NO: 397624 - DNA, 218 bp, Oryza sativa nipponbare
ccacgcgtccgcccacgcgtccgcgcacgcgtaggggcgcgactatctccatcctccttgcatacaaaactgaagaggcgagagaagagattaatccttagaggtaaccatgactgtgcattactctacatgatatatggattttatgatgtatgctatcgccgatcaaatgtgcgtctatggaagggctacactgatagagacaactgtgtggatgt

SEQ ID NO: 397625 - DNA, 467 bp, Oryza sativa nipponbare
ccacgcgtccgcggacgcgtggggcgcaggtgtggccgattgaaggcatcaagaagtttgagaccctgtcgtacctgccaccgctcacggtcgaggacctcttgaagcagatcgagtacctgctccggtccaaatgggtgccttgcctcgagtttagtaaggtcgggttcgtctaccgtgagaaccacaggtctcctgggtactatgatggcaggtactggactatgtggaagctgcctatgttcggatgcactgatgccacccaggtgctcaaggagctcgaggaggccaagaaggcatatccagatgcatttgttcgcatcatcggcttcgacatcgtcaggcaggtgcagttgattagcttcatcgcctacaagcccccgagttgcgaggagtccggcggtaactaatctagttggcaagccagcaagcttactcgtgagctctatacagaggaaactcgattg

SEQ ID NO: 397626 - DNA, 427 bp, Oryza sativa nipponbare
ccacgcgtccgaaccactgaacatttacctttggacaggctcatggtgaacctacttcatgaccactcccggtggatcgcaagttaccatgaacatgaaacccttctgcaagaaaatgaagaagaaaggcttaccaaggaggagcaagatatggcatggttaagctacaacaagttgctagaagttgccccgaggaaagctacacatgacgccgagagaaaaccaagtactgttccaacagagagcagccttatacaaccacctaaagctacttcaagaagccggcaaccccagcagcctaagatcacttcaaacaaccaaaagaagtgtaacaacctgagccacttgcttactctgagaagccaaggcaccaagcctggatgcagcacgagttgcaaagaatgtggccaggatattagttgggaga

SEQ ID NO: 397627 - DNA, 260 bp, Oryza sativa nipponbare
ccacgcgtccgcacaaaaacaacccatccggcgtcggatcgcccatgttagaacgatggccgagtaggggctggagcagaccactcagcttcctcagggacgcagcccctcgacgggatgagctcgtccgccgcgtgcgagactccggcggcctgataaacatgcgccgcactcgtcaagagcgcgccccagaccatgtggtgtggacctgaccgtcccaagtacctagagccggtctctgagcacacgccatcagacct

SEQ ID NO: 397628 - DNA, 361 bp, Oryza sativa nipponbare
ccacgcgtccggtcggattcgtctaccgtgagaaccacagatcccccggatactacgatggcaggtactggaccatgtggaagctgcccatgttcgggtgcactgacgccacccaggtgctcaaggagctcgaggaggccaagaaggcgtaccctgatgcattcgtccgtatcatcggcttcgacaacgtcaggcaggtgcagctcatcagcttcatcgcctacaagcccccgggctgcgaggagtctggtggcaactaagccgtcatcggcatatatagccttgtttaattgttcatctctgattcgatgatgtctcccaccttgtttcgtgtgttcccagggtgttcatagtcttttga

SEQ ID NO: 397629 - DNA, 447 bp, Oryza sativa nipponbare
ccacgcgtccggagcacaagaaagcataagcaacacaagggattaactcatcactcacttagctaattaaatcttcgaccatgtcggacaagtgcggcaactgcgactgtgctgacaagagccagtgcgtgaagaaaggtaccagctatggcgtcgtcatagttgaagccgagaagagccacttcgaggaggtcgccgccggcgaggagaacggcggctgcaagtgcggcaccagctgctcctgcaccgactgcaagtgcggcaagtgaagtcacgaagcaaccgaacactcgccgccggcgagtcacctaccttaattagtccacaataaaaaccacccatatgagtgtggtttgtgtgtgtgctgattattggttgattaaaccccggtgttatcgattaattaaacagctggtcgcttcggcgactatgcgtgtatcaacgtat

SEQ ID NO: 397630 - DNA, 434 bp, Oryza sativa nipponbare
ccacgcgtccgaaaaaaagggaaggaatttttttcttttttttttgttcgcctccgcttcttcctgacgcagctctcgcctcgcctcgccgcccgccactagagaggagagggagaaggaggaggaggcaaatcccagcaaaagaagatgcagatcttcgtgaagaccctgacggggaagaccatcaccctcgaggtggagagcagcgacaccatcgacaacgtcaaggccaaaatccaggacaaggaagggatccctccagatcaacagcgtttgatattcgccggcaagcagctggaagatgggcgcacactggccgactacaacattcagaaggagtcaactcttcacttggtcctcaggctcaagggtggcactatgatcaaggataagacccttactggaaaagaaattgaaattgacattgagcccac

SEQ ID NO: 397631 - DNA, 370 bp, Oryza sativa nipponbare
ccacgcgtccgcggacgcgtgggataaagtgtctcttgaagaaattctatggaatgcgcaaggcagcacctctgattatacccccaggcaagactttatttgactcaattgattcagatggtacttgccctgcatggctgtcagaagaagacatttcctactatgccgagaaatttgagaagactggatttactggaggattgaactactacagatgcatagacttgaactgggagctgactgcaccatggactggagttccaataaaagttccgacaaaattcatcgttggagatcaggaccttacgtacaacattccaggtgtaaaagattacatccacaagggtggtctaatggcatgtgtgccaaa

SEQ ID NO: 397632 - DNA, 378 bp, Oryza sativa nipponbare
ccacgcgtccgccgggaggttcgtcgccggcatcggcgtcggctatgccctcgtcatcgcccccgtctacgccgccgagatctcccccgcctcctcccgcggcctcctctcctccctccccgagatatttatcaatgggggagtgatgctgagctacgtgtcgaacttcgccttctcggggttgccggtgcacctgtcgtggcggctgatgttcgccgccggcgtggtgccgacggtgttcctggcggcgggcgtgctcaccatgccggagtcgccgcggtggctggcgatgaatgggcggcgcggctaggcgagggtggtgctcgaccgtacgtccgacacgccggccgaggccgagcagcggctgcaggagatcga

SEQ ID NO: 397633 - DNA, 446 bp, Oryza sativa nipponbare
ccacgcgtccgatgaagttcatgctcaagacaaaggtagttggggttgatacctccggagatggtgtgaagctaacacttgaacctgcagctggaggtgagcagagtgtcattgaagctgatattgtattggtttctgctggaagagtcccatatactgctggtattgggttggaaagtgttggtgttgagacagacaaagctggcaggatcctcgtggataagcgcttcatgactaacgtcaatggagtctatgcaattggggatgccatccctgggcccatgcttgcccacaaagctgaagaagatggtgttgcctgtgttgagttcattgctggcaaggaggggcacgtccactatgacacaaggcctggtgtggtctatacacatacagaggtcgcgtctgttggaagactgaagagcaggggaaagctttaagaattccct

SEQ ID NO: 397634 - DNA, 256 bp, Oryza sativa nipponbare
ccacgcgtccggaaaataatggcgttggagacgtgcttcagagcctgggcgactctgcacgccccacagccaccgtcctccggcggcagtagggacagactcctcctctccggcgccggcagcagccagtccaagccaaggttgtccgtcgcctcgccgtcaccgctccgacctgcctcccgcttcgcctgccagtgcagcaacgtcgtctacgaagtggtggtggcggtcgagaagatctggtacagcattggtg

SEQ ID NO: 397635 - DNA, 398 bp, Oryza sativa nipponbare
ccacgcgtccgcccatgtccaggagtactggagggtcttcgacttcttgtcccaccaccccgagagcctccacaccttcttcttcctcttcgacgacgtcggcatccccaccgattaccgccacatggacggcttcggcgtcaacacctacaccttcgtcacccgcgacgccaaggccaggtacgtcaagttccactggaagcccacctgcggcgtcagctgcttgatggacgacgaggccacgctcgtcggcggcaagaaccacagccacgccacccaggacctctacgactccatcgccgccggcaacttccccgagtggaagctgttcgtccaggtgatcgacccggaggaggaggggaggttcgacttcgacccgctggatgacaccaagacat

SEQ ID NO: 397636 - DNA, 316 bp, Oryza sativa nipponbare
ccacgcgtccggttgctacgagtacttgctaggaagaaactgcagtgtgctctgttccaaagagtagtgatggcttctgcctcttctcttggcctattactgatgctcgcggcgctggtctccacggccaccgcgcatttgtcgccgacgttctacgacacgtcgtgcccccgagccatgtccatcatcaagagcaccgtgacggccggcgtgaacaacgagccacgcatgggcgcgtctctgctcaggctgcacttccacgactggttcgtccaagcacgtgttcatctcacaaaccaccctgtttttttttttt

SEQ ID NO: 397637 - DNA, 451 bp, Oryza sativa nipponbare
cccacgcgtccgctaactctggaaaggagactgcgggctgctggtgaggaagcgaagtcagtagaaatattaaagcgcgacaaactgatagaatcattaagtgccaaatgtgctgctgccaagtcggctgctcaaagcgaacacgacaaaaatctgctactccagaggcagttggatgattcattgagagagataactatgttgcggagtagcaagattatgacagcagaagcagaaagggagaactccaatctgaagaacttagttgaatcattgtcaaagaataattcatcacttgaatatgaactcacctcagctcgtaaaggtagtgatgctacgatgaagaaattgaaagacgtagagggaaaatgcaaccatctccagcaaaatttggacaaattgcaggaaaaacttacaaacatggaaaatgaaaatcatgttcttaggcaaa

SEQ ID NO: 397638 - DNA, 473 bp, Oryza sativa nipponbare
ccacgcgtccgcccacgcgtccgatcaactcaacgtcagttaaagtcagcaaagcactccacaagtcgacttctggaccagagaaagaaagcgagtatgtcatattacgagaaaagggtaaagttcacctcattcgcgactccaaggattacatcgagatgacagtatctgagttgcagaacaaccctatcaactacacacagattgctgtgctggcagatgatatcttgaaaaatgttgaggatgatgctctaagggttgtttttaacaagttccactcggtcatatcattcaagcccacaatgacaaccatactttccccagaggttatggagaaagaatcggaatctggtaaggttggtgacctggattcatatgaaattgaaggaggtgaaactaaatcagaaattcttcagaatcttaccgagttccagttttcttgtgttatgtataatgctgctctagagaatgca

SEQ ID NO: 397639 - DNA, 325 bp, Oryza sativa nipponbare
  unsure (1)..(325): unsure at all n locations
ccacgcgtccgcccacgcgtccgcccacgcgtccgcccacgcgtccgccgtgagcgatcgacaggaggacttggcggaggaagcggctgcntctttcttttttgctgaagtgttgttgactattttgtttgtgtttgtcttttgttatttcttctatgttttctctttcttgtgtttttttattattttttttgtttctttttctttttttttgtattttttttttctttttttttttttttgtttttttgttttctcttttttttttttttttatttttttttctttttattctttgttttctatttttagtttttttttattt

SEQ ID NO: 397640 - DNA, 355 bp, Oryza sativa nipponbare
ccacgcgtccgcggacgcgtgggcggacgcgtgggaaaaaaaaaaaaaaaaaaaaaaaaaaagacaaacgatgtaaaaaaaaacaagataacaaacacatacatacaaaaaaaataggggcggccttttttgaggctccatgctttcctccgcccgcttgcttacaacttggtgtcttttggtgtcccttaaattaccttccttggccgccttttaacaccttcgtgtttgggaaacccctggcattaccaaacttaaccgcctggtagcacatccccattttggcagatgctgtattaccaatgaggcccgccctgttggccctttccaacttttgcgcatgctgtatgtacaa

SEQ ID NO: 397641 - DNA, 396 bp, Oryza sativa nipponbare
ccgtctggcgcggagcctgagctgatgctgaacaaccgtgtctacacctgccacaatgtccagggcccgcatagcgactatggatacgggttccttgaccggaacgcgcgcaacagccaccaatacacttgcaagtacaatgatccactccagcagagcacggagaacaagccatcgccaccggccatcttcccggcaacctacaacacgccgaaccaggctctgaacaatctggatttcggcctgcccatggatggccagaggtcaattacagagctgatgaacatgtacgacaacaacttcggggccaacaagaaccttagcaaccacaatggcacgatcatggagaggcctaatgcaggcaacccaaggatacagattgaagaagggcttttt

SEQ ID NO: 397642 - DNA, 267 bp, Oryza sativa nipponbare
  unsure (1)..(267): unsure at all n locations
ccacgcgtncgcccacgcgttcgggaacgaggaaaaggatcccttcgaaagaattgaacgaggagccgtatgaggtgaaaatctcatgtacgggatctgtttagggacaaacaacccgacttatctgtcaacttttccactatcaaccccaaaaaacccaactctgccttacctaaagttgccagagtacgattaacctctggatttgaaatcactgcttatatacctggtattggccataatttacaagaacattctgttgtatta

SEQ ID NO: 397643 - DNA, 468 bp, Oryza sativa nipponbare
  unsure (1)..(468): unsure at all n locations
ccacgcgtccgcggacgcgtgggtgacacactctgtgacctgtatgagacactggccatcacgcagagtgtcatctttgtgaacacccgccgcaaggtggactggctcactgataagatgaggggcagggatcacacagtttctgctacccatggtgacatggaccagaacactagggacatcatcatgagggagttccgatctggttcttcccgtgtgctcattaccacggaccttcttgcccgtggtattgatgtccagcaggtgtcccttgtcatcaactatgatctgccgacccaacctgagaactacctgcatcgcattggtcgtagtggtcgtnttggtaggaaaggtgttgccattaactttgtgacccgtgacgatgagaggatgctgtttgacatccagaggttctacattgtggggattgaggagctgccggccaacgtcgttgaccttctggatcaa

SEQ ID NO: 397644 - DNA, 438 bp, Oryza sativa nipponbare
ccacgcgtccgcccacgcgtccgaagtactcgagcaaagaaggagagagcttggtgagctgcagagatggccccctccgtgatggcgtcgtcggccaccaccgtcgctcccttccaggggctcaagtccaccgccggcatgcccgtcgcccgccgctccggcaactccagcttcggcaacgtcagcaatggcggcaggatcaggtgcatgcaggtgtggccgattgagggcatcaagaagttcgagaccctctcctacctgccaccgctcaccgtggaggacctcctgaagcagatcgagtacctgctccgttccaagtgggtgccctgcctcgagttcagcaaggtcggattcgtctaccgtgagaaccacagatcccccggatactacgatggcaggtactggaccatgtggaagcttgccatgtttcggtgcact

SEQ ID NO: 397645 - DNA, 312 bp, Oryza sativa nipponbare
  unsure (1)..(312): unsure at all n locations
cccacgcgtccgcccacgcgtncgcggacgcgtgggttctcacttactttcttaatacccgcgccaacctcaaaaatggcttcattttgggacggaggaagtatatatcagtacaagaattagaatgatattctcctctgttaacctaaccacctggggtctttgattttccatgttctaatataggctatgtaactttattagtgatggaatcttatttatttactttgcaggagatacgtacaggagatatattcctcagtcggattacttttcgcggggactttacacgtttgacataggtcaaaatga

SEQ ID NO: 397646 - DNA, 466 bp, Oryza sativa nipponbare
ccacgcgtccgtgcacaaccgcagctggtactaatgtcatctttggcctcgctctgggatacaaatctgagatgtattcctatgtaccgctatgagcttgcatgtattttcctgcagctttagcctcgccgcaatgtacggagtagctgtcgctgcccttggaatgcttagcacaattgcaactggtcttgccattgatgcctatggccctatcagtgacactgctcgaggaattgctgagatggctggcatgagtcacagaattcgagagagaactgatgctctggatgctgcacgaaacaccactgctgccatcgggaaggggctcgccattggcttagcagccgtggtgtctcttgccctctttggtgcctttgtgagccgtgccgccatcttcacttgcgatgttctgacacctaaagttttcattggactgattgttggtgctatgctcccatactggttc

SEQ ID NO: 397647 - DNA, 435 bp, Oryza sativa nipponbare
ccacgcgtccgcccacgcgtccgcgaacgaggaaaaggatcccttcgaaagaattgaacgaggagccgtatgaggtgaaaatctcatgtacggttctgtagagggacaggaagggtgacttatctgtcgacttttccactatcaaccccaaaaaacccaactctgccttacgtaaagttgccagagtacgattaacctctggatttgaaatcactgcttatatacctggtattggccataatttacaagaacattctgtagtattagtaagaggaggaagggttaaggatttacccggtgtgagatatcgcattattcgaggagccctagatgctgtcgcaagaaagaatcgtcaacaagggcgttctaaatatggggtcaaaaagccaaaaaaataaaggattcgttttagcccttaataaaagaaaacggatt

SEQ ID NO: 397648 - DNA, 429 bp, Oryza sativa nipponbare
ccacgcgtccggtgccaaggtcatcctctccagccacctgggtcgcccaaagggtgttactcccaagtttagcttggctccccttgtaccgcgattgtctgaacttctcggcatacaggtgactaaggcagaagatgttattggaccagatgttgagaaattggtatctgaattgccaaatggtagtgttttgctccttgaaaatgttagattttacaaggaagaggagaagaatgacccagagtttgccaagaagcttgcctccttagcagatctctatgtcaatgatgcattcggaacagcccacagagcacatgcatcaactgaaggagttaccaagtttttaaaagcctctgtcgcaggattccttttgcagaaggagcttgactaccttggtggagctggttcaagccctaacccccatttgct

SEQ ID NO: 397649 - DNA, 333 bp, Oryza sativa nipponbare
tcaatccaggcaattgatatttggtaatgtgttacacaaaagggttccggaattattacgacaagacattttagataaccatagattgccctctagatatcaaaaccacattaagcaacagccgcagaatgttccaatggtagccagcacctcccaaggcaaatcagtacttgtagtccttgacgtgaaggctctcggaggcgccctcgccgaggacagcgtcacccttgtatgtaccgagggtagcctcggagttggccttgcacctggtaaggaaggccgccctggccttctcaatgttctccgccttgccggaccaggccttgagcgtgc

SEQ ID NO: 397650 - DNA, 423 bp, Oryza sativa nipponbare
taaaaaggtaaactcttcataataatattattaagacattggagctgatgtcttttgatcacactgcgatcaaattatgcatcataggcagtacaactccgcgtcaggaaaaagtagaggagatatatttcttgttattacttaatacagcattcacatatatcgaaccatccggtacgtacgtagtagtactccacgcgttcacatcgatgatcggggacgatatcctcaggtagtacttatgcaaaagcgttggcgtaaactgacgaactgaacggacggacggtcggatttagggctcccataagtccaagttgccggagactaaatcttagtggccgccgactagcttgagggtgccgttggctattcccttcttgacgaacgggtaggtcttgaggttcttcagggattgttcacgtt

SEQ ID NO: 397651 - DNA, 309 bp, Oryza sativa nipponbare
aaaaaaggtaaacgtgttcgtgaataatattattaagacattatagctgatgtcttttgatcacactgcgatcaaattatgcatcataggcagtacaactccgcgtcaggaaaaagtagaggagatatatttcttggtattacttaatacagcattcacatatatcgaaccatccggtacgtacgtagtagtactccacgcgttcacatcgatgatcggggacgatatcctcaggtagtacttatgcaaaagcgttggcgtaaactgactaactgaacggacggacggtcggatttagggctcccataa

SEQ ID NO: 397652 - DNA, 184 bp, Oryza sativa nipponbare
ggaaggcaaatgttcgtgaagataggcgcatatatgtatcgtacaatgtcctctccgcttgtcgaaatgcaaataacattattgggggatatgatcattagttcacgggaaccgaggaaggaaccaaagcttaaaattaaaacccttaacaggccgatcgaggttgcattactagatacacaca

SEQ ID NO: 397653 - DNA, 546 bp, Oryza sativa nipponbare
  unsure (1)..(546): unsure at all n locations
ctatgagcacgcatgcacgcgcacggatgctcgagagcggtacgagcttctttttttttttttagtatagcccatatctttatattatattattattaacaaaaacttggcatgcccagctatggcttgggcgcgatctgatacacagaacaaagagaaaacataaaaaggagaaataattaatagcaagcgtcaagccggcctgcttaaaaggtgtaaaggcagctgccgtcgtcgctcctcgccgttgggtcgaagttcttggcaacagggtcggtgcaaccttccggcacaggcaggttacctgcttgctgggctccttgccctcctcctcctatgcaggccgnctacgatgcatcgatgggatgcgaatagctagagatctnttattcagctggatggcgcagaaccgtagaaggaaccagtcttcatggcgtcggagttagcgtcaccaagagcagcctcgctcaagtactgctcagccagctgcacacgctttacgttctcctgctccttcacaagcatgtatccgactccatgagcttt

SEQ ID NO: 397654 - DNA, 443 bp, Oryza sativa nipponbare
atgttatgtatctgtgttcttattcttttttctttcttaaggaattcggctatctcctgcctaagtagctttcctatttgccgattttttccattcctctgtgtaaatagcctaatatgggttcacaatcaataacatcttcaccatcgagagtaacgatcagtcgaagaacaccatgcattgatgggtgctgagggcccatattgactatcatgagatcttttcttgtaagcggtagactcatatcctttcttccttaattcattattccatgaaaatggattattccatgaattcctcaaaacgaggctcatcaaaatgcaaaatctaagactactataagactactaataaaataagaaaaaaaattcgaacgatgaaattaccgctccctaatatccaactgactgattaatttcttaataacgtactctatttttctt

SEQ ID NO: 397655 - DNA, 286 bp, Oryza sativa nipponbare
gcagaggcaaaacacgaggtatgtatatcaaacgctctagaaaagattcatgtgatgaaatacatgatgaaccacgtatgttctcaaggtaaaattaattaatgcagtatagttttaactttgtccatcgatctcaacctgtaactgtgacgacacactggctacagtgccctcgaggtactagcagtatagcagtagctgtagtacgtagcagcagcagcagcaggttcactgtcttgattggattggatcggattagtagacgtagttcttgacgaacatgccc

SEQ ID NO: 397656 - DNA, 299 bp, Oryza sativa nipponbare
tagtcatcaacacatgatttattatggaagaagaaattaacgtcaagagatacacactcttactttctctctcgtcctactaagtaagtactcaacaactaattactactactactaatcactaagcagtaatccataatgaatcaaaatgcaaggtgttgtggaagagggaagattagtcggcggcgaagacggcgtcgttgagctggaaggcgccggtgaagaaggccggccagcagaggtaggtggagaggatgctgctgacggtggaagcgcccatgagcatgttcatcaccacg

SEQ ID NO: 397657 - DNA, 392 bp, Oryza sativa nipponbare
  unsure (1)..(392): unsure at all n locations
gatcgatcgatgtacaagtggatgcattaattcatcatcttgggtgtgcttatattacaaatcaccaccatgcaagtcgccattaaccaccaacccagctttcctaatttaagtagtaatcaacaaaaggatgacctctcctctctccataccctcccagctcgctcgtcatcacaaaactaaacagcgcgcgcgaacgcacaccaacgcatcgatcccgtttgaattgcgcgcgaaagagcttaaattaagaggatgaggagaaggtgtcgaagatggtggtgtggagcgggtcgctgaggtgggtggcccagttgttgaggggccccttgccggtggcggcggcctgcacggcgaagccgaggaaggcgaccatggcgaggcnggcgtgc

SEQ ID NO: 397658 - DNA, 287 bp, Oryza sativa nipponbare
acataagcatcaataccttataaattcatcaaataggtagccactacgtggggaaaacaagtaggggaaggcaggggatcaagctcaggcattacaacaactgaagattttttatgtttttagtaggtgatacagaccgggaaagccagaattgcatatctttaggagaagcttgttgcagaaactgcaactcaatcatgtccttggcttagtcggccgtccagctctgctccacaatctcgcggactttgcggttgtactcgcgcttgttctcgctgaacagtctg

SEQ ID NO: 397659 - DNA, 302 bp, Oryza sativa nipponbare
ggataaatatatatagccggagcttccatatgggtcagggacatatgcctcacccaacaacatatagtcgtagcagataccactcttacatcaagtcagagagagatcaggtgaaacaaaaacaaaagcagagcacggccggtaaaatcaaaagacgatgaacaaactgggaacacacgaaacaaggtgggagacatcatcgaatcagagatgaacaattaaacaaggctatatatgacgatgacggcttagttgccaccagactcctcgcagcccggaggcttgtaggcgatgaagctgat

SEQ ID NO: 397660 - DNA, 405 bp, Oryza sativa nipponbare
  unsure (1)..(405): unsure at all n locations
aagccacaacaccatatttcattgatcaggttcagagcctgcacagaaatacacactaccggtacagatctcaccctctctccaatactcgtacatccatccacgcggtccacacgaatacgtacatctatacggtacacgtacgtacatctactgcaccgngtacacacacgcacactctcctgcagagacgcgcatcgtcgtcaacctagctagcttagctgaaggcgatgcgtcgccatggcagcacggcggcggcggcgctcacttgccggggacgaagttggtggcgtaggccccaggcgttgttgtttgacggggtcgggcgaggtggtcgggcgaggtctcgagggggcccttgccggtgacgatggcctggacgaagaagccgaacatggagaacat

SEQ ID NO: 397661 - DNA, 337 bp, Oryza sativa nipponbare
aaaacaatgtggcctatcatcatttctcagggtgggcaattaattagctcgactaattaataaccaagtgatggagacatatgctccacttatttcttactccatttcgtagtagtttgcacatcaccaaacattcaaggccactgacacacaacaagcaagctaggcggcgccggcgccgtcgacacaagcaagcaagcaagccggcgagctttatatcttggcgtcgccggagccggcgaggctgctgccggcaacgtcgatgacgaagcggtagcggacatcgttcttctccagccgctccatcgccgtgttgacgtagtccatcttgatgacc

SEQ ID NO: 397662 - DNA, 420 bp, Oryza sativa nipponbare
  unsure (1)..(420): unsure at all n locations
tagagaccattgaagtgataatttaaatacttaatagtaatagactgtgtgatggagtattacaacatgcagcagtggcattaatacgccagtacattaattaagttacacatatgcaggctccattttggtttcttttaatttatcgtattacagaatttctgtagccttgctgatgatcacttggatatcatgtactagtaattaacaataggatgcatacaaaagatggcccaacgacaacagaagatgcgtgcatctgacattgtctggccttatttggttggtagtactccaattaattaacaagagatgatgcattcttgtgccttagtttcttcacatgcttggncttacgttgagcctattcgcaatcttcacccccaacgactcatcacaactgggagagggagttgaccc

SEQ ID NO: 397663 - DNA, 312 bp, Oryza sativa nipponbare
ttgagtatgatagacctttttactaggcaaaccacacgaatacacgagggagtaatttcactgagaatagcacgggtacatcacatcacacaaattcatacgttgatacacgcatagtcgccgaagcgaccagctgcttaattaatcgataacacacgggtttaattcagcaataatcagcacacacacaaaccacactcatatgggtggtttttattgtggactaattaaggtaggtgactcgccggcggcgagtgttcggttgcttcgtgacttcacttgccgcacttgcagtcggtgcaggagcagctg

SEQ ID NO: 397664 - DNA, 323 bp, Oryza sativa nipponbare
aattttggaatccagctatgtattatttcagcagtaatgctgaccagagcattcaacaatcacatgagagcaatgtatgttgcacttgcacaagagtaagagacaacaggaggagaggacctaagggccaaggcagcgccgccgggagggtggtggatgccgatcagacgtcgagggttactgcgggcatctcgaactcggaggtgatctcctcgatctgcttccggacgctcatgtcgatgaggctggacccgtcgcggccgtactggatggtgaagccggcgatgagctccgggtcgatgcggggcttgagcccgacgttc

SEQ ID NO: 397665 - DNA, 426 bp, Oryza sativa nipponbare
tttgaccgccaaaaaaaattgcaaaaacttgcattagattgagtagcgacaaggtgaatttcaaacaagtttacttgcagttcttcactgccagaatctaagtactacattgaaatcagcaatctacacagggcaaccaacacgcgacgcctcgacacgaagagagagaaatatttggggggagcctagccgccgaagccgtagagggtgcggccctggcgcttgagcgcgtagacgacgtccatggcggtgacggtcttgcggcgggcgtgctcggtgtaggtgacgggcgtcccggatgacgttctcgaggaagatcttgagcactcccgcgggtctcctcgtaaatgagccccgagatgccgcttaccccgccccttcttggcaggcttcggatcggcggcttcgtgaccccctgatgttgcg

SEQ ID NO: 397666 - DNA, 179 bp, Oryza sativa nipponbare
ttagcgcggcaataaaacattgcattgaattctgaacgataaacacgaggaaccggcgtttatttgaggcaagcactgcccaaaatctcgcaaaagtactgaaaccttagacatagtacacatccatggcaaacatggatgccaaatgacaactacagaaaattatcaaattcgaatgc

SEQ ID NO: 397667 - DNA, 389 bp, Oryza sativa nipponbare
aatgcaattttttttaatagaaatagattcaatttagtaatttctttgggattgagtcttagatctcgtttgacctgtgaaagacctcctttgttgaaatgttcccaaaattcctaaaataaaaggaaaaatactttccactgccctaaacaaagggcgggaagcaagacggcgaacatatcctctaaattgatcatcctcaaatcagctattcctggggtggggtattgtctgtccccataaatagaaaactctaggagtaataaattaggagtaaagtattgatataattggaattgcagaagcaaataccaatttactaaaaaaagaagaagtatctaatctaaaggactcgttttcttttttaggataaaacaaaagggttcgca

SEQ ID NO: 397668 - DNA, 492 bp, Oryza sativa nipponbare
tttttagtaaaaaggtaaactcttcataataatattattaagacatgggtagctgatgtcttttgatcacactgcgatcaaattatgcatcataggcagtacaactccgcgtcaggaaaaagtagaggagatatatttcttgttattacttaatacagcattcacatatatcgaaccatccggtacgtacgtagtagtactccacgcgttcacatcgatgatcggggacgatatcctcaggtagtacttatgcaaaagcgttggcgtaaactgacgaactgaacggacggacggtcggatttagggctcccataagtccaagttgccggagacgaagtcgtagtggccgccgacgagcttgagggtgccgttggcgatcccctccttgacggacggggaggtttttgggtctccagggattggtcacggcctcttctccaagaggcgcattggcatcgaaaggcgcgaggctgctcggctgaaccttttttg

SEQ ID NO: 397669 - DNA, 382 bp, Oryza sativa nipponbare
aaccaacatgacaaacagtatatatatacgcctatctaacgagtatagagtgatcacaggcacagatgtgcacacagatacaaatggaagaaaaaaaagaaacagatgtgaggaaaattggaagaattagtagacttccacgttccattggtcggccttcttcagttgcttcttgtaatcagcccagtcgattccatcttttgcagccaatgacaccataatgtcatcaatacccttctccatggctttcaggccacacatgtacacataggtggggtccttcttcaggagcttccacaggtcttccttggactctggcatcctggggtggatgtacatcttctatacttgagcattggtctgcttcctgctcacagcataa

SEQ ID NO: 397670 - DNA, 288 bp, Oryza sativa nipponbare
gacaagcaattaagcgtagtttatccaccataattaagatcgagaccatgagatagctagaacactgctgctaccatgagatagtttatccccctgtagtactgtacatcagaaattcaccactcaactcaccccctcacccatgcatccagatccatgcatgcaggaaacaattaccacaacacacacagtaagtctgaatctcatcacatccatctctctctctctcctccccccaattcattaacatcttatacatgcatactccacaaaaaaaagaagaagaaa

SEQ ID NO: 397671 - DNA, 326 bp, Oryza sativa nipponbare
cctatgaacaatgaagcaaattgttcttattgcaagcgcgagtggtggacatgtttattactgagtatacattgtctagaaatatgttcattactaagcaacatcagcgtagaagtcttgaattgtgatccggacagcaattgggattcttgcagtgtggtgctcattgtaccaagttaggctgccgaatgtgtagcctccctgcactttccacagaggtgtaatgcaaatcttgaaggcatgcactttcttgctagcattgaagactaggacaggcggttcgatagtcatcttcactccaaggggggattctatagaggattggt

SEQ ID NO: 397672 - DNA, 388 bp, Oryza sativa nipponbare
gggtcccaccgttccaaatcaattattgataccaaacagagggcacaaataaaaccatggaaaatacaggatcccaaatgtcatgatggggtagcggtaatcagataatgccacacccagcaatcactgcacttgttactgcggcttcaagctgggtggatgtcttttgtagcattccttctcaatacatgtctttgttttttagtttaggtttgatacataaggatccctctgttctgccttccacttgagggagttacccctctgttctgccttccacttgagggagttgcccctctgttctgccttccacttgagggagttccttggggccaatgtccttcagcgcacagatctgctcctcccccatggcggacatgacagtcac

SEQ ID NO: 397673 - DNA, 417 bp, Oryza sativa nipponbare
ttagtatcaagtgtagtatatcatcatcatgcaagtacagtgttacggggattaatcacaatgcaggtggattaagcagtgggcatcatcacatcgcattcagaggaaggctatcttagattacagatgaatatgcagacacccagcttggtgttacatacatagactggatttgggtgaaatttagccggcgagggcgctggtgttgtagacgaggagggcgccgccgccgaggagcccggcgagggtcacggcccagatcagaagcctcgtggttccaccaacgtaggtgtcaccggtgggagaccattcctccggcgagtagattgggctgtagccggcacgtttgcgccgtacttgtcaacgaattggacacacccttccccgtgctcttcctgcagatgcataatatcgact

SEQ ID NO: 397674 - DNA, 402 bp, Oryza sativa nipponbare
atcatctttaaatatatatagccggagcttccatatatttcattcagagtatgggtcacccaacaacatatagtcgtagcagataccactcttacatcaagtcagagagagatcaggtgaaacaaaaacaaaagcagagcacggccggtaaaatcaaaagacgatgaacaaactgggaacacacgaaacaaggtgggagacatcatcgaatcagagatgaacaattaaacaaggctatatatgacgatgacggcttagttgccaccagactcctcgcagcccgggggcttgtaggcgatgaagctgatgagctgcacctgcctgacgttgtcgaagccgatgatacggacgaatgcatcagggtacgccttcttggcctcctcgagctccttgagcacctgg

SEQ ID NO: 397675 - DNA, 335 bp, Oryza sativa nipponbare
agctaactactagctccaatttatctataacggatctaatagctcattcatacaatagttacatactacactattaatacttggtcccacctgtcatacacacactgtgtcttggagtccgtgctacagctggctacaaatctggagtccgctgcccttctctctcctcatttatctccttaaaatatatttgcagctggcttatagcccgctattggacctgctctaaatatctccaatagttattgaatctatcacctgctctgctgagaagtaaaaaaaaaaaagctgaccatctaatgtacagatcacttggagtagttgacaggcctgat

SEQ ID NO: 397676 - DNA, 338 bp, Oryza sativa nipponbare
gtataaatatatatagccggagcttccatatatttcattcacatatggctcaccgcaacaacatataggcgtagcagataccactcttacatcaagtcagagagagatcaggtgaaacaaaaacaaaagcagagcacgggcggtaaaatcaaaagacgatgaacaaactgggaacacacgaaacaaggtgggagacatcatcgaatcagagatgaacaattaaacaaggctatatatgacgatgacggcttagttgccaccagactcctcgcagcccgggggcttgtaggcgatgaagctgatgagctgcacctgcctgacgttgtcgaagccgatga

SEQ ID NO: 397677 - DNA, 362 bp, Oryza sativa nipponbare
  unsure (1)..(362): unsure at all n locations
atagtagaaagcaaccgtatttctttctacattgaaatatanaagatgtacatggaaatgtgtcaagaagagatgtaggagcaccctcatggagagggatttttagaagttccattgcatggtttcacaagttatgcaatgaccatcctactttcttctagctgtaatatttccaaaactagttacaagaaatgcgaggatgcccattgtcattgatatggtatggtgatgaagagattcacgaaatatgaatgtggagctcattaaacttttgccgcttcagtaagtgcaccggccctttcagcaataatctgctcatagagatctctaatcttcaatcctaccataggttggaagagacc

SEQ ID NO: 397678 - DNA, 311 bp, Oryza sativa nipponbare
gaagttcgattgagtatgatagacctttttactaggcaaaccacacgagatacgcgattgattaatttcactgagaatagcacgggtacatcacatcacacaaattcatacgttgatacacgcatagtcgccgaagcgaccagctgcttaattaatcgataacacacgggtttaattcagcaataatcagcacacacacaaaccacactcatatgggtggtttttattggggactaattaaagtaggtgactcgccggcggcgagtggtcggttgcttcgtgacttcacttgccgcacttgcagtcggtgc

SEQ ID NO: 397679 - DNA, 418 bp, Oryza sativa nipponbare
ggaataatatgcctcaaatcatataagataataacatggaggagagcggtgctcccactaggcaaatgtgcaaagctagcatgttattatcccttcgcaaggtccatgccaacaagagtaaattttctcagccattcgaaggtattgagctaagtactagcacattagctttactaataaccacccctcagagcaaggacaagatggaggacagagccaccttcgatggtatagtccttcgcagtcttgtcggcggcaagctgcttaccaacatagataagcctttgctgcacgggaggaatgccttctttctcctcaacacgctccttgatcctatcgatcgtgtggtgggctcaatgtcaaattcaatctcttttccagggagggtcttaaccttgatcatagggccacccctgag

SEQ ID NO: 397680 - DNA, 349 bp, Oryza sativa nipponbare
tgaacagaaactgcttgattttgaaattcacaatatatttggaagatatcagtactggcataatggttctagtttttacagtacaattagcaagcaggctccaagagattttgcacatatcagaacttgctaaagaacccgcaaatatggtcggagacctcatcaggcttctcctggttgatgaaatgggcaacaccctccatgataaccacatcttcgagatttggcacacatgcctttagaccacccttgtggatgtaatcttttacacctggaatgttgtacgtaaggtcctgatctccaacgatgaattttgtcggaacttttattggaactccagtccatgggg

SEQ ID NO: 397681 - DNA, 421 bp, Oryza sativa nipponbare
gctagtcaaaagatggtatcatcaatcaataatagttacagtattgggtccatggagtagtaggattacaacaattaaggacgatgaagagaaaggggtggctggcgatacacatagagaggcaaagcagggggtagcttagttacaacttacaaacgaagctctgatcgatcaagtctgatttgattgatgcagctgaagaagaagaggaagaagacgacgatgatgatgcaatcagctgctgacgtacttgtcgatgatggtggcgagggtggtcttggggacggcgccgatgacgctctccttcttctcgccgttcttgaacatgaggacggtggggatgctccggatgccgtaattggtggcgatgtttggtgagtcgttcgtgttcaccttgcagcacttgatcttgccgacgtac

SEQ ID NO: 397682 - DNA, 406 bp, Oryza sativa nipponbare
gaagtgataatttaaatacttaatagtaatagactctttgatggagtattacaacatgcagcagtggcattaatacgccagtacattaattaagttacacatatgcaggctccattttggtttcttttaatttatcgtattacagaatttctgtagccttgctgatgatcacttggatatcatgtactagtaattaacaataggatgcatacaaaagatggcccaacgacaacagaagatgcgtgcatctgacattgtctggccttatttggttggtagtactccaattaattaacaagagatgatgcattcttgtgccttagtttcttcacatgcttggcttacgttgagcctattcgcaatcttcacccccaacgactcatcacacttgggagaggtagttgac

SEQ ID NO: 397683 - DNA, 348 bp, Oryza sativa nipponbare
aattgcaactggaattctttccttgatgcattcgtgcactggtaattagtcagtgttgtcaagtgcccagcgtctggatatatacaaaccggtcgatcagatcacgagttgacggcggagcagatgagcctgatctggccctgagtcccggtcagcggcgagatgatccccattttcaccatgggcgctgcgaaggaacaattggatgcctacaaatgatggcccaacgtcaacagaagatgcgtgcatctgacattgcttggcttaatttggttggtggtacttcaattaattaacatgagatgatgtattcttgtgccttagattcttcacatgcttggtttcacg

SEQ ID NO: 397684 - DNA, 476 bp, Oryza sativa nipponbare
atggcaaatagtcaaccatgacacaaataaataacatcagtcggcggacatagttttaacaatggagataataaaagtaaaagactcctccctcctcaccagcacatagcacagcctagcaactacaaaaattcccataacatggcataaaaatttggaaattgtctacgaccacagtgacttttaaaacagaacccccacctttatcactccccccccccccagataagacagtgatacttcagacaaaaacaatccttatcaggccccttaacataactcttctgaacttgatcacagaaggtcagcgacgttggccggcagctcctcaatcaccacattgtagaacctctggatgtcaaacagcatcctctcatcgtcacgggtcacaaagttaatggcaacacctttcctaccaaaacgaccactacgaccaatgcgatgcaggtagttctcaggttgggtcggcagatcat

SEQ ID NO: 397685 - DNA, 322 bp, Oryza sativa nipponbare
  unsure (1)..(322): unsure at all n locations
gggagacatcatcgaatcagagatgaacaattaaacaaggctatatatgacgatgacggcttagttgccaccagactcctcgcagcccgggggcttgtaggcgatgaagctgatgagctgcacctgcctgacgttgtcgaagccgatgatacggacgaatgcatcagggtacgccttcttggcctcctcgagctccttgagcacctgngtggcgtcagtgcacccgaacatgggcagcttccacatggtccagtacctgccatcgtagtatcccggggatctgtggttctcacggtagacgaatccgaccttgtgaactcga

SEQ ID NO: 397686 - DNA, 386 bp, Oryza sativa nipponbare
atgaacaactgaaaagagctatatatgtgattattatctattgacaaggaacaaatacaacgttttttttttatcaaatacaacacctcgtagtttataaaagcgaaaaaaagatctgctcattagaacttcggttttatgagaaatggcatcttgtcagcaaatggagggtcagagtatctccctgtaaggatctgcgacgcgatgtggaaattcgcagcttctgtgtaatggattccatcccaattgacaaattctgtactgtccttgcaccctttggctgtacaagataccattcagagacgctgctgccacaaggactctactgcatagttcagggtggcctcatatcacagatgcttgatgggatctcgacccatagcgcg

SEQ ID NO: 397687 - DNA, 198 bp, Oryza sativa nipponbare
taacagcagaaccttcccggtaaaatttcactgagacaggtacatggggtgggcgtacaataatcatcagtgtgatcgtatcatccaacctacaggaaaacgcacattcaaggtactcttgtccaaacctgaaagaggacagagatttgctcccatcggctacaactaccagactcaaaaaaactagacacaggtatg

SEQ ID NO: 397688 - DNA, 357 bp, Oryza sativa nipponbare
  unsure (1)..(357): unsure at all n locations
gtttgtttcgagaaagatatcgtccgattctccttctattgattcttttccgatcgagatgtatggatccatgtgtctacatacctagattctgttcatggattaacgaaaatgtgcaagagctctatttgcctctgccattctatgagtcgcttcctttttgcgtatggcacccccaccccctttggcagcatctactaattcggaacttaatttgaaagccatatttcgacccggacgcttttgggatgcttctaataaccaacgaatggcaagtgctcttccttgtttagatcctatttcaatcggaacttttcgcgtcgatccttttttattacgtctntgttttactcctat

SEQ ID NO: 397689 - DNA, 373 bp, Oryza sativa nipponbare
ccacgcgtccgtcaaggatggagcaccagactccttccacttcgtcgaggactgggtcaggaccggtttccccgccaagaagaaggttcagaccgagcacgcctcgctgcctttcgatgaccaatgcgccatcttggagaaggaggccgtgaaccaatccctggagaacctcaagacctacccgttcgtcaaggaggggatcgccaacggcaccctcaagctcgtcggcggccactacgacttcgtctccggcaacttggacttatgggagccctaaatccgaccgtccgtccgttcagttcgtcagtttacgccaacgcttttgcataagtactacctggggatatcgtccccgatcatcgatgtgaacgcg

SEQ ID NO: 397690 - DNA, 416 bp, Oryza sativa nipponbare
  unsure (1)..(416): unsure at all n locations
ccacgcgtccgcccacgcgtccgaattcatcagcttgagcaagatgcatattgttctgttcttcgtgcatttaaagcacaatctgatgctatttcatgggaaaaggaaggtcttatcactgaacttagaaaggaacttagagtgtctgacaaagagcacagggagttgttaaacagagtgaacggtgatgatatcattcaaagaataagggaatggagagagacaaaaggtgggcttcaggcagatatggtgaataatgctcaacgttcacatgatcgcgtgcccagccctaccacctncgctcgcaagaggcagaagacgtcacaatccatcccttctgcttctgtacctgtaccatctcctgctgtgcattcacagacactgacttgcccaatgcaaccattgtcatcagcaac

SEQ ID NO: 397691 - DNA, 458 bp, Oryza sativa nipponbare
ccacgcgtccgttttttttttttttttttttctctccgacaaatatttctctagaggaattactcaagaagttcagaaagtactggaatccattcacatgcccatccttttacctcaatttatttacggaataacgactcaaaacatggaaagagaaacacgcaaatcttagcacaggcagaacaactcaaaacactcgtcagaggaggtcatcagaccatcgctctcagctcccgagcagagacgtcaagaaggccagccctccgatcaagagcatgatgttgaggaagtagttggactgcagaggcttgtccgggctgcctccgaatccctcgtactccgccctgatcttctgcttcatcgagtccgacagctccttctttccgtaggagtatttcgcagcgacgaaaggctctggttgcggtgctgcaccgttgttgtcatccgctggcgatgat

SEQ ID NO: 397692 - DNA, 494 bp, Oryza sativa nipponbare
ccacgcgtccgcccacgcgtccgcgctggtgaagctgtcaccgaggagcatatgtccatggcttgcacgaaggtgtggagaagcacgatgtacacacccaggcggctgaagcgaacgacaccggcgtcaagagtatcaagcacggccatggcggcggcgaacggcgatgccagccatggcgccaacggcggcattcagattcagtccaaggagatgaagacggccatccacagcaacgatagccccaagaccctcctcaagagtgaatccctccacgagtacatgctgaacacgatggtgtacccgcgggagaacgagttcatgcgcgagctccgcctcatcaccagcgagcacacctatgggttcatgtcgtcgccgccggaagaagggcagctgctgtcgctgctgctgaacctgacaggcgccaagaacaccattgaggtgggcgtgttcaccggctgctccggcttcgcaccgggctcgccattccggac

SEQ ID NO: 397693 - DNA, 464 bp, Oryza sativa nipponbare
ccacgcgtccggatcgatctaaaccaatccattttttctatatacatacgacatgccaacggttaaacaacttattagaaacgcaagacagccaatacgaaatgctagaaaatcggccgcgcttaagggatgtcctcagcgtcgaggaacatgtgctagggtgtatactatcaaccccaaaaaacccaactctgccttacgtaaagttgccagagtacgattaacctctggatttgaaatcactgcttatatacctggtattggccataatttacaagaacattctgtagtattagtaagaggaggaagggttaaggatttacccggtgtgagatatcgcattattcgaggagccctagatgctgtcgcagtaaagaatcgtcaacaagggcgttctaaatatggggtcaaaaagccaaaaaaataagtgattcgttttagcccttataaaaagaaaacggatt

SEQ ID NO: 397694 - DNA, 419 bp, Oryza sativa nipponbare
ccacgcgtccggcagaagcagcagcagcagctcagccgccgccgatggcgtccacgatcatggccccaacctcccgcgtcctcgccgccaagacccccttcctcggccatccccgcccctccaatgcccccgtccgcgacatcgccgccgccgccaccggccgcatcaccatgagcaaggagctgtggtacgggccggatagggtgaagtacctggggccattctcggcgcagacgccgtcgtacctgaggggcgagttcccgggcgactacgggtgggacacggcggggctctccgcggacccggaggcgttcgcgaggaacagggcgctggaggtgatccacgggcggtgggcgatgctcggcgcgctgggctgcatcacgccggaagtgctcgagaagggggtgcgcgtcgacttc

SEQ ID NO: 397695 - DNA, 476 bp, Oryza sativa nipponbare
ccacgcgtccgcggacgcgtggctcgaccacctggggaaccccaacctggtgcaccacacatccatggctcgccatctgggcgggccaggtggtgctcatgggattcgtcgagggctaccgcgtcggcggcggcccgctcggcgagggcctccacaaggtgtacccacgcggcgccttcgacccgctcggactgcccgacgaccctgacacccttggcgagctcaaggggaaggagctcaacaacggccgcctcaccatgttctccatgttcggcttcttcgagcaggccatcgtcaccggcaagggccccatcgagaaccttttcgaccacgttgtcgacctcgtcgccaacaacgcctgggcatacgccaccaacttcgtgcccgggcagggagcacaacgacacgatcgagatggtgccaaccaacgtaccatgggtacacttggagtaaccacgcaccgacccttcaattgc

SEQ ID NO: 397696 - DNA, 362 bp, Oryza sativa nipponbare
ccacgcgtccgggcgccgccacttccctctcgcatcttctcgcgctcaggggccaggtaagcgaagatgtacaccgcgaggaagaagatccagaaggagaagggcctcgagccctccgagttcgaggactccgtcgcgcaggctttctttgacctcgagaatggcaaccaggagctcaagagcgagctcaaggacctgtacatcaacaatgcagtccagatggatattgccgggaacaggaaggctgtggtgatccacgtgccgtaccgtctgcgcaaggcattcaagaaaatccatgtcaggcttgtcagggagctcgagaagaagttcagcggcaaggatgtggtaattggtgcaacaag

SEQ ID NO: 397697 - DNA, 407 bp, Oryza sativa nipponbare
ccacgcgtccgtgtcacttctcctctgatggcaaactgctcgctactggtggacatgataaaaaggttcttttatggtgtacagagcctgctctaaagcctacatcttcattagaagaacattcggcattgattacggatgttcgatttagtccaagcatgtcacggcttgctacatcttcctttgacaaaaccgtgcgggtttgggatgctgacaatacaagttattcactccgtactttcacgggtcattcagcatctgttatgtcacttgacttccatccgaacaaagaagatatgatttgctcctgtgatggtgatggggaagtccgcagctggagcataaataatggtagctgcctgacctttgttaaagtctttaaaggaggtgctactcaaatgcgattt

SEQ ID NO: 397698 - DNA, 468 bp, Oryza sativa nipponbare
ccacgcgtccgggccgccgccaccatggccctctcgtccccggcgctggccggcaaggccgccgcgaaggtgttcggcgaggggcgcatcaccatgcgcaagtcggcggcgaagcccaagcccgccgcgtcggggagcccgtggtacggcgccgaccgcgtgctctacctcggcccgctctccggcgagccgccgagctacctgaccggcgagttccccggcgactacgggtgggacaccggggggctctccgccgacccggagacgttcgccaagaaccgggagctggaggtgatccactccaggtgggcgatgctcggcgcgctgggctgcgtgttcccggagctcctcgcccgcaacggcgtcaagttcggcgaggcggtgtggttcaaggcgggggcgcaaatctttagcgagggcgggctcgactaccttggcaacccgggcctgatccacgcgcagagcatt

SEQ ID NO: 397699 - DNA, 494 bp, Oryza sativa nipponbare
ccacgcgtccgcttgtgactacacccgcttcgcttcctcccctctctaagccggggaagctaagccatggcggccgtcaccgcccgcaccccggtcgcatccctccactcatttgcttttttcaagtctaccttcctagggcaatcctccacccggctcgcccgcgcaccgactacgaggcgtaatgttcgggcggaggccaagggagagtggctccccggcctcccttcttccacctacctcaacggcagcttgccaggcgataacgggttcgacccgttgggtctggcggaggacccggagaacctgcggtggttcgtgcacgcggagctggtgaacgggcggtgggcgatgctgggggtggccgggatgctgctgcagcacctgtctgacccgtggcacaacaccatcatccagacgctgtcatgctgagcgtgtgatcgatttcatcaaggccagggcatctcaaggagcttgatgagttcaggctggtg

SEQ ID NO: 397700 - DNA, 482 bp, Oryza sativa nipponbare
ccacgcgtccgcccacgcgtccgcccacgcgtccgcatgcaaatctgcaaagctgtatggtaatgctagattcgtagacgaaagacatcgacacagatatgaggtaaatcctgaaatggtaccagagtttgagaaggccggactttcatttgttggcaaggatgagagtggaagacgcatggagattattgaactacccagtcataaatttttcattggagtacagttccatcctgaattcaagtcaagaccagggaagccatctccacttttcttaggattaatagcagcagcatctggacaactagaaactttgctccaaccaagttccaacattgtcaatccaaatcctatgcccagatttcccattcccaaaaagacgatttaccatgccaagaagccactggacagcttggtaaacggatactttgcaaatggcaacgtcatccacacttgattagcagtgtgcaaatcctaagcga

SEQ ID NO: 397701 - DNA, 492 bp, Oryza sativa nipponbare
ccacgcgtccgagaaagcataagcaacacaagggattaactcatcactcacttagctaattaaatcttcgaccatgtcggacaagtgcggcaactgcgactgtgctgacaagagccagtgcgtgaagaaaggtaccagctatggcgtcgtcatagttgaagccgagaagagccacttcgaggaggtcgccgccggcgaggagaacggcggctgcaagtgcggcaccagctgctcctgcaccgactgcaagtgcggcaagtgaagtcacgaagcaaccgaacactcgccgccggcgagtcacctaccttaattagtccacaataaaaaccacccatatgagtgtggtttgtgtgtgtgctgattattgctgaattaaacccgtgtgttatcgattaattaagcagctggtcgcttcggcgactatgcgtgtatcaacgtatgaatttgtgtgatgtgatgtacccgtgctattctcagtgaaattaatcaatc

SEQ ID NO: 397702 - DNA, 487 bp, Oryza sativa nipponbare
ccacgcgtccgcgcgtgtgcccgtcggtgaccatgggcctggagcccggcgaggccttcaccgtccgcaacatcgccaacatggtcccagcttactgcaagatcaagcacgctggcgtcgggtcggccatcgagtacgccgtctgcgccctcaaggtcgaactcatcgtggtgattggccacagccgctgcggtggaatcaaggccctcctctcactcaaggatggagcaccagactccttccacttcgtcgaggactgggtcaggaccggtttccccgccaagaagaaggttcagaccgagcacgcctcgctgcctttcgatgaccaatgcgccatcttggagaaggaggccgtgaaccaatccctggagaacctcaagacctacccgttcgtcaaggaggggatcggcaacggcacccttaagcttggcggcgggcactacgaatttgtgttcggcaacttggacttatgggagccctaaattcg

SEQ ID NO: 397703 - DNA, 451 bp, Oryza sativa nipponbare
ccacgcgtccggctagttgactgtgacacttcatataacgagggatgcaatggaggtctgatggactatgcatttgatttcatcatcaacaatggtggaatcgacaccgaggatgactacccttacaaaggcaaggacgaacggtgtgacgtaaacaggaaaaacgcaaaggttgtcacaattgacagctacgaagatgtaacaccaaacagtgagacgagtctgcagaaggcggtagcaaaccagcccgtcagtgttgcaattgaagccggtggcagagcattccagctctactcatcgggtatcttcacgggtaaatgtggaacagcactagaccacggcgtcgctgctggtgggtacggcacaaagaatggcaaggactactggatcgtgaggaacttgtggggcaagagctggggtgagtccggctacgtccgtatggagcgcaaca

SEQ ID NO: 397704 - DNA, 400 bp, Oryza sativa nipponbare
cctcgccccacgcgtccgcccacgcgtccgatctgccgctgccgctgctgaagaaaaacgcacatccttccttcctagcaccaactcgccacccaattaggccattaccttccaaaattctcccatccaatggcgctacgcctctccgtctcctcctcgcacgggccggcttcctcgccggccatctacacatgccgccccgccgcctgcgggcgcttccccgccttgctcggcggcggtgtggcttctcagaggaggagcctgacggtggtgtctggccctgagacaagggcggtgatccccgtgaggtcgagcggctcggacaccgccactgttggggccgaggcggaggcggtggccgtgaccgggcaggtgacggaggtgaacaaggataccttct

SEQ ID NO: 397705 - DNA, 323 bp, Oryza sativa nipponbare
ccacgcgtccgagctatttgactaaacgcatacataatgctggcgcacaaaccgtggacgatgaggcaagaccaggctctcaaactcagtcaatggcttttgctgtagcaaaatgagtacatgcatgcttgcgagcattgcacgatgatgctgacggcgtgcaatgtgcatatgtagcatatgcggtgaccaaggtcgccgtctttgcaccaaaggtgaggatcggtcgtgctggaaccgaagaggttctgcctatgaggcacgggaaagatgtggagagagctggcctaggagatggctaacagagagctgataggatgagc

SEQ ID NO: 397706 - DNA, 403 bp, Oryza sativa nipponbare
ccacgcgtccggaagatcaggagttgaggattctacaggcaccactgcaatgcgaagttgatgcacaggagacactgaatcaacaccgtgatgagcaggaggagaaacttcaccattatctagatgaagagcatgagaagaaacttcaggatcatttggatgaagaaccggagaagaaacttcatcattatctagatgaagagcaggagaagaaacttcaggatcatctggatgaagaaccggagaagaaacttcatcattatctagatgaagagcaggagaaactgttccaggatcaagacgaagaggagaaaacaccaaagcaatatcttgatgaggatcagaagacattgcagcaatgtcaagatgaggagaaggcgccaaatcaatacgaagatgaaga

SEQ ID NO: 397707 - DNA, 444 bp, Oryza sativa nipponbare
ccacgcgtccgggagtgtcccaaggcgagtccgtgttagaatctctcgcaagagaaacgatgaggaggacgccaaggaggagctctactctctggtcacagttgctgagatccctgcagagggtctcaagggtttgggaaccaaggttgttgaggatgaggagtaaacttttcattgttatctgtcagttagcgcttagtgcatatttccatgattccagtcactatgctgagagcaaatttggaagtcttgctttagcgttttgttatctactgttgatgattcaagactgcattttcttaagcgcttggaattttgacatgtttgtcaaccttttgggatatatactccatgctatcgggctgtgaacaaggatcactcttaagcttaaaaaaatgtctgttagatgctggtattgatttttttgcttgaatttgctcaaaa

SEQ ID NO: 397708 - DNA, 459 bp, Oryza sativa nipponbare
ccacgcgtccgcccacgcgtccgcccacgcgtccgcccacgcgtccgaaatgttattgcagtatcaaagctgacctgcttcgtattgccaaatcaatatggacacttgttgcaaccaaagaccatttggagtgcagaagagacacctgagaaccattctttgctagaacaaattttgcacttagagccattggaggtcgatatcttccgtgggtttactttgccaggagctccgacttttaggcaagtttttggaggacagttgataggacaggcactagcagcagcatccaagaccgttgactgcctaaaagcggtgcacagtttgcacgcaattttccttatcgcaggagacaagaatttgccaataatatatcaggttcatcgggcgcgcgatggaacaagctttgccaccagaaaagtggaggcaaagcaaaagggccttgtcattttcaccttg

SEQ ID NO: 397709 - DNA, 414 bp, Oryza sativa nipponbare
ccacgcgtccgctcgagcaaagaaggagagagcttggtgagctgcagagatggccccctccgtgatggcgtcgtcggccaccaccgtcgctcccttccaggggctcaagtccaccgccggcatgcccgtcgcccgccgctccggcaactccagcttcggcaacgtcagcaatggcggcaggatcaggtgcatgcaggtgtggccgattgagggcatcaagaagttcgagaccctctcctacctgccaccgctcaccgtggaggacctcctgaagcagatcgagtacctgctccgttccaagtgggtgccctgcctcgagttcagcaaggtcggattcgtctaccgtgagaaccacagatcccccggatactacgatggcaggtactggaccatgtggaagctgcccatgttcgg

SEQ ID NO: 397710 - DNA, 478 bp, Oryza sativa nipponbare
ccacgcgtccgcccacgcgtccgcccacgcgtccggagaagattgggtactggaggtacatcaccatcttcaggcacctcaaggcgaacccggagtaccaggtgtaccccatcttcaagtactttgagaactggtgccaggatgagaaccgtcacggtgatttcttctccgcgctgctcaaggcgcagccgcagttcctcaacgactggaaggccaagctctggtcacggttcttctgcctctcggtgtatgtgaccatgtacctaaatgattgccaacgtactacattctatgaagggattggtctggacaccaaagaattcgacatgcatgtgataattgagaccaaccgcacaacagcaaggattttccccgctgttcttgacgtcgagaaccctgaattcaagaggaagttagacaggatggtggagatcaacaaaaagatcattgccataggcgagtctgacgatatccccct

SEQ ID NO: 397711 - DNA, 479 bp, Oryza sativa nipponbare
ccacgcgtccgcggacgcgtgggcggacgcgtgggctaaaccagtgcatcatgtattggccggaagacgggcgtccatatgtggcgcttgggaagctatacagtaagcagtcgaggtttgacaaggctagagcggcttatgaaaggggttgccaagcggcacaaggtgaaaacccgtatatttggcagtgttgggcagtcctagaacgcaaaggtgggaatattcgaagagcacgggagttatttgatgctgctactgtagctgatgcaaagcatattgcagcttggcatgggtgggctattttagaaatcaagcaaggaaacattaaaaaggctcgaaatctacttgcaaaaggtctaaaatattggggaggaaatgagtacatttaccagactcttgctctgcttgaggctagagcagaacgctttgaacaagcacgaactttatttcaacaagctacccaatgcaatcccaaaagc

SEQ ID NO: 397712 - DNA, 462 bp, Oryza sativa nipponbare
ccacgcgtccgcccacgcgtccgcccacgcgtccgggccgaagaggagaaaggttccatgtgaacggcacttgcacatgggtaagccgatcctaagggacggggtaaccccggcagagagcgcgaccacgcgcgtgccccgaaagggaatcgggttaagatttcccgagccgggacgtggcgccgtcggcgaacaggaagtcgacggcggggctgaagctggaggcgcgcgactccggcctgcagaccggcgaccccgccgggttcacgctcgccgacacgctggcctgcggggccgtcggccacatcatgggcgtcggcgtcgtcctcggcctcaagaacaatggcgtcctggaccagatcatcggctaatcaaattcattaagctagtcacacgaatcaatactcctatgtgtaatcgatgcatgagtgcctgtgtgatggacgatggaatgatcattgt

SEQ ID NO: 397713 - DNA, 463 bp, Oryza sativa nipponbare
ccacgcgtccgtcgtgtgcagcttcctggtctaagccaggagcttctccagaagttgagggaaaagaatatcgattttgctgcacacagcagccaggaggactctggttctcttctgttcaacctgatcggaaacttggctttcccacttatccttattggtggtctatttttgctgtcaagaagagcacaaggtggccttggtggacctaacggtcctggctttccccttggttttggtcagatctagggccaagtttcagatggaacccaacactggtgttacatttgatgatgttgctggtgtcgatgaagcaaagcaagacttcatggaagtggttgagttcttgaaaaaaccagaaagggtcaccgctggtggtgctcgcattcctaagggtgttctgcttggtggtcctcctggaactgggaagactttgcttgcccaggctattgcatgggaagct

SEQ ID NO: 397714 - DNA, 385 bp, Oryza sativa nipponbare
  unsure (1)..(385): unsure at all n locations
cgcgtccggaacacaagggattaactcatcactcacttanctaattaaatcttcgaccatgtcggacaagtgcggcaactgcgactgtgctgacaagagccagtgcgtgaagaaaggtaccagctatggcgtcgtcatagttgaagccgagaagagccacttcgaggaggtcgccgccggcgaggagaacggcggctgcaagtgcggcaccagctgctcctgcaccgactgcaagtgcggcaagtgaagtcacgaagcaaccgaacactcgccgccggcgagtcacctaccttaattagtccacaataaaaaccacccatatgagtgtggtttgtgtgtgtgctgattattgctgaattaaaccccgggtgttatcgattaatta

SEQ ID NO: 397715 - DNA, 478 bp, Oryza sativa nipponbare
ccgggtcgacccacgcgtccgccggcattattccacttggacgaacactagctcaccggccggccatggcgtcttcttccgttctgatcaagctgctcgtcgtcgtcggctgcgccgccgcggcctccgcggcgacgctcaccgtgggtggtagctccgggtggacgcttggccagaactacgatacttgggcaagtggccaaaccttcgcggttggagacaagctcgtgttcagcttcgttggggcgcacacggtgacggaggtgaacaagaacgattacgacaactgcgccgtcgcaagcaactcgatcagctcgaccagcaccagcccagccaccctcgacctcgccgccgccggcatgcactactacatctgcaccatcagcggccactgcgccggcggcatgaagctggccatcaacgtcggcagcggctccggctccggctccggctccgggacgccacccagcaccacccc

SEQ ID NO: 397716 - DNA, 285 bp, Oryza sativa nipponbare
ccacgcgtccgcccacgcgtccgcccacgcgtccgataagttactgggttgaaaagattatttgtcgtagaagacagaggggagtttggtggaatggtggtatttacggatagttcaagggggaaatgggaaaaaaaaggttttttacacttgtttgtctggatgaatttgtatggaacttttctgcttgataattttcgcatgtgttagtatttgtatatgatgatataagtgggaaataaatcatcaaattttccagcaggaactttgtggaaactttttttt

SEQ ID NO: 397717 - DNA, 497 bp, Oryza sativa nipponbare
  unsure (1)..(497): unsure at all n locations
ccacgcgtccggtacattgcaaagacatacgctggaatgggaacagcttttgaggatctactgcaggctgggaaaatgggtgtccttaatggagctgataaattcnacagccaaaaaggatgcaagttctcaacttatgtgaagtactggataaggaaagcaatgttagcacttcttgctgaaaactctggagtaatccagctgcccgcaaggatggagggtataattcgtaaggtcagggaagcgagaagggcgattcgctacaacacagggaggaacccaccagatgcagaaatcgcagccctcatcggtgtatcagttgccaatgttaggttggcacggaaatgctctcgtcgagttgtgtcgctttacacagagatcggagttggacagaatgcaaaatttgtggaagtgacttcggacacatttttagaagcttcatatgaggctatgttccggatgcagttgatagagagactgctttatgttctggacag

SEQ ID NO: 397718 - DNA, 484 bp, Oryza sativa nipponbare
ccacgcgtccgcggacgcgtggggtcgcaacagctacaaacgcccacatcacacgcagaaatccgcatcaacagccagccatggcgtccacgctgaccaacgtcggcctgtctaccccggcggcggcggcgtcgtccctcgttaggccggtcgccggagctggacgcgtggtgtttccccgtgttggccgcggcgggttcgcggcggtgagggcgagcgggccggcgacgccgccggacatctcggacaagatgtcggagagcatcgacaaggcgaaggaggcgtgcgcggaggacacggcgagcggcgagtgcgcggcggcgtgggacgaggtgaggggctgagcgcggcggcgagccacgcgcgcgacaagctcaaggagacctccgacccgctcgaggcctactgcaaggacaacccggagaccgacgagtgccgcacctacgacaactgattcttaccattatatgtttgctaatctctc

SEQ ID NO: 397719 - DNA, 449 bp, Oryza sativa nipponbare
ccacgcgtccgaaagcataagcaacacaagggattaactcatcactcacttagctaattaaatcttcgaccatgtcggacaagtgcggcaactgcgactgtgctgacaagagccagtgcgtgaagaaaggtaccagctatggcgtcgtcatagttgaagccgagaagagccacttcgaggaggtcgccgccggcgaggagaacggcggctgcaagtgcggcaccagctgctcctgcaccgactgcaagtgcggcaagtgaagtcacgaagcaaccgaacactcgccgccggcgagtcacctaccttaattagtccacaataaaaaccacccatatgagtgtggtttgtgtgtgtgctgattattgctgaattaaacccgtgtgttatcgattaattaagcagctggtcgcttcggcgactatgcgtgtatcaacgtatgaatttgggtg

SEQ ID NO: 397720 - DNA, 485 bp, Oryza sativa nipponbare
ccacgcgtccggctgatcggcatccacaacaagaaagactgcctgcagaagtgatacctcagaagatgataggattttcaagttcagctatgtctaccctaaaagaagctgaatttttcattcctgactccaaaaaatccagtgtcattcatatggatttagatcgcagcttcttgccagtgccttctgcagtgaatgcctccatttttgaaagttttgttaggcagaacattactgagtctgaaactgatgtccgttccagcattcagcagctggtgaaagatagctatggtttcccagcagatggttgttctgaaatattatatggcaacacctgtcttgcactcttcaacaagcttgccctttgctgcatccaagaccagggcaccttacttttccccttgggcgctaatggtcactatgtctcagcagcaaaagttgtgaatgcaaatacgctgactattccgacaaagttagaatcaggc

SEQ ID NO: 397721 - DNA, 486 bp, Oryza sativa nipponbare
ccacgcgtccgcggacgcgtgggcggacgcgtgggtgaaactgtactttccagtagtatcgctgctgttttttttgcagctttcgtagttgccggaactatgtggtatgggtcagcaactaccccaattgaattgtttgggcctactcgttatcagtgggatcagggatactttcagcaagaaatatatcgaagagttagtgatgggttagccgaaaatctcagtttatcagaagcttggtctaaaattcccgaaaaattagccttttatgattatattggtaataatccggcaaaggggggattattcagagcaggctcaatggacaatggggatggaatagctgttggatggttaggacatcctatctttagagataaagaagcgacacggtatgatgtacaagaaagcacagatgtgtgatagaatggtattagggaatgatgtgtgctgcatttggtgaaaagaataccacactgtaggcct

SEQ ID NO: 397722 - DNA, 385 bp, Oryza sativa nipponbare
ccacgcgtccgcccacgcgtccgcggacgcgtgggcggtcggacggcgatgatgggcgtcgtcggcatggtcgcccgggagctcctcggcaagctgggcctcatccccgcccagacagcgatcccgtgggtccagaccgacgtgatcccccacggtgccacctacacctactgggccgacccttacactctcttcgcgttggagctcgccctgggcggcttggacgagcactgccggttgcaggactgggacacgccgggctccatggggaagcagtacttgctcggcctcgagaagtacctcgccggctccggcgagccggcctaccccagcggaccgttttcaacccgttcggcttctggaccaagagcgaggcggtgatgaa

SEQ ID NO: 397723 - DNA, 361 bp, Oryza sativa nipponbare
ccacgcgtccgcccacgcgtccgcccacgcgtccggaagatagctaaagcttatgacacaatatacttacgtggggcctcgaacaatctgtgtggcaaggataaacacctgaatggctgaagtactataacttgtactaaaaggtcataatgtagcaaatggtccaggatcttctagagctactatcatatgctgcattattcgaggataccccctatactgaatatgccgaaaaatatgcagatgttcaagtagccttctacaaagactacgctcaaaattatgcttagctgaggcacgttcgtgctaatgtacattcaccttggggattgttactggacaatttaccgatccatgctta

SEQ ID NO: 397724 - DNA, 500 bp, Oryza sativa nipponbare
ccacgcgtccgcggacgcgtgggcggacgcgtgggcacacgccaaagcaattttagcccgtacccccctgcatcccaagcgcccgaaaccgcctctcccctacaccaataccaccaccgcttcctttccgatccgatcccttcccctcgatcgacggcggccatggcgagaatcccgctgctgctggccctcctgctcgccgtctccgccgccgccgccgcgcaggtcgggggtaaccgcggccatggcccgctggtgggcgggtggagcccgatcacggacgtgggcgacccccacatccaggagctcggcgggtgggcggtggagcggcacgcctcgctctccagcgacgggctgcggttccgccgcgtgacgagcggcgagcagcaggtggtctccgggatgaactaccgcctcgtcgtctccgcgtcagatcccgcgggggccaccgcgtcctacggtcccgtcgtgtacgagcagtcgtggaccaacacccggca

SEQ ID NO: 397725 - DNA, 481 bp, Oryza sativa nipponbare
  unsure (1)..(481): unsure at all n locations
ccacgcgtccgcccacgcgtccgggcgcatcaccatgcgcaagtcggcggcgaagcccaagcccgccgcgtcggggagcccgtggtacggcgccgaccgcgtgctctacctcggcccgctctccggcgagccgccgagctacctgaccggcgagttccccggcgactacgggtgggacaccgcggggctctccgccgacccggagacgttcgccaagaaccgggagctggaggtgatccactccaggtgggcgatgctcggcgcgctgggctgcgtgttcccggagctcctcgcccgcaacggcgtcaagttcggcgaggcggtgtggttcaaggcggggtcgcagatcttcagcgagggcgggctcgactacctcggcaacccgagcctgatccacgcgcagagcatcctcgccatctgggcggtccaggtggtgctcatggncgccgtcgaggggtaccggatcnccggcgggcccgct

SEQ ID NO: 397726 - DNA, 398 bp, Oryza sativa nipponbare
ccacgcgtccggctcgctcatcgccatctctctcagctctcacagctcactgcatcaatggccgcggccaccatggcgctctcctccccggtgatggcccgcgcggcgccttcgacctcctccgcgctcttcggcgaggcgcggatcaccatgcgcaagaccgccgcgaagcccaagccggcggcgtcgtcggggagcccgtggtacggcgccgaccgcgtcctctacctcggcccgctctccggcgagccgccgagctacctcaccggcgagttcccgggcgactacgggtgggacaccgtggggctctccgccgacccggagacgttcgccaagaaccgggagctggaggtgatccactctcggggggcgatgcttggcgcgctctgctgtatttt

SEQ ID NO: 397727 - DNA, 456 bp, Oryza sativa nipponbare
  unsure (1)..(456): unsure at all n locations
ccacgcgtccgcccgagcctgatccacgcgcagagcatcctcnccatctgggcggtccaggtggtgctcatgggcgcgggcggggggtaccgcatcgccggcgggcctctcggttaggtcttctacccgctctaccccgtcggcagcttctacccgctcggcctcgccgacgacccggaggccttcgcggagctcaaggtgaaggagatcaagaacggccgcctcgccatgttctccatgttcggcttctttggccaggccattgttaccggcatgggccccctcgagaacctcgccgaccacctcgccgaccctgttaacaacaacgtctgggcctacgctaccaacttcgtcctcggcaagtgagcgccgccgcctgcgtgctggcatggcgacgcatcggcttcagcttagctagctaggttgacgacgatgcgcgcttttcaagagagtgtg

SEQ ID NO: 397728 - DNA, 236 bp, Oryza sativa nipponbare
  unsure (1)..(236): unsure at all n locations
cccatcaccctctccctccaccacactacacccctctccactctcacgcaggcaatcagcggcgaggcaccattctcttctccgtcaatntcntccactttcttttttctccaccactccacggcccgcttcntctcgcgcgtctccttctcgtccccttctacaccgacccaccttctcgtctgctgcgcccagaatcatgactactcctacttttcccgccgtgcgacttctct

SEQ ID NO: 397729 - DNA, 468 bp, Oryza sativa nipponbare
cccacgcgtccggcacttccaggagcagctgaaggagaagctgcggctctacggggagcgggagaaggagcaggacttctggctggtggtggagcccaagttcctcgacaggttccccaacatcaccaagcgcctcaagcgccccgccgtcgcgctcgtctccaccgacggcaactggatcacttttatgaagttgaggctagacagggtcttagcagaacaatttgaagcagaaacgcttgaggaggcattggcttctaacccggtcgacttgaaatttgacaagcctgagaaatggacagctccataccccaagtatgagtatggatggtgggagccctttctacctccaaagtctagcaatggaacagcatagagatgatcggcaatccatatgagcaatgtaagatttcttccatgcaagtgcccaaatgtaatctaaatttttaacaatgcctatgtaatact

SEQ ID NO: 397730 - DNA, 390 bp, Oryza sativa nipponbare
  unsure (1)..(390): unsure at all n locations
ccacgcgtccgcccacgcgtccgcccacgcgtccggaaaaccttgctaggctagcanggcacagcaagaacaaggccggaaccaatggcggcgacagctacacttgctgccccctccttcttgncacatcantcgatcttgagccacaagcctttgaggaagcttggtctatccctggaactgccaagaaccagatctgtcaaaattagagctgcaaagctgcctgcaggggttgaggtgccgaggaagcagccaaagctgagtgagcccttcctgggtttcaccaggactgcatagatatggaactccagggcctgcatgattggccttattggcacctttatcggggagctggngctgaacaagggcatttcttagatgattggtgtg

SEQ ID NO: 397731 - DNA, 474 bp, Oryza sativa nipponbare
ccacgcgtccggctgggcgcgctcggctgcgtcttcccggagctcctcgcccgcaacggcgtgaagttcggcgaggccgtgtggttcaaggcggggtcccagatcttcagcgagggggggctcgactacctcggcaaccccagcctgatccacgcgcagagcatcctggcgatctggggttgccaggtcgtgctcatgggcgccgtcgaggggtaccgcgtcgccggcggcccgctcggcgaggtcgtcgacccgctctaccccggcggcagcttcgacccgctcggcctcgccgacgaccccgaggcgttcgccgagctcaaggtgaaggagatcaagaacggtcgtcttgccatgttctccatgttcgggtttttcgtccaggccattgttaccggcaagggtccactggaaaaccttgtcgacatctttttgaccccgaaacaacaatcgcatgtgcctacccaccaactt

SEQ ID NO: 397732 - DNA, 472 bp, Oryza sativa nipponbare
ccacgcgtccgccaaccgccgccgcatcgccctcgttagaacgatggccgcgtcggcgctgcaccagaccaccagcttcctcggcaccgcccctcgccgggatgagctcgtccgccgcgtcggcgactccggtggccgcatcaccatgcgccgcaccgtcaagagcgcgccccagagcatctggtatggacctgaccgtcccaagtacctgggcccgttctcggagcagacgccatcgtacctgaccggagagttcccgggagactacgggtgggacacggcggggctatcggccgacccggagacgttcgcgaggaacagggagctggaggtgatccactcgcggtgggcgatgctgggggcgctgggctgcgtcttcccggagatcctgtccaagaacggggtgaagttccgggaggcagggtggttcaaggcccgccccccaaatctttttcgagggggggttggcttc

SEQ ID NO: 397733 - DNA, 449 bp, Oryza sativa nipponbare
ccacgcgtccgcggacgcgtggggtgaaatagacatgtctgtgaagatgcggactacctgcacctggacagaaagaccctatgaagctttactgttccctgggattggctttgggcctttcctgcgcagcttaggtggaaggcgaagaaggcccccttccgggggggcccgagccatcagtgagataccactctggaagagctcggattctaaccttgtgtcagacccgcgggccaagggacagtctcaggtagacagtttctatggggcgtaggcctcccaaaaggtaacggaggcgtgcaaaggtttcctcgggccagacggacattggtcctcgagtgcaaagtgtacgaaaactaagaccactgtccaagtacgggctcgcgtaggtgcagaaatatatactcctataatgtaacgaaacacacacattgactgtccccgggcag

SEQ ID NO: 397734 - DNA, 490 bp, Oryza sativa nipponbare
ccacgcgtccggaagaaaccgatctcttcagtaacgactatcttctttttaacttcaatgactatccaagtggtatggtaactctgttcaatttgttagtgatgggcaattggcaagcttggatggagagctacaggcaattgactggaagttattggagcctgatttattttgtcagcttttacctcatttcagtattactgctgcttaatctgattgtagcatttgtgttggaggcattttttgctgagatggaactggagaaagatggcgaagctgatatccaggatcctactttggaaggaagaaacaggcggcgatctgtgcgtgtgaggacaaaggggaccatggttgatattcttcttcaccatatgttgagcaatgaacttgatggatctcaaaaccgtgaccaatagcttatcttcatggtactaccctgtttttctctccaatggcaactcccgtaaaattagatgaccgaatacatgat

SEQ ID NO: 397735 - DNA, 498 bp, Oryza sativa nipponbare
ccacgcgtccggcagcaggagcaggacgcacaatgcttgttagtgatgctggtagggtctatgcatttggaaaggattcatttggagaagtggaatatgcagcccaaggttctagggttgtcaccacaccacagctggtggaatcattgaaggacatatacattgtccaggcagcaatcgggaacttctttactgcagttttatctcgggaaggtcatgtgtatacattttcttgggggaatgacatgaaacttggtcatcagacagagccaaatgatgttcagcctcatcttctagcaggccctcttgagaacattccagttgtgcagattgccgcaggctactgctatctcctggctctggcatgccaaccaagtggcatgtctgtttattctgttggttgtgggttaggtgggaaacttggccatggttctcgaaccgatgagaaataccctaggttaatcgagcagttccaagctttgaatatacaaccagtag

SEQ ID NO: 397736 - DNA, 499 bp, Oryza sativa nipponbare
taccgattcggaattcgacccacgcgtccggcagcagcagcagcagctgagcttgaagcagcagagcgaggtagacatggccgccgccaccatggccctctggtccccggcgctggccggcaaggccgccgcgaaggtgttcggcgaggggcgcatcaccatgcgcaagtcggcggcgaagcccaagcccgccgcgtcggggagcccgtggtacggcgccgaccgcgtgctctacctcggcccgctctccggcgagccgccgagctacctgaccggcgagttccccggcgactacgggtgggacaccgcggggctctccgccgacccggagacgttcgccaagaaccgggagctggaggtgatccactccaggggggcgatgctcggcgcgctgggctgcgtgttccccgagcttctcgcccgcaacggcgttaagttcggcgaggcggtgtggttcaaggcggggtctgaaatttttcagcgagtgtggtctctgctt

SEQ ID NO: 397737 - DNA, 389 bp, Oryza sativa nipponbare
ccacgcgtccgcccacgcgtccgcccacgcgtccgaagaaagcataagcaacacaagggattaactcatcactcacttagctaattaaatcttcgaccatgtcggacaagtgcggcaactgcgactgtgctgacaagagccagtgcgtgaagaaaggtaccagctatggcgtcgtcatagttgaagccgagaagagccacttcgaggaggtcgccgccggcgaggagaacggcggctgcaagtgcggcaccagctgctcctgcaccgactgcaagtgcggcaagtgaagtcacgaagcaaccgaacactcgccgccggcgagtcacctaccttaattagtccacaataaaaaccacccatatgagtgtggtttgtgtgtgtgctgatta

SEQ ID NO: 397738 - DNA, 441 bp, Oryza sativa nipponbare
ccacgcgtccgcggacgcgtgggttttttttggccgggagagagagcatctagctagggagagaaaggaagagacgagaggagagagatggccactgcttatgctcccatggcgagccagctgatgaagagcagcttggtgtgctccaagccgagggggctgtctggtgcttcgctgacaaggaggccccgcttcacagtcaaggccatccagtctgagaagccaacgtaccaggtggtgcagcccatcaatggcgaccccttcatcggcagcctggagacgccggtgacctccagcccgctggtcgcctggtacctctccaacctcccggcgtaccgcaccgtcgtcagcccgctgctccgcggcatcgaggtctgcctcgcccacggctacctcctagtcgggcccttcgcgctcaccggcccgttccggaacacgccg

SEQ ID NO: 397739 - DNA, 427 bp, Oryza sativa nipponbare
  unsure (1)..(427): unsure at all n locations
cgcgtccgcccacgcgtccgcccacgcgtccgaagaactgtcttttctgtatactttccccgttctattgctaccgcgggtcttatgcaatcgatcggatcatatanatatcccttcaacacaacataggtcatcgaaaggatctcggacgactcaccaaagcacgaaagccagttagaaaatggattcctatttgaagagtgcctaaccgcatggataagctcacattaacccgtcaattttggatccaattcgggatttttcttgggaagtttcgggaagaaattggaatggaataatatagattcatacagaggaaaaggttctctattgatgcaaacgctgtacctagaggatagggatagaggaagacgggaaaatcgaaatgaaataaataaagaataaagccaaaaaaaataaaaagggc

SEQ ID NO: 397740 - DNA, 399 bp, Oryza sativa nipponbare
ccacgcgtccgcggcgccatggcggcatcggcggcggcggcggtggcccccatgctgacgatgcacaacctgtgcccgtacacggtgtggccgatcgtgtcgccggacagtggctcgccgcccatcgccgacgggatacggctggagggccgcggcgtcgggctgaggtcgctcaacctcccggcggggttctggtcggggcgcgtcgtgccgcgcacatggtgcagggacggcgggcggtgcgacaccgggaacgcgccgccggcgacggtggtgaggctgtcgttcaacggcgccggcgggctggcggagtacagcgtcaacctcggggaagggttcaacgtgccgacggtggtgagcccgcacgccatcggcggcgggatgtgcccggcgctgggc

SEQ ID NO: 397741 - DNA, 409 bp, Oryza sativa nipponbare
  unsure (1)..(409): unsure at all n locations
ccacgcgtcccgccacgcattcgcaccactgttggctaccgaaaaggatgaggagcttgaactcggagagagacaccagtccacattcaggctatgcttttttgatgcacatgctgcatagaccatatcaaataagatccacaaacctttcttcctacaagaaggcaccattaatggacagagctgaagccacttcctctgccaagcacggagctgacacgcccatgtggatcacatccaagcagatcctgagctacctggatggcacgcttgctggagacttcgggttcgacccgctggggctatcggacccgggagggaccggtgggttcatcgagccacggtggctggcctacggcaggtgttaacgggcgacggnatgatggcgtcgcggatgtcgcccgagctc

SEQ ID NO: 397742 - DNA, 440 bp, Oryza sativa nipponbare
ccacgcgtccgcccacgcgtccggagcaaagaaggagagagcttggtgagctgcagagatggccccctccgtgatggcgtcgtcggccaccaccgtcgctcccttccaggggctcaagtccaccgccggcatgcccgtcgcccgccgctccggcaactccagcttcggcaacgtcagcaatggcggcaggatcaggtgcatgcaggtgtggccgattgagggcatcaagaagttcgagaccctctcctacctgccaccgctcaccgtggaggacctcctgaagcagatcgagtacctgctccgttccaagggggtgccctgcctcgagttcagcaaggtcggattcgtctaccgtgagaaccacagatcccccggatactacgatggcaggtactggaccatgtggaagctgcccatgttcgggtgcactgacgccaccc

SEQ ID NO: 397743 - DNA, 466 bp, Oryza sativa nipponbare
ccacgcgtccgcccacgcgtccggccgcctgccggtctgcgcctacgccaccacctccgggcgcgtcaccatgtccggcgagtggatgccgggccagccacgccccgcccacctcgacggctcctctcccggtgacttcgggttcgacccgctgggcctcgccaccgtgccggagaacttcgagcggttcaaggagtcggaggtgtaccactgccggtgggccatgctcgctgtgcctggggtgttggtgccggaggcgctggggctgggcaactgggtgcaggcgcaggagtgggcggcggagcccggcggccaggccacgtacctcggcaacccggtgccatggggcacgctgccgacgatcctggtcatcgagttcgtcgccatcgccttcgccgagcaccagcgcaccatggagaaggaccccgagaaggagaagtaccccggcggcgcctttgaccccctc

SEQ ID NO: 397744 - DNA, 355 bp, Oryza sativa nipponbare
ctcctcaccaactcaaagtctcttcctcacgaccggcggagagcggcggggtttcttatgtctgggagaggcaacgtcctctaggttctcgataatggcggctcgaataggcacaggaaggtgctgctcgacaacatccaggggatcacgaagcctgcgatccggaggctggccaggaggggcggcgtgaagcgcatcttcgcgctgatctacgaagagacccgcggcgtgctcaagatctttctcgagaacgtcatacgcgacgccgtcacctacacggagcacgcccgccgtaagatcgtcaccgccatggacgtcgcctactccttcaacgccaggccgtactctttacgga

SEQ ID NO: 397745 - DNA, 483 bp, Oryza sativa nipponbare
ccacgcgtccgccacgcgtccgcccacgcgtccgcccacgcgtccggttcatttcagattacctaaaagttaatagagagagattgcgcaagatgtaccatttgtttgttgatgctttggatcaagtggggattgagtgctacaagagcagtggagggttctactgctgggcagacatgagcaagttcatcaggtcttacagcgagaaaggggagcgcaagctttgggataggttattggaggaggcaaaggtcaatgtcactccaggttcatcttgccattgcatcgagcctggatggttcaggtgttgcttcacgacattgagcgaacatgatatccctgtcttagtgcaaaggctcaggacgattacagatagccataaaccgaatcattgaaacaccaggattatcctctcgagcttgtcatggaatggataactgctttgccaggtacttcacagagaatcagggggcatagaggaaa

SEQ ID NO: 397746 - DNA, 375 bp, Oryza sativa nipponbare
ccacgcgtccgcccacgcgtccgcccaaacgtccgtctacacgtccgaacaaacaaagcggatgacgcgcatgatgggatgccactgactgtagcccagaaagctgttatagctctcaccgtacgagcaatcgatgcctgtgtggttagtcctgcggataagccactcatgtaggatgcaggctgatataacgacgacagcaggccagagatacaattataagaatgctttggatgcactgtatagcaatgctgctgatgaaggcgtggtagcaatgaagaagggcgcaggtgcaactgtaaagggagctatgaccatgaagatggagatgcagcggctgctatgatcagagtgcagcgttatggagagacactc

SEQ ID NO: 397747 - DNA, 426 bp, Oryza sativa nipponbare
ccacgcgtccgggttccaacgatggcactgggagttcaacagctcaagaacgagcagtatcgcacaaggaagatccccactgcatttgacgagatccacgagtttcttgacagattctacatgtcaaggattgggatccgcatgcttatagggcagcatgtggctttgcatgatcctgacccagagcctggcgtcataggcctcattaatacagaattgtcccctatacaggtggctcaagctgccagtgaagatgcccgttctatttgtttgagggaatatggatcagctcctgagattgacatctatggagacccaacttttacatttccatatgtttcatcacatctacatctcatgctatttgaattggtgaagaactccttgcgtgcagtacaggaacgatatatgaattccgataaagat

SEQ ID NO: 397748 - DNA, 449 bp, Oryza sativa nipponbare
ccacgcgtccgcggacgcgtgggcggacgcgtgggtgcaaacacacgcagcaaaatccacaccgcttcccctccccgagaagaagagagcagcatccatggcgcccaaggcggagaagaagccggccgcgaagaagcccgcggaggaggagcccgcggcggagaaggccgagaaggccccggcggggaagaagcccaaggcggagaagcgtctccccgccggcaagggcgagaagggcagcggcgaggggaagaaggcggtgcggaagaaggggaagaagagcgtcgagacctacaagatctacatcttcaaggtgctcaagcaggtccaccccgacatcggcatctcctccaaggccatgtccatcatgaactccttcatcaacgacatcttcgagaagctcgccgccgaggccgccaagctcgcccgctacaacaagaagcccacca

SEQ ID NO: 397749 - DNA, 381 bp, Oryza sativa nipponbare
  unsure (1)..(381): unsure at all n locations
ccacgcgataaccgagcgcatcgcacggaccgagatctgaccccggcagcggcggcgaactccggtgaaacaactatgggcatgaacgggcggggccaccatggcccctctcctcccaggagaaggacctcgcgatgcacgacgacctcctncgcgctcttcggcgaggcgcggatcaccatgcgcaagaccgccgcgaagcctaagccggcggcgtcgtaggggagcccgtggtacggcgccgaccgcgtcctctacctcggcccgctctccggcgagccgccgagctacctcaccggcgagttcccgggcgactacgggtgggacaccgcggggctctccgtcgacccggagacgttcgccaagaaccgggagctggag

SEQ ID NO: 397750 - DNA, 471 bp, Oryza sativa nipponbare
ccacgcgtccggcgacgcgtgggccattggagtagtcttggtcaccgagaaggttgcttcagcaataaacttcggcgaccacggtaccacattcgggggaggccctcttgtttgccaagctgcattgaccacattggataagatccagaaacctggcttcctagcagaggtggccaagaaaggagagaacttcaagcagcttctcagtaccaagctgagcggaaacgcccatgtgaaagagatccgggggatcggtctcattgtcggcatcgagctcgatgtcccagcgggtcctttggttgatgcgtgcttggatcgcggtgtcatagtgctgacagctggtaaaggcaatgttgtgaggctggtagccgcactcatcatctacgaaaaggagcttgagcaagctgcagaggtgataaggcactgtctacctgcacttgatgcctctaccctataatgtaagccacatgc

SEQ ID NO: 397751 - DNA, 392 bp, Oryza sativa nipponbare
cgggtcgacccacgcgtccggcatggactcgcccgggttcttcaccttcgtggtcgacacgcgcaaggaggtggacgcgctccgcgccgagctgcccgacgcgctcaagcgctgcgtcgatccggcgaggttcgccatggacgcggtctccgaggtgttccccatcgacaagcgggcggtgaggtcccccaccgacctggcgtgggcgtgcgtgctcatcctggaggcggtggtgccgtcgctggccgatccggacccggagatcgggggcgggcgccccattgtgccctaagccgcgcgcgagaaggcgctctacatggtcaaggagctgaagcgacgccaccccgacataggcatgtgctgcaaggccatgtgcatcatgaactccttca

SEQ ID NO: 397752 - DNA, 336 bp, Oryza sativa nipponbare
  unsure (1)..(336): unsure at all n locations
ccaaaccgagcgcagcgcacggaccgagatctgcgcccggcagcggcggcgaactccggtgaaccaaccatggccgtggacctgatgggctgctacgccccgcgccgcgcagacgaccagctcgccatccaggaggcggccaccgccggcctccgcagcctggagatgctcgtgtcgtccctctcctcctcctctcaggccgccggggctcacaaggcctcgccgcagcagcagccgttcggcgagatcgccgaccaggccgtctccaagttccgcaaggtcatctncatcctcgaccgcaccggccacgcccggtttcggcgcggcccggtcgag

SEQ ID NO: 397753 - DNA, 369 bp, Oryza sativa nipponbare
ccacgcgtccgcgagagatcattagttgagcgtgtacggcaagagctgaaacatgagcttaaacaggggtacagagaaaagcttgtggacattagggaagagatactccgaaagcgaagagctggaaaactcccaggagatacagcgtctactttgaaagcatggtggcaggctcactctaaatggccatacccaactgaggaggacaaggctcgcttggtgcaggaaacagggttgcaactaaaacagatcaataattggtttatcaaccaacgtaaacggaactggcacagcaatcctgcttcatcctcatcagacaaaagcaagagaaaaaggtgatggcaaggccgagcaatcttggtagaacgt

SEQ ID NO: 397754 - DNA, 430 bp, Oryza sativa nipponbare
ccacgcgtccgcccacgcgtccgagcagcagcagtagctgagcttgaagcagcagagcgaggtagacatggccgccgccaccatggccctctcgtccccggcgctggccggcaaggccgccgcgaaggtgttcggcgaggggcgcatcaccatgcgcaagtcggcggcgaagcccaagcccgccgcgtcggggagcccgtggtacggcgccgaccgcgtgctctacctcggcccgctctccggcgagccgccgagctacctgaccggcgagttccccggcgactacgggtgggacaccgcggggctctccgccgacccggagacgttcgccaagaaccgggagctggaggtgatccactccaggtgggcgatgctcggcgcgctgggctgcgtgttcccggagctcctcgcccgcaacggcgtcaagttc

SEQ ID NO: 397755 - DNA, 405 bp, Oryza sativa nipponbare
  unsure (1)..(405): unsure at all n locations
ccacgcgtccgcccacgcgtccgaaaagctctcgctgctcctcgagagggagttggtggagagagaaagagagagagagagatggcgtcgccgtcgtcgtcntcttctctgtgctcnaccttcgcctcgccgcgcgccgcctccctcggccgccgcctcgccttctcctcgcccaggaaagcattccgagtgagggcatcatccagggttgacaagttctcgaagaatgacatcatcgtgtccccttccattctttctgcaaacttttccaagcttggcgagcaggtaaaagctgtggaggtggcaggatgtgactggattcatgttgatgtcatggatggacgttttgtgccaaatatcacaatcggacctttgggtggtggtgctctgcgggcagtcactgat

SEQ ID NO: 397756 - DNA, 207 bp, Oryza sativa nipponbare
ccacgcgtccgaaaaaaaagataccttaaaagcccgtgctcaatcagccaagacttcaacaaaagtgagcgaaatgctggggaatgtaaatactattggtgctcttttcagcatttgaaaaaatggacgaaaaatttatggcattggagtcccaagcagaggcactcgtgtttttgtcaactgatgatcttggaaggaaagtttgca

SEQ ID NO: 397757 - DNA, 472 bp, Oryza sativa nipponbare
ccacgcgtccggattgatactcctgcaccagagcaaagggatgattgggacatcctgaaagctatcgtatacggtggcctcgtggaatcgatcaccagcctctctgtggtttcagcagctgcatccagcggcgccaggacattggacatattcatcttgggcatagcaaacctcatcggtggacttcccatcatctttcacagcatggctgagctgagaagcattggagatgtggatgagagggaggagcagggcggtcactactggttgcagctggggaggcgatccaagtaccggctgcatgtcgccatggccgtgctgtcctacctcctcttcggcctgctgccgccgctcatctacggcctctccttccgcggcggcgacgtgagggagaagaagatggttgcggtggcggcggcgtctctggggtgcatcgcgctgctggccatgggcaaggcacacgtggcacgga

SEQ ID NO: 397758 - DNA, 289 bp, Oryza sativa nipponbare
acccacgcgtccggtgaacatgagtacatcgacgcggtggtcggcgaggaggtgaggctcattgtggaggtggacttccggtcggagttcgaggtggcgcggtcgaccaaggcgtaccgggcggcgctgcaggcgctgccgccgctgttcgtggggacgccggaccgcctcgggcagatcgtggccgtcgtggcggaggcggcgcggcaaatcctgaagaagaagggcctgcacttccctccatggcgcaagccggagtacatgcgcgccaagtggctgtccccgcacg

SEQ ID NO: 397759 - DNA, 424 bp, Oryza sativa nipponbare
ccacgcgtccgctctcctccaagctagcagctcagctaagctccattactacccagcttctcctgatgcgtgtgaagatgaagaactcatcaagaagcctgctacctcaccgggatgaaatcgtcagtggcggcgtggtcgctgtgacgatggagaagtgcaggtcggtgccgcacgagcactcggcggcgtactacggctgcggcggcgggtacgactactaggacgtgagcggaggcggcggcgtgcgcctcgcgaagtcgtacagcttcaacgggccaagcgcccgcgatgacccggaggcgaagcggcggcggctggtggcggcgtacaacgtgttcgcgacgcaagggaggctcaagttcaccgttcggagcagcttcaagtggatcaagttcaagttcttcacattcgtttcggtggc

SEQ ID NO: 397760 - DNA, 265 bp, Oryza sativa nipponbare
ccacgcgtccggttgcgttcaacaagatttaaaatatcaaaaggggatgttgctacttatccaaaaactgggactgggactggttgttctggaagcatttttcatcccatcttattatccttcacagaaatgctagtttgagtttatttttgagtgatgcctgtcattagtgcctcttatctttaagtagttgaactgcagagcggcttgtaatggcgaaacatatgctatgtcaaagtacatccgtccatttttactgtgcaac

SEQ ID NO: 397761 - DNA, 429 bp, Oryza sativa nipponbare
ccacgcgtccgaagaaggagagagcttggtgagctgcagagatggccccctccgtgatggcgtcgtcggccaccaccgtcgctcccttccaggggctcaagtccaccgccggcatgcccgtcgcccgccgctccggcaactccagcttcggcaacgtcagcaatggcggcaggatcaggtgcatgcaggtgtggccgattgagggcatcaagaagttcgagaccctctcctacctgccaccgctcaccgtggaggacctcctgaagcagatcgagtacctgctccgttccaagtgggtgccctgcctcgagttcagcaaggtcggattcgtctaccgtgagaaccacagatcccccggatactacgatggcaggtactggaccatgtggaagctgcccatgttcgggtgcactgacgccacccaggtgc

SEQ ID NO: 397762 - DNA, 279 bp, Oryza sativa nipponbare
cccacgcgtccgcccacgcgtccgcccacgcgttcgcccacgcgtccgcccacgcgtccgcccacgcgtccgcccacgcgtccgacctgctgtccgtggcgtacaagaacgtcatcggcgcgcgcagggcgtcgtggcgcatcgtgtcctccatcgagcagaaggaggaaggccgcggcgccgctggccacgccgtcgtcgcgcgctcctaccgcgcccgcgtcgaggccgatctctccaacttctgcgcggggatactccgcctccttgacgagcgcc

SEQ ID NO: 397763 - DNA, 479 bp, Oryza sativa nipponbare
acccacgcgtccgaagtactcgagcaaagaaggagagagcttggtgagctgcagagatggccccctccgtgatggcgtcgtcggccaccaccgtcgctcccttccaggggctcaagtccaccgccggcatgcccgtcgcccgccgctccggcaactccagcttcggcaacgtcagcaatggcggcaggatcaggtgcatgcaggtgtggccgattgagggcatcaagaagttcgagaccctcttctacctgccaccgctcaccgtggaggaccttctgaagcagatcgagtacctgctccgttccaagtgggtgccctgcctcgagttcagcaaggtcggattcgtctaccgtgagaaccacagatcccccggatactacgatggcaggtactggaccatgtggaagctgcccatgttcgggtgcactgacgccacccaggtgctcaaggagcctgaggaggccaagaaggcgtaccct

SEQ ID NO: 397764 - DNA, 424 bp, Oryza sativa nipponbare
ccacgcgtccggcaagcgcgactggagaagtttgagatcccggccaagatcaagctgatatctgagccatggaccccggagtctggccttgtcactgctgccctcaagctcaagagggaagggctcacgaagacatatgaggatgatcttgctaaactatacgcctgatgatcaatgctgaagtgctgattcagcctactcgacgttttgacacaaccagctaccgtaggtaaagtacatccgtccatttttactgtgcaacataaaaaaaaaaaaaagggccggccttttggagctgtggttgtttgatcttttggagctagcacaattatgtgtagcctcatttcacacttacttctgtgtctctgccatattctcttgtgaatttacattgttcaaaggaaaaaaaaaaggcattctacaa

SEQ ID NO: 397765 - DNA, 463 bp, Oryza sativa nipponbare
ccacgcgtccgttcatcctgttccactacgtggagatccggcggtggcaggacatcaagaaccctggctgcgtcaaccaggaccccatcttcaagagctacagcctcccgccgcacgagtgcggctaccccggcagcgtcttcaaccccctcaacttcgagcccaccctcgaggccaaggagaaggagctcgccaacgggaggctggcgatgctggcgttcttggggttcctggtgcagcacaacgtgacgcagaaggggcccttcgacaacctgctgcagcacctgtctgacccgtggcacaacaccatcatccagacgctgtcaggctgagcgtgtgatcgatttcatcagggccagggcatctcaaggagcttgatgagttcaggctggtgaaaccgatgattgggcgatggaagatgttctcttcttgtttcttcttcttttttttgtggagtatgcat

SEQ ID NO: 397766 - DNA, 288 bp, Oryza sativa nipponbare
ccacgcgtccgggtgatattaaggatataggagaaagagaaggaaaatattatgccattaacattccacttaaagatgggatagatgactccggctttactcgcctttttaaaacagttattgccaaagttgttgagacatatctgccaggtgctattgttcttcaatgcggggctgattccttggcacgggaccgtctggggtgcttcaatctgtccattgaaggccatgctgaatgtgtgaagtttgtcaagaaattcaatatccctctactggtgactggtggtg

SEQ ID NO: 397767 - DNA, 456 bp, Oryza sativa nipponbare
ccacgcgtccggactacaaaaagattggagcaaaactaagggatcttgttccttgtgttcttttgtcgtttgacaatgagcagatattaatgttcagaggcaaggaatggaagtccagatatccaaagcctctgactcttattccaaaaattcgaaagaataatgttccaatgtcatctgatgagagtagttcagatgaagccactgatgatgatgaccgtttggcagtaagagaagtactgagacctaaaatgtttgaactatgggcaaatgcgattgagtcatctgtggcactgatgttggatgatgctgaagtggatgcttttacacctgattccctttttacaagggtagaggacttcagtgttacatctcaagttgtcgaacattcattttcagctgtgcttgtgggcaatgatgaatcaaacccagatgtcctaaatgctgaatacaccg

SEQ ID NO: 397768 - DNA, 253 bp, Oryza sativa nipponbare
acccacgcgtccgcccacgcgtccgaaaaagcccaacaagtatagctatccaattgggaagagacgaatgcagccagtgggcataatagtatttgcatctgtaatgggtacacttggcttccaagtgctaattgaatccgggcgtcagcttatcacaaatgagcaccaagtgttcgaccacaggaaggagctgtggatgatcggcagcatgtcctcagtcgcagtggtgaagttctttctgatgctctactgc

SEQ ID NO: 397769 - DNA, 401 bp, Oryza sativa nipponbare
ccacgcgtccggaaagcataagcaacacaagggattaactcatcactcacttagctaattaaatcttcgaccatgtcggacaagtgcggcaactgcgactgtgctgacaagagccagtgcgtgaagaaaggtaccagctatggcgtcgtcatagttgaagccgagaagagccacttcgaggaggtcgccgccggcgaggagaacggcggctgcaagtgcggcaccagctgctcctgcaccgactgcaagtgcggcatgtgaagtcacgaagcaaccgaacactcggcgccggcgagtcacctaccttaattagtccacaataaaaaccacccatatgaggggggtttgtgtgtgtgccgattattgcctgaattaaaccccggggggttatcggattaatt

SEQ ID NO: 397770 - DNA, 427 bp, Oryza sativa nipponbare
ccacgcgtccgattaatttcagagatagagtgagtgatcagttgagtgttgttgcataaacatggctgcctctgtcatggcttctctggctctgaaaccatctgcatctccattactagaacgttcgaagcttcgagggaaagggacaatggcaaggccatctttgatcatagtggccaagaaagcaaagaagattcagacatcccagccctatgggcctgctggaggagtggtgttcaaggaaggtgttgatgcatctggaagggtagccaagggaaagggtctttaccagttttccaacaagtatggagcaaatgttgatgggttcagcccaatatataccccagaagaatggtcttcaactggtgatgtctatgttggaggaaaggcaggtctatttctttgggctaacaattctgcaggaatt

SEQ ID NO: 397771 - DNA, 204 bp, Oryza sativa nipponbare
ccacgcgtccgagaggagcagccatggcgtcgtcggtggcagcggcggcgagcacgttcctggggacgaggctggcggacccggcgccgcagagcgggaggatcgtggcgaggttcgggttcggcggcgggaagaaggcggcggcgaagaaggcggcgaggccgtcggcgccgacgacggacaggccgctgtggtttcccggcg

SEQ ID NO: 397772 - DNA, 436 bp, Oryza sativa nipponbare
ccacgcgtccgcccacgcgtccgaaaaaccaacccaaccgccgccgcatcgccctcgttagaacgatggccgcgtcggcgctgcaccagaccaccagcttcctcggcaccgcccctcgccgggatgagctcgtccgccgcgtcggcgactccggtggccgcatcaccatgcgccgcaccgtcaagagcgcgccccagagcatctggtatggacctgaccgtcccaagtacctgggcccgttctcggagcagacgccatcgtacctgaccggagagttcccgggagactacgggtgggacacggcggggctatcggccgacccggagacgttcgcgaggaacagggagctggagggatccactcgcggtgggcgatgctgggggcgctgggctgcgtcttccccgggatcctgtccaagaacggggttgaattcggg

SEQ ID NO: 397773 - DNA, 478 bp, Oryza sativa nipponbare
ccacgcgtccggccacgtcgactccggcaagtcgaccaccacgggccatctgatctacaagcttggaggtatcgacaagcgtgtgatcgagaggttcgagaaggaagccgctgagatgaacaagaggtccttcaagtacgcgtgggtgctcgacaagctcaaggccgagcgtgagagaggtatcaccattgatatcgccctgtggaagttcgagaccaccaagtactactgcacggtcatcgatgcccctggtcaccgtgacttcatcaagaacatgatcacgggtacctcccaggctgactgtgccgtgctcatcattgactccaccactggtggttttgaggctggtatctccaaggatggccagacccgtgagcacgctcttcttgctttcactcttggagtgaagcagatgatctgctgctgcaacaagatggatgccaccactcccaagtactccaaggcccgttatgatgaa

SEQ ID NO: 397774 - DNA, 474 bp, Oryza sativa nipponbare
ccacgcgtccgcggacgcgtgggcggacgcgtgggcgcccctcgacgtcatcgccatcaacgacaccggaggcgtgaagcaggcgtcgcacctcctcaagtacgactccacgctcggcatcttcgacgccgacgtcaagcccgtgggcgacaacgccatctccgtcgacggcaaggtgatcaaggtcgtctccgaccgcaacccgtccaacctgccgtggggcgagctcggcatcgacctcgtcatcgagggcaccggtgtgttcgtcgaccgcgacggcgcgggcaagcacattcaggccggcgccaagaaggtgctcatcaccgcccccggcaagggtgacatccccacctacgtcgtcggcgtcaatgccgaccagtacagccccgacgagcccattatcagcaacgccttctgcaccaccaactggcttgcccccttcgtgaagatcctcgaccagaagttcggcatcat

SEQ ID NO: 397775 - DNA, 449 bp, Oryza sativa nipponbare
ccacgcgtccggctcaccactcatctgccgctgccgctgctgaagaaaaacgcacatccttccttcctagcaccaactcgccacccaattaggccattaccttccaaaattctcccatccaatggcgctacgcctctccgtctcctcctcgcacgggccggcttcctcgccggccatctccacatgccgccccgccgcctgcgggcgcttccccgccttgctcggcggcggtgtggcttctcagaggaggagcctgacggtggtgtctggccctgagacaagggcggtgatccccgtgaggtcgagcggctcggacaccgccactgttggggccgaggcggaggcggtggccgtgaccgggcaggtgacggaggtgaacaaggataccttctggccaattgtcaagtcggcagggcccaaagtcgtcgtcctcgacatgtacacccaat

SEQ ID NO: 397776 - DNA, 478 bp, Oryza sativa nipponbare
ccacgcgtccgcccacgcgtccgcggacgcgtgggtgtctcccctctccttcctcctctcctttcccctcctctgttcccccctctcacaagagagagagcgccagactctccccaggtgaggattcagccatgaagggggccaaatccaagggcgccgccaagcccgacgccaagttggctgtgaagagtaagggcgcggagaagcccgccgccaagggcaggaaggggaaggccggcaaggaccccaacaagcccaagagggctccctccgctttcttcgtttttatggaggagttccgtaaggagttcaaggagaagaaccccaagaataaatctgtcgctgctgtaggaaaagcagccggtgataggtggaaatccctgaccgaagcggacaaggctccctatgtagccaaggccaacaagctcaaggccgagtacaacaaggccattgctgcctacaacaagggcgagagcac

SEQ ID NO: 397777 - DNA, 470 bp, Oryza sativa nipponbare
ccacgcgtccgatttttctgagaggcacagagctcatgaaagacgctcgagggattgcatccctgagtggcatggtgcctccatttgttccatttgctcaaacgtttgcagcagccatcactgcggctctcacaggatcactctattatgtggctactgccccgaaagatcctacttatgtggtgacaccagcaatgcgttcaaatactgggcgagagaatctcaagaaactatttgcagcatggtatgaaaggcggcaaatgaggaagatatattcccctcttcttgaaggaatcttggctttctaccttggctttgagtggatccagacagataatattcttgcacctatgatcacccacggcatatactctaccgttgtgctttgccatgggttgtggaaaatacacgaccactggagaaggctacggcaaagaattcaggatatcagacaggatggaacatcaaat

SEQ ID NO: 397778 - DNA, 462 bp, Oryza sativa nipponbare
ccacgcgtccgcccacgcgtccgcccacgcgtccggggcggcggagcccggcggccaggccacgtacctcggcaacccggtgccatggggcacgctgccgacgatcctggtcatcgagttcgtcgccatcgccttcgccgagcaccagcgcaccatggagaaggaccccgagaagaagaagtaccccggcggcgccttcgaccccctcggcttctccaaggaccccgtcaagttcgaggagtacaagctcaaggagatcaagaacgggcgattggccatgctggcttttgtgggtttctgcgtccaacagtcggcgtacccgggcaccggcccactggagaacctggccagccacctctcggacccgtggcacaacaacatcggcgacatcatcatcccgagaaccatctacccttgagcttggcacgaaccggtgcgtgcgtccgggcgtacgtgaaggct

SEQ ID NO: 397779 - DNA, 473 bp, Oryza sativa nipponbare
ccacgcgtccgccctctcgccttcctttccccaactaaaccctaactcctcgccgccgcctccgcctccgcctcctcgtcggagcagcgagccgctgctccttctcctccaccaccagccatggcgacccagatcagcaagaagaagaagttcgtgagcgatggcgtgttctacgcggagctgaacgagatgctgacgcgggagctggccgaggacggctactccggcgtggaggtgcgcgtgacgccgatgcgcacggagatcatcatccgggccacgaggacgcagaacgtgctcggcgagaaggggcgcaggatcagggagctcacctccgtcgtgcagaagcgcttcaacttccccgagaacggcgtcgagctctacgccgagaaggtcgtcaaccgcggcctctgcgccatcgcccaggccgagtccctccgctacaagcttcttggaggcctcgccgtccgcagggc

SEQ ID NO: 397780 - DNA, 391 bp, Oryza sativa nipponbare
ccacgcgtccgtgcagagatggccccctccgtgatggcgtcgtcggccaccaccgtcgctcccttccaggggctcaagtccaccgccggcatgcccgtctcccgccgctccggcaactccagcttcggcaacgtcagcaatggcggcaggatcaggtgcatgcaggtgtggccgattgagggcatcaagaagttcgagaccctctcctacctgccaccgctcaccgtggaggacctcctgaagcagatcgagtacctgctccgttccaagtgggtgccctgcctcgagttcagcaaggtcgtattcgactaccgtgagaaccacagatccgccggatactactatggcaggtacctgacattgtggaagctgtctatggtcgggtgcactg

SEQ ID NO: 397781 - DNA, 435 bp, Oryza sativa nipponbare
ccacgcgtccgcaagaaagcataagcaacacaagggattaactcatcactcacttagctaattaaatcttcgaccatgtcggacaagtgcggcaactgcgactgtgctgacaagagccagtgcgtgaagaaaggtaccagctatggcgtcgtcatagttgaagccgagaagagccacttcgaggaggtcgccgccggcgaggagaacggcggctgcaagtgcggcaccagctgctcctgcaccgactgcaagtgcggcaagtgaagtcacgaagcaaccgaacactcgccgccggcgagtcacctaccttaattagtccacaataaaaaccacccatatgagtgtggtttgtgtgtgtgctgattattgctgaattaaacccgtgtgttatcgattatattaagcagctggtcgcttcggcgactattgcgtgta

SEQ ID NO: 397782 - DNA, 426 bp, Oryza sativa nipponbare
ccacgcgtccgcccacgcgtccgtgtggtttgcttggtggtactgttggtggccttcttggatccgggggtgggttcatccttggtccacttctccttgagcttgggtgcatccctcaggttgcaagtgcaacagcaacattcgtgatgatgttctcctcatccctatccgtagtggagttctacttcctgaacagattcccaatcccttttgctgtctacttgatctgcatttccatattggctggattctggggccagtccttggtccggaaactcgtgcacgtgctcaagcgagcatctttgattgtcttcatcctatcctctgtcatcttcgcgagtgctcttacaatgggtgttggtggaacccagaagagcatcagcattgaacaacaaccatgagttcatggggttcctcgacttctgc

SEQ ID NO: 397783 - DNA, 463 bp, Oryza sativa nipponbare
ccacgcgtccgctccagattccaaaccagcaggagtcgcctcgcctcctccttcatcctcctcgtcgtcgccgcgggggtcgcctgaggtaggaatcccaacaacccccccccttcctctccacccaagcaagcttctagggttttcgaccgcgcctcgcttcctccggtttcgtgggaggcgatcacattaacaatggtgaaggctgttgttgtgcttggtagcagtgagattgttaagggcactatccactttgtccaagagggagatggtcccaccactgtgactggaagtgtttctggcctcaagcctggtctccatgggttccatattcatgcacttggtgacaccaccaatggttgcatgtcaactgggccacactacaatcctgccggaaaggagcatggagcaccagaagatgagacccgccatgctggtgatcttggaaatgtcaccggtggag

SEQ ID NO: 397784 - DNA, 168 bp, Oryza sativa nipponbare
ccacgcgtccggcaaaagaagaagaagaagaatagaagaagaagaagatgcataccgctgctagcagtgtcgctggattgtccgccgcgtcgcccgctgctgttaaggggctcaccctgctgatttaggctcctcggcgtgttgcgttgcgcgttcacgcggcggatg

SEQ ID NO: 397785 - DNA, 476 bp, Oryza sativa nipponbare
ccacgcgtccggccacccccgccgacattgtcaacagatggtgatgtgacgctggcaccccgggctaccgatcgacaatcctatgcagctctatcatccccatcaccgtcctcctgcttcttctcctccaacagcaggaacctcccggcccccttccgcccccgcctcatccgtaacacccccgtcttcgccgcccccgttgcccccgccgcgatggacgccgccgtcgaccgcctcaaggatgggttcgccaagttcaagaccgagttctatgacaagaagccggagctcttcgagccgctcaaggccggccaggcacccaagtacatggtgttctcgtgcgccgactctcgcgtgtgcccgtcggtgaccatgggcctggagcccggcgaggccttcaccgtccgcaacatcgtcaacatggtcccaggctactgcaagatcaagcacgctggcgtctggtcggccatcgagta

SEQ ID NO: 397786 - DNA, 381 bp, Oryza sativa nipponbare
ccacgcgtccgcccacgcgtccgcccacgcgtccgctggattctcaggtgcagaccttgctaacttggttaatgtggctgctcttaaagctgccatggatggggcaaaagccgttacaatgaatgatcttgagtatgccaaggaccggatcatgatgggcagtgagcgcaagtcagcagttatttctgatgaatcccggaaattgacggcgtaccatgagggagggcacgcccttgttgccatccacactgaatgtgctcaccctgttcacaaagctaccatagtttccaggggaatggcccttggaatggtggcccaactcccggttaaagatgagtcatgcgtgttacggaaacagtatgctgctaggctgtatgtgtg

SEQ ID NO: 397787 - DNA, 477 bp, Oryza sativa nipponbare
ccacgcgtccggtcataacaagggtctgaggatcttagctagcacaagatctcaactcggcatttcattggagtttttcacgcctaatggatagcagcagtggtagccagggaaagaattccaaaaccagtgatggttgtgaaacaaaagaagttaataacactgcacagaattttgttcatttcacggaagaagaggaagatctcgttttcagaatgcacaggcttgttgggaacaggtgggaacttatagctggaagaatccctggaagaacagcaaaagagcagtacactgaaggggaaatttggtgtttggaaacatttcccagaaggatgtaatcagttatgaagtgacagttttgatgctaaacaaataatgtccacgggtgaccttgtaatactttgcaatagttgtggtctaactgacattgctcccaaaataaaaagaacacacgtgagatattcctaaagaacatcg

SEQ ID NO: 397788 - DNA, 309 bp, Oryza sativa nipponbare
ccacgcgtcccggacgcgtgggcgccgtccgccactagagaggagagggagaaggaggaggaggcaaatcccagcaaaagaagatgcatatctttttgaataccctgacggtgaataccatcacccttgaggtggtgagcagtgaccccatcgacaacgttaaggccaaaatccaggacaaggaatgggatcctacagaatcaacagtgtttgatatttgccggcaagcaactggaagatgggcgcacactggtcgacttcaacattcagaaggagttaactttttacttggtccttaggcttaggggt

SEQ ID NO: 397789 - DNA, 319 bp, Oryza sativa nipponbare
ccacgcgtccgcccacgcgtccgcataattttcaagagcactggtcctactgtactgagttccaatggatcaccgacacaatctaatccatccatggttcttgagatttgtaatttgacattattaacacccaggagtggaaacattcttattactgacctcactatggaactcaaagaaaaggaccacctactggtaatggggcccaatggaagtgggataacctttttggtacgtgctttggctggccttggaccagtggtactggggacatcatataccatgtgagaggtttcatggagcttcaaacattaaatta

SEQ ID NO: 397790 - DNA, 421 bp, Oryza sativa nipponbare
ccacgcgtccgcccacgcgtccggtctgtctcccctcccaaccagacgcctcctctctccaagtccgtctgcctctctcaccaccaccaccgtgcgctgctccaagggggagatggcggtggtgaagtgcatcagggtccacgagctgggcgggcctgaggtgttgagatgggagcaagtggaggtcggggagcccaaggagggcgagatccggatcaagaacaccgccatcggcgtcaatttcatcgacgtctactaccgccagggggtctactccgctccactgcccttcgtccctgggagggaagccgttggagtggtgaccgctgtaggtcctggcctgactggcaaaaaggttggggacgtcgtcgcctatgccggcaatcccatgggctcttatgctcaagagcagattattccc

SEQ ID NO: 397791 - DNA, 465 bp, Oryza sativa nipponbare
ccacgcgtccgcccacgcgtccgcccacgcgtccgcccacgcgtccggcttttcagttgattggaatggcttctgcccttgatctttcaggtttctttgaggaagaggatgcgtctcaaagaaagataaggttcacatcaacacattcaccaaaagatttattcgacaagattgagaatgttgtgacggagatgggattccaagtccagaggggtaatagcaagctaaaggtcatgaaaaatggcaggggttcaaagaacctcaggaatccatcatcattcttggtctgtactgaggtagtcgagctcgggccatccttatatgttgtcgaattgaagaaatcccatggagatcctatattgtatagacagctatgtgagaggctatcagatgagctaggagtgtgcaagacagagcagattcagaggacggagtcgctggaggatgatctagagagcttcgaca

SEQ ID NO: 397792 - DNA, 472 bp, Oryza sativa nipponbare
ccacgcgtccgcccacgcgtccgataaaaagggccatttaagccatatgaatgaaactgctgatggggccatgcaagctcctcgtaataatcaaagtgtccagcgtgctgattcagctgttcggaatttgttgtttcaaggatcaggccatctatttactgaaaaagacatcatcggtatttatagaaccccaatgctagatcaacttgggaggtcccgttatagtcttttccagaaggaggtacaagtcacaaaaaatcaacggggaaatgcaaatgagcgttatgcatggcttgcttgcactaagggtactatggaggagatgatgatgaatggtgctttggaaatagcaaaacctctgcagggtccaatgtatggtgttggggctcatcttgctccagcaaactcctccaatatctgtgttggtttatctgatattgacgaaaatggaatcataaggatgatgttgtgc

SEQ ID NO: 397793 - DNA, 325 bp, Oryza sativa nipponbare
ccacgcgtccgcggacgcgtgggcggacgcgtggtcggacgcgtgggggcggaaggatcaagtgcatgcaggtgtggccaattgagggcatcaagaagttcgagaccctatcgtacctgccaccactcaccgtggaggatcttttgaagcagatcgagtacctgcttcgatccaagtgggtgccttgcctcgagttcagcaaggttggattcgtctaccgtgagaaccacaggtctcccgggtactacgatggcaggtattggaccatgtggaagctgcccatgttcggctgcaccgatgccacccaggtgctcaaggagctcga

SEQ ID NO: 397794 - DNA, 476 bp, Oryza sativa nipponbare
ccacgcgtccggtcgacggccccggcgccgggaagcacatccaggccggcgcgaagaaggtcatcatcactgctccggcgaagggtgctgacatccctacctacgtcctcggtgtcaacgagggagactactcccacgaagtggccaacattatcagcaatgcttcctgcacaaccaactgcctcgctccgttcgtcaagatcttggacgaagagttcggaatcgtaaagggaaccatgaccacaactcactcctacaccggcgaccagaggttgctggacgcgtcgcaccgtgacctgaggagggcccgggcggcggcgctgaacatcgtgccgacgagcaccggcgccgcgaaggccgtggcgctggtgctcccgcagctgaaggggaagctcaacggcatcgcgctgcgcgtgccgaccccgaacgtgtccgtggtggacctggtgatcaacaccgtgaagaccggcatcacc

SEQ ID NO: 397795 - DNA, 284 bp, Oryza sativa nipponbare
ccacgcgtccggaaagcataagcaacacaagggattaactcatcactcacttagctaattaaatcttcgaccatgtcggacaagtgcggcaactgcgactgtgctgacaagagccagtgcgtgaagaaaggtaccagctatggcgtcgtcatagttgaagccgagaagagccacttcgaggaggtcgccgccggcgaggagaacggcggctgcaagtgcggcaccagctgctcctgcaccgactgcaagtgcggcaagtgaagtcacgaagcaaccgaacactc

SEQ ID NO: 397796 - DNA, 328 bp, Oryza sativa nipponbare
ccacgcgtccggcggggttcctggagaagtaccctgccttgatcaccggcttcttcttcttcatgtggtactgcttgaacgttatattcaacatcctcaataagaagatatacaactacttcccctatccatactttgtgtcggtgatccatctgcttgttggtgtcgtgtactgcctcgtgagctggaccgtctggctcccaaagcgtgcgcctatcaattcgacactcttgaagctgctctttccagttgcgttgtgccatgctcttggtcatgtcactagcaatgtatgggttgctactggtgcattttcatttgccgataataa

SEQ ID NO: 397797 - DNA, 125 bp, Oryza sativa nipponbare
ccacgcgtccggaaataccactacttttaacgttattttacttattccgtgagtcggaagcggggcctggcccctccttttggctctaaggcccgagtccctcgggccgatccgggcggaagaca

SEQ ID NO: 397798 - DNA, 237 bp, Oryza sativa nipponbare
ccacgcgtccgcccggctcaacttcgccggctcctcccgctacgccaccgcggcaccgaccaccggagcgcagaagatcgtgtccctcttcagcaagaagcccgccccgaagcccaagcccgccgccgtcacctcctcgagccccgacatcggcgatgagctcgccaagtggtacggccctgacaggaggatcttcttgccggagggtcttcttggaccgttcaggaggtgcgcgga

SEQ ID NO: 397799 - DNA, 413 bp, Oryza sativa nipponbare
  unsure (1)..(413): unsure at all n locations
ccacgcgtccgcccacgcgtccgcccacgcgtccggttggcttctcctccccctcccggttcggttcggttcgggtccggttcgatttcgtttttttttcttcttcgtggggttggtgggaaagcatggcggcgccggatgttgagtaccgctgcttcgtcggcggnctcgcctgggccaccgacaaccgttccctcgaagccgccttctccaccttcggcgagatcctcgagtccaagatcatcaacgatcgggagacggggaggtcgcgcgggttcgggttcgtgacgttctcgagcgagcaggccatgcgcgacgccatctaggggatgaacggcaaggagctcgacggtcgcaacatcaccgtcaacgaggcccaatcgcgccctttccggaggcggatgcggaagcgg

SEQ ID NO: 397800 - DNA, 473 bp, Oryza sativa nipponbare
ccacgcgtccgactcgatcgatcgatcgatctccataggtgggggaagggaagctttggaaggtggagggacggagggggggatgacgaggcggtgctcgcactgcatccacaacgggcacaactcgcggacgtgccccaaccgcggggtcaagatcttcggggtgcgcctcaccgatggctccatccgcaagagcgccagcatggggaacctctccctcctctcctccgccgccggatccaccagcggcggcgccttccccgccgacggccccgacgccgtccccaccgtcgtcgactgctactcctccgactacttttttcagggctccttctccgtcacccgcgaccgcaagatgggtgttccttggactgaagaagaacaccggaggttcttgcttggattgcaaaagcttgtcaaaagtgattggcgaggaatctctcgtaatttctggtcctaagaacacctactta

SEQ ID NO: 397801 - DNA, 410 bp, Oryza sativa nipponbare
ccacgcgtccgggtgtttccgatggaggcgtgcgacctcatcggcggcgaggcgtgcaacgtgcagatgtacccagaggccaagctctcatcatcggctgctgttgctgtttctcgtgcggcggcggaggaagtcgacagggactacctatcctacgacgagcccaccacggtgttccccgaggaggcgtgcgacgatctgggcggagagttctgcaaggccacctgatcccattcccatccatggagaattggagtcttctatcatccttcctcctctgctccactaccttaattccatgtagctacagatttatatgttaatcatcatgtaatggtacatatctccttgttaataaggcacgctagtctagctcctcaaaatgatttacaataatataatatttacat

SEQ ID NO: 397802 - DNA, 429 bp, Oryza sativa nipponbare
cgtccgcggacgcgtgggctcgagcaaagaaggagagagcttggtgagctgcagagatggccccctccgtgatggcgtcgtcggccaccaccgtctctcccttccaggggctcaagtccaccgccggcatgcccgtcgcccgccgctccggcaactccagcttcggcaacgtcagcaatggcggcaggatcaggtgcatgcaggtgtggccgattgagggcatcaagaagttcgagaccctctcctacctgccaccgttcaccgtggaggacctcctgaagcagatcgagtacctgcttcgttccaagtgggtgccctgcctcgagttcagcaagggcggattcgtctaccgtgagaaccacagatcccccggttactactatgggatggtactggaccatgtggaagctgcccatgttcgggtgcact

SEQ ID NO: 397803 - DNA, 412 bp, Oryza sativa nipponbare
ccgggttcgacccatcgcgtccgcccacgcgtccgcccacgcgtccgcggacgcgtgggcgccgctccagcagctcgagctttggcaacgtcagcaatggcggaaggatcagatgcatgcaggtgtggccgattgagggcattaagaagttcgagactctgtcgtacttgccgccattgacagtggaggaccttttgaagcagatcgagtacctgctccgatctaagtgggtgccttgcttggagttcagcaaggtcggattcgtctaccgtgagaatcacagatcacccggatactatgacggtaggtactggaccatgtggaaactgcccatgtttggatgcaccgatgccacccaagtgctcaaggagctcgaggaggcaaagaaggcataccctgatgccttcgttcg

SEQ ID NO: 397804 - DNA, 384 bp, Oryza sativa nipponbare
ccacgcgtccgggagaggagcagccatggcgtcgtcggtggcagcggcggcgagcacgttcctggggacgaggctggctgtcccggcgccgcatagcggtaggatcgtggcgaggttcggtttcggctgcttgttagatttgcgttgttttttttgttgttttttatttgtttttctttttaatctttattttttattttttattttcttttttttttacttatcttttttttactttgtttttatttttattttttttttatgtatttttgttttttttttatttgttgttttttttttttttaattatgtttttttgttttgttttttttttttttttatttttttctttatttttattgtttttctttttcttttattttt

SEQ ID NO: 397805 - DNA, 271 bp, Oryza sativa nipponbare
aaacaacaaccccaaaacatcatgtaattacccttctgttggaaaactgtaacccccactttgattcaattcacttccacttaaatggggattattacaaaaccttttccaaaatggtcattttttaaagtttaaatattttcaaaagaaccccccaaggtccaatttttgttaacacccattatcttaccgttcgaagcccctaccgtacttcaacttggtagtttccacccccttttcagggtttagcccttggattttaccgcggact

SEQ ID NO: 397806 - DNA, 266 bp, Oryza sativa nipponbare
tgttgcacagtaaaaatggacggatgtactttgacatagcatatgtttgggcattacaagccggtctgcagttcaactacttaaagataagaggcactaatgacaggcatcactcaaaaataaactcaaactagcatttctgtgaaggataataagatgggatgaaaaatgcttccagaacaaccagtcccagtcccagtttttggataagtagcaacatccccttttgatattttaaatcttgttgaacgcaaccggacgcgtgg

SEQ ID NO: 397807 - DNA, 228 bp, Oryza sativa nipponbare
gggaaaaatatatatgggcggagcttccatatatttgattcacatatgccttacccaacaacatatagtcgtagcagataccacttttacattaagtcaaagagagatcaggtgaaacaaaaacaaaagcagagcacggccggtaaaatcaaaagacgatgaacaaactgggaacacacgaaacaaggggggagacattatcgaatcagagatgaacaattaaacaag

SEQ ID NO: 397808 - DNA, 298 bp, Oryza sativa nipponbare
ttacatagtattatacggattataaagaagaaaccaccaccattacactgatacacacaaagctcgatcaagcagcttaattaatttcttccacatgtacgacatgcattctatcctaactccacgatcaatttaagatgattctttacacatccagatccaccactatccattcaaattcaactcattacaccttctgtatctatttcatgacatacatgtttgtctacacgccggcgtaattcaccttggcgaaccgaaccaccaccgggtagcgagtgttgggatccttatcaac

SEQ ID NO: 397809 - DNA, 306 bp, Oryza sativa nipponbare
tttttaaatatatatagccggagcttccatatatttcattcacatgtgcctcacccaacaacatatagtcgtagcagataccactcttacatcaagtcagagagagatcaggtgaaacaaaaacaaaagcagagcacggccggtaaaatcaaaagacgatgaacaaactgggaacacacgaaacaaggtgggagacatcatcgaatcagagatgaacaattaaacaaggctatatatgacgatgacggcttagttgccaccagactcctcgcagcccgggggcttgtaagcgatgaagctgatgag

SEQ ID NO: 397810 - DNA, 301 bp, Oryza sativa nipponbare
gacaagcaattaagcgtagtttatccaccataattaagatcgagagcatgagatagctagaacactgctgctaccatgagatagtttatccccctgtagtactgtacatcagaaattcaccactcaactcaccccctcacccatgcatccagatccatgcatgcaggaaacaattaccacaacacacacagtaagtctgaatctcatcacatccatctctctctctctcctccccccaattcattaacatcttatacatgcatactccacaaaaaaaaaaagaagaaacaagaagagaaca

SEQ ID NO: 397811 - DNA, 241 bp, Oryza sativa nipponbare
gagtatgatagacctttttactaggcaaaccgcgacggatacacgattgattaatttcactgagaatagcacgggtacatcacatcacacaaattcatacgttgatacacgcatagtcgccgaagcgaccagctgcttaattaatcgataacacacgggtttaattcagcaataatcagcacacacacaaaccacactcatatgggtggtttttattgtggactaattaaggtaggtgact

SEQ ID NO: 397812 - DNA, 326 bp, Oryza sativa nipponbare
agaccaagaaattgttgaagttcgattgagtatgatagacctttttactaggcaaaccacacgaatacacgattgattaatttcactgagaatagcacgggtacatcacatcacacaaattcatacgttgatacacgcatagtcgccgaagcgaccagctgcttaattaatcgataacacacgggtttaattcagcaataatcagcacacacacaaaccacactcatatgggtggtttttattgtggactaattaaggtaggtgactcgccggcggcgagtgttcggttgcttcgtgacttcacttgccgcacttgcagtcggtgc

SEQ ID NO: 397813 - DNA, 315 bp, Oryza sativa nipponbare
ttacagcagaaaatgggaaaccactttatagtctacaaatcggggggggaatatctacatgcatcgcatcagatgagatcacatcgagtccaacaagatggcgtatgcaggttgcgcatgcattcatgaaaatcccgataaaaagggcttgattaattattaacatatatatatccatcaatagactttcacattccattgctccgacttcttcaactggttattgtagtcaagccattccatgccgtattttgcagcgaggtccatcatgatgtattccatgcctttctacatgcccttgatgccacacatgta

SEQ ID NO: 397814 - DNA, 355 bp, Oryza sativa nipponbare
gatgtacaagtggatgcattaattcatcatcttgggtggtgttatattacaaatcaccaccatgcaagtcgccattaaccaccaacccagctttcctaatttaagtagtaatcaacaaaaggatgacctctcctctctccataccctcccagctcgctcgtcatcacaaaactaaacagcgcgcgcgaacgcacaccaacgcatcgatcccgtttgaattgcgcgcgaaagagcttaaattaagaggatgaggagaaggtgtcgaaaatggtggtgtggagcgggtcgctgaagtgggtggcccagttgttgaggggccccttgccgggggcggcggcctgcacggcgaaaccca

SEQ ID NO: 397815 - DNA, 370 bp, Oryza sativa nipponbare
cagagcatccaagtttttaaccgaatagaaataaacgaggggtgggcgactaacatagtgcacattgcgagcagatattaacggtccatgcaacgagtgccatggccgtgggcaaaacttaacgaacgctaagatatctcaaatgcagccagcataaccaccacttcaacgatgctcatttcttcttggcggcagccttggtcaccttggcaccggttgggtccttcttctccacgttcttgatgacgccaacagccaccgtttgcctcatgtcacgcacggcaaaacgaccaagaggagggtactcagagaaggtctccacaaccatgggcttggtgggaatcatcttaaccataccagcatcaccggt

SEQ ID NO: 397816 - DNA, 286 bp, Oryza sativa nipponbare
ttgatgaagagaacttcacttctaaaagagtatcaacttgttttttacgtcggttacatcataggacaggtacacaatcaacaaggcatgcagtgctccatccacaattacatcccaatacaccaccaccattcacaggctactccgatcccaaaaaagagaggtaagtcgcgtcgacgaacagtcttttcatcttcctccattggcagccattgctaacactccaacacctgaagaactcctcatttgggggtgaaagcctggaagatggtggcgtggccggggt

SEQ ID NO: 397817 - DNA, 293 bp, Oryza sativa nipponbare
tttgtctccatgtcgaatacccacttcaataactggtggttcagccgtgacgtacactagtgacaacaagctaactgatgcaaattttcagggcattcctcagcttgacttcaccgtctcgatcgcttggattaattcatctagtttggcacctgtgacctccttgacgaccttcccgtccttgagaatcttgaatgttggcacaacctttatgcccagctcctttgcaagagacttgttgtcttgattgcagtcgagtttgaggaacacaacgtcctggtccttctcggaca

SEQ ID NO: 397818 - DNA, 330 bp, Oryza sativa nipponbare
agaaacaatttaatctaacatacgcaaactgatattatcacaaggggagccgatgacaatggaaagagtaatctaggtacaagcggatcattgacggtggagacaagacattggctgcaccacaacacccaccagtggcgccaacaaggagcgctatccgttataggacgagagaaaaagtaaaacatcacgatgtgaagtgaaactgaataattctagtagacgatgatgatgatggataggctccttaggacgcccgccgcccttagcgtcttgctgctcccatcttgtccactggaaggctcactcgtcatcgtcttcatcctcttc

SEQ ID NO: 397819 - DNA, 329 bp, Oryza sativa nipponbare
caccaaatcgacgtaccataccagatcgagtttaactaagaccgggttgatttcgtgtttgatacaaaaattaagatggacggattcacaagagagcaccctctacttaagctttacattacaaggccaaccagcagctgcctgccggccgaccactgcgtgcgcacgcgcgcgcaataatcaaccaatcacacacagtacgcacgcacataaaaaccacccatagccttcacgtacgcccggacgcacgcaccggttcgtgccaagctcaagggtagatggttctcgggatgatgatgtccccgatgttgttgtgccacgggtcccag

SEQ ID NO: 397820 - DNA, 307 bp, Oryza sativa nipponbare
aaatatatatagccggagcttccatatatttcattcacatatggctcacccaacaacatataggcgtagcagataccactcttacatcaagtcagagagagatcaggtgaaacaaaaacaaaagcagagcacggccggtaaaatcaaaagacgatgaacaaactgggaacacacgaaacaaggtgggagacatcatcgaatcagagatgaacaattaaacaaggctatatatgacgatgacggcttagttgccaccagactcctcgcagcccgggggcttgtaggcgatgaagctgatgagctgcac

SEQ ID NO: 397821 - DNA, 304 bp, Oryza sativa nipponbare
acacgattgattaatttcactgagaatagcacgggtacatcagatcacacaaattcatacgttgatacacgcatagtcgccgaagcgaccagctgcttaattaatcgataacacacgggtttaattcagcaataatcagcacacacacaaaccacactcatatgggtggtttttattgtggactaattaaggtaggtgactcgccggcggcgagtgttcggttgcttcgtgacttcacttgccgcacttgcagtccgtgcaagagcagctggtgccgcacttgcagccgccgttctcctcgccg

SEQ ID NO: 397822 - DNA, 316 bp, Oryza sativa nipponbare
acggacgaaacgagcgaacagatgtaacgacattccgaggaagagagcaacatcgagtctacaaatggtacccttcaccttaaggtttaacacaaaacacatagttcattgggcgccaacgatgcgggcgacagaatggtacaccaaaaaccatgcgcagagatcaggtgcttattgtagaatctagagtagccactcaggtaaagacgaaacggctaagagctcgtagagtttcaagcttctggtgctgggaaaaatggaagggagttcacacctccaggtttcaacccttgaagtcccgatgatcccgcaagca

SEQ ID NO: 397823 - DNA, 280 bp, Oryza sativa nipponbare
ttttgttcgatggagtaagtgtattatatgtatgtaaatattatgttattgtaaatcattgggaggagctagactagcgtgccttattaacaaggagatatgtaccattacatgatgattaacatataaatctgtagctacatggaattaaggtagtggagcagaggaggaaggatgatagaagactccaattctccatggatgggaatgggatcaggtggccttgcagaactctccgcccagatcgtcgcacgcctcctcggggaacaccgtggtgggc

SEQ ID NO: 397824 - DNA, 271 bp, Oryza sativa nipponbare
tacataagtgcttactgatacaatatcaacattgatgggacgggggcagttccatatgagacaaacataaaacacaccgaaaccccatatggacattatgccgatcctagcctagcttggcgaggacatcggcaagagcagatttggtcaacctgaataacttatccacctattcggggctattgatctcggctgcatggtcaagcccgtcaatgacagcgaagagcttgcccgagaggcccatgaggcccttattctcaaccttgggctt

SEQ ID NO: 397825 - DNA, 406 bp, Oryza sativa nipponbare
ggtaatgctatcactggaagggatttcatttatttacttgataagtgcaagccatctttgcagtgggatgagaaaagttcagagcattttttcgtctattcagataaaggtttgagacatgctgtattctacccaacgctgatgtccctttctttacgtttggatgaagctcaagattggggaacagggctttcaatttgggaaattgggcaaggtttggactattttttcgatgttctttaggaatatctcacgtgtgttctttttattttgggagcaatgtcagttagaccacaactattgcaaagtattacaaggtcacccgtggacattatttgtttagcatcaaaacttgcacttcataactgattaccatcctttggggaaatgttccaaacaccaaatt

SEQ ID NO: 397826 - DNA, 271 bp, Oryza sativa nipponbare
  unsure (1)..(271): unsure at all n locations
aaccaaactgtaaaataaaaatatatagcatattatatatggatatatcatcaacatagcccaaaacaaagctgcatactattattataggcagcaatccaccagcgcgatgcttgatcttagcttagttgccaccagactcctcgcaacctgngggcttgtaggcgatgaagctaatcaactgcacctgcctgacgttgtcgaagccgatgatacggacaaagggcatcggggtaggccttcttggcctcctcgagctccttgagcacct

SEQ ID NO: 397827 - DNA, 286 bp, Oryza sativa nipponbare
aaaataaaaatatatagcatattatatattgatatatcatcaacatagcgccaaaacaaagctgcatactattattataggcagcaatccaccagcgcgatgcttgatcttagcttagttgccaccagactcctcgcaacctgggggcttgtaggcgatgaagctaatcaactgcacctgcctgacgttgtcgaagccgatgatacggacaaaggcatcggggtaggccttcttggcctcctcgagctccttgagcacctgggtggcatcggtgcagccgaacatg

SEQ ID NO: 397828 - DNA, 377 bp, Oryza sativa nipponbare
tgaaaaaaatcctgaagtctgtaccaaagttcagtattacacgcggacagaaaatggcccgtgtctgcagctgtgtttcttcttcgacagtcatgcgttcctctgtcgaaggggaacaacgtacgggcagccaatccgagcacagtatatatagtatagcagttctgcccggggacagtcaatgtgtgtgcttcgttacattataggagtatatatttctgcacctacgcgagcccgtacttggacagtggtcttagttttcgtacactttgcactcgtcggtctccgggttgtccttgcagaagtcctccagtgggtcgccgctgccctgcaccgccgcgccgggccacttgctcgccaccagatgcgccagatcg

SEQ ID NO: 397829 - DNA, 386 bp, Oryza sativa nipponbare
cacagacacgaataacattctcggttattacatacaaaagggagggcttttccaagtatgagcgtttatttctacacatttgggctctctcgacaatcaactgatgataaccaatcttaccaccgcaatatgctgttcaacaccagactaggaacaatttgaccaaataaccccaaaagcaaaaacaagatacgcaagaagaagacgccatgatcctcgcccatgttgtccctgaggcgagtaaaactaacgcacgcaccgcagccaccttgccatattcacagaaaccacctcatcatgcactcttcgcccttttctcctcttcgatcttagccttgatgtacgagtagatggcaacaccagctatggcaatgcaagtaccaatt

SEQ ID NO: 397830 - DNA, 248 bp, Oryza sativa nipponbare
aacgagggaaaccaaacaaatacacgattgattaatttcactgaaaatagcacgggtccatcaaattacacaaattcattccttgatacacccatagtccccaaaacgaccaattttttaattaatcgataacacacgggtttaattcagcaataatcagcccacacacaaaccacactcatttgggtggtttttattggggactaattaaggtaggtgactccccggcggcaaatgttcggttgctt

SEQ ID NO: 397831 - DNA, 273 bp, Oryza sativa nipponbare
ttaaaaccaaccccaagaaggatcgcagatccaacttcaccgaatgggtgcaagaacttcgcctaatgcaaccaaaccatgggcgatctcattttaccaacacgacacgaactctttaaaagacttacaccaccaccaccttcttcttatttaggggctctacgactcaaaacgactgatacttgcgaaaggcgaagggggaccacacaaatctaggagaggttgccccaatctgcgattaccacccgctttgcggtgcttccgccccgggat

SEQ ID NO: 397832 - DNA, 395 bp, Oryza sativa nipponbare
cctatcagacgatcagattgaccaggttttcaaattcatcgcccaactcgacgatagtgtacacgtccatttaacacattcttccacccttctaaaactcctccctttttcttcccgggtaagataaaaattaacttgaggcctgccagcgttcgccggcggcgagatgtttacaggctgggcgtcctctcggcggcgccggagatgccggtgagcaggttgttgccgaaggggtcgctgaggtgcttggagaggttctcgacggggccctcgccggtgacgtacgcctggatgaagaaccccagcatggagaacatggccagccgcccgttcttgatctccttcaccttcagcagcgccgcctggtccgggtcgctcgccagccccaacgggtc

SEQ ID NO: 397833 - DNA, 271 bp, Oryza sativa nipponbare
gcacactaagattcattcattcatttcatttgatcaaagcaaacacgagacgagctttcttcttgcgatcaaaaacacagatgggcaaccacacagtaacacaaactagatagtagttccacacaaaactaacgatgataacgatcggatgatgatgatggtagctcgattagatagatagataacttggccatgagggccccaccgctcagttcctccagttcccgtcggagttgccgccgccgcggctgccgtagccaccgccgtagcc

SEQ ID NO: 397834 - DNA, 343 bp, Oryza sativa nipponbare
atgtaaatattatattattgtaaatcattttgaggagctagactagcgtgccttattaacaaggagatatgtaccattacatgatgattaacatataaatctgtagctacatggaattaaggtagtggagcagaggaggaaggatgatagaagactccaattctccatggatgggaatgggatcaggtggccttgcagaactctccgcccagatcgtcgcacgcctcctcggggaacaccgtggtgggctcgtcgtaggataggtagtccctgtcgacttcctccgccgccgcacgagaaacagcaacagcagccgatgatgagagcttggcctctgggtaca

SEQ ID NO: 397835 - DNA, 365 bp, Oryza sativa nipponbare
ttaaatatatatagccggagcttccatatatttcattcacatatgcctcacccaacaacatatagtcgtagcagataccactcttacatcaagtcagagagagatcaggtgaaacaaaaacaaaagcagagcacggccggtaaaatcaaaagacgatgaacaaactgggaacacacgaaacaaggtgggagacatcatcgaatcagagatgaacaattaaacaaggctatatatgacgatgacggcttagttgccaccagactcctcgcagcccgggggcttgtaggcgatgaagctgatgagctgcacctgcctgacgttgtcgaagccgatgatacggacgaatgcatcagggtacgccttct

SEQ ID NO: 397836 - DNA, 405 bp, Oryza sativa nipponbare
  unsure (1)..(405): unsure at all n locations
ctatcactatagcaagagctatgactgcacacgcacgcgagcgtaggatcctatagagcgagacgcccttttttttttttttttttagtaaacgaatattaatagtcttcaacactgttttgcttaaccgcaaaatccaaagaacggcaataacatttgattttgagtctttaaccgaaccctgtttttacactaattaaccgaccaaaccctattacaaagctgctaatgaaaacgagatctaaaacgcggaagcgagaggggaatcaacaagttgaccacgtcacgtcgtcgtcgttgatccccccagatcgcttcggcgctacgcaacgcaaccgcgtcgaaggcggcggcttacgcgcgctcgccgcggatgcggcgggcgagctggatgtncttgggcat

SEQ ID NO: 397837 - DNA, 316 bp, Oryza sativa nipponbare
tttagtaaacgaatattaatagtcttcaacactgttttgggtaggcgcaaaatccaaagagcggcgataacatttgattttgagtctttaaccgaaccctgtttttacactaattaaccgaccaaaccctattacaaagctgctaatgaaaacgagatctaaaacgcggaatccagaggggaatcaacaagttgaccacatcacgtcgtcgtcgttgatccccccagatcgcttcggcgctactcaacgcaaccgcttttaatgcggcggcttacgcgcgctcgccgctgatgctgcggacgagcttgatgtcctt

SEQ ID NO: 397838 - DNA, 242 bp, Oryza sativa nipponbare
ccacgcgtccgccagatcttctccgacggcggcctcgactacctcggcaaccccaacctggtgcacgcccagagcatcctcgccgtgctgggattccaggtcgtcctcatgggcctcgtcgagggctaccgcatcaacggcctccccggcgtcggcgacggcaacgacctctaccccggcggccagtacttcgacccgctcggcctcgccgactacctcgtcaccttcgccgtgcttaaggt

SEQ ID NO: 397839 - DNA, 329 bp, Oryza sativa nipponbare
ccacgcgtccgcaaaagcacacccaagagagagtagtggtagttccagagcggtctgcttgcgaagttgcgatgcctgccatggccaagcccgcctcccgcgctgccaagcccgcgtcggcgccgaagaagcagaaggcaaagccctccgccgccgccggtggctcctcccacccgccttatttcgagatgatcaaggaggcgatcacggtgcttaaggagaggaccggctcgagcgcgcacgccatcgccaagtacatggaggagaagcacggggcgtcgctgccggccaactacaagaagatgctctccatccagctgcgcgggttc

SEQ ID NO: 397840 - DNA, 490 bp, Oryza sativa nipponbare
  unsure (1)..(490): unsure at all n locations
acccacgcgtccggtcaccgaggcgccacccgccgctgccgctgccgcggagacggagccggctgccaaggacgtcgccgaggagaaggccgtcatccccgcccccgcgccgccggccgaggaggagaagcctcccgtcgacgactccaaggcgctggccatcgtcgagaaggttgcagatgaacctcctgccgagaaacctgctcaagggggctctaatgacagagatgttgctcttgcaagggtggaaactgagaagaggaactcattgatcaaagcatgggaggaaaatgagaagacaaaagctgagaacaaggcttcgaagaagctatctgctattctttcctgggagaacacaaagaaagcaaacatagaagctcaactgaagaagaatgaggagcaactggaaaagagaaggctgaatatgcanagaagatgaagaacaaaggtcgcatcgtccacaaaggagctgaggagaagagagcaatgt

SEQ ID NO: 397841 - DNA, 438 bp, Oryza sativa nipponbare
ccacgcgtccgcccacgcgtccgactcgctccgccatggctggagaagctgatggaaaagccccactgggatcaagatacccccctgctgctctcaacgagcgcatcctttcttccatgtctcaaaaacatgttgctgctcatccatggcacgatctggagataggtccaggagctccagcagttttcaactgtgtggttgaaattcctagaggcagcaaggttaagtatgagttggataaggcaactggtctaattaaggttgatcgtgttctttactcatctgttgtttacccacacaactatggtttcattccacgcacactttgtgaggacggtgaccccattgacgtcctcgtcctggagcaagaacaagttgtccctgaatgtttcctgcgaggctcgtgcttttgtgccaatcccattatttgatcagggt

SEQ ID NO: 397842 - DNA, 475 bp, Oryza sativa nipponbare
ccacgcgtccgcgtgttcactcctcagccagtcaaggccctgcaggggataaagatcaagcagatagcttgcggcgatagccattgtcttgccgtcactatggcaggtgaagtgcaaagttgggggcgcaaccaaaacggacagcttggtcttggaaccactgaagactcattgctcccacaaaagattcaatcttttgagggagtttgtgtgaaaatgattgctgctggtgctgaacataccgctgcagtaactgaagatggtgacctctatggatggggctggggtcgatatggaaacttggggcttggtgatcgcaatgatcggttggtacctgagaaagtatcttctgtggagggaagagaagatggtgcttattgcatgtggatggcgccatacaattactggttcttcctctggtaggtggatacttatggttggagcaaatatggtcaactagggcatggggattttg

SEQ ID NO: 397843 - DNA, 297 bp, Oryza sativa nipponbare
ccacgcgtccgccacgcgtccgccggaggccttcgcggagctcaaggtgaaggagatcaagaacggccgcctcgccatgttctccatgttcggcttcttcgtccaggccatcgtcaccggcaagggccccctcgagaacctcgccgaccacctcgccgaccccgtcaacaacaacgcctgggcctacgccaccaacttcgtccccggcaagtgagcgccgccgccgccgtgctgccatggcgacgcatcgccttcagctaagctagctaggttgacgactattcgcgtctctgcagg

SEQ ID NO: 397844 - DNA, 244 bp, Oryza sativa nipponbare
ccacgcgtccggtactcgagcaaagaaggagagagcttggtgagctgcatagatggccccctccgtgatggcgtcgtgggccaccaccgtcgctcccttccaggggctcaagtccaccgccgtcatgcccgtcgcccgccgctccggcaacttcagcttcggcaacgtcagcaatggcggcaggatcatgtgcatgcatgtgtggccgattgagggctttaagaagttcgagacctttttctac

SEQ ID NO: 397845 - DNA, 440 bp, Oryza sativa nipponbare
ccacgcgtccggctcggcgcgctgggctgcataacgccggaggtgctcgagaagtgggtgcgcgtcgacttcaaggagcccgtgtggttcaaggccggcgcccatatcttctccgacggcggcctggactacctcggcaaccccaacctggtgcacgcccagagcatactctgcgtgctgggattccaggtcgtactcatgggcctggttgagggctaccgtatcaacggcctccccggcgtcggggacggcaacgacctctaccccggcggccagtacttcgacccgctcggcctggacgacgaccccgtcaccttcgccgagcttaaggtcatggtgatcaagaatggccgacttgccatgatctgcatggtcggcttctgtgttcaggccatctttaccgacaagggccccttggagaacctgcttgaccaccttgc

SEQ ID NO: 397846 - DNA, 487 bp, Oryza sativa nipponbare
ccacgcgtccgggaggtgaaggagcgcactgcgaagcgaacccttctccgccgcctccgctcttcgctgcacggtgctagctcgccgccgtccgtctcgcgcgcctcaagggttatcacaagatgtatacagcaaggaggaagatccagaaggacaagggtctggagccaactgagtttgaggacactgttgctcaggcattttttgaccttgagaatgggaatcaggagctgaagagtgacttgaaggacctttacatcaatggagcagtgctgcggaaggcatataagaagatccatgtgaggcttgttagggaacttgagaagaaattcagtgggaaggatgtggttctggttgcaactagaagaatagtgaggcccccaaagaaaggctcagctgttgttcggccttgtacccgcacacttactgctgttcatgatggcatcttggaggatgttgtgtattcagcagagattgttgggaagcg

SEQ ID NO: 397847 - DNA, 230 bp, Oryza sativa nipponbare
ccacgcgtccgcccacgcgtccgcccacgcgtccgcccacgcgtccgatactctactactactagccagtaagctagctaactaactacgtggctatggcccccaccgtgatggcctcctcggccacctccgtggctccattccaagggctcaagtccaccgccgggctccccgtcagccgtcgttccaccaactcggtcttcggcaacgtcagctatggcggaaggatc

SEQ ID NO: 397848 - DNA, 477 bp, Oryza sativa nipponbare
ccacgcgtccgcttaattatctcattcttgaatcaaataaattcacaggcacagttgaacttagctctgtctggaagcagaagaatctatttatcctaagcctgtcaaacaatttgatatcactcatagatgatgaaggttaaacagtgcctccttatcttcctaacatcaagtacttatacctgtcatcttgcaaccttacaaaaattccaggcacattaaaatatcttgatgcggtttcccttcttgacctttcgagtaatcaaataacgggggctataccaaattggatatgggagaattggaagggccaccttaatattttgaacctctcgtgcaacatgttaactactttggaacaatctccttctcttgttaatatgtccaatttagcttatcttgatctcagtttcaatagacttcaaggaagcataccaataccagtaaccacatccagtgagatcgcattggactact

SEQ ID NO: 397849 - DNA, 294 bp, Oryza sativa nipponbare
ccacgcgtccgcaagaagtactcgagcaaagaaggagagagcttggtgagctgcagagatggccccctccgtgatggcgtcgtcggccaccaccgtcgctcccttccaggggctcaagtccaccgccggcatgcccgtcgcccgccgctccggcaactccagcttcggcaacgtcagcaatggcggcaggatcaggtgcatgcaggtgtggccgattgagggcatcaagaagttcgagaccctctcctacctgccaccgctcaccgtggagggacctcctgagcagatcgagta

SEQ ID NO: 397850 - DNA, 356 bp, Oryza sativa nipponbare
ccacgcgtccgcccacgcgtccgcccacgcgtccggcgcctcgctgggcaagcccgtcaagggcctgggcttcggccgggagcgcgtgccgaggacggcgacgaccatcacatgccaggccgcgagcagcatcccggccgaccgcgtcccggacatgggcaagcgccagctgatgaacctcctcctgctcggcgccatctcgctccccaccgtcggcatgctcgtcccctacggcgccttcttcatccccgccgggtccgggaacgccggcggcgggcaggtcgccaaggacaagctcggcaacgacgtgctcgccgaggagtggctcaagacacacggtcctaacgtccggaccc

SEQ ID NO: 397851 - DNA, 470 bp, Oryza sativa nipponbare
ccacgcgtccggaggagcttgagcttggagagagacaacaatggcggctcaggctcttctctctgggaggcagctgctggggaggccattgcaatcttcagtctccaggtcttcttcctccaggaaggcacccttcatggtcagggcagaggccactccccctgccaagcaaggtgctgacaggcagctgtggttcgcatccaagcagtccctgagctacctggatggcacgcttccgggagacttcgggttcgacccgctggggctatcggacccggaggggaccggtgggttcatcgagccacggtggctggcctacggcgaggtgttcaacggccggacggcgatgatgggcgtcgtcggcatggtcgccccggagctcctcggcaagctgggcctcgtccccgccgagacggcgatcccctggttccagaccggcgtgatcccccccgcgggcacctacacctact

SEQ ID NO: 397852 - DNA, 445 bp, Oryza sativa nipponbare
ccacgcgtccgcggacgcgtgggttcgaagtcccaaacgtgtacagatcaaatttgatgaaggcattatcggcactccacaattgactgattctattgtactacctgagaagtttgagttatttgggcagaatattgacctgaccccattgaagggcatattttcatcaattgaaaatgcagcatcctcagttgctagaaccatctctggtcaacctccactaaagataccaattaggactgacaatgctgagtcttggttgctcacaacctaccttgatgatgagcttagaatctccagaggtgatggcagcagcatctttgtactgtttaaggaaggaagcaccctcctatattaagcttggcatgcctaatctagggtagaacttgatgctgaagctcttccaagcagtacttgtggctaaattatttttcatatataagtt

SEQ ID NO: 397853 - DNA, 454 bp, Oryza sativa nipponbare
ccacgcgtccggcacaagaaagcataagcaacacaagggattaactcatcactcacttagctaattaaatcttcgaccatgtcggacaagtgcggcaactgcgactgtgctgacaagagccagtgcgtgaagaaaggtaccagctatggcgtcgtcatagttgaagccgagaagagccacttcgaggaggtcgccgccggcgaggagaacggcggctgcaagtgcggcaccagctgctcctgcaccgactgcaagtgcggcaagtgaagtcacgaagcaaccgaacactcgccgtcggcgagtcacctaccttaattaggccacaataaaaaccacccatatgagtgtgggttgtccgtgctcctctcatttggaattaatacaccttgttgtttatcattactatatttttaatttgtcgtttgtttcccttttatttatttgtatctatctt

SEQ ID NO: 397854 - DNA, 195 bp, Oryza sativa nipponbare
ccacgcgtccgcggacgcgtgggcggacgcgtgggaaaaaaaaaaaaaaaaaaaaaaaaaaaaaataaaaaaaaaaaaaaaaatagaaaaataaaaaaaaaaaaaaaagataaacaataatacaaaatataaaataaaaataataatatatatatgtaatagggggttttttttttaggggttctatattttacg

SEQ ID NO: 397855 - DNA, 477 bp, Oryza sativa nipponbare
ccacgcgtccgggcaacgtcagcaatggcggcaggatcaggtgcatgcaggtgtggccgattgagggcatcaagaagttcgagaccctctcctacctgccaccgctcaccgtggaggacctcctgaagcagatcgagtacctgctccgttccaagtgggtgccctgcctcgagttcagcaaggtcggattcgtctaccgtgagaaccacagatcccccggatactacgatggcaggtactggaccatgtggaagctgcccatgttcgggtgcactgacgccacccaggtgctcaaggagctcgaggaggccaagaaggcgtaccctgatgcattcgtccgtatcatcggcttcgacaacgtcaggcaggtgcagctcatcagcttcatcgcctacaagcccccgggctgcgaggagtctggtggcaactaagccgtcatcgtcatatatagccttgtttaattggtcatctttgatt

SEQ ID NO: 397856 - DNA, 194 bp, Oryza sativa nipponbare
ccacgcgtccggtgtgtaacaacaatcccaccatctacatcaccgagaacggcactgacgaggcgaataacagcacgatccccatatccgaggcgctcaaggacgagacgcggatcggcttccactacaagcacctccagttcgtgcacaaggccatccaggagggtgtgaaggtgaagggttactttacatgg

SEQ ID NO: 397857 - DNA, 454 bp, Oryza sativa nipponbare
ccacgcgtccgtgaaaatcttttgatgacaaaagaacagctttttgatatgacatgcatgacattaggtggccgagctgcagaggaggttttgattggaaggatctccactggtgctcagaatgacctggagaaagttaccaaaatgacctatgcgcaggttgctgtatacggtttcagcgaaaaggttgggcttctgtcctttcctcagagggacgatggctttgaaatgaccaaaccttacagcaaccaaacagcatccatcatcgacgatgaggtgagggaatgggttggcaaggcgtacaaaaaaacagtggaactgataactgagcacaaggagcaagtcgccaaaatcgctgaaatgctgcttgagaaaggggtcctccaccaggaacgattggttagggtattaggagaacggcctttcaaggcatccgagccaactaactacgacc

SEQ ID NO: 397858 - DNA, 268 bp, Oryza sativa nipponbare
ccacgcgtccgcccacacgtacggtgagaagcaacatgattggagagattgcgaatagatcaacattcctattagctgtcaaagcgcatgtggagacacaaggagactttgccgagtctgtagcaaatgaggtccgagcagcaagtttcgtaaatatcgactatgttgatgcatttgttaattggcttgatgaggtactatactacttggtcgatgtgcggcccattctttagcactttaattgaccagatagccttactgatgcact

SEQ ID NO: 397859 - DNA, 433 bp, Oryza sativa nipponbare
ccacgcgtccgctcgaaatcaaaagcacacccaagagagagtagtggtagttccagagcggtctgcttgcgaagttgcgatgcctgccatggccaagcccgcctcccgcgctgccaagcccgcgtcggcgccgaagaagcagaaggcaaagccctccgccgccgccggtggctcctcccacccgccttatttcgagatgatcaaggaggcgatcacggtgcttaaggagaggaccggctcgagcgcgcacgccatcgccaagtacatggaggagaagcacggggcgtcgctgccggccaactacaagaagatgctctccatccagctgcgcgggttcgcttccaagggcaagctcgtcaaggttaaagcctcctacaagctcttcgacgccgtcaaggactcgcccaaggccaagcctgccgtccccggcccc

SEQ ID NO: 397860 - DNA, 174 bp, Oryza sativa nipponbare
ccacgcgtccgcattcatcgaaaattatagagacaggaaaagaaaaatgaatttctatcaaatcaactgcaagatgttctccatcttgcaaattcctactttgttagaagtatattacttttattacctatatctatattatattttaaatttagtcttttttgtatatatatt

SEQ ID NO: 397861 - DNA, 361 bp, Oryza sativa nipponbare
ccacgcgtccgatcggcatgaggatccagtgcgacgcgtgcgaggccgcggcggccacggtggtgtgctgcgcggacgaggcggttctgttgcgcgctgtgtcttcatattctttttttatttttttatgtttagcactttctcttttttttttttattgttagttttttttatgtgttattaggtttattttttttgttttctttttttatttgttttatttatatatattttgtttttcatttttaagtttactcttttttttttttttttttttgtttttttttttatttttattcttgtttttttttgttttttttagttttttttttattttttctctttttttttttttttattt

SEQ ID NO: 397862 - DNA, 134 bp, Oryza sativa nipponbare
  unsure (1)..(134): unsure at all n locations
cccacgcgtccgcaaaagaagatgaagaagaaagaagaagaagaagatgcagaccgctgctagcagtgtcgttggattgtcggccgtgttgcccgctgctgagaaggggcacancctgcatattcaggctcctc

SEQ ID NO: 397863 - DNA, 303 bp, Oryza sativa nipponbare
atctgacgcgcgccatccacatgcttggccaccttgcctacaccaggggagaggcggcgctggcaaggctgaaggcgtacgagggcgtgccgccgccgtacgacaggaccaagcgcatggtcatccccgacgcgctcaaggttctgaggctgcagcctgggcacaagtactgccttctcggccagctctccaaggaggttggctggaactactatggcactaaacatgcttaaaacatacagcggatctggatattaggagtatctgttggaatttggaagtctacacactatgccggttcat

SEQ ID NO: 397864 - DNA, 424 bp, Oryza sativa nipponbare
ctggcgcagctgaacctggagacggggatcccgatctacgaggcggagcccctcctcctcttcttcatcctcttcaccctcctcggcatgcccgtcgcccgccgctccggcaactccagcttcggcaacgtcagcaatggcggcaggatcaggtgcatgcaggtgtggccgattgagggcatcaagaagttcgagaccctcttctacctgccaccgctcaccgtggaggacctcctgaagcagatcgagtacctgctccgttccaagtgggtgccctgcctcgagttcagcaaggtcggattcgtctaccgtgagaaccacagatcccccggatactacgatggctggtactggaccatgtggaagctgcccatgttcgggtgctactgacgccacccatgtgctcaaggtgtctgaggtggcc

SEQ ID NO: 397865 - DNA, 241 bp, Oryza sativa nipponbare
ccacgcgtccgatccaaacaacgctagagggatagcaaaatttaatgttcctttatcgcatatgatgtttgctggggctgagggtataattgttcctagtaggtttgagccatgtggtctcatccaattgcaagggatgagatatggagtggttcccatactctcatctactggatgacttgtctacacgtctaaggagggcgttaccggattccacatggtgttggttcaatgtcgagtg

SEQ ID NO: 397866 - DNA, 148 bp, Oryza sativa nipponbare
ccacgcgtccgctccaaccgccgccgcatcgccctcgttagaacgatggccgcgtcggcgctgcaccagaccaccaggttcctcggcaccgcccctcgccgggatgagctcgttcgccgtgtcagctattactttataatatttaata

SEQ ID NO: 397867 - DNA, 250 bp, Oryza sativa nipponbare
ccacgcgtccgccctcctcccccctcgccgtcgccgccgccgccgccgccgacgccgccgcgaccacctctcgcaaggggattttgtaggggtttctgatccgaggagcgggcgatgtcggactccgaggagcaccacttcgagtcgaaggccgactccggctccttcaagacctacccgcagcaggctgggaccatccgcaaaaatggctacatagtcatcaagaaccgcccctgcaaggttgttgagg

SEQ ID NO: 397868 - DNA, 468 bp, Oryza sativa nipponbare
ccacgcgtccgggacatactctactactactagccagtaagctagctaactaactacgtggctatggcccccaccgtgatggcctcctcggccacctccgtggctccattccaagggctcaagtccaccgccgggctccccgtcagccgccgctccaccaactcgggcttcggcaacgtcagcaatggcggaaggatcaagtgcatgcaggtgtggccaattgagggcatcaagaagttcgagaccctatcgtacctgccaccactcaccgtggaggatcttttgaagcagatcgagtacctgcttcgatccaagtgggtgccttgcctcgagttcagcaaggttggattcgtctaccgtgagaaccacaggtctcccgggtactacgatggcaggtattggaccatgtggaagctgcccatgttcggctgcaccgatgccacccaggtgctcaaggaggctgaggag

SEQ ID NO: 397869 - DNA, 418 bp, Oryza sativa nipponbare
ccacgcgtccgcccacgcgtccgcccacgcgtccgcccacgcgtccggggaaattacaattgcatccatacattgaaagatcacactgccgaggttgaagctgttacagtccatgcgactcagaagtactttgtgactgcttccaaggataatacttggtgcttctacgatattccatcaggatcttgcctcacacaggttggcgagtcttcaggacaagagggatatacatctgcatctttccacccagatggtcttatcctggggacagggaccactgaagctgttgtcaaaatttgggatgtgaagacgcagtcaaatgttgcattagttgtggtgctttttggtcttattttctgttttttttttttttggttattgtttccttattttctatttctttttttctttttatttt

SEQ ID NO: 397870 - DNA, 436 bp, Oryza sativa nipponbare
ccacgcgtccgcccacgcgtccgatcgagtacctgcttcgatccaagtgggtgccttgcctcgagttcagcaaggttggattcgtctaccgtgagaaccacaggtctcccgggtactacgatggcaggtattggaccatgtggaagctgcccatgttcggctgcaccgatgccacccaggtgctcaaggagctcgaggaggccaagaaggcctaccccgatgcctttgtccgtatcatcggcttcgacaacgtcaggcaggtgcagttgattagcttcatcgcctacaagcccccaggttgcgaggagtctggtggcaactaagctaagatcaagcatcgcgctggtggattgctgcctataataataatatgcagctttgttttgggctatgttgatgatatatcaatatataatatgctatatatttttatttt

SEQ ID NO: 397871 - DNA, 124 bp, Oryza sativa nipponbare
ccacgcgtccgcccacgcgtccgcccacgcgtccgaacttaccaaggccagacatagcacggattgacagagggggagctttctcttgccgctaggagctacaagtacttctagttactactat

SEQ ID NO: 397872 - DNA, 336 bp, Oryza sativa nipponbare
ccacgcgtccggattgcttcaagtctatccagggagagttgtgaagcactacaccaaagcatccaacaggttgcgaaatatgctgttgaagccgacgctgattgatactgcccttctgcggaatggccaactcatccccgttgggtcatgaagccccgtgacgtcaatggacagaaaattgagttcataacagctggtggcagggtaagctcttatctgcttcagtactactacactttctagtgcttcgaacatttatgcatctaccctttgatttgaactctcactatttagactacagcatacgtgccacatctgtagaagctgactggaatg

SEQ ID NO: 397873 - DNA, 354 bp, Oryza sativa nipponbare
accgtccggattcccggtcgacccacgcgtccgtccacgcgttcttaccccaccagcagcatctgcagtagctgagcttgaagcagcagagcgtggtagacatgggcgtcttcaccatggccgtatcgtccccggctctggcctgcaaggccgccgcgaaggtgtactgcgtggggcgcatcaccatgcgcaagtaggtggtaaatcccaagcccgccgagtatgtgagcccgcgtgacggtgcctaccgcgtgctctacctgatgcccgtttcttgtgagcctgggtactacctgacgcggtgagttatcctggaataatgtgagggacacctggggactcttcgcaaacttg

SEQ ID NO: 397874 - DNA, 176 bp, Oryza sativa nipponbare
ccacgcttccgtcaccaaggtacactctactagcataagccgatcgaccgtcttctcgatccatatcttccggtggagttcttggtctatcttcttactattccaccttattctcacaggtttttggagtattttgacactttcaccataaatgatttatgtctgaactcgtcatt

SEQ ID NO: 397875 - DNA, 375 bp, Oryza sativa nipponbare
ccacgcgtccgcggacgcgtgggcggacgcgtgggcaaggaagaagatggcggcggcggcggccatggcgatgaaagatccgagcctgtggcacaaggtggccgccatatccggggttgctgcccttggacttggcacctatggcgcgcacatgttccgccccaagaaccccgcgtacaaggaggtttggcacactgcgtccctctaccatctcgtccacaccgcggcgttgctcggggctcccatcaccaagcgccccgatgtttttggagggcttcttactgctgggattgttctcttctttggaacgtgctacacttgggcttatcttgaaaacaggaagtatatctctcacggcaccgtttgggtggcttt

SEQ ID NO: 397876 - DNA, 448 bp, Oryza sativa nipponbare
ccacgcgtccgcggacgcgtgggcgcgaattcaccgcagcaatggcgtccctcgtcgccgtccagcctgtcgccgtgaagggcctcgccggcagctccatctccggcaggaagctcgccgtcaggccgtcgccccgggcgctctgccgcaccacccgcaggccgcgcgccgccgtggtggccaagtacggcgagaagagcgtctacttcgacctcgaggacatcggcaacaccaccgggcagtgggacctgtacggctccgacgcgccgtcgccgtacaaccctctccagagcaagttcttcgagacgttcgcggggcccttcaccaagagggggctcctgctcaagttcctgctgctcggcggcggatcgctggtggcctacgtcagcgcgtcggcgtttccagaactgctttcgatcaaaagggcccgcagctgccgtcgacgccc

SEQ ID NO: 397877 - DNA, 453 bp, Oryza sativa nipponbare
cccacgcgtccgcccacgcgtccgcccacgcgtccgtgctccttcctcccagtgtctctcaagagcggtgcagggttcacaaggcaggagaaaatgggggagatcaccaatgtcatggagtaccaggccatcgcgaagcagaagcttccgaagatgatctacgactactacgcctctggagctgaggatgagtggactctcaaggagaacagggaggcattctccaggatcttgtttcgtccccgcatcctgatcgatgtctcaaagatcgacatgtccgcaactgttcttgggttcaagatatcaatgcccataatgattgctcccagtgccatgcagaagatggctcaccctgacggagagtatgcaacagccagggcagcttcagcagcaggaactataatgacactggcatcttgggctacttcaagtgttgaggaggtcgcctcaact

SEQ ID NO: 397878 - DNA, 372 bp, Oryza sativa nipponbare
ccacgcgtccgcccacgcgtccgcccacgcgtccgtaccgtgcacggccaatggaagcacagcgacatcaagatcaaggactccaagactctgctcttgggcgagaagccggtcaccgttttcggcatcaggaaccctgacgagattccgtgggctgaggctggtgctgagtatgtcgtggagtccaccggtgtcttcactgacaaggagaaggctgctgctcacttgaagggtggtgccaagaaggttgtcatctttgccccgagcaaagatgctccgatgtttgtctgcggtgtaaacgaggacaagtacactttagttatttgtattgtcttaaaagctagtttgaccacaatctgtcttgcttctctt

SEQ ID NO: 397879 - DNA, 311 bp, Oryza sativa nipponbare
ccacgcgtccggatctctatgagagttactacaactctaacaagtcaaaccttaagttgtatgttagaagggttttcatctgtgatgaatttgatgagcttcgttccgaagtatctcagcttttagaagggtctcgtctacttggacacattgcctgtcaatgtatcacaagaaatgctccaacatcatagcgagcctgtagaccatcatgaagaatctaatcctgcaaagcttcttgacatgattagatatcttgctgtggtagatcctgatgagtacagccacatagattagactgtttatgtaaaaag

SEQ ID NO: 397880 - DNA, 184 bp, Oryza sativa nipponbare
ccacgcgtccgcgctggctcagctcagttcacctccatcgcagcttcctcttcatttgctaggaacattgagccgctgagagcgatagctactcaggcaccccctgccgtcccacaatattcgagtggcgagaagacaaaggttggcatcaatgggtttgggcgaattgggaggttggtcctgc

SEQ ID NO: 397881 - DNA, 482 bp, Oryza sativa nipponbare
ccacgcgtccgcccacgcgtccggtcgtgtccgccttcaacggctgcatggccctgtccatggccgagatctgctccgcctacccgacctccggtggcctctactactggagtgccaagctcgccggcaacgactgggctccctttgcttcttggatcactggctggtttaacatcacgggacagtgggccgctaccacgagcgtggacttcgcgttggcgcagttggtccaggtgatcgtcttgctcagcaccggtggagccaacggcggtggctacatggcctccaactacgtcgtgctcgccatctacggcgccatgctcgtcatccacggcgctatcaacagcctcccgatccagtgcctctcttggttcggccagcttggagctttttggaatgcggcaggtgtctttgtgctggtggccttgatccccgctgtcgccacggaaagggcgagcgttgagttcattttcactcacttc

SEQ ID NO: 397882 - DNA, 438 bp, Oryza sativa nipponbare
ccacgcgtccggcaactgcgactgtgctgacaagagccagtgcgtgaagaaaggtaccagctatggcgtcgtcatagttgaagccgagaagagccacttcgaggaggtcgccgccggcgaggagaacggcggctgcaagtgcggcaccagctgctcctgcaccgactgcaagtgcggcaagtgaagtcacgaagcaaccgaacactcgccgccggcgagtcacctaccttaattagtccacaataaaaaccacccatatgagtgtggtttgtgtgtgtgctgattattgctgaattaaacccgtgtgttatcgattaattaagcagctggtcgcttcggcgactatgcgtgtatcaacgtatgaatttgtgtgatgtgatgtacccgtgctattctcagtgaaattaatcaatcgtgtattcgtgtggtttgcctagt

SEQ ID NO: 397883 - DNA, 296 bp, Oryza sativa nipponbare
ccacgcgtccgacacaaccctaccagcgagaggagcatgtagctgagcttgaagcagcagagcgaggtagacatggccgccgccaccatggccctctcgtccccggcgctggccggcaaggccgccgcgaaggtgttcggcgaggggcgcatcaccatgcgcaagtcggcggcgaagcccaagcccgccgcgtctgggagcccgtggtacggcgccgaccgcgtgctctacctcggcccgctctccggcgagccgccgagctacctgaccggcgagttccccggcgactacttgtg

SEQ ID NO: 397884 - DNA, 472 bp, Oryza sativa nipponbare
ccaacgcgtccgcccacgtcgtctcgcttcccattccaattggtcgtctacgtcctcttccgtcttccttcctcgcacagggtgccgtgcttggcgtcgggcggtccattctcacactatgcgcgcgcctcgccgttctgcagtgcgcttttcccgtcattgcatcgatgtgtgtgagtattttttatatattgatatatattctggtatatgtttctatctatgaactctggtgattttgaaagttcaaaaccgaacaagctaccggactggcttcaggaggctgtgcgtgcaccttcatccaagccacctgaatgtgagctaccagcaactgtttcagctattgctcagtctgtgtgcctactacttggagagcaaaaaccatctattcctccatttctgattccaggaacttggttttttctccccaaggacccaaggagtgcttcaaagaagaggagaattcacaaag

SEQ ID NO: 397885 - DNA, 57 bp, Oryza sativa nipponbare
ccacgcgtccgcggacgcgtgggcggacgcgtgggcggacgcgtgggcggacgcgtg

SEQ ID NO: 397886 - DNA, 240 bp, Oryza sativa nipponbare
ccacgcgtccgagcagaagcagcagcagcagctcatccgccgccgatggcgtccacgatcatggccccaacctgccgcgtccttgccgccaagacccccttcctcggccatccccgcccctccaatgcccccgtccgcgacatcgccgtcgccgtcaccggccgcatcaccatgagcaaggagctgtggtacgggccggatagggtgaagtacctggggccattcttggcgcagacgccg

SEQ ID NO: 397887 - DNA, 328 bp, Oryza sativa nipponbare
cgcacttgtagctctcgacccccgcatctcatccctcctctcgcttagttcagatcgaaatcgcaaatggcgaagattaagatcgggatcaatgggttcgggaggatcggttggctcgtggccagggtggccctgctgtgctactacttctcgtttttctttctttgtattctttttatttctgtattttttcttctcgaattttttttttttcttgtacatatttttttttttttgtttttctcattttcttttatttatgtttcttctgtttgtccttttggtatctttatcttttgtttttttctcaatttttatttttcttttt

SEQ ID NO: 397888 - DNA, 471 bp, Oryza sativa nipponbare
ccacgcgtacgagcgaatccagcagcagaagcagcagcagcagctcagccgccgccgatggcgtccacgatcatggccccaacctcccgcgtcctcgccgccaagacccccttcctcggccatccccgcccctccaatgcccccgtccgcgacatcgccgccgccgccaccggccgcatcaccatgagcaaggagctgtggtacgggccggatagggtgaagtacctggggccattctcggcgcagacgccgtcgtacctgaggggcgagttcccgggcgactacgggtgggacacggcggggctctccgcggacccggaggcgttcgcgaggaacagggcgctggaggtgatccacggccggtgggcgatgctcggcgcgctgggctgcatcacgccggaggtgctcgagaagtgggtgcgcgtcgacttcaaggaagcccggtggttcaaggccggcgcccagatcttc

SEQ ID NO: 397889 - DNA, 387 bp, Oryza sativa nipponbare
tttcgacccacgcgtacgcctacgcccacgcgtacgcccacgcgtacgatggcgtccacgctgaccaacgtcggcctgtctaccccggcggcgagtctatgggtcttactggtgcgaatatgcccacctggacccgtggtgtgaccctgcggccacagaggttgatgctaatattggaaaacgactctacccacgacgccgtcggacatctcggacaagatgtcggagagcatcgacaaggcgaaggatgcgtgcgcggaggacacggcgagcggcgagtgctcggatgaaacacacaacgtggtggacattcggggactcttgctgatattgtgatgacctgtaacctctacatgggctttgctcgggactactgcaaggacaacc

SEQ ID NO: 397890 - DNA, 169 bp, Oryza sativa nipponbare
ccacgcgtccgcggacgcgtgggcggacgcgtgggcagccgcagcagcagcagtcgcgcacacacgagccacgaagacgatggccacggccacggcgctctccctgagcggcggcgggggcgggggctgcggcggcaggtaccccgccacggtggcgcggcggagctgc

SEQ ID NO: 397891 - DNA, 476 bp, Oryza sativa nipponbare
ccacgcgtccgcccacgcgtccgcccacgcgtccgcccacgcgtccgcccgcttcgcttcctcccctctctaagccggggaagctaagccatggcgtccgtcaccgcccgcaccccggtcgcagccctccgctcgtcggcgtcgctcaagtctaccttcctagggcaatcctccacccgcctcgcccgcgcaccgactacgaggcgtaatgttcgggcggaggccaagggagagtggctccccggcctcccttctcccacctacctcaacggcagcttgccaggcgataacgggttcgacccgttgggtctggcggaggacccggagaacctgcggtggttcgtgcaggcggagctggtgaacgggcggtgggcgatgctgggggtggccgggatgctgctgcctgaggtgctgacgaagatcgggttgatcgacgcgccgcagtggtccgacgccggcaaaggcacctactttgc

SEQ ID NO: 397892 - DNA, 410 bp, Oryza sativa nipponbare
ttccgagttcgacccacccgtccggtgccccatctgggcatgcctggtgctcttcttctcggtgagcagccagatgtcgtcgacgctggtggagcaaggcacggccatggacaaccgcgtgggccccttcaccatccctccggcctcgctcgccaccttccactccatcggcgtcctcctctggatccccgtctacgacgtcgcgctggtgcccctggcgcgccgcgccaccggcaagcccaaggggatcacgcagctgcagcgcatcggcgtcggcctcgccgtggccgcgctcatcatggcctactcggcgctggtcgaggagcggcggctggcggcggcgcgcgccggcgccgccaggacgagcatcctgtggcaggtgccggcgcagctgatgcacggcaatggcg

SEQ ID NO: 397893 - DNA, 286 bp, Oryza sativa nipponbare
ccacgcgtccgctcaaaatgcagtttttggagtgggtcggtgaagatacgaagtgtccatactgtgaaggccttggttcaattgtatgtgatgcgtgtgcatgggagagacaacccccttgatctaacctacgtgctggaccaacatgctgtttcatttgtgaacatctataacagtttatgtagatagatactcgccaatttttcatgttctttttcacaacagttgaagaattgtattcacatggccagtgttagtgctacctgaagggcgtagtcccgggcga

SEQ ID NO: 397894 - DNA, 447 bp, Oryza sativa nipponbare
cggtccggtccggattccagttcgagcacgcgtacgcccacgcgtacgcccacgcgtacggagagcaatgcgattgcacgatatgttacccgctcgaaggctgacaacccactctatgggtcttcactgattgaatatgcccacatcgagcagtggaatgacttttcggccacagaggttgatgctaatattggaaaatggctctacccacggctaggaattgctccctatgttgctgtgagtgaggaagcagctattgctgctttgaagagatcattgggtgccctcaacacacaccttgcatcaaacacataccttgttggccattcggcgactcttgctgatattggcatgacgctgggaacagtacactggatgtgatcggatcatgaccaaaagttttacttctgagttccctcatgttgagaggtacttttgggccatggg

SEQ ID NO: 397895 - DNA, 428 bp, Oryza sativa nipponbare
ccacgcgtccgtgcaaggagaaggagaaggtaggctccagccatggcttcccagctctccgccgccacatccgtgccgcagttccatggcctccggacctactcctctcctaggtccatggtgacgctgccatcgttgaggatgagcaagaagaggtcccagggcatccggtgcgactacatcggctcagccaccaacgttatcatggtgacgacgacgacgctgatgctgttcgcggggaggttcgggctggcgccgtcggcgaacaggaagtcgacggcggggctgaagctggaggcgcgcgactccggcctgcagaccggcgaccccggcgggttcacgctcgccgacacgcttgcctgcggcgccgtcggtcacattatgggcgtcttgcgttttccctaggtctctagaaaaatatgtggttt

SEQ ID NO: 397896 - DNA, 416 bp, Oryza sativa nipponbare
ccacgcgtccgcccacgcgtccgcccacgcgtccgacctgagattaagaaggaaatcaaggaaagccgaatcaacgttacatcaaaagtggtgaattacataaataatgccagtggtgatgctcggccctcagttttcgtgagcgcaacagccattggcttctatggtaccagtgagatcagtagcttcgatgagtcaagtccgtcaggcaatgactatctagcagaggtgtgtcgagagtgggaggccagggcatgccaagtaaaccaagaggatgttaggcttgtgcttcttcggattggggttgttctcggcaaggacggcggcgctctagccaagatgattcccctttttatgatgtttgccggcggccccctggggacgggacggcaatggttttcctggattcaccagga

SEQ ID NO: 397897 - DNA, 361 bp, Oryza sativa nipponbare
tttttgaatgatgaactctgtatccagtacttgatgcaagaaaatgccacagcaaattagcaataatcaaacactaggtctcgtatggatcattacaaagtacacaaatgtacaaattaaaacatcaaaagagttaactaagcttaaagcagcagctgacacataagttgcaaaccccaacttttttcagtttctgaattctggatggatcatatcagattcatcacagcatcgtacaatctgtgcaagcattggtacatcgagcgatggagagagagagtagtctacaatggcggctgggccattcacgagcccggcgtgaacttggtggcgtagacccaggcgttgttggcgacggggt

SEQ ID NO: 397898 - DNA, 335 bp, Oryza sativa nipponbare
gagtatatagccggagctttggtttgacatatcctaacgcaacgataattgtagtactcttacaataaaaccgaacgcagagggagggaagagattattacatatgtgttaagagcagaggccattgagatgggacataaccaaactgcaaaatagaaacatatagcatacctatatatggatatatgatcaacatagcccaaaacaaagctgcatactattattataggcagcaatccaccagcgcgatgcttgatcttagcttatttgccaccagactcctcgcaaactgggggcttgtaggcgatgaagctaatcaactggacctggctgac

SEQ ID NO: 397899 - DNA, 292 bp, Oryza sativa nipponbare
  unsure (1)..(292): unsure at all n locations
tnnnnnaatgaaaatggttgatttctattagggaaccgttcagcaaactgtcggtttgggcagcaaagagttcagcaaaggggtcaggtgcttgggacccgagtatctgacatggcatacatggaaagaaaaggtgctgcttcttgtcttaacatgaatagtagaaggtatatatccccgaagtactggttttagaccatgtatgttaacatatgtcgtactattgatgagaaacttgtcagtgtatcatgtatcctttgcagttgatcagttgtagatcactttcctaagc

SEQ ID NO: 397900 - DNA, 252 bp, Oryza sativa nipponbare
  unsure (1)..(252): unsure at all n locations
atgcgaacaaaactttcgaactcttttttttctccttgttttggattgcatttcatcccgatagagaggaacaagcanttcaaacaccataaccaaagcgaactcaatgcatgtgaacatcacggacgaagaacacctaacactggatggatggatagagggcttctcgacttgagagagccactggacacgataacgactcgactcgatgataagatgactttgacacgtatagttaatgaaaactggcca

SEQ ID NO: 397901 - DNA, 234 bp, Oryza sativa nipponbare
gtaaaataaaaatatatagcatattatatattgatatatcaggagcatagcccaaaacaaagctgcatactattattataggcagcaatccaccagcgcgatgcttgatcttagcttagttgccaccagactcctcgcaacctgggggcttgtaggcgatgaagctaatcaactgcacctgcctgacgttgtcgaagtccatgatactgacataggcatcggtgtaggcctttt

SEQ ID NO: 397902 - DNA, 390 bp, Oryza sativa nipponbare
gggaagagataaagatggtctttctagcgaagaggatctgtgcatattgcatctttggggaaaaatcttcccctcgtgtacaatttcagactttccgtctctcatcaaccgcatcaattttccttttcgccatattggtgtacaatagtagaagctacaaactaacatcttggaagcacatgatcaacctctaaatcaacataaccaaaaaaaaaaatctcaaaattggcgccttggctttgattctgcaactgtaactcggatctgcctgccgtccaggtcaacgccgccaagatttgatatggcattgttgacttcttcagcggagccataggtgacaaaaccaaaaccccttgacctgccgctctccctgtcgtagatgaccttggc

SEQ ID NO: 397903 - DNA, 357 bp, Oryza sativa nipponbare
ttaccctttgtataaatatatatagccggagcttccatatattgcattcacatatgcctcacccaacaacatatagtcgtagcagataccactcttacatcaagtcagagagagatcaggtgaaacaaaaacaaaagcagagcacggccggtaaaatcaaaagacgatgaacaaactgggaacacacgaaacaaggtgggagacatcatcgaatcagagatgaacaattaaacaaggctatatatgacgatgacggcttagttgccaccagactcctcgcagcccgggggcttgtaggcgatgaagctgatgagctgcacctgcctgacgttgtcgaagccgatgatacggacgaat

SEQ ID NO: 397904 - DNA, 307 bp, Oryza sativa nipponbare
ggcaaaccccaacttttttaagtttttgaattttggatggatcattttaaattcatcacagcattgtacaatttgggcaagcattggtacattcagcgatggaaaaagagagttttttacaatggggggtgggccattaacgagcccggggtgaacttggtggcgtaaacccaggcgtttttggcaacggggtccgagagggggtcaagcaggtttttcaaggggcccttgccggtgacaatggcctggacaaaaaaacccaacatggaaaacatggggagggggccatttttgatctccttgacct

SEQ ID NO: 397905 - DNA, 420 bp, Oryza sativa nipponbare
  unsure (1)..(420): unsure at all n locations
tgcacgttgaaaatactaccattgaacaaagcaacaagttctacagctgcagttggaaaacacctgaacaatttaaaccagttctagcaatcagatatgcagatcacaggactgtcaaaacttttcgcatataggaaaccacagttatagtctattttaggaagagtagcagcatttgcggccaaagatagccgtcgactaactatgacatggtttacgcagtctcggtcatggggtagtcgaacacgacgtccttcccacagagcctcctgtagacagagctgaaagtgtcgagcttgtactcggtggtgttgcgctcctttgggtccaggaagatcttcatgatttttctaccatccaagtggtatctgacancgcttccaacaatctctgctggatacacaacattcttcaagatgc

SEQ ID NO: 397906 - DNA, 313 bp, Oryza sativa nipponbare
tttatagcatattatatattgatatatcatcaacatagcccaaaacaaagctgcatactattattataggcagcaatccaccagcgcgatgcttgatcttagcttagttgccaccagactcctcgcaacctgggggcttgtaggcgatgaagctaatcaactgcacctgcctgacgttgtcgaagccgatgatacggacaaaggcatcggggtaggccttcttggcctcctcgagctccttgagcacctgggtggcatcggtgcagccgaacatgggcagcttccacatggtccaatacctgccatcgtagta

SEQ ID NO: 397907 - DNA, 393 bp, Oryza sativa nipponbare
ttcagaaagtactggaatccattcacatgcccatccttttacctcaatttatttacggaataacgactcaaaacatggaaagagaaacacgcaaatcttagcacaggcagaacaactcaaaacactcgtcagaggaggtcatcagaccatcgctctcagctcccgagcagagacgtcaagaaggccagccctccgatcaagagcatgatgttgaggaagtagttggactgcagaggcttgtccgggctgcctccgaatccctcgtactccgccctgatcttctgcttcatcgagtccgacagctccttctttccgtaggagtatttcgcagcgacgaagggctctggttgcggtgctgcaccgttgttgtcatccgctggcgatgatgccact

SEQ ID NO: 397908 - DNA, 342 bp, Oryza sativa nipponbare
tagggatgcatgaaacgtgctgtcaatcacattgccactattacaacagttgcattagcacaatggcggcagcagagaggatttagcttagctagctgagctcagtcactggggagtggagctggagccgcatgtctgtgctgcccatcctgccggcgccgacgagcgtcaggccgtcggggtacacgtcgacgcggccgaaggcgtcggtgccgggcgggcactccagcgccgccttcaggggggcggtgtggacgccgcgggcgtcgacgccgtagccgcccctgtggtcgtggccggcgaggcacgccgcgacgcaaccgtgccggtgcaccacgcgca

SEQ ID NO: 397909 - DNA, 333 bp, Oryza sativa nipponbare
taaatatatatagccggagcttccatatatttcattcacatatgcctcacccaacaacatatagtcgtagcagataccactcttacatcaagtcagagagagatcaggtgaaacaaaaacaaaagcagagcacggccggtaaaatcaaaagacgatgaacaaactgggaacacacgaaacaaggtgggagacatcatcgaatcagagatgaacaattaaacaaggctatatatgacgatgacggcttagttgccaccagactcctcgcagcccgggggcttgtaggcgatgaagctgatgagctgcacctgcctgacgtgtcgaagccgatga

SEQ ID NO: 397910 - DNA, 424 bp, Oryza sativa nipponbare
taaagcagtttataatttcaatccaatttctagcaaaaggatcattgattttatacttatcacgagaagttcactgaaattacattcttaggagaagcagcgtatacacacggataaaacacggagaaaatctttacgagagatggttggtgtttgggaggcaagaacggccggcggcggggcggccattacgcggatgggagcaccttcttgacgatctcgtcgctgagggaggcgatctgggcgtcgagcgccttgacggcctcctccttctgcgccctcaggttggcgagcgcctccacgagctcggcctcgacgcggcggcgcccctcgtccagcttcgcctccaagcttctgggggtctccttcttcatcttgttgagcgccggcgggatctccggccgtgccgccttcaacaacggcg

SEQ ID NO: 397911 - DNA, 268 bp, Oryza sativa nipponbare
caggaagacatctaaggtatgatctgctataaaagagtatccatctcacagattcataaccctcaaaaagggttacttatgcagtgaaaagggttttatgctctttcatacagtgtgacagtgtgtgtacatataatttggaaaaacaaagtgaagatggatttacagcagcgtttctcagatacagcggacttatagctacaagctgatcacacaagggaactttgctgctgatgatgatatggatcatgttggtatagcttacccc

SEQ ID NO: 397912 - DNA, 456 bp, Oryza sativa nipponbare
tataacatgtatactagtatagcagctcaggtgctcagggacatcagggaatacattacacatacacaaaacttcacataatccaaacgcccgaactatacaaacacaaataacaacacaccaacttaaatatgaaaaataatttagccacaagtactgcttggagttgcttcagcatcaagttctaccctagattaggcatgccaagcttaatataggagggtgcttccttccttaaacagtacaaagatgctgctgccatcacctctggagattctaagctcatcatcaaggtaggttgtgagcaaccaagactcagcattgtcagtcctaattggtatctttaagtgaggttgaccagagatggttctagcaactgaggatgctgcattttcaattgatgaaaatatgcccttcaatggggtcaggtcaatattctgcccaaataactcaaac

SEQ ID NO: 397913 - DNA, 329 bp, Oryza sativa nipponbare
gttgaagttcgattgagtatgatagacctttttactaggcaaaccacacgaatacacgattgattaatttcactgagaatagcacgggtacatcacatcacacaaattcatacgttgatacacgcatagtcgccgaagcgaccagctgcttaattaatcgataacacacgggtttaattcagcaataatcagcacacacacaaaccacactcatatgggtggtttttattgtggactaattaaggtaggtgactcgccggcggcgagtgttcggttgcttcgtgacttcacttgccgcacttgcagtcggtgcaggagcagctggtgcc

SEQ ID NO: 397914 - DNA, 421 bp, Oryza sativa nipponbare
tttttaaagaaaatccaaacacctccaagatttgcgttttgagaacatagtaatagattcagtacacagagataacggttttgacgaagtatgagctagtagtattccgaatttccgataggccaaacaagcggacaaccagccaaaattttcactcagccaaaagccacaggctatataataatctgatctaacaaacaggcagaaggggggcaaagcttccttctctaggccttcctggctgcgatctgagactcaggctctttcttcactggttcttccttctctgacaggataagctcaatgtggcacggggaggacatgtaagggttgatgcgtccatgagcacggtaggtacggcgcctctgcttctgggcctggttaacttggatgtgggacacataaagagtataacattcag

SEQ ID NO: 397915 - DNA, 417 bp, Oryza sativa nipponbare
ataaatatatatagccggagcttccatatatttcattcacatgggcctaacccaacaacatataggcgacgcagataccactcttacatcaagccagagagagatcaggtgaaacaaaaacaaaagcagagcacggccggtcaaatcaaaagacgatgaacaaactgggaacacacgaaacaaggtgggagacatcatcgaatcagagatgaacaattaaacaaggctatatatgacgatgacggcttagttgccaccagactcctagcagcccgggggcttgtaggcgatgaagctgatgagctgcacctgcctgacgttgtcgaacccgatgatacggacgaatgcatcagggtacgccttcttggcctcctcgagctccttgagcacctgggtggcgtagtgcaccccaacatg

SEQ ID NO: 397916 - DNA, 329 bp, Oryza sativa nipponbare
cctttctatttaggtatggtggagacataattcttatagaaacaaagctctctcgcttcactttgtctcattttctctagaatctctagaaaaaggaataaaaacgaaaatactacgaattagagcctaattaagataggatgactaatgtatgcagcctaatgaggagtaattctataaaaataaagaactctatttcagaacgtagattgatttagatttaggtaatctatagatatagataagcaaagtaatatacttcaaacaaagtaggaatttgcaagatggagaacatcttgcagttgatttgatagaaatttatttttctt

SEQ ID NO: 397917 - DNA, 332 bp, Oryza sativa nipponbare
tttttgtttttaggcaagcaaactttcgtcatgtcatagtacatcatagttcatgcccaacaccatgctgataagtattgggcccaaattgtcttacaattacatacgcccacagtaagatgtacttagcacacttagtacaaccgagatggcagtgttctttgcatacatacaaaattacatcacttgcatagcattactgttacataacaacatctcatccaagatcaggaacgatgaagaagtcctcgtcgtcatcgggtatctccacccgtggcttcttgctttggcgtgcaccgctcgccttgtagagccccatgttgctcgctggc

SEQ ID NO: 397918 - DNA, 355 bp, Oryza sativa nipponbare
atgtaaatattatattattggaaatcattttgaggagctagactagcgtgccttattaacaaggagatatgtaccattacatgatgattaacatataaatctgtagctacatggaattaaggtagtggagcagaggaggaaggatgatagaagactccaattctccatggatgggaatgggatcaggtggccttgcagaactctccgcccagatcgtcgcacgcctcctcggggaacaccgtggtgggctcgtcgtaagataggtagtccctgtcgacttcctccgccgccgcacgagaaacagcaacagcagccgatgatgaaagcttggcctctgggtacatctgcacgttgc

SEQ ID NO: 397919 - DNA, 339 bp, Oryza sativa nipponbare
aaaaaaatatatagccggagcttccatataggtcattcacatatgcctcacccaacaacatatagtcgtagcagataccactcttacatcaagtcagagagagatcaggtgaaacaaaaacaaaagcagagcacggccggtaaaatcaaaagacgatgaacaaactgggaacacacgaaacaaggtgggagacatcatcgaatcagagatgaacaattaaacaaggctatatatgacgatgacggcttagttgccaccagactcctcgcagcccgggggcttgtaggcgatgaagctgatgagctgcacctgcctgacgttgtcgaagccgatgatacg

SEQ ID NO: 397920 - DNA, 168 bp, Oryza sativa nipponbare
gtataaatatatatagccggagctatcatatatttcattgacggattccttacctaacaacatataagtatatcaaataccactcttacatcatagtaaagagagatcagttcaatcacattcataatcttatcacgtccttttaaattatttaactaaaaacaaact

SEQ ID NO: 397921 - DNA, 447 bp, Oryza sativa nipponbare
tgttttttgggacagggtccagaacttcacagccaaatatacgagtgacacatgcagaaggagcgagagagaaacaggcaaatgcatgccatctggcccatcatctctaagtaacatctgcgattatattacacgtgaagtcgacgagagaaatggcagaagcctgcagggatacaaatagtggctttgccggtggcgagctcagaagtccatgggatcctatcaggctgcctgtcacctaaacaagccagcaagctaggcaccgtcatggagaatttcagggagtggccacgttttccttggcaagtggcgccagctcctcaccctcgatgcctggctggcttccctcaacgcccaacccaagaagaacctcctcccacttatttgcaggtccctttcaagataggtcttgagccatgcagttctgaaccattttttggaatgccg

SEQ ID NO: 397922 - DNA, 354 bp, Oryza sativa nipponbare
ttgatgacagacagaaattaattaagctagaaatctcctggatcgatcacacacacacacacaattaaggtacatacatacatgcactgctgcaactgcaactgcagggtcggtgcgtggctactacaagtgtacacatggtacgttggttggcaccatctcgatcgtgtcgttgtgctcacttgccggggacgaagttggtggcgtatgcccaggcgttgttggcgacggggtcggcgacgtggtcgaagaggttctcgatggggcccttgccggtgacgatggcctggacgaagaagccgaacatggagaacatggcgaggcggccttcttgagctccttcaccttgagctc

SEQ ID NO: 397923 - DNA, 412 bp, Oryza sativa nipponbare
atcacaaatgatattttcaccttaagcacacaatgcaactccacaatgaaagttgctaccaaatacccaaagggttaacaaaacgtctagggatggtggtttaggggtacaggaactcaggaaatttaggacagtgaatcgacgacgagacccagataaataagagcctgactggcggggacgagttttgtgatacaattccttaatggttgtgactctgtatgttttaagagaatccttgttcctacatacccaaaccgatcataactgaaagttcagtagtaatcacatggaacaggtgaggtttacttcgggccgatgtccttcagcgcgcagatctgctcctctcccatggcagacataacagtcaccaccaggtccttcccttcttcaaatccattcttgatctgac

SEQ ID NO: 397924 - DNA, 333 bp, Oryza sativa nipponbare
gtaaaataaaaatatatagcatattatatattgatatatcatcaacatagcccaaaacaaagctgcatactattattataggcagcaatccaccagcgcgatgcttgatcttagcttagttgccaccagactcctcgcaacctgggggcttgtaggcgatgaagctaatcaactgcacctgcctgacgttgtcgaagccgatgatacggacaaaggcatcggggtaggccttcttggcctcctcgagctccttgagcacctgggtggcatcggtgcagccgaacatgggcagcttccacatggtccaatacctgccatcgtagtacccgggag

SEQ ID NO: 397925 - DNA, 479 bp, Oryza sativa nipponbare
ctgaaggaaattcttggccataagttatacagatacaaagttttaactgtctggtcaataaacaggttaaaacaaaaattttgcaagatgtagtaatgcattggagcagcctagtttcctatcatttcttcagaagcttcctcagcacttcctcagcatgatgctccatctttggtaaagcccagtcatgctggattatatccaggttgtctttctctgcggccaaacccattgtgggattaccgccaaatcccccacccatctgcatcatcttttgtgcatcatcattagcattttcttcaccgaggatcagactgaagagacccctcaaaccaaacaaattgagaaagtaccatgaacggctgctaacatagctcacatcaacagtactcaggtctatcccgttttgcagcattcccctgaatcgcggagtcaatggaaagggaatcttagctgcaacaaaacccgaaaagaagaag

SEQ ID NO: 397926 - DNA, 380 bp, Oryza sativa nipponbare
tttttaaacacattctagatttcattggcatgtccgcaagtcgagcacttcagcattgtattcatctccaaaacaaaccgtatcctcattaggtagtaaggcctacaaatacaataacaatgtcaaatttgtttacatcgaccaaagcccaccaaattgctcctgcaaggaacttctcgtctcccgttgttatgtgcctccaatctcagccagctcatccaccgtcaaaacacacaaacagggagcaatttacgcaggccaaatgaagtacaattggtttcatcactcttccgatggctttgcgtcgtccatttgatcatcttctcccggatgcccaaatatccgtaggttacgatccatagaacctacggcaatgtact

SEQ ID NO: 397927 - DNA, 400 bp, Oryza sativa nipponbare
ttaaaataaaaatatatagcatattatatattgatatatcatcaacatagcccaaaacaaagctgcatactattattataggcagcaatccaccagcgcgatgcttgatcttagcttagttgccaccagactcctcgcaacctgggggcttgtaggcgatgaagctaatcaactgcacctgcctgacgttgtcgaagccgatgatacggacaaaggcatcggggtaggccttcttggcctcctcgagctccttgagcacctgggtggcatcggtgcagccgaacatgggcagcttccacatggtccaatacctgccatcgtagtacccgggagacctgtggttctcacggtagacgaatccaaccttgctgaactcgaggcaaggcacccacttggatcg

SEQ ID NO: 397928 - DNA, 233 bp, Oryza sativa nipponbare
ttttataattaattcacaacaccatatttcattgatcaggttcagaagctgcacagaaatacacactaccggtacagatctcaccctctctccaatactcgtacatccatccacgcggtccacacgaatacgtacatctataccgtacacgtacgtacatttacttgaccgggtacacacacgcacacttttctgcagagacgcgcattgtcgtcaacctaactagcttaact

SEQ ID NO: 397929 - DNA, 394 bp, Oryza sativa nipponbare
aaccgggggggttttggcgcttttaaaggagcttatttttttcaatcttgaagaaagagggacacaagccattattttttgtgttggggccttttacaaactttaacacacgggtaacaagccttcactcaaaagtcaagaggtggctaggttttgtgtgtacaatggaacacccaggcatgtgcacaaccaagttttctccaccccaaactattttttttgaaatggttttggcagttttttaaaaaccatgaatcttgatggggtcctttttaacaatgccggcctgaacaaaaaaattttatacctttttcctttgatcacccttaaattgaatgagctggccaagcttttggtcctggacaacattaccattggagaaaaactttttttt

SEQ ID NO: 397930 - DNA, 285 bp, Oryza sativa nipponbare
gccataggaatagtacaattatatcaacatcataaacagggggaattaatccatggcgatccggccatgggggactagcagtacagtacagaggatttgcatggatggatcggatcaagaagaaggtgaggcagagacgaggaatttaatttagatcttgccgcgtgggccgggcgtcggcggcagctgcgggcccttcttgatcggaagcaggtctggcgacgccgacgcgctgacgtaggccaccagcgatccgccgccgagcagcaggaacttgagcaggag

SEQ ID NO: 397931 - DNA, 264 bp, Oryza sativa nipponbare
tttaaaaattaaaggagtatataaaccggttccgtaaatatcttaaggcgagatatacagatgccaaataggtgtacagtactcgaaattacaaagattataccagtataattaatcgttgggattaagagcatgaacgacccagttacgaggggtgcacggagtacgtgtgttgcttgcgcgcgtgtggatcgacgagattcttttgcaaaaattacctaattaattaatcggcgtgctctctggcgtcgtagatattggtta

SEQ ID NO: 397932 - DNA, 347 bp, Oryza sativa nipponbare
tgatcgaaattagacggccattaatttgaactagaatttcacaggctacgtacatcgacaaaaatccccgtttcatggtactatgcatttttcgcatggaaaaatggacgtccctcgaaaccatcacatttttaaacaacctaacacaagagctagataaaaaaacaacagttggtggcgacacatcactacagctcgtccttatcatacgacgacggctccgcctcctccttgatgttggatgattccttctcttcaacctcggcctcctcgacctcctctttctctttcacggccgcgtcggggctcaagtcaaggctcttctgcaccgacctgtagatgctgga

SEQ ID NO: 397933 - DNA, 425 bp, Oryza sativa nipponbare
aaaacattactggggcttattcattaccaccggtggcagtcaagtccagtccaggtacataactggttacattcctagggaagattatatacatggaagcaggcacagcttggtctgctgcacttagctaagccagggcactagtgttgtagacaagaatagcgccgccaactagaattccagcaagagtgattgcccagagaagtaaacctgcctttcctccaacatagacatcaccagttgaagaccattcttctggggtatatattgggctgtacccatcaacatttgctccatacttgttggaaaactggtaaagaccctttcccttggctacccttccagatgcataaacacctttcttgaacaccacttcttcagcaggcccataggggtgggatgtctgaatcttctttgctttcttg

SEQ ID NO: 397934 - DNA, 430 bp, Oryza sativa nipponbare
  unsure (1)..(430): unsure at all n locations
ttcactcaacagttccgcttgcccaggtcgatacagagtaaatggcaccgcctgctacaaacaatgtcatggacatcaatgtccattctttttttgctttgtttccaagtttacatcttattccaagacaacagaaagagaccgtcaaaattgcagcctttcctagctagatactatcggaggaggattttcaacaaatcagtgcttggcgttgacaagagccatgtgggcaatcagatccaacacacggttgctgtagccccactcgttgtcataccatgacacaagcttcatgaaggaagagctcagtccaataccagccttggcatcaaagatgcttgaccttgcatcaccanacaagtcattggaaaccacatcctcatctgtgtaacctagaataccttcagtgcaccctctgatgctgccttga

SEQ ID NO: 397935 - DNA, 347 bp, Oryza sativa nipponbare
tgcaagaaacctttttcagctaattacattttataattaaccagagagtaagttacatgtagtatgccaaaaaatccggccggcaaagtaaagttagtgtacaccaagaatcgaaaatatgaacatcttacagcatgttccattcctacaaaactagtgggatttaggcagggagagctgccggcgtggctgggggaacccggttctcgacagggatctccgtgaactcggagagaatcgccctgaactcgtcaccactcaatgtctccttctcaaggagcacctccacgatcttgtccatggcctcccggttgctcctgatctggctcaaagcgatctcgtaggcc

SEQ ID NO: 397936 - DNA, 354 bp, Oryza sativa nipponbare
tagcaaaaggatcattgattttatacttatcacgagaagttcggtgaaattacattcttaggagaagcagcgtatacacacggataaaacacggagaaaatctttacgagagatggttggtgtttgggaggcaagaacggccggcggcggggcggccattacgcggatgggagcaccttcttgacgatctcgtcgctgagggaggcgatctgggcgtcgagcgccttgacggcctcctccttctgcgccctgaggttggcgagcgccttcacgagctcggcctcgacgcggcggcgcccctcgtccagcttcgccttcagctcctgggtggctccttcttcatcttgttgagcg

SEQ ID NO: 397937 - DNA, 411 bp, Oryza sativa nipponbare
aaatccaacttattcgatcatatatttctttgcagtgaaccatttgtattggtcgaaaaggtttggtcacaagagtatatgggaagaactgatcgagtttagtaaacaaaaaatggctgaccaaaaactctccagaaaagctaattgctccatctctccctgtacaatatgatgatgtgctccatcatttctcagcctctctgccactctgtttgtctttagactttacgcagcactcacaggtgagatgtctttgccgaaaagcccagcgattgctttgccaggatcctcctgcttgatgagagactccccaacgagaacagctttaaccccagcattctgaacgaatgaaatatggtctggtgtgaacaagcctgattcccctacaacaattatgcctttctgagctat

SEQ ID NO: 397938 - DNA, 400 bp, Oryza sativa nipponbare
actaggcaaaccacacgaatacacgattgattaatttcactgagaagagcacgggtacatcacatcacacaaattcatacgttgatacacgcatagtcgccgaagcgaccagctgcttaattaatcgataacacacgggtttaattcagcaataatcagcacacacacaaaccacactcatatgggtggtttttattgtggactaattaaggtaggtgactcgccggcggcgagtgttcggttgcttcgtgacttcacttgccgcacttgcagtcggtgcaggagcagctggtgccgcacttgcagccgccgttctcctcgccggcggcgaccttcctgaagtggctcttctcggcttcaactatgacgacgccatagctggtacctttcttcacgcact

SEQ ID NO: 397939 - DNA, 327 bp, Oryza sativa nipponbare
ttttataattaattcacaacaccatattgcatagatcaggttcaggacgtgcacagaaatacacactaccggtacagatcttaccctctatccaatactcgtacatccatccacgcggtccacacggatacgtacatatatacggttcacgtacgtacatatactgcaccgtgtacacacacgcacactctcatgcaaagacagcgcatcgtcgtcaacctagctagcttagctgaaggcgatgcgtggccatggcatcacggcggtagttgtgctcacttgccggggacgaagttggtggcataagcccatgcgttgttgttgact

SEQ ID NO: 397940 - DNA, 424 bp, Oryza sativa nipponbare
tttggagcgaaatacatctttctgcaaggtttatgaatatgttgcagtacatttagcccaaaacacagttaaatacgacgatgcaacagcttatacaaacatgtctatgctctaggcttgaataatcagcaaaagtctgagcggctagaaaatgtattacaacatattagccaaaattcctcctgaatttacttcgtacctttctcaggcaagcattagtcgactcaattcaaactatgatcctacagggtatatgctaaatatggaattatccaagttttccgatctccatctttttctttatagcacgatgaccatggtagacaaaagaatctatgatgccagcaacagtgaaaatccctccaacaatagcacatatgtttgtcaggaagtgaagaagcgatgtattttcttcaagtaaatc

SEQ ID NO: 397941 - DNA, 366 bp, Oryza sativa nipponbare
cagctggaaatttgttgatatattttgaaattttgctaaccatgaatacaatgttcacttgcaaatcagtaagattagaaaacagatcatcatgacgttggaaatagttatttacatggtgcattccatataaatggccgtatattgttctggatgcttgataaatcatcataggcagaagaactagattaactgtttgtctccatgtcgaatacccacttcaataactggtggttcacccataacgtacactagtgacaacaagctaactgatgcaaattttcagggcattcctcagcttgacttcaccgtctcgatcgcttggattaattcatctagtttggcacctgtgacctccttgacgac

SEQ ID NO: 397942 - DNA, 64 bp, Oryza sativa nipponbare
cacgcgtccgcccacgcgtccgcccacgcgtccgcccacgcgtccgcggacgcgtgggtcgggg

SEQ ID NO: 397943 - DNA, 253 bp, Oryza sativa nipponbare
  unsure (1)..(253): unsure at all n locations
tttacaaattaaaacatcaaaagagttaactaagcttaaagcagcagctgacacataagttgcaaaccccaacttttttcagtttctgaattctggatggatcatatcagattcatcacagcatcgtacaatctgtgcaagcattggtacatcnagcgatggagagagagagtagtctacaatggcggctgggccattcacgagcccggcgtgaacttggtggcgttgacccaagcgttgttggcgactgggt

SEQ ID NO: 397944 - DNA, 384 bp, Oryza sativa nipponbare
ttagcaattaagcgtagcttatccaccataattaagatcgagaccatgagatagctagaacactgctgctaccatgagatagtttatccccctgtagtactgtacatcagaaattcaccactcaactcacccgcttacccatgcatccagatccatgcatgcaggaaacaattaccacaacacacacagtaagtctgaatctcatcacatccatctctctctctctcctccccccaattcattaacatcttatacatgcatactccacagaaaaaaaaagaagaaacaagaagagaacatctttcatcgcccaatcatcggtttcaccagcctgaactcatcaagctccttgagatgccctggccctgatgaaatcgatcacac

SEQ ID NO: 397945 - DNA, 260 bp, Oryza sativa nipponbare
ccaaaacattatcagaatggcaagtttaacacatgagcaacagcagattcgaatggtgtgtttctgacgatgattcgatggataagtgtcttaacaacttaactacaaggttaaaaagggccaaaactctagcaaacagtacaaaaagaaaggaccagcacactcaatattgactaatatagccacatggtgatagtattttttttttcataatcatgaactattgtagaagggtaaatccaaaacctaaatagctcatt

SEQ ID NO: 397946 - DNA, 379 bp, Oryza sativa nipponbare
gacagaaacaaaattaagctagataagcactgattccacgcacaatttacatgatcattacatcgtccatcacacaggcactcatgcatcgattacacataggagtattgattcgtgtgactagcttaatgaatttgattagccgatgatctggtccaggacgccgatgttcttgaggccgaggacgacgccgacgcccatgatgtggccgacggcgccgcaggccagcgtgtcggcgagcgtgaacccggcggggtcgccggtctgcaggccggagtcgcgcgcctccagcttcagccccgccgtcgacttcctgttcgccgacggcgccagcccgaaccttcccgcgaacaggattaacgtcgtcgtcgtcaccatg

SEQ ID NO: 397947 - DNA, 408 bp, Oryza sativa nipponbare
tactcattcattcacgtgcatatatttgcttcagtctaaaaatggtggaaagacgtacgccatccaatgaaacgtatggcctagtttaatcagagataatacaagccaacaacaataatagtttgcttttggtatatataatatatttcaattttgatatctactgttgtgcgtgcacggcggatcgatcgatttgagtattcatctgagtcgatcagtcataggtccctggcaatggcccggagtgcatcctgtacataggggtatcggtaggagaagcccagttgcttggccttcacaggaagaaccttctgcccttccaggaccactgatgcaccttctccgagcaccgctttgagggcgatttctggcaccggcagccaggaggggcggccgacgactcgcccc

SEQ ID NO: 397948 - DNA, 430 bp, Oryza sativa nipponbare
ccacgcgtccgcccacgcgtccgacaagagccagtgcgtgaagaaaggtaccagctatggcgtcgtcatagttgaagccgagaagagccacttcgaggaggtcgccgccggcgaggagaacggcggctgcaagtgcggcaccagctgctcctgcaccgactgcaagtgcggcaagtgaagtcacgaagcaaccgaacactcgccgccggcgagtcacctaccttaattagtccacaataaaaaccacccatatgagtgtggtttgtgtgtgtgctgattattgctgaattaaacccgtgtgttatcgattaattaagcagctggtcgcttcggcgactatgcgtgtatcaacgtatgaatttgtgtgatgtgatgtacccgtgctattctcagtgaaattaatcaatcgtgtattccgtgggttggctag

SEQ ID NO: 397949 - DNA, 448 bp, Oryza sativa nipponbare
ccacgcgtccgatttctgttgagagagttgttgagtatgttggcttacctcaagaagaacttcatggatcgggatcccctcacagtggctggccaacagaggggaacattgagtttgagcgtgttactctaaggtacaaggaggatttacccccggctttgaatgatgtttcgttctttatttcatcaggcatgcaggttggaataatagggaggactggagcaggcaaatccagtatactgaatgcacttcttcgtttagctccaatctgtaatggccgcatcttagtagatgactttgatgtggccaaacttgctgtccgagatcttcgtggacattttgcagtagtcccacagagcccgtttttgttcgatgggtctttgagggaaaatctagacccttttaatagaacaacagatctcaggatatgggaagctcttgataagtg

SEQ ID NO: 397950 - DNA, 241 bp, Oryza sativa nipponbare
ccacgcgtccgcccacgcgtccgcacaaagctcgaaatatagcgttatcatttcgcctgcctattgttggagttcatcatatggaggcacatgcattagtttccaggttagtgaacaaggatcttgatttcccatttttggccctcctaatttcaggaggacacaatcttcttgttcttgctcatggactcggtcaatatgttcaactggggactacaatagatgatgcaattggtgtggc

SEQ ID NO: 397951 - DNA, 431 bp, Oryza sativa nipponbare
ccacgcgtccgcttaccccaaattcgtcgctccgcttccctctccgatccttatagatggcggtgccgctgctgacggggaacatcgtgaagaagagggtcatgcagctcaagaggccccatattgaccgctacctatgcctcaagccaagctggcgcatgcccaagggtattgactcccgtgtcaggagaaagttcacgggatgcaccttgatgccctacattggttacggctcagacaagaagaccaggcactacctccccaacaagttcaagaagtttggggcgcacaatgtctctgatctggagttgcttatgatgcacaacatgacctactgtgcctagattgcccacaacgtctctacgatgaagcgcaaggagatcgttgagcgtgctgcgcagctcgacatcgtggtcaccaacaagcttgca

SEQ ID NO: 397952 - DNA, 442 bp, Oryza sativa nipponbare
ccacgcgtccgcccacgcgtccgcccacgcgtccgcccacgcgtccgtgattatagcatccagttcatcaacgtcaaggaccaagccacttgcagcctatcttttcaccaaggacaagaaactgcaagaggaatttgtgtccaatgtcccagcaggaggaatgcttgtaaatgatgttgccctgcatctcgccaatccgcacctgccatttggcggagtcggcgacagcgggatcggctcctaccatggcaaattcagcttcgattgtttcacccacaagaaggccgtcctgatccgcggcttctgaggggaggcaactgctaggtacccaccttacacgattgagaagcagaagatcctgagaggactgataaacggcagcttctttgcactgattcttgccctcctgggctttcccaaagagaggcgttagaaaactttc

SEQ ID NO: 397953 - DNA, 456 bp, Oryza sativa nipponbare
ccacgcgtccgactacaccccgctccactctaaggcaggcaatcatcggcttggcaccaacccaccgaccgggaatggcgtacaccttctgcttcctacaccagtccacggaccacgtaagggggcgcggccactgaacgtgaaggagatggcgctctctctgttgctaattcaaagaacgaatccagacccacctttgaagacaacattgttctgggtttagctcttgagggatccaagaggacattaccaattgatgacggaatgaaccctcatctatcactttctgaaactgagcaagacacagttgaggctgcttcattaccaaatgattagaaatgtcaagaaaaaggtgaccagaggaatcttgataggtgatctgattttaaaccgattatttaatgctatttttgtaaccaaatcctacctttttatatgtgcttgtgcaaatgcaat

SEQ ID NO: 397954 - DNA, 441 bp, Oryza sativa nipponbare
ccacgcgtccgcccacgcgtccgcccacgcgtccgcccttcgtccgaaaaaaaaatcatcagcacgggagcgaggaggctttatctgaacaagggagatggcggactacgtgtatgggccggggcggaaccacctgttcgtgcctgggccggtgaacatcccggaccaggtgatccgcgccatgagccgtcagatcgaggactaccgttcgccggcggtgcccgccctcaccaagaccctcctcgaggacgttaagcagatcttcaagaccaccaccggcacccccttcctcttccccaccaccgggacgggggcgtgggagagcgcgctgtcaaacacgctgtcaacgggggacaagatcgtgtcgttcccggatcggccagttcaaactgctgtggatcggccagcttcaacgcctaaacttcatcgtggacgtggttg

SEQ ID NO: 397955 - DNA, 445 bp, Oryza sativa nipponbare
ccacgcgtccggaagctcccgaagatgatctacgactactatgcatctggggccgaggacgagtggactctccaggagaacagggaggccttcgccaggatcctgtttcgcccacgcatactgatcgacgtatccaagattgacatggccacaacagtcctggggttcaagatttcaatgcccattatgattgctccctctgccatgcagaagatggctcacccagatggagagtatgcaactgcgcgtgctgcatcagcagcgggcactataatgacattgtcatcatgggctacttcaagcgttgaggaggttgcctcaactggaccagggattcgtttcttccagctttatgtttacaaagacaggaaggtggtggagcagcttgttaggagagctgaaagggctggattcaaggcgaatgcgcttacggtggatacttcgc

SEQ ID NO: 397956 - DNA, 401 bp, Oryza sativa nipponbare
ccacgcgtccgcccacgcgtccgcggacgcgtgggtctcaatccttaccgcctcgccataccttcttccactttccgagtgagagcacggagtagttcgagagaacgtctacagtacccagccgcttctagacgacaacacaggtgttcctgccggatctaacagtacctagctgcaaggcgccagagcttgccgacgtaacctccatggctggatccaaggcggaccgcagcgaggagaaaggggctgcttcctccgcaccgacctagcttgagaagatgttcgaggtgccagtggagttgtcggtggtcggcagtctgacgacatcaccgaagacgcgagaagtggagctggtcagccatttgctgggtggcaccgtgccggtcctgttcgtgcagata

SEQ ID NO: 397957 - DNA, 375 bp, Oryza sativa nipponbare
ccacgcgtccggcagtactggagggtactcgactttttgtaccatcaccccgagagcctacacaccttcttgttcctggttagacgacctgtgcatccccaccgatcaccgccacatggacggcgtttgagtcaacacctacacctttgtcagcccgatactcacaaggcctggttcgtcaagttccactggtagcccacctgcggtgtatgctggtttgcggacgaccaggccacgcgtcgaaaggggatgatccacacgcaccgcaccaagtagctatgctgctccatgtgccacgggaactttcgcgagtgcgagctgttactacaggtgatcaaccccgaggaggaggagtggttcgacttttaccgggtg

SEQ ID NO: 397958 - DNA, 332 bp, Oryza sativa nipponbare
ccacgcgtccgcccacgcttccgggaagagagatattctcagcttatcctctggagcggtcacaccttcgtgtgcctggtggaccacgtaatcatccccaccgatcacctgcacatggacggttttggcgtcaacacctacaccttctttacccgctacgccaaggccaggtacgtaatgttccactggaagcccacctgcggtgtcagctgtttgatggacgacaaggccacgctcgttgtgggcaagaaccactttcacgcttcccatgacctttacgacttcatcgtctccggtaactttctgtagtggtagctgttctttcaggtgat

SEQ ID NO: 397959 - DNA, 262 bp, Oryza sativa nipponbare
ccacgcgtccgcccactcgtccggaagtactcgagcaaagaaggagagagcttggtgagctgcagagatggccccctgcgtgatggcgtcgtctgccaccaccgtcgctcccttccaggggctcaagtccaccgccggcatgcccgtcgcccgccgctccggctactccagcttcggcaacgtcagcattggcggcaggatcaggtgcatgcatgtgtggccgtttgagggcattaagattttcgagactcccttttacctt

SEQ ID NO: 397960 - DNA, 159 bp, Oryza sativa nipponbare
cgacgcgtccgtcgcctccatccccaccatccagtaccttatcatgaacggtgccaaggtcatggggtccaggcacctgtgtcgcccaaagggtgtcactcccaagtttagcttggctccccttgtaccgcgattgtgtgaactttttggtatacaggt

SEQ ID NO: 397961 - DNA, 208 bp, Oryza sativa nipponbare
ccacgcgtccgtccagcttcagcaacgtcagcaatggcttctgtatcaggtgcatgcaggtgtgggggggtgagggcattaagaagtttcataccctctcctaccttcctccgtttaccgtggaggtccttctgtaatatatctatttccttcttctttccaagttactttcttttctattagttttattaatatctcaatgtttttt

SEQ ID NO: 397962 - DNA, 156 bp, Oryza sativa nipponbare
ccacgcgtccgctccacgcgtccggtgcacggccagtggaagcatcatgaggttaaggtgaaggactgcaaggcgccttctcttcggtgagaaggaggtcaccgtgttcggctgcaggaaccctgaggagatcccatggtgtgagactggcgctgt

SEQ ID NO: 397963 - DNA, 440 bp, Oryza sativa nipponbare
ccacgcgtccgcccacgcgtccggctgcaaccaagcttcggagtttagtttcaaggacagcagaaactgagaaagatgccaaagcaatctttcaggcctacattgatgcagcagagaccatgctagttgacgatgtgtcagataacaaggcaattggctctcatggagctgagtttctcaaacagaaacttgaggtctctaaagatatttctgttctaacacactgtaatactggcagtcttgcgactgctggttatggaactgccttgggggttattcgtgctcttcactctggaggaattctagagaaggccttttgcactgaaactcgtccatttaaccagggttccaggcttacagctttcgagttagttcacgacaaaatacccgcaacgctgatagcagattctgctgcagctgcactgatgaagagcgggtgt

SEQ ID NO: 397964 - DNA, 452 bp, Oryza sativa nipponbare
ccacgcgtccgccctttctgaacacagcaccaccccttctgctgcatctcccacctccctctgaattgtgggcctgaggcgatggcggcgctcgccccgtccaagatgctcggcacccggctcaacttcgccggctcctcccgctacgccaccgcggcaccgaccaccggagcgcagaagatcgtctccctcttcagcaagaagcccgccccgaagcccaagcccgccgccgtcacctcctcgagccccgacatcggcgatgagctcgccaagtggtacggccctgacaggaggatcttcttgccggagggtctcctggaccgctcagaggtgccggactacctcaacggagaggtccccggagactacggctacgacccttttggccttagcaagaagccagaggacttctccaagtaccaggcctatgagctgatccatgccaggtgggc

SEQ ID NO: 397965 - DNA, 401 bp, Oryza sativa nipponbare
ccacgcgtccgcgctcatcgccatctctctcagctctcacagctcactgcatcaatggccgcggccaccatggcgctgtcctccccggtgatggcccgcgcggcgccgtcgacctcctccgcgctcttcggcgaggcgcggatcaccatgcgcaagaccgccgcgaagcccaagccggcggcgtcgtcggggagcccgtggtacggcgccgaccgcgtcctctacctcggcccgctctccggcgagccgccgagctacctcaccggcgagttcccgggcgactacgggtgggacaccgcggggctcttcgccgacccggagacgttcgccaagaaccgggagctggaggtgatccactcccggtgggcgatgcttggcgcgctcggctgcgtctttccgga

SEQ ID NO: 397966 - DNA, 295 bp, Oryza sativa nipponbare
ccacgcgtccgcccactcgtccgcacacaccccaccagctgcatcttcagtagctgagcttgaagcagcagggcgaggtagacatggccgccgccaccatggccctctcgtccccggcgctggccggcaaggccgccgcgaaggtgttcggcgaggggcgcatcaccatgcgcaagtcggcggcgaagcccaagcccgccgcgtcggggagcccgtggtacggcgccgaccgcgtgctctacctcggcccgctctccggcgagccgtcgagctacctgaccggcgagttccccgg

SEQ ID NO: 397967 - DNA, 449 bp, Oryza sativa nipponbare
ccacgcgtccgcgccgacgacccggaggccttcgcggagctcatggtgaaggagatcaagaacggccgcctggccatgttctccatgttcggcttcttcgtccaggccatcgtcaccggcaagggccccctcgagaacctcgccgaccacctcgccgaccccgtcaacaacaacgcctgggcctacgccaccaacttcgtccccggcaagtgagcgccgccgccgccgtgctgccatggcgacgcatcgccttcagctaagctagctaggttgacgacgatgcgcgtctctgcaggagagtgtgcgtgtgtgtacgcggtgcattagatgtacgtacgtgtaccgtatagatgtacgtattcgtgtggaccgcgtggatggatgtacgagtattggagagagggtgagatctgtaccggtagtgtgtatttctgtgcaggttctgaacc

SEQ ID NO: 397968 - DNA, 343 bp, Oryza sativa nipponbare
ccacgcgtccgcagcagcagcagtagctgagcttgaagcagcatatcgaggtagacatggccgccgccacgatggcgctctcgtccccggcgctggccggcaaggccgccgcgaaggtgttcggcgaggggcgcatcaccatgcgcaagtcggcggcgaagcccaagcccgccgcgtcggggagcccgtggtacggcgccgaccgcgtgctctacctcggcccgctctccggcgagccgccgagctacctgaccggcgagttccccggcgactacgggtgggacaccgcggggcttttcgtcgacccggagacgttcggcaagaaccgtgagctggaggtgat

SEQ ID NO: 397969 - DNA, 431 bp, Oryza sativa nipponbare
ccacgcgtccgcgccgaccgcgtgctctacctcggcccgctctccggcgagccgccgagctacctgaccggcgagtggccccggcgactacgggtgggacaccgcggggctctccgccgacccggagacgttcgccaagaaccgggagctggaggtgatccactccaggtgggcgatgctcggcgcgctgggctgcgtgttcccggagctcctcgcccgcaacggcgtcaagttcggcgaggcggtgtggttcaaggcggggtcgcagatcttcagcgagggcgggctcgactacctcggcaacccgagcctgatccacgcgcagagcatcctcgccatctgggcggtccaggtggtgctcatgggcgccgtcgaggggtaccgcatcgccggcgggccgctcggcgaggtcgtcgacccgctctaccccg

SEQ ID NO: 397970 - DNA, 332 bp, Oryza sativa nipponbare
ccacgcgtccgcaccatccaccatctgaaactcgtgcttttcatcttctagaaccccaactacctgacctagtaattcccccgcaactacttgccccacacctcgctgctcttcaccgaccctgaaaccttcaccaataacctcatgctgaaagtgatccaatccaagtgtgctatactcggcgcgctggacttacttttcccgaagcttctcttccacaacagtttcatcttcttcgagagcgtatggttcaatagcggtgtatcaatattttaactagatctgactctactacctcattaaccctaacctgttccacacacatatcattc

SEQ ID NO: 397971 - DNA, 446 bp, Oryza sativa nipponbare
ccacgcgtccggccgccctgctcgtgctgcattcgctagccacgccgtccgctcaggccgaggcgcatcgcgcagggggagaaggggaggagaagatgtcgagcgacggagggccggtgcttggcggcgtcgagccggtggggaacgagaacgacctccacctcgtcgacctcgcccgcttcgccgtcaccgagcacaacaagaaggccaattctctgctggagttcgagaagcttgtgagtgtgaagcagcaagttgtcgctggcactttgtactatttcacaattgaggtgaaggaaggggatgccaagaagctctatgaagctaaggtctgggagaaaccatggatggacttcaaggagctccaggagttcaagcctgtcgatgccagtgcaaatgcctaatgcccatctcgtatcctatgtgtatcaagttatcaagaagat

SEQ ID NO: 397972 - DNA, 284 bp, Oryza sativa nipponbare
ccacgcgtccgcccacgcgtccgcagcttcatcgcctactagcccccgggctgcgaggagtctggtggcaagtaagccgtcatcgtcatatatagccttgtttaattgttcatctctgattcgatgatgtctcccaccttgtttcgtgtgttcccagtttgttcatcgtcttttgattttaccggccgtgctctgcttttgtttttgtttcacctgatctctctctgacttgatgtatgagtggtttctgcttctactatatatttgttgggtgttgtatattt

SEQ ID NO: 397973 - DNA, 195 bp, Oryza sativa nipponbare
ccactcgtccgcccactcgtccgatccaactctgaggatgcaaatccagcagtgcaactggcaaatgatgagtgtcacaactcctgcatactatttccatgtcctgcgtcgccagattcaccgtgacttcataaagcctttgattgttatgtctccaaagaatctccttctacacatggactgctaatcgaatct

SEQ ID NO: 397974 - DNA, 439 bp, Oryza sativa nipponbare
ccacgcgtccgagaagaaagaagaagaagaagatgcagaccgctgctagcagtgtcgttggattgtcggccgtgttgcccgctgctgtgaaggggcgcagcctgcagattcaggctcctcgccgtgttgcgttgcgcgttcgtgcggcggcggcggcggtggcagtggaggctgcggaggtggactacagctctaacatctcggtgtttccgatggaggcgtgcgacctcatcggcggcgaggcgtgcaacgtgcagatgtacccagaggccaagctctcatcatcggctgctgttgctgtttctcgtgcggcggcggaggaagtcgacagggactacctatcctacgacgagcccaccacggtgttccccgaggaggcgtgcgacgatctgggcggagagttctgcaaggccacctgatcccattcccatccatggag

SEQ ID NO: 397975 - DNA, 164 bp, Oryza sativa nipponbare
ccacgcgtccgctcacgcgtccgagacacgactcaccaatggcgctcgtctcctcctcctcctccaccaccggcgtcgggtcgctccccggcgccgtcagggcctcctccttcctcggcggctccggcaggagcggcaggctgctgctgaggcaggccgagtca

SEQ ID NO: 397976 - DNA, 402 bp, Oryza sativa nipponbare
ccacgcgtccgcgccaccaacggcgtcgacatctccgtcgccgagggcgacgccgtcggccccggcggattgctcggcttcgtcggcaacctcctcttccccttcctcgctttcgctggcctcttcttcctcttccgccgcgcccagggcggccccggcgctggacctggcggcctcggcgggcccatggacttcggccgctccaagagcaagttccaggaggtgcccgagactggcgtcaccttcgtcgacgtcgccggcgccgaccaggccaagctcgagctgcaggaggtcgtcgatttcctcaagaaccccgacaagtacaccgcgctcggggccaagatccccaagggatgcctgctcgtcggcccgcccggaaccgggaagacactgctggcgcgt

SEQ ID NO: 397977 - DNA, 452 bp, Oryza sativa nipponbare
ccacgcgtccgcccacgcgtccggcaggacgagatgaagctgtgcctgctgctcaacgtcatcgaccctaagatcggcggtgtcatgatcatgggagaccgtggcaccggcaaatccaccaccgtccgctcgctcgtcgacctgctcccggatatccgcgtcgttgttggcgaccctttcaattccgaccctgacgatcccgaggtcatgggccctgaggtccgggaacgcgtgctggagggtgagaagcttcctgttgtcacggccaagatcaccatggtagatcttccccttggtgccactgaggatagagtctgtggcaccattgatattgagaaggcgctcaccgatggtgtcaaggcgttcgagcctggtttgcttgccaaggccaacagggggattctttatgtggatgaggtcaatttgttggatgaccatctagtagatgtgct

SEQ ID NO: 397978 - DNA, 316 bp, Oryza sativa nipponbare
ccacgcgtccgtggacgcgtggggccgtgcgcgccgcttcgcccttcaggccaatctggttccccggcagcggcccgccgccgtggctcgacagcagcctccccggcgacttgggcttcgaccccctgggtctcggatcggacccggagagcttgcggtggaacgtgcaggcggagctggtgcactgccggtgggcgatgctgggcgcggcgggcatcttcatcccggagttcctgaccaagatcgggatgcttaacacgccgtcgtggtacacacggccgagagcagcaatactttaccgacaccaccaccctct

SEQ ID NO: 397979 - DNA, 426 bp, Oryza sativa nipponbare
ccacgcgtccgcccacgcgtccgacccgcttcgcttcctcccctctctaagccggggaagctaagccatggcgtccgtcaccgcccgcaccccggtcgcagccctccgctcgtcggcgtcgctcaagtctaccttcctagggcaatcctccacccgcctcgcccgcgcaccgactacgaggcgtaatgttcgggcggaggccaagggagagtggctccccggcctcccttctcccacctacctcaacggcagcttgccaggcgataacgggttcgacccgttgggtctggcggaggacccggagaacctgcggtggttcgtgcaggcggagctggtgaacgggcggtgggcgatgctggaggtggccgggatgctgctgcctgaggtgctgacgaagatcgggttgatcgacgcgccgtagtggtt

SEQ ID NO: 397980 - DNA, 398 bp, Oryza sativa nipponbare
ccacgcgtccgccaacatcaacaggttcaaggtgatggccaaggagctggacgagggcaagcagaccgaccaggacaggtggaagggtctcgcctacgacatctccgatgaccagcaggacatcaccagggggaagggtttcgtcgactcccttttccaggctcccacgggtgatggcacccacgaggccgtcctcagctcctacgagtacctcagccagggtctcagaacgtacgacttcgacaacaccatgggaggcttctacatcgcccctgctttcatggacaagctcgtcgtccacatctccaagaacttcatgacccttcccaacatcaaggtcccactcatcctgggtatctggggaggcaagggtcagggaaaatccttccagtgtgagc

SEQ ID NO: 397981 - DNA, 315 bp, Oryza sativa nipponbare
ggccaacataccgacgaggacggggggaagggtcttgcctacaacatatcccatgaccagcaggacattaccagggggaagggtttaggcgactcccttttccaggctcccacgggtgatggcacccactaggccgtcctaagctcctccggtaccctaaccaggggtttagaaccttccaatttcgccaacaccctgggagggcttatacattggcccttgctttatggacaagctcttcatttccattcttcaaaaaccttaatgtacccttcccaacatcaaaggtcccacttcattcctgggttatctggg

SEQ ID NO: 397982 - DNA, 438 bp, Oryza sativa nipponbare
ccacgcgtccgcccacgcgttcggcaggacgagatgaagctgtgtctgctgctcaacgtcatcgaccctaagggcggcggtgtcatgatcatgggagaccgcggcaccggcaaatccaccaccgtccgctcgctcgtcgacctgctcccggatatccgcgtcgttgttggcgaccctttcaattccgaccctgacgatcccgaggtcatgggccctgaggtccgggaacgcgtgctggagggtgagaagcttcctgttgtcacggccaaaatcaccatggttgatcttccccttggtgccactgaggatagagtctgtggcaccattgatattgagaaggcgctcaccgatggtgtcaaggcgttcgagcctggtttgcttgccaaggccaacagggggattcttatgtggatgagggcaatttgttggatgaccatc

SEQ ID NO: 397983 - DNA, 353 bp, Oryza sativa nipponbare
ccacgcgtccgggagcggctgttcaacgcccatatcaattagcttctcaaccacgaggagttcggcgcgctgctgcaggagttcaagacggactataaccacacccacttctttcgtaaccacggagttcaaggccgccggcgacaagatgtgggggcctctcaagcagatcttagtggagttcctcgagcgctcctgcaccgtggagtcctccgggttcctgctctacaaggagctcggccacatgctcatgataacaaacccagtggtggttgacatctttctagcttatgtcctgggcatgaagcccaggacgctgggttctttaacaatatccttttttgacttatact

SEQ ID NO: 397984 - DNA, 377 bp, Oryza sativa nipponbare
ccacgcgtccgcttctcttatatggtggtgtgggtgtgtacatgtttcacgtttacttactcctgtactcggggctactcttttcccatctctcacaagagagagagcgccatactctccccaggtgaggattcagccatgaagggggccaaatccaagggcgccgacaagcccgacgccaagttggctgtgaagagttagggcgcggagaagcccgccgccaacggcacgaaggggaaagccggcaaggaccccaacaagcccaagagggctcccttcgctctcttcgttttttatggaggagttccggaaggagttcaaggagaagaacccccagaataaatctgccgctgctggaagaaaagcagcccgtgata

SEQ ID NO: 397985 - DNA, 451 bp, Oryza sativa nipponbare
ccacgcgtccggcacaagaaagcataagcaacacaagggattaactcatcactcacttagctaattaaatcgtcgacgatgtcggacaagtgcggcaactgcgactgtgctgacaagagccagtgcgtgaagaaaggtaccagctatggcgtcgtcatagttgaagccgagaagagccacttcgaggaggtcgccgccggcgaggagaacggcggctgcaagtgcggcaccagctgctcctgcaccgactgcaagtgcggcaagtgaagtcacgaagcaaccgaacactcgccgccggcgagtcacctaccttaattagtccacaataaaaaccacccatatgagtgtggtttgtgtgtgtgctgattattgctgaattaaacccgtgtgttatcgattaattaagcagctggtcgcttcggcgactatgcgtgtattaacgtatgaattt

SEQ ID NO: 397986 - DNA, 402 bp, Oryza sativa nipponbare
ccacgcgtccgagctagtgggaatagaaagctggattctgcttattgcttggtccaaagaaaaagaagactgtggcccggtttttctatttttctgggttaatggcagtggtcacttctgtggtgtagctgagaatgattgcacccgtcgattttgacaaaagtgtcccttattgaccccatgacaagtggtgtggccagttccctgtgacggggcacattattaaggatgcccctgacaacctgctgctgcacatcattcttgagaacaatgacaacaaacctgcaactaatagcagggacacccatgaggtgaagctggcacatggtctgccaacgttatctatcttgaaggaccatgaaccggagacgaacattcttgaagactttgacttctatgaac

SEQ ID NO: 397987 - DNA, 408 bp, Oryza sativa nipponbare
ccacgcgtccggtgcgcaagtgggtgtcggacacgggtgtggagaacatttgcaagaggctggtgaactcgggggagggcccaccggagttcgagcagcccaagatgacgatcgaaaagctcatggagtacggatacatgcttgtgaaggagcaggagaacgtcaagcgtgtgcagctggctgagcagtacttgagcgaggctgctcttggtgacgctaactccgacgccatgaagactggttccttctacggttctgcgccatccagctgaataaaagatctgtagctattcgcatcccatcgatgcatcgtaggcggcctgcataggaggaggagggcaaggagcacagcaagcatgtaacctgcctgtgcctgaaggttgcaccgtccttgtttgcaagaacttt

SEQ ID NO: 397988 - DNA, 454 bp, Oryza sativa nipponbare
  unsure (1)..(454): unsure at all n locations
ccacgcgtccggagagaaagtcggagagatacacccntgtggatttcatttgtaagaggctggtgaactcagcggggggcccaccggagttcgagcagcccaagatgacgatcgaaaagctcatggagtacggatacatgcttgtgaaggagcaggagaacgtcaagcgtgtgcagctggctgagcagtacttgagcgaggctgctcttggtgacgctaactccgacgccatgaagactggttccttctacggttctgcgccatccagctgaataaaagatctctagctattcgcatcccatcgatgcatcgtaggcggcctgcataggaggaggagggcaaggagcacaacaagcaggttacctgcctgtgccggaaggttgcaccgaccctgttgccatgaacttcgacccaacggcgaggagcgacgacggcagctttctttacacctttt

SEQ ID NO: 397989 - DNA, 222 bp, Oryza sativa nipponbare
  unsure (1)..(222): unsure at all n locations
ccacgcgtcctcgtgacgcgtgggcgagtacctgcttctatccaattttttgccttgcctcnagttcagcaagattggattcaactaccgggataaccacacctcttcctggtactactatggcatgtattgtgaccatatggaagctttccattttctgctgcaccgattccacccatattcttaaggagcttgaagaggtcaatatatcttaccttcttt

SEQ ID NO: 397990 - DNA, 223 bp, Oryza sativa nipponbare
ccactcgtactcggacgcgtgagctttgatcttcccaatgatatttattattacctacacagaattgggaagacagtgaggtcacaaaaaagtgatcctgcaactgatttattaaatgaaaatcactattccatgcccaggtctttacctgaactaattcatgaatgtaatcaagaggtacctccgcggatgcctcggtatcctcgtcggccatcctatggtg

SEQ ID NO: 397991 - DNA, 426 bp, Oryza sativa nipponbare
  unsure (1)..(426): unsure at all n locations
ccacgcgtccggcgagtgcgcggcggcgtgggacgaggtggaggagctgagcgcggcggcgagccacgcgcgcgacaagctcaaggagacctccgacccgctcgaggcctactgcaaggacaacccggagaccgacgagtgccgcacctacgacaactgattcttaccattatatgtttgctaatctctctgtaattaattataagttactgggttgaaaagattatttgtcgtagaagacagaggggagtttggtggaatggtggtatttacggatagttcaagggggaaatgggaaaaaaaaggttttttacacttgtttgtctggatgaatttgtatggaacttttctgcttgaaaattntcgcatgtgttagtatttgtatatgatgatataagggggaaataaatcatcaaattttccaac

SEQ ID NO: 397992 - DNA, 450 bp, Oryza sativa nipponbare
ccacgcgtccggcaaaagaagaagaagaagaaagaagaagaagaagatgcagaccgctgctagcagtgtcgttggattgtcggccgtgttgcccgctgctgtgaaggggcgcagcctgcagattcaggctcctcgccgtgttgcgttgcgcgttcgtgcggcggcggcggcggtggcagtggaggctgcggaggtggactacagctctaacatctcggtgtttccgatggaggcgtgcgacctcatcggcggcgaggcgtgcaacgtgcagatgtacccagaggccaagctctcatcatcggctgctgttgctgtttctcgtgcggcggcggaggaagtcgacagggactacctatcctacgacgagcccaccacggtgttccccgaggaggcgttcgacgatctgggcggagagttctgcaaggccaccttgatcccattcccattcat

SEQ ID NO: 397993 - DNA, 448 bp, Oryza sativa nipponbare
ccacgcgtccgcccactcgtccgcccacgcgtccgagagagcttctcatttctttcaagagggcaactggacagaaaccccagaggattatattttacagggatggtgtcagtgaaggacagttttatcaggttctgttttatgagcttgatgccattagaaaggcatgtgcatctttggaagccgattatcagccacccgttacctttgtggtggtccagaagcgtcatcacacaaggctgtttgctaataaccacaaggaccagcgcactgttgacagatgtggaaatatactaccaggcaccgtggttgattcaaagatatgccatcctactgagtttgatttctacctgtgtagccatgctggcattcagggaacaagtcgccctgcacattattatgttctgtgggatgagaacaagttcactggtgttggtttgcaaacttt

SEQ ID NO: 397994 - DNA, 401 bp, Oryza sativa nipponbare
ccacgcgtccgcccacgcgtccgcggacgcgtgggcgtcgctcaataagtacgcgccggactccgggcgggcgctcgccatcaacgccaccatcgagaagacgaagcgccgcttcgagaactacggcaagttcggcctgctctgcggcgccgacggcctcccgcaccttatcgtcagcggcgaccagcggcactggggcgagttcatcaccccgggcttgctctgcctctacatcgccggctggatcggctgggtcggcaggagctacctcatcgccatcagcggcgagaagaagcccgccatgtgggagatcattatcgtcgtcgagctcgccgtcaagctccttccgagggggtaaatctggcccgtcgtcaggctaccgtgggctcatcatcggttac

SEQ ID NO: 397995 - DNA, 399 bp, Oryza sativa nipponbare
  unsure (1)..(399): unsure at all n locations
tcgaacattagcccaaatttaatttttcaagggaaagaaacattttcttcaatctctttttcaatgactaatgataagctagatgatcagagtttatgttccctaccagctatcgatgtaaaattgcagctgatctaacgtgtctagtacatctgctcaaggggagttagcagaaaaactagaccatcagagtatgttaacctagaatcacatgttagatgccttggcaaatcgtgagaatcttgagaatttgtcatccacaagaacctctgggtttccttcttcaaccaattttccttgatcaagaactagaatactgtccatcttcatcactgtntgaaattcatgtgctatcgtcagaactgtcatgcctttgcattcagcagaaatagattttgc

SEQ ID NO: 397996 - DNA, 321 bp, Oryza sativa nipponbare
aggctaatgatgcgatagtaatttggccacattagagtagctgctggtagcaaaaaggttgacataatagttatctttcacagtaccacatcgattgaaaggagaatacttggaggcgcgacagtttcctacaatcaaaccagaccaaaacattatactgataaaacagcctactcgtcctcctggctacggagccttgcaagcttgttggtgaccacgatgtcgagctgcgcagcacgctcaacgatctccttgcgcttcttcgtaaagacgttgtgggcaatctcggcacagtaggtcctgttgtgcatcatgagcaac

SEQ ID NO: 397997 - DNA, 299 bp, Oryza sativa nipponbare
tcatcctaacatcgtggccgtccttctcttgttttattaaaagttttttttttacgattacacgatagatacatggtatgtgggttctaaacttttattatcctcacacgttagtacatgtaataatagcgttattatggtaaaggatgtgaacacgtccactacacacgctgacttaacctgccacggtttcaccgatctcaatgcatttcaccgctccaccggaaattccctctgcccctaccgtactccagcttggtagtttccaccgcctgtccagggttgagccctgggatttg

SEQ ID NO: 397998 - DNA, 331 bp, Oryza sativa nipponbare
ggaagaatacaacaaatcaatagcaattaccaattttgttctgctcttggtaagataacacaaaatccatggcaaagaacagcacagcttgtgcaatttcaactacaaaatgaagctttgttaagagtgaaagcatgattccagtatcttgggccgttcggcggtagagggcttggttggcatgggatgggagtaggcgaggtggcccaggtcgcccagctgcacggacagggccgggtcggtgccacccaggaaatgggtgaccaggttcgactttcgcgtttttggggatgtcgtccgactggcggccaccaacaacttcactggcacc

SEQ ID NO: 397999 - DNA, 448 bp, Oryza sativa nipponbare
gaagtgataatttaaatacttaatagtaatagactctttgatggagtattacaacatgcagcagtggcattaatacgccagtacattaattaagttacacatatgcaggctccattttggtttcttttaatttatcgtattacagaatttctgtagccttgctgatgatcacttggatatcatgtactagtaattaacaataggatgcatacaaaagatggcccaacgacaacagaagatgcgtgcatctgacattgtctggccttatttggttggtagtactccaattaattaacaagagatgatgcattcttgtgccttagtttcttcacatgcttggcttcacgttgagcctattcgcaatcttcacccccaacgactcatcacactgggagaggtgttgacccagatggggcggagctcaggggagacccttgggtgcgcgagc

SEQ ID NO: 398000 - DNA, 286 bp, Oryza sativa nipponbare
tgaatcatacgtaagtgcttgctgatacaatatcaacatggagggtacattgccggttccatatgaacaaacataaaaacaccgaaaccccatatggccattatgccgatcctagcctagcttggcgaggacatcgccaagagcagatttggtcaacgtgtagtacttctccgccttttcggggctcttgatcttggctgcatggtcaagcccgtcaatggtggccaaaagcttgccggtgaggtccttgaggcccttttttttgttcttgggcttggagttgatg

SEQ ID NO: 398001 - DNA, 161 bp, Oryza sativa nipponbare
aggattcacatccatctcgtaccctttgtataaatatatatagccggagcttccatatatttcattcacatatgcctcacccaacaacatatagtcgtagcagataccactcttacatcaagtctgagagagatcaggtgaaacataatctttagcagagc

SEQ ID NO: 398002 - DNA, 393 bp, Oryza sativa nipponbare
  unsure (1)..(393): unsure at all n locations
ttgggggaaacaacgtaaggtattgataattatgtttcctgaggtaaggtatatccaacaaacacaaaatgctgggaagttattcaaacgatttccagcatctctataaaacattggtctcttacatttcgagtggttgaagaggtgcgagaaaggagtagaatatagcaagtttagaatggtacatgaagaagatgcaacaaaatgaaacttagcctcatacggccacagtgacagcttcatcaagtgcaatgactccaggaagttcctttccttccaacagctccaagctagcaccacctcccgttgaaatgtggctcataacatctgcaactcccaccttctcaacagcggcaacagaatcacctcctncaataatggttgtaacaccct

SEQ ID NO: 398003 - DNA, 363 bp, Oryza sativa nipponbare
gtataaatatatatagccggagcttccatatatttcattcacatatgcctcacccaacaacatatagtcgtagcagataccactcttacatcaagtcagagagagatcaggtgaaacaaaaacaaaagcagagcacggccggtaaaatcaaaagacgatgaacaaactgggaacacacgaaacaaggtgggagacatcatcgaatcagagatgaacaattaaacaaggctatatatgacgatgacggcttagttgccaccagactcctcgcagcccgggggcttgtaggcgatgaagctgatgagctgcacctgcctgacgttgtcgaagccgatgatacggacgaatgcatcagggtacgcc

SEQ ID NO: 398004 - DNA, 350 bp, Oryza sativa nipponbare
ttttcaaattcaaaaaccacgatttataaagtgccggagatgaagtacacaaattaacattacatcgagttttaataaaacatcatgcgaaaagccagcaaaaacaaaaggcagcatacagctaatgaagctctactggagtagctcgcaaaaggtccgacttattttcagtagcactctactccatttcttccgaaagagtgaccatcttctactgggtgttgtacatgtgacggatcaggtcaacaacgcgagagctgtatccccattcgttgtcataccaagacacaagcttaacaaagttgtcattgagagcaataccggcctttgcatcaaagatgcttgacctg

SEQ ID NO: 398005 - DNA, 262 bp, Oryza sativa nipponbare
tttttgatgaaaaccacttcgagacaatttactcaggtagcaaatatttctcagccacaaatccaaacacttggtccttcctatcagaagatcagaatgaacaggttttcaaattcatctcccaactcgacgataatttacacgtacatttaacacattcttccacccttctcaaactcctcccttcttcttcccgggtaagattaaaattaacttgaggccagccagcgtcgccggcggcgagatgtttacaggctgggcg

SEQ ID NO: 398006 - DNA, 402 bp, Oryza sativa nipponbare
ttgccacaatataaacaatttagactacatatttacactatacatagccagaaatggttatattttgggatcgagggagtatttgtttccgatctaatagagatgagaaatccgctaatcagaataacaccacggataagtacctagaccattagttgggaaacgaataaaatcattattgcaaaaacatcatcttcttcttcatcttcttagtgtacacaacaccaactcgatcatcatctcgtcgcactaaacccatcttccccaacccaaagacaacgaactcgctggccacaaatccatccaaccacaattaaccactgctaagctacggtcccccacttcacttgccggggacgaagttggtggcgtacgcccaggcgttgttgtgacgggtcggcg

SEQ ID NO: 398007 - DNA, 406 bp, Oryza sativa nipponbare
  unsure (1)..(406): unsure at all n locations
actggagtagataataaaccgtacacggtacagcacgccgcacaagctatcaagtaccacacgaggacagccgacaaagatacatggccgtacgtgcaacagcacgccacaccaactgacaattatccaaggtgacgagacgacgacgacggagcttaatttattcaggtagaaaacgcgagctgagtagctgaccatgcacgcactgatcactacgaacacgactaaaccttactgacaccgacccggtnaggggtgctgtggtacacacgctatcaagcgatggcaatgcggttaggggtctcgttctccatggccttgaacgcctcgaaccggggctccttggcctcgaacttgtggcgcacgtacagcttcatgtagtcctcgaacacgaacttgggatacg

SEQ ID NO: 398008 - DNA, 156 bp, Oryza sativa nipponbare
acctagaccattagttgggaaacgaataaaatcattattgcaaaaacatcatcttcttcttcatcttcttagtgtacacaacaccaactcgatcatcatctcgtcgcactaaacccatcttccccaacccaaagacaacgaactcgctggcacaaa

SEQ ID NO: 398009 - DNA, 231 bp, Oryza sativa nipponbare
ggaattaaatattatatagtatataactgagagaaattatcaaagtgatgttgatgaagaatatttgtcgaggaaacgtacttccgaaagatggcagaggctatctgattaatatgatccgttctcaacgcagcccacgatacatgcccacgcgaatccgcgggctacctttctagttggctttaaaatcgctacccacaaattatcattgttttggctaatacaccatac

SEQ ID NO: 398010 - DNA, 326 bp, Oryza sativa nipponbare
  unsure (1)..(326): unsure at all n locations
ataattaattcacaacaccatatttcattgatcaggttcagaacctgcacagaaatacacactaccggtacagatctcaccctctctccaatactcgtacatccatccacgcggtccacacgaatacgtacatctatacggtacacgtacgtacatctactgcaccgngtacacacacgcacactctcctgcagagacgcgcatcgtcgtcaacctagctagcttagctgaaggcgatgcgtcgccatggcagcacggcggcggcggcgctcacttgccggggacgaagttggtggcgtaggcccaggcgttgttgttgacggggt

SEQ ID NO: 398011 - DNA, 252 bp, Oryza sativa nipponbare
taattcacaacaccatatttcattgatcaggttcagaacctgcacagaaatacacactaccggtacagatctcaccctctctccaatactcgtacatccatccacgcggtccacacgaatacgtacatctatacggtacacgtacgtacatttactggaccgggtacacacacgcacactcttctgcagagacccgcatcgtcgtcaacctagctagcttaactgaaggcgatgcgtcgccatggcagcacg

SEQ ID NO: 398012 - DNA, 403 bp, Oryza sativa nipponbare
taattcacaacaccatatttcattgatcaggttcagaacctgcacagaaatacacactaccggtacagatctcaccctctctccaatactcgtacatccatccacgcggtccacacgaatacgtacatctatacggtacacgtacgtacatctactgcaccgcgtacacacacgcacactctcctgcagagacgcgcatcgtcgtcaacctagctagcttagctgaaggcgatgcgtcgccatggcagcacggcggcggcggcgctcacttgccggggacgaagttggtggcgtaagcccaggcgttgttgttgacggggtcggcgaggtggtccggcgggttctcgagggggcccttgccggtgacgatggcctggacgaagaagccgaacatggagaacat

SEQ ID NO: 398013 - DNA, 340 bp, Oryza sativa nipponbare
tttcaccaaacatatactacaatattataagaagagattatatcccaccatcgatcgattacaccatcatcaataactgaagagcagcctgacagatgattaaaattacatgtccatccacccaaaacacaagtaattaataggtcgattatgagagaagaagaagaagaagaagaagtctagatgtcgaagacgttcttgccggtgaacttgacctcgatggggctgacgttcttgccgatgctgcggaagttctggccgacgccctgcctgccggcgttgaccttctccgggtagacgcccgcccttggggtagggtactgcacctcgccattgggga

SEQ ID NO: 398014 - DNA, 258 bp, Oryza sativa nipponbare
  unsure (1)..(258): unsure at all n locations
tataattaattcacaacaccatatttcattgatcaggttcagaacctgcacagaaatacacactaccggtacagatctcaccctctctccaatactcgtacatccatccacgcggtccacacgaatacgtacatctatacggtacacgtacgtacatctactgcaccgngtacacacacgcacactctnctgcagagacgcgcatcgtcgtcaacctagctagcttagctgaaggcgatgcgtcgccatggcagcacg

SEQ ID NO: 398015 - DNA, 396 bp, Oryza sativa nipponbare
gtcctgaaccctgatcattgctaaaggtcgaataaacaaatacggtatttacacacggaattgacatgctggcgtttcttacacactacactatccaattatacatcttatgttacaagtaagaggatatatttcactgtttgagcgaagttgtaactacaatagatacaatatgccctgtggaatatttacaacatacatacgccaaaatacttaaatcttgaagaccacaagcacaaaatgggtagagaagatcagtccttggtgcgagaggaccgctcccgctccttcttctgaccaccaagaatccgagagatttgcagtcctctactgaacgcttgattaaatagcatccgtgtctgaaactcggacacaaagggaaaccatgccaaaata

SEQ ID NO: 398016 - DNA, 282 bp, Oryza sativa nipponbare
gtagtaacagggacttttattgcaatatttgtagttaatacaccttgcaatcattcttacttagtactaatacacattgaaatatgccataggtaaaatctttaatagctatatatccaagccatattatcgtgtgagatccttatatccaagccatattatcatgtggataattaacatgtccaatagctatatccacaccatattattccccatcttcttgataacttgatacacataggatacgagatgggccttaggcatttgcactggcatcgacag

SEQ ID NO: 398017 - DNA, 319 bp, Oryza sativa nipponbare
aaatatatatagccggagcttccatatatttcattcacatatgcctcacccaacaacatatagtcgtagcagataccactcttacatcaagtcagagagagatcaggtgaaacaaaaacaaaagcagagcacggccggtaaaatcaaaagacgatgaacaaactgggaacacacgaaacaaggtgggagacatcatcgaatcagagatgaacaattaaacaaggctatatatgacgatgacggcttagttgccaccagactcctcgcagcccgggggcttgtaggcgatgaagctgcggacgcgtgggcggacgcgtgg

SEQ ID NO: 398018 - DNA, 223 bp, Oryza sativa nipponbare
ggctatataagagcaagttcaatagtatagccaactactagctccaattcatctatagtcaatctaatagcccattcatacaatagttacatactacactattaatatctagtcccacctgtcatagacacactgggttttggagtccgggcttcaactggcttcaaatttgtagcccggtggtttttttttttttgatttatcttcggaaaatatggttgga

SEQ ID NO: 398019 - DNA, 457 bp, Oryza sativa nipponbare
ttgctttcatgccaatattgattgatgattcctaatgttgctaaataactcatctcaagagtttactgactaaatatggcaagccaatacactggtgtttcctttatacaataaataaaagcattaatagttgcatagcatactttaaagtcaaacggaaaaaggtatgttcctcttcaggcatttttcaatgccgaggtgagaagggtgaagatcttaggcaaaacatcaccgtgctagagttgataatgtaaatgaattcagggtacacaaccaagaaagaagacggtattcagtgaatcaggcaggtaattgtgtctacacaattattctaatatgtttgtattcctctttaccttcaatgaagctccactgacaagaaaaccattaagatcaggttgtactgcagttccttgcgttcgaagcagacaggacctgcatagatgattcatgtgga

SEQ ID NO: 398020 - DNA, 290 bp, Oryza sativa nipponbare
tcagtgatgaagagaacttcacttctaaaagagtatcaacttgttttttacatcggttacatcatagtacaggtacacaatcaacaaggcatgcagtgctccatccacaattacatcccaatacaccaccaccattcacagcctactccgatcccaaaaaagagaggtaagtcgcgtcgacgaacagtcttttcatcttcctccattggcagccattgctaacactccaacacctgaagaactcctcatttgggggtgaaagcctggaaaatggtggcgtggccggggtc

SEQ ID NO: 398021 - DNA, 332 bp, Oryza sativa nipponbare
agcggtgctataatcgtaagcaccaactgtttacttgatcaatgtcagtatttgccattctttacaatgaactatacaagtatatgcaaaaacatctcgcctaaattgatgtgcttcctacaaattcgccttctccatttcacccaaggggatgaacatacaacgcaattaagcgacaaacaactctgcctgaccgtcgatgaacaggctcatgaactcttccccgtccaccgtctccttctccatcagaagctgagcaagcttgtggaggatgtcgatgtgtgtcgtgatgatctgcgttgctcttgagtaggccttctccacgagctccc

SEQ ID NO: 398022 - DNA, 291 bp, Oryza sativa nipponbare
ggaagaaaaatttaacatctcttaaatttatcttcttgaacagacacaagcacagatcacaaggttcaacgacaccaccatagattaaatcaacagcattagactactaacagacacacatcccgtccaatctactccagctaaacaagcaaagcgaggcgccgacgcctaggccttcttgggggacttcccggcggccttcttgggcgacttggcctccttgccggcggcggcggccttctccgccgtctttttgggcagcaacaccgggttgatgttgggcagcacgcc

SEQ ID NO: 398023 - DNA, 363 bp, Oryza sativa nipponbare
ggctggaaaatttgatgatttatttcccacttatatcatcatatacaaatactaacacatgcgaaaattatcaagcagaaaagttccatacaaattcatccagacaaacaagtgtaaaaaaccttttttttcccatttcccccttgaactatccgtaaataccaccattccaccaaactcccctctgtcttctacgacaaataatcttttcaacccagtaacttataattaattacagagagattagcaaacatataatggtaagaatcagttgtcgtaggtgcggcactcgtcggtctccgggttgtccttgcagtaggcctcgagcgggtcggaggtctccttgagcttgtcgcgcgcgtg

SEQ ID NO: 398024 - DNA, 359 bp, Oryza sativa nipponbare
ttagcgagacacctgttataactttattaatatcaatacatgtcaggtaaagtctatgcagtgtgcatatgtgcattcacagtcacactcacttagtcaaataccaagatcgatcgatcgatgtacaagtggatgcattaattcatcatcttgggtgttcttatattacaaatcaccaccatgcaagtcgccattaaccaccaacccagctttcctaatttaagtagtaatcaacaaaaggatgacctttcctttctccataccctcccagctcgctcgtcatcacaaaactaaacagcgcgcgcgaacgcacaccaacccattgatcccgtttgaattgcgcgcgaaagagcttaaat

SEQ ID NO: 398025 - DNA, 402 bp, Oryza sativa nipponbare
acgaaccgtctgcaactcatagcaggcatttcgattgaaggggaataaaatctatactaatgatagatgtacaaatagacatcaagttcaagcctctgaaacaatgtcattaaactcaaacaaaagccctcctgccgaactttctgatagaaaaccatttacctccagaataatttaggtgaagacttcataaaacttctcaaccacgagcaatcctgagtcaattgattcaagtgggtccttccgaagccgatgcctcaagcagttggggataacagtggcaatgtcctctacagggacagtgtccctgcctcttgagtgctgccaacgccttggcagcccttgtagtcacaatgtcccctcttaatccatcaacattcaactctgcacacactttaaaaa

SEQ ID NO: 398026 - DNA, 512 bp, Oryza sativa nipponbare
atttacgatcgcaccgctggtattgcagcaaacttaacattataagtgagcctgctatgcgtgattatcattaacacagggtgctccttgtagggctcttacaacaccagggaattcaccatttcacctaggtggcctaaatgactatatgcctgaatcacctttaaacctatccaaattccaaagatacaacaatagcaggaaatgctaagtcgactagtttccgtaaatgacaccatttgggctcacaggagagccattgtgttgaagatcctcttcctcaacttctgacaagaaaccgttctcaaagaatgctgaatgaagggcctgtatacactgtttcgcctcgctatcatggaccaccaatgaaatgttcaccttggatgccccttgtgagatcatctggacgttaacgccatttctccgtagaacattgaaagccttctcaagaatcaatgacgatctctgtacattccctatcagtgagatgatagacctgtgctgcagtagat

SEQ ID NO: 398027 - DNA, 321 bp, Oryza sativa nipponbare
tttttagctagaacactgctgctaccatgagatagtttatccccctgtagtactgtacatcagaaattcaccactcaactcaccccctcacccatgcatccagatccatgcatgcaggaaacaattaccacaacacacacagtaagtctgaatctcatcacatccatctctctctctctcctccccccaattcattaacatcttatacatgcatactccacaaaaaaaaaaaaggagaaacaagaagagaacatcttccatcgcccaatcatcggtttcaccagccttgactcatcaagcttcttgagatgccctggccct

SEQ ID NO: 398028 - DNA, 237 bp, Oryza sativa nipponbare
gagggataaaatccattttgtaccctttgtataaaaatatttagccggggctttcattttttttatttaaatatgcctcacccaaaaacattttgttgtagcaaattccacttttacattaagtcagagagggatctggtgaaacaaaaacaaaagcggaaccggggttttttttttaaatttctgattataattttggtatattatttatagggtggttggtaattttttttttat

SEQ ID NO: 398029 - DNA, 382 bp, Oryza sativa nipponbare
gaaatatactcatgtatagtatagcccatatctttatattatattattattaacaaaaacttgtcatgcccagctatggcttgggcgcgatctgatacacagaacaaagagaaaacataaaaaggagaaataattaatagcaagcgtcaagccggcctgcttaaaaggtgtaaaggcagctgccgtcgtcgctcctcgccgttgggtcgaagttcttggcaacagggtcggtgcaaccttccggcacaggcaggttacctgcttgctgtgctccttgccctcctcctcctatgcaggccgcctacgatgcatcgatgggatgcgaataagctaggatcttttattcagctggatggcgcagaaccgtagaaggaaccagtct

SEQ ID NO: 398030 - DNA, 344 bp, Oryza sativa nipponbare
taaagcactaattaatccttccatgccacaatataaacaatttagactacatatttacactatacatagccagaaatggttatattttgggatcgagggagtatttgtttccgatctaatagagatgagaaatccgctaatcagaataacaccacggataagtacctagaccattagttgggaaacgaataaaatcattattgcaaaaacatcatcttcttcttcatcttcttagtgtacacaacaccaactcgatcatcatctcgtcgcactaaacccatcttccccaacccaaagacaacgaactcgctggccacaaatccatccaaccacaattaaccact

SEQ ID NO: 398031 - DNA, 267 bp, Oryza sativa nipponbare
agaaacaatttaatctaacatacgcaaactgatattatcacaatgttagccgatgacaatggaaagagtaatctaggtacaagcggatcattgacggtggagacaagacattggctgcaccacaacacccaccagtggcgccaacaaggagcgctatccgttataggacgagagaaaaagtaaaacatcacgatgtgaagtgaaactgaataattctagtagacgatgatgatgatggataggctccttaggacgcccgccgccctt

SEQ ID NO: 398032 - DNA, 257 bp, Oryza sativa nipponbare
tacacgattgattaatttcactgagaatagcacgggtacatcacatcacacaaattcatacgttgatacacgcatagtcgccgaagcgaccagctgcttaattaatcgataacacacgggtttaattcagcaataatcagcacacacacaaaccacactcatatgggtggtttttattgtggactaattaaggtaggtgactcgccggcggcgagtgttcggttgcttcgtgacttcacttgccgcacttgcagtcg

SEQ ID NO: 398033 - DNA, 349 bp, Oryza sativa nipponbare
tatttttttttttttttagcccatatctttatattatattattattaacaaaaacttgtcatgcccagctatggcttgggcgcgatctgatacacagaacaaagagaaaacataaaaaggagaaataattaatagcaagcgtcaagccggcctgcttaaaaggtgtaaaggcagctgccgtcgtcgctcctcgccgttgggtcgaagttcttggcaacagggtcggtgcaaccttccggcacaggcaggttacctgcttgctgtgctccttgccctcctcctcctatgcaggccgcctacgatgcatcgatgggatgcgaatagctagagatcttttattcagctggat

SEQ ID NO: 398034 - DNA, 367 bp, Oryza sativa nipponbare
gctaaagaacgatatttattatgaacaatttcgtgagcacggtagtatcacatgacactgagaatatgtagtatatcttcgcggacagtgagaaaaacggtcgccctccacgttttcttcttccttcaatttctccaatataacgtacagcttggcacatatctgtacaaaccgcggtactggtaaacaaaaacaacgtacacagcatactactttaggatcctcatgctggtacagccacaggtttttggctggtcttgattcccttgatagcttctgcatagtctggagccccgaaaacggctgaaccagcaacaatggcgttggccccagcttcaatgaccttgtaggcgtttttgggaccaac

SEQ ID NO: 398035 - DNA, 227 bp, Oryza sativa nipponbare
aacgggataccatccattttttttattgtcgacgaatttatcagatatgctctagatacatatcttgtgtgtatatagccggagctttgttttcacatatcctcacccaacgataattgtagtactcttacaataaaaccggccggagagggagggaagagattattacatatgtgttaagagcagaggccattgagatggtacataaccaaactggtaaataaaaa

SEQ ID NO: 398036 - DNA, 441 bp, Oryza sativa nipponbare
  unsure (1)..(441): unsure at all n locations
ttgctggaaaatttgatgatttatttcccacttatatcatcatatacaaatactaacacatgcgaaaattatcaagcagaaaagttccatacaaattcatccagacaaacaagtgtaaaaaaccttttttttcccatttcccccttgaactatccgtaaataccaccattccaccaaactcccctctgtcttctacgacaaataatcttttcaacccagtaacttataattaattacagagagattagcaaacatataatggtaagaatcagttgtcgtaggtgcggcactcgtcggtctccgggttgtccttgcagtaggcctcgagcgggtcggaggtctccttgagcttgtcgcgcgcgtggctcgccgccgcgctcagctccttcacctcgtcccacgccgncgngcactcgccggncgcgtgggtcgacccgggaa

SEQ ID NO: 398037 - DNA, 236 bp, Oryza sativa nipponbare
tggatgtaaatattatattattgtaaatcattttgaggagctagactagcgtgccttattaacaaggagatatgtaccattacatgatgattaacatataaatctgtagctacatggaattaaagtagtggagccaaggaggaaagattattgaaaactcccattcttcatggatgggaatgggatcaggtgggcttgcagaaattttcggccaaattgttggacgccttcttggg

SEQ ID NO: 398038 - DNA, 349 bp, Oryza sativa nipponbare
caaacagatgtggccatcatatatgtatatgtagcacagtttgattcctctttgctagtcaaaagatggtatcatcaatcaataatagttacagtattgattccatggagtagtaggattacaacaattaaggacgatgaagagaaaggggtggctggcgatacacatagagaggcaaagcagggggtagcttagttacaacttacaaacgaagctctgatcgatcaagtctgatttgattgatgcagctgaagaagaagaggaagaagacgacgatgatgatgcaatcagctgctgacgtacttgtcgatgatggtggcgagggtggtcttggggacggcgccgatga

SEQ ID NO: 398039 - DNA, 420 bp, Oryza sativa nipponbare
gcaatgtaattgtcaattattacatttcttcgacgatatgatttgagtagccacactgaaagagtctagaatcctcaacttctagtgttgataatagataaacaaccagatcatggtcgatagttcacagcaccacaatcattaacgtacacacactataggtcgttccgtcttagataacagggggcgactcaaaccgtcagacgttttcccccatacacaaatattcccaaacttagcagtagaacatgacacgtttgacattttccttcagatcaggaagcggccttacagcaacattcccagcaggcttagtgctgcgtgcaccaggaagggggccaccgccacgggtatgggcaccgctcgccatcgacccactatctgaagtatccggctccatgtaaaatcgagctcgaaatg

SEQ ID NO: 398040 - DNA, 380 bp, Oryza sativa nipponbare
  unsure (1)..(380): unsure at all n locations
tttttnnnnntttttttttttttttttttttttttttttttttttttttttttttggcacgaaggaattgttctcaagaattttaagatggtaaatacccacaagaggggggtgcggtttacaagacttagttttttttaagtacaacaaatcttccattcctccatgatcctataagcttttacacccaaaccacacaaatcaccatgcccgggccctttttcttcactgccaaataaactggggcttgagtagccaagcatccatgtggtgatcagtagccgatttcagcgtcttcaacaacaaggttgccggtgattagcttacggtaggcggcgacgggccaaattaacccctttgggaggagcttgacggcgagc

SEQ ID NO: 398041 - DNA, 461 bp, Oryza sativa nipponbare
ccacgcgtccgcccacgcgtccgaagtactcgagcaaagaaggatagagcttggtgagctgcagagatggcgccctccgtgatggcgtcgtcggccaccaccgtcgctcccttccaggggctcaagtccaccgccggcatgcccgtcgcccgccgctccggcaactccagcttcggcaacgtcagcaatggcggcaggatcaggtgcatgcaggtgtggccgattgagggcatcaagaagttcgagaccctctcctacctgccaccgctcaccgtggaggacctcctgaagcagatcgagtacctgctccgttccaagtgggtgccctgcctcgagttcagcaaggtcggattcgtctaccgtgagaaccacagatcccccggatactacgatggcaggtactggaccatgtggaagctgcccatgttcgggtgcactgacgccacccaggtgctcaaggg

SEQ ID NO: 398042 - DNA, 147 bp, Oryza sativa nipponbare
ccacgcgtccgcccacgcgtccgcccacgcgtccgaaaaaaattttttattaataaaaaaaaaaaaaaaaggggagagagaatttataaaaaagggcggcccctttcccggatcccagtttactttcttcttgcgtgcgcccccttt

SEQ ID NO: 398043 - DNA, 469 bp, Oryza sativa nipponbare
ccacgcgtccgctactggacatactctactactactagccagttagctagctaactaactacgtggctatggcccgcaccgtgatggcctcctcggccacctccgtggctccattccaagggctcaagtccaccgccgggctccccgtcagccgccgctccaccaactcgggcttcggcaacgtcagcaatggcggaaggatcaagtgcatgcaggtgtggccaattgagggcatcaagaagttcgagaccctatcgtacctgccaccactcaccgtggaggatcttttgaagcagatcgagtacctgcttcgatccaagtgggtgccttgcctcgagttcagcaaggttggattcgtctaccgtgagaaccacaggtctcccgggtactacgatggcaggtattggaccatgtggaagctgcccatgttcggctgcaccgatgccacccaggtgctcaaggagctcga

SEQ ID NO: 398044 - DNA, 469 bp, Oryza sativa nipponbare
ccacgcgtccgcccacgcgtgcgcccacgcgtccggaaaaatttttgaagaaattaatctaaagcataagaggatttgatgaatggaactcgcaaatgacctcaaaaaatcaccagccaattgttcaggttctgatagatgggaaaagccaaaatgcagttgatgacgacggaaatgtgctaccaacactggtatacatggcgcgcgagaagagccctcagtatcaccataacttcaaagccggggcattgaacgctttgataagggtatcagcactgataagtgacagccctgttatcttgaatgtggactgtgacatgtattccaacaatagtgattcaatcagagatgcgttgtgcttcttccttgatgaagaaatgagccacaaaattggatttgtccagtatcctcagaactacaacaatatgaccaaaaataatatatatgggaactctctcaatgttatcaa

SEQ ID NO: 398045 - DNA, 430 bp, Oryza sativa nipponbare
ccacgcgtccgcccacgcgtccgcgatcttcggcgggagcacgtggggactcctccggaaggcgcaggtgggggagttctacgtcatcacatggacgtcgcccaaggagcaggtgttcgagatgcccacgggcggcgccgccatcatgcgcgagggccccaacctgctgaagctggccaggaaggagcagtgcctggccctgggcaccaggctccgctccaagtacaagatcaactaccagttctaccgcgtcttccccaatggcgaggtgcagtacctccaccccaaggacggcgtctacccggagaaggtcaacgccggcaggcagggcgtcggccagaacttccgcagcatcggcaagaacgtcagccccatcgaggtcaagttcaccggcaagaacgtcttcgacatctagacttcttcttcttct

SEQ ID NO: 398046 - DNA, 457 bp, Oryza sativa nipponbare
ccacgcgtccgagcataagcaacacaagggattaactcatcactcacttagctaattaaatcttcgaccatgtcggacaagtgcggcaactgcgactgtgctgacaagagccagtgcgtgaagaaaggtaccagctatggcgtcgtcatagttgaagccgagaagagccacttcgaggaggtcgccgccggcgaggagaacggcggctgcaagtgcggcaccagctgctcctgcaccgactgcaagtgcggcaagtgaagtcacgaagcaaccgaacactcgccgccggcgagtcacctaccttaattagtccacaataaaaaccacccatatgagtgtggtttgtgtgtgtgctgattattgctgaattaaacccgtgtgttatcgattaattaagcagctggtcgcttcggcgactatgcgtgtatcaacgtatgaatttgtgtgatgtgatgta

SEQ ID NO: 398047 - DNA, 449 bp, Oryza sativa nipponbare
ccacgcgtccgggccccgctcaaccccaaggctaacagggagaatatgacccagatcatgtttgagactttgaatgtgccagctatgtatgtcgccatccaggccgtgctctccctgtatgccagtggacgtacaactggtatcgtgttggactctggtgatggtgtcagccacaccgtgccaatctatgaaggatatgcccttcctcatgccatcctgcgtctggaccttgctgggcgtgacctcactgacagcttgatgaagattcttactgagagaggttactccttcactaccactgctgaacgggaaattgtaagggacatcaaggagaagcttgcatatgtggcccttgactatgagcaggagctggaggctgcaaagagcagctcatctgtggagaagagctatgagctgcctgatggacaggtgatcaccattggggcaga

SEQ ID NO: 398048 - DNA, 456 bp, Oryza sativa nipponbare
ccacgcgtccgaaaaacttgacgcctcaattaagtcttcgccttcctataaaatccccgaattccccacgcccaaaaacccaagcaaaagaatccccaaattccaacaagaacaccttcgatttcgatccaccaatctaacacaacatccaatatccatggccgattcaggcagcgacgccccgatcagcaaccgccccgaggaggaggtgacggtggagaagacgccggagatggaggcggcggcggaggaggagaggctgaggtatctggagttcgtgcagcaggcggcggcgcaggtgctggtgctggcggcggcggcgtacgcgtacgccaagcagggcgccggcccgctccgccccggcgtcgaccacgtcgagggcaccgtcaaggccgtcgtcggccccgtctacgaccgcttccatggcgtccccctcgacctcctcaagttcctcga

SEQ ID NO: 398049 - DNA, 427 bp, Oryza sativa nipponbare
  unsure (1)..(427): unsure at all n locations
ccacgcgtccggctcaccactgctagcttgggaagaggaggaggagcttgagcttggagagagacaacaatggcggctcaggctcttctctctgggaggcagctgctggggaggccattgcaatcttcagtctccaggtcttcttcctccaggaaggcacccttcatggtcagggcagaggccactcccnctgccaagcaaggtgctgacaggcagctgtggttcgcatccaagcagtccctgagctacctggatggcacgcttccgggagacttcgggttcgacccgctggggctatcggacccggaggggaccggtgggttcatcgagccacggtggctggcctacggcgaggtgttcaacggccggacggcgatgatgggcgtcgtcggcatggtcgccccggagctcctcggcaagctgggcc

SEQ ID NO: 398050 - DNA, 153 bp, Oryza sativa nipponbare
  unsure (1)..(153): unsure at all n locations
cgacgcgtccgcaccctactcagcagcagcagcagtagctgagcttgaatcagcagagcgaggtagacatttccgcnctcaccatggccgtgtggtccccggcgctggccggcaaggccgccgcgaaggtgttctgttaggggcgcattatta

SEQ ID NO: 398051 - DNA, 338 bp, Oryza sativa nipponbare
ccacgcgtccgcccacgcgtccgggccatccagtctgagaagccaacgtaccaggtggtgcagcccatcaatggcgaccccttcatcggcagcctggagacgccggtgacctccagcccgctggtcgcctggtacctctccaacctcccggcgtaccgcaccgccgtcagcccgctgctccgcggcatcgaggtcggcctcgcccacggctacctcctcgtcgggcccttcgcgctcaccggcccgctccgcaacacgccggtgcacggccaggccggcgccctcggcgccgcaggccttgtggccatcctaaggggttgcctaaccatgtccggggt

SEQ ID NO: 398052 - DNA, 468 bp, Oryza sativa nipponbare
  unsure (1)..(468): unsure at all n locations
ccacgcgtccggatgttttctactgcctcaagcttcttgaagcaactggaatatccactgttccagggtcaggtgtcggacaaaaagaaggggtgttccacctgaggacgaccatcctgccagctgaggaggacatgcctgccatcatgaccagcttcaagaagttcaacgacactttcatggatcagtacgatggctactccaggatgtgaaatgaaaacaagatgagcactaccccaggagaagagagaaagaatctgcctcagcgtggctgatcgagcagttataattaaaaggcactgttaattaattaattaatcaatcaatcgaaaggctaattatttgctgcaacaatctgtaactcgatctactgaaggaaaaaaaaaacttcttgtccttgatatgcatgatgtatagataaaattatttctgctctttgggaatngaataatacgggcgcacccaccg

SEQ ID NO: 398053 - DNA, 360 bp, Oryza sativa nipponbare
  unsure (1)..(360): unsure at all n locations
ccacgcgtccgccactacgcactagtagtagcactctggtattctcccatggcgactgcgaccgagganggtnccgctgcggctgctgccgccggcgaggcgccgccgccgccgccgccagcggtggtagaggaggcgaaggaggctttggaggcaccgaagccggaggaggcgccgaaggctgaggagggggaggagaagaaggcggagggtgagaaggagaaggagaaggcgaagaaggagaggaaaccgagggcgaggaagccccgatcggcggggccacaccacccgccctacttcgagaagatcaaggaggcgatcatggcgcttgaccgaaacggcaaggcggtatcgagctcg

SEQ ID NO: 398054 - DNA, 463 bp, Oryza sativa nipponbare
ccacgcgtccggtgggtgtgtccctgtctcccctctccttcctcctcttctttcccctcctctcttccccggtcggacaagagagagagcgccagactctccccaggattcagccatgaagggggccaaatccaagggcgccgccaagcccgacgccaagttggctgtgaagagtaagggcgcggagaagcccgccgccaagggcaggaaggggaaggccggcaaggaccccaacaagcccaagagggctccctccgctttcttcgtttttatggaggagttccgtaaggagttcaaggagaagaaccccaagaataaatctgtcgctgctgtaggaaaagcagccggtgataggtggaaatccctgaccgaagcggacaaggctccctatgtagccaaggccaacaagctcaaggccgagtacaacaaggccattgctgcctacaacaagggcgagagcact

SEQ ID NO: 398055 - DNA, 465 bp, Oryza sativa nipponbare
ccacgcgtccgcgagcgcgttcttcgtgttcatggagcagttcaggaatgactacaaggagaagcaccccagcgtgaagcaggtctcggtgattggcaaggctggtggtgacaagtggaagtccatgactgatgctgacaaggctcctttcgtgaccaaggctgagaagctcaaggctgagtacaccaagaagattgacgcctacaacaacaagcaggcaggaggcccggctacctcaggcgactctgacaagtccaagtccgaggtgaacgacgaggacgagggcagcggtgactagtgatctatgtagggcttgcatgtagtaggtaaagtactcttatctaaattatcataattctcatatatttttccttattccttccatttttccccttttccttagatttattttctattctttaatttttttatttttttccacatattttcctactttttcctact

SEQ ID NO: 398056 - DNA, 340 bp, Oryza sativa nipponbare
ccacgcgtccgcccacgcgtccgggagcttgagcttggagagatacaacaatggcggctcaggctcttctgtctgggaggcagctgctggggaggccattgcaatcttcagtctccaggtcttcttcctccaggaaggcacccttcatggtcagggcagaggccactccccctgccaagcaaggtgctgacaggcagctgtggttcgcatccaagcagtccctgagctacctggatggcacgcttccgggagacttcgggttcgacccgctggggctatcggacccggaggggaccggtgggttcatcgagccacggtggctggcctactgcgaggtgtt

SEQ ID NO: 398057 - DNA, 464 bp, Oryza sativa nipponbare
ccacgcgtccgcccacgcgtccgcttcttcttcctcctcctcgcgctcccccgattcgaagcgtggagagaggaacggcgcttgcgagaggagagagatggcccgtaccaagcagaccgctcgtaagtccacaggaggaaaggctcccaggaagcagcttgccaccaaggctgctcgtaagtctgctcccaccactggaggagttaagaagccccaccgttaccgccctggaactgttgccctccgtgagattcgcaagtaccagaagagtactgagcttttgatcaggaagctgcccttccagaggcttgttagggaaattgcacaggacttcaagaccgatctgcgtttccagagccatgctgtccttgccctccaggaggctgcggaggcataccttgttggtctcttcgaggacaccaacctgtgcgccattcatgccaagcgtgtgaccatcatgccta

SEQ ID NO: 398058 - DNA, 472 bp, Oryza sativa nipponbare
ccacgcgtccggcagaaacaaatccttccacgatagtacttcgtatgagcaagagcagcagcatagcaaagagtaagaggagatgcttaatcttcacaccattaggatgtccattccttcgctacacagatcctccccataccgatgtgcgctgctaaagaggaagagatcttgtatccgtgcctgcagctctgaagatgatggatccgatgcttcgtcgtcgcttggcggagacaaacgccagcaggaggtccttgcgaagatcgcaatgcttcaggcgcagaaggtgcgcatcacaagcttcttggacgagcgctctgcttacctgaccaagtttgcgaaggatgcggacaccgagttcgatctgattggccagaacgccatgaaagagcttgatgaagttggggaccagataatggagaggctggacagcaagatgcagtgccttgaggagactgctgaagttcaaagg

SEQ ID NO: 398059 - DNA, 363 bp, Oryza sativa nipponbare
  unsure (1)..(363): unsure at all n locations
cgcacgcgtccgcccacgcgtccgaccgaccaccctctccgcaagtatacctgaattttatgtactgaaagaaggtnagtccccctgcatttttggtccaattgtgaaacagcgatggtcttatgcatgtgcgaagcagcttattgagaggcttatttttgctgaaggagcagaaaatggccttgagttcacaattgtgagacctttcaattggattggaccaagaatggactttattcctggtgttgatggtcctagtgagggtgttcctcgggttttggcatgtttcattaacaatctcctgcgtctgtagctcctgaaacttgttgattggttccaattccaaagaactttttgtacatt

SEQ ID NO: 398060 - DNA, 288 bp, Oryza sativa nipponbare
ccacgcgtccgcccacgcgtccggttcgatcctggctcaggattaacgctggcggcatgcttaacacattcaagtctaacgggaagtggtgtttccagtcgcccaacgggtgagtaacgcgtaagaacctgcccttgggaggggaacaacaactggaaacggttgctaataccccgtaagctgaggagcaaaaggagaaatccgcccaaggaggggctcgcgtctgattagctagttggtgaggcatatagcttaccaaggctatgatctttatctgttcctttagga

SEQ ID NO: 398061 - DNA, 207 bp, Oryza sativa nipponbare
  unsure (1)..(207): unsure at all n locations
ttccgggtgaggggcgcgtccgcccacgcgtccgcacacttgactggagatgtatttgtgaggaggatgtgaanaaagaanagatctaccaccaaggtgggtgagcaacaccaagaagaagaagaaagaagaagaagaagatgcagaccgctgctagcagtgtcgttggattgtcggtcgtgttgcccgctgctgtgatggggctca

SEQ ID NO: 398062 - DNA, 164 bp, Oryza sativa nipponbare
  unsure (1)..(164): unsure at all n locations
ccacgcgtccgctctcagctctcacagctcactgcatcaatggtcgcggccaccatggcgctctcctcgcctntgatggcccgcgcggcgccgtccacctcctccgcgctcttcggcgaggcgcggatcaccatgcgcaagaccgccgcgaagcccaagccggc

SEQ ID NO: 398063 - DNA, 351 bp, Oryza sativa nipponbare
  unsure (1)..(351): unsure at all n locations
ccacgcgtccgcccacgcgtccgcccacgcgtccgcccactctttcgcccacgcgtccgcccacgcntcggcccacgcgtccgttcaagaagtactctaccaaagaaggagagagcttggtgagctgtattgatggtctctttcgtgattgtcttttatttaaattattctttgtttttttttatttctttgatttatctataattttattttttttttattttttttttttattattcttatttcttgtttttttttttattttttaattttatttatttattttttttttttttaattattatatagtttttatttttattttatttgtgtttttgtttatgtattatt

SEQ ID NO: 398064 - DNA, 283 bp, Oryza sativa nipponbare
ccacgcgtccggcaggatgatgatggacaagttattgaaccccactccattagtgctgggctggactacggtggtgttgggcctgagcatagctttttgaaggatattggacgtgctgaatatgacagcgtgacagatcaggaggcactggatgctttcaagcgcgtctctcggctggagggcatcatccctgctctggagacgtcccatgcgctcgcctacctggagaagctctgcccaacgctgcccgacggcgtgagggtggtggtgaacttcttcggaa

SEQ ID NO: 398065 - DNA, 145 bp, Oryza sativa nipponbare
ccacgcgtccgagcagcagcagcagtagctgagcttgaagcagcagagcgaggtagacatggccggcgccaccatggccctctcgtccccggcgctggccggcaaggccgccgcgaaggtgttcggcgaggggcgcataccatgc

SEQ ID NO: 398066 - DNA, 465 bp, Oryza sativa nipponbare
ccacgcgtccgccacgcgtccggaagtactcgagcaaagaaggagagagcttggtgagctgcagagatggccccctccgtgatggcgtcgtcggccaccaccgtcgctcccttccaggggctcaagtccaccgccggcatgcccgtcgcccgccgctccggcaactccagcttcggcaacgtcagcaatggcggcaggatcaggtgcatgcaggtgtggccgattgagggcatcaagaagttcgagaccctctcctacctgccaccgctcaccgtggaggacctcctgaagcagatcgagtacctgctccgttccaagtgggtgccctgcctcgagttcagcaaggtcggattcgtctaccgtgagaaccacagatcccccggatactacgatggcaggtactggaccatgtggaagctgcccatgttcgggtgcactgacgccacccaggtgctcaaggagctc

SEQ ID NO: 398067 - DNA, 212 bp, Oryza sativa nipponbare
gtcgaccacgcgtccgaagggctgcggtggatacctaggtacccagagacgaggaagggcgtagcaagcgacgagatgcttcggggagttgaaaataagcatagatccggagattcccaaataggtcaaccttttgaactgcctgctgaatccatgagcaggcaagagacaacctggcgatactggaacatcctagtagccagaggaaaaga

SEQ ID NO: 398068 - DNA, 383 bp, Oryza sativa nipponbare
ccacgcgtccgcccacgcgtccgtggagctgtggtccggtggaggttatagagaagaagcagagagcggggatggctgggctgtatgagagaccgtcggagacgtacaccaagaagcggcctcggtaccctgacgcttggttctccaagctcgccgccctcacagccggccaccaccgcgcctgggacgccggctgcggcaccggccaggcctccatcagcatcgcggagcactacgacagcgtggtcgcgacggacgcgagcgaggggcagatccgccacgccgtcgcgcaccccaaggtgcggtacctgcacaccccggtggacctctccgaggacgaccttgttgccatggtcggcggctagggctcgctggacctcgtc

SEQ ID NO: 398069 - DNA, 405 bp, Oryza sativa nipponbare
ttatagcccatatcttgtggaggatattattattaacaaaaacttgtcatgcccagctatggcttgggcgcgatctgatacacagaacaaagagaaaacataaaaaggagaaataattaatagcaagcgtcaagccggcctgcttaaaaggtgtaaaggcagctgccgtcgtcgctcctcgccgttgggtcgaagttcttggcaacagggtcggtgcaaccttccggcacaggcaggttacctgcttgctgtgctccttgcccgtagaaggaaccagtcttcatggcgtcggagttagcgtcaccaagagcagcctcgctcaagtactgctcagccagctgcacacgcttgacgttctcctgctccttcacaagcatgtatccgtactccatgagcttttcgatc

SEQ ID NO: 398070 - DNA, 362 bp, Oryza sativa nipponbare
  unsure (1)..(362): unsure at all n locations
ccacgcgtccgctcgctcttcccgccgccgccgcctcctccgccgcgcagtcgccaaccgccgtcgccgntcgccngcgccaaattccccactgccaccatggggcgtatgcacagccgcgggaagggcatctcgtcgtcggcgattccgtacaagaggactcccccaagctgggtcaagaccgccgccgccgatgtggaggagatgatcatgaaggccgcgaagaagggccagatgccgtcgcagatcggcgtggtgctccgtgaccagcacggaatccccctcgtcaagagcgtcaccggcagcaagatcctccgcatcctcaaggcccatggtcttgcgccggagatcccggaggacct

SEQ ID NO: 398071 - DNA, 365 bp, Oryza sativa nipponbare
ccacgcgtccgggcagaaactgcgacatctgtattgtcagtggacgaaatgcttccagcagttgctcaaggtgctggtggaatagcttgcagaagcagtgatgacacaatgatgaattacttgtcctcattgaaccatgaagataccagattagctgttgcatgtgaaagagaattcttgtcagttcttgatggcaactgccgaactccaattgcggcatatgcttctcgtgacaaggatgggaattgttcattccgagggctattggcttcacctgatggatctacagtatatgagacttcgagaactggaccttatgatttcgatatcatggttgagatgggtaaagatgctggccacgagct

SEQ ID NO: 398072 - DNA, 216 bp, Oryza sativa nipponbare
  unsure (1)..(216): unsure at all n locations
ccacgcgtccggcgccatcaactccgtgccgctgctccccaagatcctggagctcgtcggcctcgnctagaccngctggttcgtctaccgctacctcctcttcaaggagagcaggaaagagttggcgaccgacatcgagaccttgaagaagaagatcgctggaacggagtaattaagcagctgcatttgtccggggaagttttggggggtgacata

SEQ ID NO: 398073 - DNA, 434 bp, Oryza sativa nipponbare
ccacgcgtccgcccacgcgtccgcccacgcgtccgatcaggtagaacagtgagagtgaggtgcagaaaaatgggagctgaagctgaggatggcaacatccatgatcacctcgccgctggtggcgccggcccgggccaagggccttccgtccatctcccgccggggatcctccttcgccatcgtctgcagcggtgggaagaagatcaagaccgacaagccctacgggattggaggtggcatgtcagtcgatattgatgcatctggcaggaagagcacggggaagggtgtgtaccaattcgttgacaagtacggcgcaaacgtcgacggctacagcccaatctactcgccggaggaatggtctcccaccggtgacacctacgttggtggaaccaccgggcttctgatctgggccgtgaccctcgccgggctcctcg

SEQ ID NO: 398074 - DNA, 472 bp, Oryza sativa nipponbare
ccacgcgtccgctgcaaagaaaaggcctgtgtcaaggagagggtagtagcaccttgctctcctttgccttgagagaaaccggaagcaatggcgtctgctactctcctcaagtcatctttccttcccaagaagtctgaatggggtgccacccgccaggctgccgcccccaagccggtgactgtctccatggttgtccgcgctggtgcctacgacgatgagcttgtcaagaccgcgaaaaccattgcatcaccaggaaggggtatccttgccatggatgagtcgaacgcgacctgcggtaagaggcttgcgtcaattggccttgagaacaccgaggccaaccgccaggcttaccggaccctccttgtcaccgcaccgggcttgggacagtacatctccggtgctatcctctttgaggagactctgtaccagtcaactgtagatggcaagaagaatgtcgacatcctcactgagc

SEQ ID NO: 398075 - DNA, 385 bp, Oryza sativa nipponbare
ccacgcgtccgcggacgcgtgggcggacgcgtgggcggacgcgttgttcgccgtcaagtttgctgagctggtgaccaagatcgacagacgatctggtaaggagctggagaaggagcccaagttcctcaagaacggtgatgctggtatggttaagatgattcccaccaagcccatggttgtggagaccttctctgagtaccctcctcttggtcgttttgccgtgcgggacatgaggcaaacggtggctgttggcgtcatcaagaacgtggagaagaaggacccaaccggtgccaaggtgaccaaggctgccgccaagaagaaatgagcctagttcaagtggtgctttccatatctgcatttgagatatctagctcttttagtactc

SEQ ID NO: 398076 - DNA, 462 bp, Oryza sativa nipponbare
ccacgcgtccggtccagaacaagcccgactggtttctgaagatcatcccataggggaaggtgcctgtgtttgacggtggtgatggcaaatggattcctgattctgatgtgatcactcaagtcattgaggagaagtacccaaccccgtctcttgtcacccctcctgagtatgcatcagtgggatcaaaaattttctcatgcttcacaacgttcttgaagagcaaggatccaaatgatggttcagagaaggcacttcttactgaactgcaggcactcgaggagcatctgaaagctcatggcccctttatcaacgggcagaacatttcagctgctgaccttagcctggcaccaaagctctaccatctccaggttgctctggagcatttcaaaggctggaagatccccgaagacctaaccaatgttcatgcttacacagaggctctgtttagccgcgaatctttca

SEQ ID NO: 398077 - DNA, 465 bp, Oryza sativa nipponbare
ccacgcgtccgggagcgcgccgtgcaccgcctctcacaatgtctaccgtcgccgccgccgccgctgcccagagctggtgcttcgccactgtcaccccgcgctcccgcgccacagtcgtcgccagcctcgcctccccatcaccgtcctcctcctcctcctcctccaacagcagcaacctcccggcccccttccgcccccgcctcatccgcaacacccccgtcttcgccgcccccgtcgcccccgccgcgatggacgccgccgtcgaccgcctcaaggatgggttcgccaagttcaagaccgagttctatgacaagaagccggagctcttcgagccgctcaaggccggccaggcacccaagtacatggtgttctcgtgcgccgactctcgcgtgtgcccgtcggtgaccatgggcctggagcccggcgaggccttcaccgtccgcaacatcgccaacatggtcccag

SEQ ID NO: 398078 - DNA, 327 bp, Oryza sativa nipponbare
  unsure (1)..(327): unsure at all n locations
cgacgcgtccgcacggtaccctcctctctcctcctccgaccaccatggtcatggccacgcaagcctccgcgcncggtgccacctcctcgccgcctgggcaccggcgaagccgcgctcatccaccctctccatgcccacctcgagggcacccacctccctcagagcggcggcggaggatcagcccgccgcggcggcgacggaggagaagaagccagcccccgcggggttcgtgccgccgcagctggaccccaacacgccgtccccgatcttcggcgggagcacggggggactcctccggaaggcgcangtggaggagttctacgtcat

SEQ ID NO: 398079 - DNA, 480 bp, Oryza sativa nipponbare
ccacgcgtccgcggacgcgtgggcgacggcgccccgagaatgggcccgacgttcggagccatgatgatcggcgggcggaaggcggcgcacctggcgctgaaggcgctcggccggccgaacgccatcgacggcacgatcaagaaggcggcggcggcggcggcgcacccggagctgatcctggcgtcgaaggacgacggcgagatcgtggacgcctgagcgaatagaacagggtaaaaaaaaatccgcaagacgtggtggtgacacggaggagttggggacgagaagaagatgtggactttcccctgtgtttttttttcgggatttgcattgatccccttgtttgttttagctctggatgttgattagcgtcttgttcatagcactttcactgccaccgtgtgtgtgtgctctgcttgcctgatgagggcaagaaaactttcatggatccgtctctttggggggaatgaataaaaaggatga

SEQ ID NO: 398080 - DNA, 477 bp, Oryza sativa nipponbare
  unsure (1)..(477): unsure at all n locations
gcccacgccacccgagcagcgagaaggtaggctccagccatggcttcccagctctccgccgccacatccgtgccgcaggggcatggcctccggacctactcctctcctaggtccatggtgacgctgccatcgttgaggatgagcaagaagaggtcccagggcatccggtgcgactacatcggctcagccaccaacgttatcatggtgacgacgacgacgctgatgcntgttcgcgggaggttcgggctggcgccgtcggcgaacaggaagtcgacggcggggctggaagctggaggcgcgcgactccggcctgcagaccggcgaccccgccgggttcacgctcgccgacacgctggcctgcggcgccgtcggccacatcatgggcgtcggcgtcgtcctcggcctcaagaacatcggcgtcctggaccagatcatcggctaatcaaattcattaagctagtcacacgaatcaatact

SEQ ID NO: 398081 - DNA, 463 bp, Oryza sativa nipponbare
ccacgcgtccgcccacgcgtccgcccacgcgtccgcccacgcgttcggaagtactcgagcaaagaaggagagagcttggtgagctgcagagatggccccctccgtgatggcgtcgtcggccaccaccgtcgctcccttccaggggctcaagtccaccgccggcatgcccgtcgcccgccgctccggcaactccagcttcggcaacgtcagcaatggcggcaggatcaggtgcatgcaggtgtggccgattgagggcatcaagaagttcgagaccctctcctacctgccaccgctcaccgtggaggacctcctgaagcagatcgagtacctgctccgttccaagtgggtgccctgcctcgagttcagcaaggtcggattcgtctaccgtgagaaccacagatcccccggatactacgatggcaggtactggaccatgtggaagctgcccatgttcgggtgcact

SEQ ID NO: 398082 - DNA, 453 bp, Oryza sativa nipponbare
ccacgcgtccgcccacgcgtccgggaggtgatccactcgcggtgttcgatgctgggggcgctgggctgcgtgttcccggagatcctgtccaagaacggggtgaagttcggggaggcggtgtggttcaaggccggcgcgcagatcttctccgagggggggctcgactacctggggaaccccaacctggtgcacgcgcagagcatcctcgccatctgggcggtccaggtggtgctcatgggattcgtcgagggctaccgcgtcggcggcggcccgctcggcgagggcctcgacaaggtgtacccaggcggcgccttcgacccgctcggcctcgccgacgaccctgacaccttcgccgagctcaaggtgaaggagctcaagaacggccgcctcgccatgttctccatgttcggcttcttcgtccaggccatcgtcaccggcaagggccccatcgag

SEQ ID NO: 398083 - DNA, 460 bp, Oryza sativa nipponbare
ccacgcgtccgcccacgcgtccgaagccatctaacttgttagttaaccgtaaaggtgaagtaaagattaccgattttggggtaagtgcggtgctagcaagttcaatgggtcagcgggatacgtttgttggaacctacaactatatggcgcctgagcgtattagtggaagctcctatgactacaagagtgacatatggagtttgggcttagtaatactcgagtgtgccattggtcggttcccctatataccttcagaaggggaaggttggttaagcttctacgaattattagaagcaattgttgaccagccaccaccctctgcaccagcggaccagttctctccagaattttgtgcatttatctcctcctgcatacaaaaggatcctgcggagcggatgtctgcttcagaactcttgaatcatcctttcatcaagaagtttgaggataaggatttagacct

SEQ ID NO: 398084 - DNA, 475 bp, Oryza sativa nipponbare
  unsure (1)..(475): unsure at all n locations
ccacgcgtccgtgatatttgggcgtacttgggttgattctcctggagagatggtattgacaaacctgacaactggagacaaagttgtgcttttattccagccatgtggctggtttggggctggtcggtacgaggtggatggctatgtgtatagtgcagctgaagaacccaaaataatgataactggaaagtggaaccagtccatgagttgtcagccatgcgatcaagaaggcgatcctcttccaggaactgagctaaaggagatatggagagttgctcctactccaccaaatgacaagtaccagtacacgcacttcgcgcacaaaataaacagcttcgatacggcgccgaagaagctattggcatcggactcccgattgaggcctgatagatatgccctcgagaagggtgacatgtcaaaaataggttcagaaaagagcaggcttgaagagcaacanagagctgagaaaagacac

SEQ ID NO: 398085 - DNA, 483 bp, Oryza sativa nipponbare
agaccgcacgcgtcaccaaatcctcgacgcgctcctcccgctctacctcaacagccagatcctccgcgcgctccaggagtcgctcgccagcgagctcgccgccaggatgagcgccatgagcagcgccaccgacaacgccatcgagctccggaagaacctctccatggtctacaaccgccagcgccaggccaagatcaccggcgagatcctcgagatcgtcgccggcgccgacgccctcgcctaaatccaatcaactcatttcttcatcccatccacctcgcttgagctgctgaggttgctgctgttatatatactactctattcttttttacttcctttttctctcttgctattgtgtctgtaatttctgtgatagcacgaaaaaaaaaaggaaaaaagatcgatccgactcgatcgatgtaattgttaatcgcgcgagatacacaagatttcaattcagcgatgccaaatgtacaagcagag

SEQ ID NO: 398086 - DNA, 391 bp, Oryza sativa nipponbare
cgcgtccggtcaacgagttccaaaccaacctggtgccctatacgtggacacacttaatgttttcctgctacgcgcgggtgatctcggccgagaaggcctaccacgagcagctctccgtggcggagatcaccaacagcgccttcgagccgtcctccatgatggccaagtgcgacccgcgccacggcaagtacatggcgtgctgcctgatgtaccgcggcgacgtggtccccaaggacgtgaacgccgcggtggccaccatcaagacgaagcgcaccatccagttcgtggactggtgccccacggggttcaagtgcggcatcaactaccagccgcccagcgtcgtcccggggggagacctggccaaggtgcagagggccgtgtgcatgatctt

SEQ ID NO: 398087 - DNA, 413 bp, Oryza sativa nipponbare
ccacgcgtccgggcgatgaggtgatagaccaggtggttgtcaagttagggggaaagcatgatggataaggatgatgtcgtgagcagtgatagtgatgaagaagaggaagatggagaggaaaattctggagcttcccaaaagaagaaaggatggttctcctcgatgttcaagagcattgcaggtaacaatgtgcttgagaagtctgacatccaacctgcactcaaagcgcttaaagataggctgatgactaagaatgtggctgaagaaattgcagagaaactttgtgaatcagtggcagctagccttgagggcaaaaagctgggatccttcacaaggatatcctctactgttcagacagctatggaggaggctcttcttcgcatcttaaccccaaggcgatctattgacatatt

SEQ ID NO: 398088 - DNA, 402 bp, Oryza sativa nipponbare
tgttaaccactagtaagtatatattccagggtaaaacaggtaaaacctgtgatacaaagcagtcacataactgaaaaagcgcacgatagtttgtgctactacaacagtaaaccaggacagaacacatccaacacgatgacgacgaggtcatgggggtttcgacgatagcaatactggcagtacgaattcgaggtgccgcacaacggcgcaccacattcacttcagcagggttttaacgatggatttgacattgagcttcttgaggtcagtgtaagactgaccacagccaacgaacatgactggagctccagatatataaaccattgaaagtgcagcttcaaccttgtcgtcgatgggtcaaacttggtgagcaggatgccatctatcaatctggtagtaggg

SEQ ID NO: 398089 - DNA, 356 bp, Oryza sativa nipponbare
taggattcacattcatctagtaccctaagtgtaaatatatatagccggagctcacatatatttcattcacatatgcctcacccaacaacatagagccgtagcagataccaatcttacatcaagtcagagagagatcaggtgaaacaaaatcataagctgagcacggccggcacaatgaagagactatgcacaaactgggagcacacgatacatggcgggagacgtcatggaatcggagttgaacaattaaacaaggctatctatgacgatgacgggttacatgccaccagactcctatcagcccgggggcttggaggcgatgaatctgaagagctgaacctgacagacgttgtcca

SEQ ID NO: 398090 - DNA, 286 bp, Oryza sativa nipponbare
agccggagctttgttttcacatatcctcacccaacgataattgtagtactcttacaataaaaccggccggagagggagggaagagattattacatatgtgttaagagcagaggccattgagatggtacataaccaaactgtaaaataaaaatatatagcatattatatattgatatatcatcaacatagcccaaaacaaagctgcatactattattataggcagcaatccaccagcgcgatgcttgatcttagcttagttgccaccagactcctcgcaacctgggg

SEQ ID NO: 398091 - DNA, 362 bp, Oryza sativa nipponbare
ttttaagaaacgtcatcaacccagaatgaataatatcagttctatgggtcgttccaactttcaaacgatagcatacgaaccacttaaaaagctaaggacgcattagaccattgaggcaatccagcacagggacatgctatgtacacaggaggttgaccatgacacctggccatccatgtttatttacagcagcagcaacagttgatgaattacgcagagccgaatgtgttctcgccactgtaagtcatgtagaggaagccgtcctcatccttgttctcttcgtagattgcagacatcaaagaagcagttggcggcaatgtgttcttcacaaagacaaagatggccttttctgggctaagctt

SEQ ID NO: 398092 - DNA, 270 bp, Oryza sativa nipponbare
ccccaccatcgatcgattacaccatcatcaataactgaagagcagcctgacagatgattaaaattacatgtccatccacccaaaacacaagtaattaataggtcgtttttgggagaagaagaagaagaagaagaagttttgatgtcaaaaacgtttttgccggtgaacttgaccttgatggggctgacgtttttgccgatgctgcggaagttctggccgacccccttcctgccggggttgaccttttccgggtagaccccctccttgggg

SEQ ID NO: 398093 - DNA, 197 bp, Oryza sativa nipponbare
actaggcaaaccacacgaatacacgattgattaatttcactgagaatagcacgggtacatcacatcacacaaattcatacgttgatacacgcatagtcgccgaagcgaccagctgcttaattaatcgataacacacgggtttaattcagcaataatcagcacacacacaaaccacactcatatgggtggtttttatt

SEQ ID NO: 398094 - DNA, 332 bp, Oryza sativa nipponbare
tcaaataagaagaagagctgtactgaatttttgttcaagggaagagaggattaggaacaggattaattaaggcataagtacaccacattccacgtcactaccactccactccactccaccaccctcaaaacacaccacgtacacacatgtacggatgcaatcttcaagctcaagctctcagtctgaccgcatgcggtttagctggttcaacgccggctgcaggatgttgtagagaacccaggcgatcgccggcgccaccacgaacagcagcagcaggccgcggttgtcgacgccctccgccgacgtcgccttcgtcgacagcctagtcacct

SEQ ID NO: 398095 - DNA, 327 bp, Oryza sativa nipponbare
gaggagctagactagcgtgccttattaacaaggagatatgtaccattacatgatgattaacatataaatctgtagctacatggaattaaggtagtggagcagaggaggaaggatgatagaagactccaattctccatggatgggaatgggatcaggtggccttgcagaactctccgcccagatcgtcgcacgcctcctcggggaacaccgtggtgggctcgtcgtaggataggtagtccctgtcgacttcctccgccgccgcacgagaaacagcaacagcagccgatgatgagagcttggcctctgggtacattttgacgttgcacg

SEQ ID NO: 398096 - DNA, 207 bp, Oryza sativa nipponbare
ttttataggatcaacaactaatttccaaattcaagtgtcaagcgtgggatataatcatcatgcacgtacagggttccatagatttactacactgccagttgattgaacagcgggcattatcacatggcattcagaggaaggctatgttagatcacagatgaatctgctaacacccagcttggtgttgcatacatagactggatttgg

SEQ ID NO: 398097 - DNA, 358 bp, Oryza sativa nipponbare
agcaaatcgatccatgcgaccatgcgtgcaaatcagttggagcacaaatttacatgttacacccacaccctacacccatgcataataatacatcgtatatacgtacgtacatacatacccctctcgatcacacgcaccatcgatcgtacaaagttgcgtacatacatacgtacacacatatacgcatacgcacgtacatacatacataattaaaaactcgtaattaattaaatacgtagttgatggcatctctaatggaacttgaggctggtgaggatgttgttgtggacgggatcagcgaggtgatcaagcaggttctgcacggggccaaccccggtgaaaagcgcctggacggaga

SEQ ID NO: 398098 - DNA, 343 bp, Oryza sativa nipponbare
aaccaagagttcagaaggtgcataatattcagccatgaaacaaatccaacaacattctgataggacaccaacaatcccaaacagagtagcttacatgacaagggcttgtgaaaactgaaaagaaactgccttgtagataagcgattaaaaagccagagcttagaagcacttccggtgaacaattgctggacccgactcatcatactctccctttgagatccacatctgttggaaggtgctaaaggaggcaaggatggacccttctatccagacactgtatttccttttaagcggtgccaccaccttgatctttatgctgcttggggcgagggcagtgatcttc

SEQ ID NO: 398099 - DNA, 333 bp, Oryza sativa nipponbare
tttaaggcaaagctgcgagcgccagatcatcttattactacagcttcttggcgatatgctacagtagcttcttcctcccttgcaaaaagaaacccaaaccttatctacaacgcaacacacacaccggacacagagcgctcgatcgatcgaagcagacgagacgacgatggcgaactactactaggtaagcgacaacacctaggctatacagggatacaacgcgcccgcgcgacgggcggcgagacggcggcgatgatcaggcgctggccttgttggccttcttggagatggcggagcggatggatttgggcggctgcatcggctttgcggggg

SEQ ID NO: 398100 - DNA, 322 bp, Oryza sativa nipponbare
gagaaaactacttgacagtacactttattcactatagctgtatgcacatgcgactcgcatgcccccactggacgggtataaatgtaagaactaatgtgtccagaaccaaaaatacgattacataggacacgaatcctgtacaggaatggagaagtttagaagtgtgtcttcactggctctgcaaatagcaacctagcgttagcaaaccaatttacaggggggtggttaactagggcgggcaagtgcaagggcgcaaagaagaaaactccacgatcatgtgaaacttcgttttaaaagatgccttgggcagagctttcacaaa

SEQ ID NO: 398101 - DNA, 380 bp, Oryza sativa nipponbare
tattttttttttttaatctaacatacgcaaactgatattatcacaatgttagccgatgacaatggaaagagtaatctaggtacaagcggatcattgacggtggagacaagacattggctgcaccacaacacccaccagtggcgccaacaaggagcgctatccgttataggacgagagaaaaagtaaaacatcacgatgtgaagtgaaactgaataattctagtagacgatgatgatgatggataggctccttaggacgcccgccgcccttagcgtcttgctgctcccatcttgtccactggaaggctcactcgtcatcgtcttcatcctcttcgctgccctcgcgtcatcctcatcattgacctcggacttggacttgtc

SEQ ID NO: 398102 - DNA, 257 bp, Oryza sativa nipponbare
taaacaagctaattgtataatgaattcacaacaccatattgcattgatcaggttcagaacctgcacagaaatacacactaccgggacagatgtcaccctatgtccaatactcgtgcattcatacacgcggtccacacgaatacgtacatctatacggtacacgtacgtacatgtactgcaccgtgtacacacacgcacactcatgctgggagacgcgcatcgtcgtgcacctaggtagcttagctgaaggcgatgcg

SEQ ID NO: 398103 - DNA, 400 bp, Oryza sativa nipponbare
tagcaaatcgatccatgcgaccatgcgtgcaaatcagttggagcacaaatttacatgttacacccacaccctacacccatgcataataatacatcgtatatacgtacgtacatacatacccctctcgatcacacgcaccatcgatcgtacaaagttgcgtacatacatacgtacacacatatacgcatacgcacgtacatacatacataattaaaaactcgtaattaattaaatacgtagttgatggcatctctaatggaacttgaggctggtgaggatgttgttgtggacgggatcagcgaggtgatcaagcaggttctgcacggggccaaccccggtgaagagcgcctggacggagaagccgaggaaggcgagcatggccagcctgccattcttgatc

SEQ ID NO: 398104 - DNA, 406 bp, Oryza sativa nipponbare
gacagcaacggaacacttacattaacacggattagagacaggtgaattacaatgtaattgtatctagccatgcacagtgccaaagaggcagcaccgctagaataagacgcaaacgaatcagactaacaaaataagagtcaccagacacactgacaatatgctgagtatttttgacagatccaccaataagacgaatacagcaccatcatgagaaacatattgttccacaaaatacaccctactcagattgttcttataagcaaaagattaaaacccactactaacactacgacgcatgcttcatttgtcaaaggaatcgccgaggggaatttaagccctctcaccacgaatcctcctagccagctgaatgtccttaggcatgatggtcacacgcttggcatgaatg

SEQ ID NO: 398105 - DNA, 373 bp, Oryza sativa nipponbare
gcaaaagactatatattcatatgaactttatacactttacatttcttgtgaaaatgttgattaaaatctactgctactttttcatgcttatctctcaagtctttcattcattcttcttttcctcccttcttttcagcttctggtgatgagatatcctgctcgtagatgacctgagcaaccaaaccaatgaatattagacccagagctgcaaccttcctccactccacctcaggtgttgcgaagacggcatttgcaattgtaagcccgagtattgccatgagcccaaggtaaatgttcatcctagtttttgatcctgcactttcttttgcaatatctttgaccttttgtgcttctagcctgggtattggtttta

SEQ ID NO: 398106 - DNA, 362 bp, Oryza sativa nipponbare
ggagtaagtgtattatatgtatgtaaatattatattattgtaaatcattttgaggagctagactagcgtgccttattaacaaggagatatgtaccattacatgatgattaacatataaatctgtagctacatggaattaaggtagtggagcagaggaggaaggatgatagaagactccaattctccatggatgggaatgggatcaggtggccttgcagaactctccgcccagatcgtcgcacgcctcctcggggaacaccgtggtgggctcgtcgtaggataggtagtccctgtcgacttcctccgccgccgcacgagaaacaagaacagcagccgatgatgagagcttggcctctgggtac

SEQ ID NO: 398107 - DNA, 316 bp, Oryza sativa nipponbare
tttaaaatcattattgcaaaaacatcatcttcttcttcatcttcttagtgtacacaacaccaactcgatcatcatctcgtcgcactaaacccatcttccccaacccaaagacaacgaactcgctggccacaaatccatccaaccacaattaaccactgctaagctacggtcccccacttcacttgccggggacgaagttggtggcgtacgcccaggcgttgttgttgacggggtcggcgaggtggtcggcgaggttctcgagggggcccttgccggtgacgatggcctggacgaagaagccgaacatggagaacat

SEQ ID NO: 398108 - DNA, 276 bp, Oryza sativa nipponbare
ttgaacaacagaagcatgattttttaattccatgatcaaattttcattgtcgacgaattgattgttggacacatatgctctaggattcacatccatctcgtaccctttgtataaatatatatagccggagctttcatatatttcattcacatatgcctcacccaacaacatatagtcgtagcagataccactcttacatcaagtcagagagggatcaggggaaacaaaaacaaaagcagagcacggccggttaaatcaaaagacgatgaacaaact

SEQ ID NO: 398109 - DNA, 338 bp, Oryza sativa nipponbare
acacatgaacattacacagcattgcgatttccaattgccggaagtcgataataatccgtgccggacagtgaaaagtcagatgaggtggggaagaaaagcaaagaaagaaacaagaaactgtgttgggcgctcgaaacttcgaaattctcattacaaaggatcgagaggaagaaggaagaagtctggggaaaatttttggagcgaggtggagttacaaaggcagcagcagcagcagcttctacgttctcacttccactggttggcgacgatgtcggcgaggtcgacgaccctcttggagtatccccactcgttgtcgtaccaggcgatgacctttaaca

SEQ ID NO: 398110 - DNA, 271 bp, Oryza sativa nipponbare
  unsure (1)..(271): unsure at all n locations
tgcaggtggtgcggtgctcgctgcgtgagctgcggagccgcatcgactcggtgcgcaacacgcagaagatcacggaggcgatgaagctggtggcggcggccaaggtgcggcgggcgcaagaggcgtgggtgtcctcccgccccttctcggaggcgctggtggaggtgctctacaacatgaaccaggagatccagacggaggacatcgacctncccctcacccgcattcgccccgtcaagaaggtcgccctcgtcgtcctcaccggcgagcg

SEQ ID NO: 398111 - DNA, 285 bp, Oryza sativa nipponbare
gggggggactggtggtttttatcatgattaaaatggttaaacatcagtttacatttagtccatccagaatgggggtttgcaacaacagatcatttaacatcagcttttttttcctttggctactaaaatgtttcaattcgccaggttgtcttttgcctgctcatggattcagcaggcagttcaaaaggttgacctttttgggaatctccggatctatgcttattttcaactccccgaagcattttgtcgcttgctacccccttccttgtttttgggtacctaggt

SEQ ID NO: 398112 - DNA, 333 bp, Oryza sativa nipponbare
  unsure (1)..(333): unsure at all n locations
ataattaattcacaacaccatatttcattgatcaggttcagaacctgcacagaaatacacactaccggtacagatctcaccctctctccaatactcgtacatccatccacgcggtccacacgaatacgtacatctatacggtacacgtacgtacatctactgcaccgngtacacacacgcacactctcctgcagagacgcgcatcgtcgtcaacctagctagcttagctgaaggcgatgcgtcgccatggcagcacggcggcggcggcgctcacttgccggggacgaagttggtggcgtaagccccaggcgttgttgttgacggggtccggcg

SEQ ID NO: 398113 - DNA, 243 bp, Oryza sativa nipponbare
ccacatccatctcgtaccctttgtataaatatatatagccggagcttccatatatttcattcacatatgcctaacccaacaacatatagtcgtagcagataccactcttacatcaagtcagagagagatcaggtgaaacaaaaacaaaagcagagcacggccggtaaaatcaaaagacgatgaacaaactgggaacacacgaaacaaggtgggagacatcatcgaatcagagatgaacaatta

SEQ ID NO: 398114 - DNA, 257 bp, Oryza sativa nipponbare
agacttcttacaaaactaattacataaataaaagctaattcacaagataaattttttaagcctaattaatctataattagagaatgtttactggagcatcacataggctaatcatggattaattaggctcattagatttggctcgcaaattagtccaagattatggatgagttttattaataggctacgtttaatatttataattaattttcaaacatccgatttgatagggacttaaaaatagtttcatttaaaca

SEQ ID NO: 398115 - DNA, 371 bp, Oryza sativa nipponbare
ctggggaggcaagggtcagggaaaatccttccagtgtgagctcgtcttcgccaagatggggatcaaccccatcatgatgagcgccggagagctggagagcggcaacgccggagagccggcgaagctgatcaggcagcggtaccgtgaggcggcagacatcatcaagaaggggaagatgtgctgcctcttcatcaacgatctggacgcgggtgcaggtcgcatgggaggcaccacccagtacacggtgaacaaccagatggtgaacgccaccctgatgaacatcgccgacaacccaaccaacgtgcagcttccccggatgtacaacaaggaggacaacccccgtgtccccatcatcgtcaccggcaacgact

SEQ ID NO: 398116 - DNA, 283 bp, Oryza sativa nipponbare
tataataaacaaaatctcgatgcacattactagaagtttaacgttcagaatattgaatgcataagggttttatggcattctccagacaaaggaaaattagcagctcctgcttgtctcaagactcataatgcgctacataaataaaatccattcctagaacaagctaagcttgaagcagcaaggagcacagcagaagcagagctctctctctaggccaccagagtgctggctgtggtcgactcatacttccaggtgggcgggagcttcttggtgcgcttgtagt

SEQ ID NO: 398117 - DNA, 303 bp, Oryza sativa nipponbare
gggccgcaaaagcctcttccagaattcattggaaatacaagggattacaataaccgtggaaccacgttctaaattctagctcaccttgctaaaagaagcaaagatacagatctgaatgagacagctcaacattgtggtacaatcctctagtagaactagggtacaaaaaaaaatcaaaataatccactcaacactctagttggccaatggtggatttctattttcattgcaagctatcaaagaagccagggccagcctttgctttcagctcgtggccagcatctttacccatctcaaccatga

SEQ ID NO: 398118 - DNA, 361 bp, Oryza sativa nipponbare
gcagtaaccaaatcgattcacaggccacacatacaggtagtatacagattcgtctacacacaaggttattgcagaggcaaaacacgaggtatgtatatcaaacgctctagaaaagattcatgtgatgaaatacatgatgaaccacgtatgttctcaaggtaaaattaattaatgcagtatagttttaactttgtccatcgatctcaacctgtaactgtgacgacacactggctacagtgccctcgaggtactagcagtatagcagtagctgtagtacgtagcagcagcagcagcaggttcactgtcttgattggattggatcggattagtagacgtagttcttgacgaacatgccctcctt

SEQ ID NO: 398119 - DNA, 317 bp, Oryza sativa nipponbare
gagcaaggtatactcgcattccacaacagtcgaagggcaataataagtcttaacatccaagtttaaaccgaacagaaaatagagttttaaatgactgacatagtgcacaaagcgagcagattttaacggtcaatgcaacaactgaaatgaccgtcgacaaaacttaacgagttctaaaagagcttgatatctcaaatgcagatttggaaagcaccacttgaacgaggctcatttttttttggcggcagccttggtcaccttggcaccggttgggtccttcttctccacgttcttgatgacgccaacagccaccgttt

SEQ ID NO: 398120 - DNA, 332 bp, Oryza sativa nipponbare
gggaacgaaaggcaccctgcgaactgcaggggctgatacggtaattaaattgtctcccaaagatggactatgggagtaaaaacaagcatagcagtttttgttttgccacttaacccagcaaaatggcgctaagaagacaccgtgtagcgattacttcacgatgcagatcttgatcacggatgcgacgccaatacggtgcagagcaacaacagcatcaccaggcttgcacaactgcttctgtacagctgacttgagagcagcatcaaggatgacctctgtcgactccgaatcggtggctttggcagaaccctcagccaggagaggaacaagac

SEQ ID NO: 398121 - DNA, 367 bp, Oryza sativa nipponbare
ataagaagagattatatcccaccatcgatcgattacaccatcatcaataactgaagagcagcctgacagatgattaaaattacatgtccatccacccaaaacacaagtaattaataggtcgattatgagagaagaagaagaagaagaagaagtctagatgtcgaagacgttcttgccggtgaacttgacctcgatggggctgacgttcttgccgatgctgcggaagttctggccgacgccctgcctgccggcgttgaccttctccgggtagacgccgtccttgggggtgggtactgcacctcgccattggggaagaccgcggtagaactggagttaatcttgtacttggagcggagcctggtgccca

SEQ ID NO: 398122 - DNA, 340 bp, Oryza sativa nipponbare
agattaatcacaatgcagtttgattaagcagtgggcatcatcacatcgcattcagaggaaggctatcttagattacagatgaatatgcagacacccagcttggtgttacatacatagactggatttgggtgaaatttagccggcgagggcgctggtgttgtagacgaggagggcgccgccgccgaggagcccggcgagggtcacggcccagatcagaagcccggtggttccaccaacgtaggtgtcaccggtgggagaccattcctccggcgagtagattgggctgtagccgtcgacgtttgcgccgtacttgtcaacgaattggtacacacccttcccc

SEQ ID NO: 398123 - DNA, 325 bp, Oryza sativa nipponbare
agccggagcttccatatatttcattcacatatgcctcacccaacaacatatagtcgtagcagataccactcttacatcaagtcagagagagatcaggtgaaacaaaaacaaaagcagagcacggccggtaaaatcaaaagacgatgaacaaactgggaacacacgaaacaaggtgggagacatcatcgaatcagagatgaacaattaaacaaggctatatatgacgatgacggcttagttgccaccagactcctcgcagcccgggggcttgtaggcgatgaagctgatgagctgcacctgcctgacgttgtcgaagccgatgata

SEQ ID NO: 398124 - DNA, 348 bp, Oryza sativa nipponbare
gacagacagaaattaattaagctagaaatctcctcgatcgatcacacacacacacacaattaaggtacatacatacatgcactgctgcaactgcaactgcagggtcggtgcgtggctactacaagtgtacacatggtacgttggttggcaccatctcgatcgtgtcgttgtgctcacttgccggggacgaagttggtggcgtatgcccaggcgttgttggcgacggggtcggcgacgtggtcgaagaggttctcgatggggcccttgccggtgacgatggcctggacgaagaagccgaacatggagaacatggcgaggcggccgttcttgagctccttcaccttgagc

SEQ ID NO: 398125 - DNA, 381 bp, Oryza sativa nipponbare
taaaaaggtaaactcttcataataatattattaagacattatagctgatgtcttttgatcacactgcgatcaaattatgcatcataggcagtacaactccgcgtcaggaaaaagtagaggagatatatttcttgttattacttaatacagcattcacatatatcgaaccatccggtacgtacgtagtagtactccacgcgttcacatcgatgatcggggacgatatcctcaggtagtacttatgcaaaagcgttggcgtaaactgacgaactgaacggacggacggtcggatttagggctcccataagtccaagttgccggagacgaagtcgtagtggccgccgacgagcttgagggtgccgttggcgatcccctccttga

SEQ ID NO: 398126 - DNA, 352 bp, Oryza sativa nipponbare
tcgtagaatgatggaaatttatgtgcatgtacaatttggccgtagaagaaagaatacaacggttataagcaagggattatcaagtccacgaggaagaagcagaggcaggcaaattacatagtattatacggattataaagaagaaaccaccaccattacactaatacacacaaagctcgatcaagcagcttaattaatttcttccacatgtacgacatgcatcctgtcctcactccgtgatcaatttaagatgattctttgcagctccagctcgacgacgatccatccgaattaaaatcatttgacctcctggatctcgtccagggcgtagttgttggtcgacacgccggcg

SEQ ID NO: 398127 - DNA, 384 bp, Oryza sativa nipponbare
gacagaaacaaaattaagctagataagcactgattccacgcacaatttacatgatcattacatcgtccatcacacaggcactcatgcatcgattacacataggagtattgattcgtgtgactagcttaatgaatttgattagccgatgatctggtccaggacgccgatgttcttgaggcccgagcggacgccgacgcccatgatgtggccgacggcgccgcaggccagcgtgtcggcgagcgtgaacccggcggggtcgccggtctgcaggccggagtcgcgcgcctccagcttcagcccccgccgtcgacttcctgttcgccgacggcgccagcccgaaccttcccgcgaacagcatcaagcgtcgtcgcgtcaccatgataa

SEQ ID NO: 398128 - DNA, 324 bp, Oryza sativa nipponbare
  unsure (1)..(324): unsure at all n locations
tttttacgacaaaccacgaacttggatattaaagatgccacaaagaaggttcacataaacaacacaggtcacagcagcgaaagctacaagcaaaccctgcataatcgaaaagcaaatgtttttcaaaaccagacacacaaactgatagatagaagcccacacggacagatcataggatagcagcagtaatcaagcattgccaaggcaccaggcaagaaccctgaacctctctagtactcgtcaccctcatcaccctcgtcaccatcgtcgaactcggagccgacctnctcgtagtccttctccagcgcggcgaggtcctcgcgg

SEQ ID NO: 398129 - DNA, 304 bp, Oryza sativa nipponbare
aaggtgaaatcatgattccctctattgtcatgctcgcaagtcacaggaccataaaaagaggcaacaaaagggccttaggtaaagaaaaattataccgatacattactgcaactcctcccgaattttcaacatcatacacactacatcgcatgcagggaacatgtgccgctaccaagagaccgacaaaacctcattcctcccaatgacaagttactcggatatattcattggaggttcaaggctctcgacaagaatgcgcaggtctaaatccttatcctcaaacttcttgatgaaaggatgattc

SEQ ID NO: 398130 - DNA, 430 bp, Oryza sativa nipponbare
ccacgcgtccgcccacgcgtccggaagctatatacattcctaaccataagttcacagtttctattttgagaaataacactcagaggacccattggcgtattaagacctacctggctttaagccacatggatgctgcgaaaattggtataattgttgcggacatgagaaaagtgttggcaaagaatccacatatagagcaacagaggctgcataggagagtattttttgagaaaattgatccaaaaacccaagctcttatgatttacatatcatgctttgtgaagacatctcattttgaggagtatctcaatgtccaggaagctgttatgttggatcttcttagaatagtcggccatcatagggcaaggcttgccacccagattcgaacagttcagaaatcttatggcaatgcaaacatcgataacatttc

SEQ ID NO: 398131 - DNA, 425 bp, Oryza sativa nipponbare
ccacgcgtccggtccactctcacaccaaaaccagtaaaaaaatatcgtcaccttcgccggcgagatggcccaccgccgcatcatcctcctcctcgccgccgccgccgtcgccgcgacctccgccgtcgccgccgcgtcctccggcttcgacgactccaacccgatccgctccgtcacggaccacgccgcctccgcgctcgagtcaaccgtcatcgccgccctcggccgcacccgcgacgccctccgcttcgcccgcttcgccgtcaggcatgggaagaggtacggcgacgcggcggaggtgcagcggcggttccggatcttctccgagagcctcgagctcgtccgctccaccaaccggagggtgcctccctaccgacttgggattaaccgtttcgcggacatgagctggggaggagttcaggcga

SEQ ID NO: 398132 - DNA, 376 bp, Oryza sativa nipponbare
ccacgcgtccgatcatccgtaccctactgcttctggtattggataccgtgttatctaaggcacaagaaaacgaaggtggatacctccacgacacaatcgaatcgaattaccaacaagcaaccatacgaggatgaggatgatcttaactgctgcttaccaaacacatacatcgatgttgaccatgcctgcatcacttagcatggagagaagagttctactcaaagcttttggcgctgaacttgtccttactgatgccggaaaagggatgaagggggctgtagatcaggctacagagactgtaaataagacacctgatgcctatatgctgcagcagtttgacaaccctgccaactcagaggtacattatgagactact

SEQ ID NO: 398133 - DNA, 394 bp, Oryza sativa nipponbare
ccacgcgtccgcccacgcgtccgggatgttccttggagagaatttttcaaaagcaaggcagtgtgggcaatgatatatgctcacttttgtggaagctgggggcactatacttgcttgtcttggctaccaacattctttagtgaggagctggacctgaatttgactgaagcagcatgggtgtcagtccttcctcctttgggctcaatgatcattacatctattgctgcaccttttgcagacaacttgatatcaaatggagtagacaccacaaaggtacgaaagatatgtcaaacaattgcatttctgtcacctgcaactttcatgatgctttcctctgtggatcttggtgtgccaccgtgggaaattgttgcttttcttacaagtggtctggcac

SEQ ID NO: 398134 - DNA, 358 bp, Oryza sativa nipponbare
ccacgcgtccgcgtcactggactgttctttcttatcatagggacagtagtttggatgcttgaacatagaatcaatgatgaattccgtggccctcctgcgaaacagcttattactgtgttctggttcagtttctcaactctgtttttcgcacacagagaggacaccaggagcactctcggccgcttcgtgatcatcatatggctgttcgtcgttctgatcatccagtcgagctacactgccagcctgacctccatactcaccgggcagcagctcacgtcgccgatcaccgggatcgacagcttgatcaccaacgacgttcccatcgggtttcaagtcgggttcttcgcggagaactacc

SEQ ID NO: 398135 - DNA, 403 bp, Oryza sativa nipponbare
  unsure (1)..(403): unsure at all n locations
ccacgcgtccgcgccgccgccgccgccgcaagtagccacccgcgccgccgtcgccgccgtcgccggagaaggagaggagcagccatgggtcgcgtgcggaccaagacggtgaagaagacctcgaggcaggtgatcgagaagtactactcgcggatgacgctcgacttccacaccaacaagaaggtgctcgaggaggtgtccatcctgccgtcgaagcggctgcgcaacaaggtggccgggttcaccacccacctgatgcgccgcatccagcgcgggcccgtgcggggcatctcgctgaagctgcaagaggaggagcgcgagcgccgcatggacttcgtcccgggaaagtcggcgctcgaggtggaggagatccgcgtcgacaaggagaccatgnagatgctcg

SEQ ID NO: 398136 - DNA, 455 bp, Oryza sativa nipponbare
ccacgcgtccgcgccggtgcacggccaggccggcgccctcggcgccgcaggcctcgtcgccatcctcagcggctgcctcaccatgtacggcgtcgcctccttcggcgagggcgagccgtccacggcgccgacgctgacgctcaccggccgcaagaaggaggccgacaagctgcagaccgccgacggctgggccaagttcaccggcggcttcttcttcggcggcatctccggcgtcctctgggcctacttcctcctctacgtgctcgacctcccgtacttcttcaagtagatcttttgtttgtaagtgcatgaccgggtgatgcatgtgtagatcgatcgatgatggaacatgtgtgggttcatgtggtggctgagttggagtgccttctacttgtataaatgaaatgcatctgcacaagggcacaaacaggctggcttgatggataaaaaataaa

SEQ ID NO: 398137 - DNA, 440 bp, Oryza sativa nipponbare
ccacgcgtccgcaccggtggcaaaaatgggtacagtgagaactttagtatcttgtgcagtgaactttgggtggcccctccatcagcttgatgtgaaaaatgcatttcttcatggtgatttatatgaggaggtctacatggagattcctccaggatttgggaatagccagacagttggaaaaatatgtaaactcaagaaatccttgtatgggttgaagcagtttccacgtgcgtggtttgaaagattcaggtgcgcagtgtgtgatatggggtattctcagtgtaatggagatcacacggtattctacaaacatagggggacatacatcaccatcttggctgtgtatgttgatgatatagtgatcaccggtgatgatgtagaagaaatcaggtgcctgaaggaatggacacctaaatgtagaaagatattgtgatgctgat

SEQ ID NO: 398138 - DNA, 346 bp, Oryza sativa nipponbare
ccacgcgtccgcttttttttgacacgaggaactcatcatgaatccactaattgctgctgcttccgttattgctgctggattggccgtaggtcttgcttctattgggcctggagttggtcaaggtactgctgcaggacaagctgtagaaggtattgcgagacagccagaagcagaaggtaaaatacgcggtactttattgcttagtctagcttttatggaagctttaacaatttatggactagttgtggcactggcgcttttatttgcgaacccttttgtttaatcctaaaaaagaaaacgagtcctttagattagatactttcttctttttttaagaaattggtat

SEQ ID NO: 398139 - DNA, 414 bp, Oryza sativa nipponbare
ccacgcgtccggtcttgattcttgtccagcggcagaaagagttgcaagcacatatgagggattggacagactgggctcagcagaaggtgatgcaagtcactcgtcgacttgccaaggagaaggaagagcttcattcacttaggaaagagaaggaagaagcggaccgcctccaagaagagaggcacaatctggaagagagcactcggaagaagcttttagagatggaatctgcgatttctagggcgaacacccagctggaaaaggcagaatcttctgctcgtagacgtgaagccgagaatgaacagctcaggatacagatggaagctgcaaagcggcatgcactagtgtctgcaacaaataatttggagctttcaaagaaggatgagaacagtcataaaaaggctcagcattggg

SEQ ID NO: 398140 - DNA, 309 bp, Oryza sativa nipponbare
ccacgcgtccggcttcatcgcctacaagcccccgggctgcgaggagtctggtggcaactaagccgtcatcgtcatgtatagccttgtttaattgttcatctctgattcgatgatgtctcccaccttgtttcgtgtgttcccagtttgttcatcgtcttttgattttaccggccgtgctctgcttttgtttttgtttcacctgatctctctctgacttgatgtaagagtggtatctgctacgactatatgttgttgggtgaggcatatgtgaatgaaatatatggaagctccggctatatatatttatac

SEQ ID NO: 398141 - DNA, 238 bp, Oryza sativa nipponbare
tcgacccacgcgtccggaaataacatgatgaaacacacaagtttgcctgttgattatttcctgtaatttatttcacagggtgaaatttgtagatctatcctgatcccgtaagagttgtattattttgttacccagtggaagatctcattgccaatcctgaaagcaaagaatggctattcatttcaacagagctgtgtggcggttcacacattaaaaacactatgcgggcagaagcatt

SEQ ID NO: 398142 - DNA, 467 bp, Oryza sativa nipponbare
ccacgcgtccgggaccggtacccgacccaccgcgggctggtggagtcgatgcacatcttccggtcgggcgccgacgcggccccgggcgtcatccgcgacgcgctcgccagggcgctggtcttcttctacccgctcgccgggcgcatcgtggagcccgaggccgggtcccccgccatccggtgcaccgccgacggcgtctacttcgccgaggccgccgccgactgcagcctggaggacgtccgcttcctggagcgccccctcctcctccccaaggaggacctcgtcccctaccccggcgacgaccgctggggcgtcgagccccacaacaccatcatgatgatgcagatcaccaaattcacctgcggcgggttcgtgatggggctccggttcaaccacgcgtcggcggacggcatgggcgcgggtcagttcatcaacgcggtgggcgacatggcgcggggctcccggag

SEQ ID NO: 398143 - DNA, 296 bp, Oryza sativa nipponbare
  unsure (1)..(296): unsure at all n locations
ccacgcgtccgcggcgcccccgtatggaacaacaacaactcgctcaccgtcggctcccgaggcccgggcctgctggaggactaccacctggttgagaagctggccaacttcgacagggagcgtatcccggagcgcgtggtgcacgcccgcggcgccagcgccaagggcttcttcgaggtcacccacgacatcacccacctcacctgcgccgacttncttcgcgccccgggcgttcaaaccccgggcatcgtccggttttccaccgtcattcacgagcgcggcaggccggagaccct

SEQ ID NO: 398144 - DNA, 341 bp, Oryza sativa nipponbare
ccacgcgtccgatcagctctaacaggtgagtgcatcaatggccgtggccaccatggcgctctcctccccggtgatggcccgcgcggcgccgtcgacctcctccgcgctcttcggcgaggcgcggatcaccatgcgcaagaccgccgggaagcccaagccggcggcgtcgtcggggagcccgtggtacggcgccgaccgcgtcctctacctcggtccgatgtacggcgagccgccgagctacctgaccggcgagttcccgggcgactacgggtgggacaccgaggggctcttcgccgaccctgagacgtacgccaagaaccgggcgctggaggtgatccact

SEQ ID NO: 398145 - DNA, 447 bp, Oryza sativa nipponbare
ccacgcgtccgagcaaagaaggagagagcttggtgagctgcagagatggccccctccgtgatggcgtcgtcggccaccaccgtcgctcccttccaggggctcaagtccaccgccggcatgcccgtcgcccgccgctccggcaactccagcttcggcaacgtcagcaatggcggcaggatcaggtgcatgcaggtgtggccgattgagggcatcaagaagttcgagaccctctcctacctgccaccgctcaccgtggaggacctcctgaagcagatcgagtacctgctccgttccaagtgggtgccctgcctcgagttcagcaaggtcggattcgtctaccgggaggaaccacagatcccccggatactacgatggcaggtactggaccatgtggaagctgcccatgttcgggtgcactgacgccacccaggtgctcaaggagctcga

SEQ ID NO: 398146 - DNA, 401 bp, Oryza sativa nipponbare
ccacgcgtccgcccacgcgtccgaaaaagccaaaaaaataagtgattcgtttttagcccttataaaaagaagacggattcttgaacctctttcacgctcatgtcacgtcgaggtactgcagaaaaaagaactgcaaaatccgatccaatttttcgtaatcgattagttaacatggtggttaaccgtattatgaaagacggaaaaaaatcattggcttatcaaattctctatcgagccgtgaaaaagattcaacaaaagacagaaacaaatccactattggttttacgtcaagcaatacgtagagtaactcccaatataggagtaaaaacaagacgtaataaaaaaggatcgacgcggaaagttccgattgaaataggatctaaacaaggaagagcacttgg

SEQ ID NO: 398147 - DNA, 393 bp, Oryza sativa nipponbare
ccacgcgtccggagaaacaaatgctgatataaccgttgctgcgctgcccatggatgaagaacgtgctacaggatttggccttatgaagattgatgatgaagggaggatcattgaatttgcagaaaagccaaaaggagagaagttgaaatcaatgatggttgacactaccatacttggccttgatactgagagggcaaaggaattgccttacattgctagtatgggaatctatgtttttagcaaagatgtgatgcttaagcttctccgtcaaaatttccctgctgcaaatgactttggaagcgaggttatccctggagcaacagaaattgggatgagggtgcaagcttacttatatgatggttactgtgaagatattgttactatagaggcatt

SEQ ID NO: 398148 - DNA, 180 bp, Oryza sativa nipponbare
acgcgtccgttttttttttttttttttttttttggagacaaatcatatgatgctttatttcaggacacgtgctgacaaatgcccatgtaaagggttctgatatacagggaagataaaatgtaaactgtttaacactacaaggctaacacactgtgttccccattgctacacaagcagaac

SEQ ID NO: 398149 - DNA, 374 bp, Oryza sativa nipponbare
ccacgcgtccgcccacgcgtccgcccacgcgtccgcccacgcgttcgcggcgaggaacccgctgctgacgaggaacctggagaggaacggcaggatcacctgcatgacgtttccgcaggactggcttaggagggacctgaacgtgatcgggttcgggctgatcgggtggatcgcgccgtcgagcgtcccggcgatcaacggcaacagcctcacggggctcttcttctccagcatcggccaggagctctcccacttcccctcgccgccggcgctcgactcgccgttctggctgtggttggtgacgtggcaccttgggctgttcctggcgctcaccttcggccagatcgggttcaaaggcaggaccgagggctact

SEQ ID NO: 398150 - DNA, 406 bp, Oryza sativa nipponbare
ccacgcgtccgcggacgcgtgggcgcgagtcggcggcgacaacatatcgaaaatcgaacgggagaaattcgctctgattctctctcgcgggcggcggaagcaatcgtagttagcagaggccggcgagcgagccgccaccggcgatgggcgacagccagtactccttctccctcaccaccttcagcccgtcggggaagctggtgcagatcgagcacgcgctgacggcggtcgggtccggccagacctccctcgggatcaaagctgctaatggagtagttattgccaccgagaagaagttggccttctattttagtggatgaaacatctgtgcaaaagattcagtcgttgactccaaatatttggtgttgtctacagtggcatggggccagacttccggttttagtga

SEQ ID NO: 398151 - DNA, 254 bp, Oryza sativa nipponbare
ccacgcgtccgcccactccgatcgcaaatactctctctcgccgatagcagcagcagcagcaatggccgccctcgccggcgcatccaccgccttcgccgccaagccgcgcctggcgcgcgcgccgtcgtccccggcccggcggttctccgtgtcgtgctccgcgtcgggcaacaacggcggcgccggcgagatggcgcagtcgctggcggcgtcggccaagacgtttttcgcggcgctggcgctgtccttggtgc

SEQ ID NO: 398152 - DNA, 354 bp, Oryza sativa nipponbare
ccacgcgtccggtgggacgtcctggagaagctgggagccgacacgacggggagcctccacctggagcccgacggcgggttccctcaccacatgcccaacccggaggacacgaccgcgatgtccctcacgcgcgatgcggtcctggaccacggcgcggacctcggcgtggtgttcgacaccgacgtggaccgcagcggcgtggtggacgccacgggcgcggccatcaacggcgatcggctcatcgcgctcatgtccgccatcgtgctggacgagcaccccggcacgacggtggtcacggacgcgcggaccagcgacgggctcacccgcttcatccaggccaggggcggccaccac

SEQ ID NO: 398153 - DNA, 85 bp, Oryza sativa nipponbare
gcagtaccgtctcgaattcccggtcgacccacgcgtccgcccacgcgtccggcggcgcgtacagggatcgttttttcgggggggc

SEQ ID NO: 398154 - DNA, 351 bp, Oryza sativa nipponbare
ccacgcgtccgcccacgcgtccgcccacgcgtccgaagggctcaagtccaccgccgggctccccgtgagccgccgctccaccaactcgggcttcggcaacgtcagcaatggcggaaggatcaagtgcatgcaggtgtggccaattgagggcatcaagaagttcgagaccctatcgtacctgccaccactcaccgtggaggatcttttgaagcagatcgagtacctgcttcgatccaagtgggtgccttgcctcgagttcagcaaggttggattcgtctaccgtgagaaccacaggtcttccgggtactactatggcaggttttggaccatgtggaagctgtccatgtttcg

SEQ ID NO: 398155 - DNA, 372 bp, Oryza sativa nipponbare
ccacgcgtccggtttgtttcaggtgacactcttgtccagaatggcgctaccagcattgtcggccagtgcgtgattgagctcgccaaactgcatggtcttcacaccatcaacatcataagggacaggcctggttcacaagaggccaaggacaaacttaaacagcttggagcagatcatgtgtttacggaaagccagctagacatcaagaatatcaaaagcttattgggtgctttgccagaacctgcattagggttgaattgtgttggaggaaatgctgcttctgtcatactgaaatttttaaggcaaggtggcacaatggtgacatattggtggaatgtccaagaaaccctgttactgtttctacttcatctt

SEQ ID NO: 398156 - DNA, 254 bp, Oryza sativa nipponbare
  unsure (1)..(254): unsure at all n locations
cgcgtccgcctatttcctactcaacacaaggganattccttcactcacttagctaattaatctgcnaccatgtcggacaagtgcggcaactcccactgtgctgacaagagccagtgcgtgaagaaaggtaccagctatggcgtcgtcatagttgaagccgagaagagccacttctaggaggttgtcttctgtaattattatggtagcttaaatttttgatgttcacttttccttgactattttttttttgtttg

SEQ ID NO: 398157 - DNA, 419 bp, Oryza sativa nipponbare
ccacgcgtccggcgacggcgtgataggcacccacctcccatggtccctgaaaagttgaaggctggggtcgggggatactcgcagattggaaaggcatttattgctgcaactatattggtgtttggaggatcaacggctgtcctattatacacagcagataagctgcagttgcattcagtagatgatgtcagaactaaaggaagagatgctgtgcaaccacgagccgacatgatcaaagaacaaatagctccattgagaagctgggctgaagagatgtcccgaaaatggcatttcgaaggagataaagatgccaaggagaagtccattatcagagagctttcaagagcactcggctctaggacgccgccaacttgatcaaacatcttcccggccattggttgatgttaccaagtttacca

SEQ ID NO: 398158 - DNA, 372 bp, Oryza sativa nipponbare
ccacgcgtccggcttcttcgtccaggccatcgtcaccggcaagttctcccatcgagaacctcttcgaccacgtcgccgaccccgtcgccaacaacgcctgggcatacgccaccaacttcgtccccggcaagtgagcacaacgacacgatcgagatggtgccaaccaacgtaccatgtgtacacttgtagtagccacgcaccgaccctgcagttgcagttgcagcagtgcatgtatgtatgtaccttaattgtgtgtgtgtgtgtgatcgatcgaggagatttctagcttaattaatttctgtctgtcatcatctttgcttctttggatcgagatttaatgtaagccgcaggccgcatccaagggatgatcga

SEQ ID NO: 398159 - DNA, 123 bp, Oryza sativa nipponbare
  unsure (1)..(123): unsure at all n locations
ccacgcgtccgcggacgcgtgggcggacgcgtgggcgctgcgctgttctttggtcttcttggatctctgacgtagatcgnatccaatttcagtttgtctggaggtgagaaagagagagagtaa

SEQ ID NO: 398160 - DNA, 319 bp, Oryza sativa nipponbare
ccacgcgtccgagaagaagaagaagaaagaagaagaagaagatgctgacctctgctagcagtgtcgttggatggtcggccgtgttgcccgctgctgtgaaggggcgcagcctgcagattcaggctcctcgccgtgttgcgttgcgcgttcgtgcggcggcggcggcggtggcagtggaggctgcggaggtggactacagctctaacatctcggtgtttccgatggaggcgtgcgacctcatcggcggtgaggcgtgcaacgggcatatgttcccagaggcctagctcttatcatcggctgctgttgcttgttctcgtgc

SEQ ID NO: 398161 - DNA, 410 bp, Oryza sativa nipponbare
  unsure (1)..(410): unsure at all n locations
gtcgacgcacgcgtccgcggacgcgtgggcgaaactcttctgcaggcatcttttttttcgtttaaaagcctagctanagacagaccgaggatcttatgaaaacccacagcttataggttacttgctaatttatgcatttgtggtctatatagtaaccagcaagtgtaggaaattccttcttttgatcttaccaagtcactctcttgtggtaccagtttacgagggagtaaaatccttctacaaagaggatgatgagaccttgccagtgaacatgtacggaaaatctaaagttgctgcagagaagtttattattgaacaatgctcaaactatgcaatctttggaagcaagtattattatgggccacaaacaatttttcctggtggaaaatctcttccaattcagtggatgg

SEQ ID NO: 398162 - DNA, 483 bp, Oryza sativa nipponbare
  unsure (1)..(483): unsure at all n locations
tcccggctcgacccacgcgtccgccggtgggtcaactacctccaccctggcctcaatcgtgttcgcatgtctccgcatgaanagcnccgcatccttgagctccatgctcggcggggaaacaggtggtccaggatagcaaggcgtctgccaggacgtactgacaatgagatcaagaactactggaggacacatatgaggaagaaagcacaggagaggaagagtaacatgtcaccctcatcatcctcgtcttcactgacataccaatcttgccacccagagaccccgtcaatgatcattggaattgaggagcaggaacttcatggcggcagtggctgcatcacaagcatcatgaaaagcacccctgttgacatggatggttatcccatggatcagatatggatggaaattgaggcaccaaatgtgctcccagggccattgttttgatgaagcaaaggatagtgcatccaataacctatctggtcc

SEQ ID NO: 398163 - DNA, 388 bp, Oryza sativa nipponbare
ccacgcgtccgcccacgcgtccgcccacgcgtccgcctttcagtattttccaccttagagctcaccagacacagcagctgatacttgtttagggtaagacaagatgaacaggaagccaggagactgggactgcagggcgtgccagcacctcaacttcagccgccgggacctatgccagcgctgcggcgagccgcgtggcgccgctgatcgcggcagcggtggtggcggtgactacgccaacttcggcggccgtggtggttcctccttcggtggaggctttggcactggctctgatgtccgcccaggtgactggtactgcaactgcggcgcgcacaacttcgccagccgctccagctgcttcaagtgcgctgcttttaaggacgatgct

SEQ ID NO: 398164 - DNA, 290 bp, Oryza sativa nipponbare
ccacgcgtccgcaagaaagcataagcaacacaagggattaactcatcactcacttagctaattaaagcttggaccatgtcggacaagtgcggcaactgcgactgtgctgacaagagccagtgcgtgaagaaaggtaccagctatggcgtcgtcatagttgaagccgagaagagccacttcgaggaggtcgccgccggcgaggagaacggcggctgcaagtgcggcaccagctgctcctgcaccgactgcaagtgcggcaagtgaagtcacgaatcaaccgaacactcgcc

SEQ ID NO: 398165 - DNA, 94 bp, Oryza sativa nipponbare
ccacgcgtccgatgggaggcttctacatcgcccctgctttcatggacagtctcgtcgtccacatctccaagaacttcatgacccttcccaacat

SEQ ID NO: 398166 - DNA, 431 bp, Oryza sativa nipponbare
ccacgcgtccgcccatcgcgttcgcgactacctggggaaccccaacctggtgcacgcgcagagcatcctcgccatcggggcggtccaggtggtgctcatgggattcgacgagggctaccgcgtgggcggatgcccgctcggcgagggcctcgacaaggtgtacccaggcggcgccttcgacccgctcggtcttgtcgacgaccctgacaccttcgccgagctcaccgtgaatgagctgacgaacgggcggctcaccatgttctccatgttcggcttattcgtgcaggccatactcaccggcaagggccccataatgaactcttttcaccacgttgtcgaccccgttgccaacaacacctgggcatacaccacccaacttctggcccggcaagtgagcacaactgacacgtatcgagatggtgccaaccaac

SEQ ID NO: 398167 - DNA, 118 bp, Oryza sativa nipponbare
  unsure (1)..(118): unsure at all n locations
ccacgcgtccgcggacgcgtggggccgcggccaccatggcgctctcctccccggtgatggcccgcgggggggggtcnacctcctccgtgctcttcccccccttctcggtttttcttgc

SEQ ID NO: 398168 - DNA, 420 bp, Oryza sativa nipponbare
  unsure (1)..(420): unsure at all n locations
ccacgcgtccgcaagcagctggaggatggccgcacccttgctgactacaacatccagaaggagtccgccctgcaccttgtgctcaggctcaggggaggtatgcagatcttcgtcaagaccctgaccggcaagaccatcaccctcgaggtcgagtcctcggacacgatcgacaacgtgaaggccaagatccaggacaaggagggcatccccccggaccagcagcgtctcatcttcgccggcaagcagctggaggacggccgcacccttgccgactacaacatccagaaggaatccaccctccaccttgtgcttaggctcangggaggtatgcagatcttcgtcaagaccctgactggcaagaccatcacactngaggtcgagtcctcggacacgatcgacaatgtgaaggccaagatccaa

SEQ ID NO: 398169 - DNA, 357 bp, Oryza sativa nipponbare
ccacgcgtccgcccacgcgtccgcccacgcgtccgcaactcaagtggctagtcatgctcagaaatattttggtagacaaactaatccaaacaagaagaagcgcagatcaagcctttttgatatgatggcaactgatatgtcaccagcaccaaactgccctgtcttgccaccatcaatgggaaaattacatgatatggtagctatgactaaacaactccagaacagcagtttggaaggagtctcatcttcaagcacagttaatctagcaccacaagttgcaagagatcttcctcccccaattccatcttttaaagcaacaaatgtagattcaagtctcagcaaaatgaaccacatgga

SEQ ID NO: 398170 - DNA, 399 bp, Oryza sativa nipponbare
ccacgcgtccgcggacgcgtgggcggacgcgtgggcttgtgactacacccgcttcgcttcctcccctctctaagccggggaagctaagccatggcgtccgtcaccgcccgcaccccggtcgcagccctccgctcgtcggcgtcgctcaagtctaccttcctagggcaatcctccacccgcctcgcccgcgcaccgactacgaggcgtaatgttcgggcggaggccaagggagagtggctccccggcctcccttctcccacctacctcaacggcagcttgccaggcgataacgggttcgacccgttgggtctggcggaggacccggagaacctgcggtggttcgtgcaagcggagctggtgaacgggcggtgggccatgcttggggtggccgggatgctg

SEQ ID NO: 398171 - DNA, 165 bp, Oryza sativa nipponbare
  unsure (1)..(165): unsure at all n locations
ccacgcgtccgcccacgcgtccgcgggagagagagcatctagctagggagagaaaggaagagaccanaggagagagatggccactgcttatgctcccatggcgagccagctgatgaagagcagcttggtgtgctccaagccgagggggctgtctggtgcttcctg

SEQ ID NO: 398172 - DNA, 447 bp, Oryza sativa nipponbare
ccacgcgtccgcccacgcgtccgttttcctcgaaactcagctgctaggagaaggagaaggtaggctccaggcatggcttcccagctctccgccgccacatccgtgccgcagttccatggcctccggacctactcctctcctaggtccatggtgacgctgccatcgttgaggatgagcaagaagaggtcccagggcatccggtgcgactacatcggctcagccaccaacgttatcatggtgacgacgacgacgctgatgctgttcgcggggaggttcgggctggcgccgtcggcgaacaggaagtcgacggcggggctgaagctggaggcgcgcgactccggcctgcagaccggcgaccccgccgggttcacgctcgccgacacgctggcctgcggcgccgtcggccacatcatgggcgtcggcgtcgtcctcggcctcaagaacatc

SEQ ID NO: 398173 - DNA, 444 bp, Oryza sativa nipponbare
cacagacagtcatttggaatggacctatgggtgtcttactaatttgacaagtttgcagtggggactgaggctattgcaaagaagttggcagaccttagcggcaagggtgttacaaccattattggaggaggtgattctgttgccgctgatgagaaggtgggagttgcagatgttatgagccacatttcaacgggaggtggtgctagcttggagctgttggaaggaaaggaacttcctggagtcattgcacttgatgaagctgtcactgtggccgtatgaggctaagtttcattttgttgcatcttcttcatgtaccattctaaacttgctatattctactcctttctcgcaccttttcaaccactcgaaatgtaagagaccaatgttttatagagatgctggaaatcgtttgaataacttcccaacattttgggtttggtggat

SEQ ID NO: 398174 - DNA, 389 bp, Oryza sativa nipponbare
ccacgcgtccgagcgtgactctgctctagcacctcaccaagcagtaagctagagagctagcaatggcgccgggcgtgatggcctcgtcggccacctccgttgctcccttccaggggctcaaatccaccgccgggctccccgtcagccgccgctccaacagcgccggcctcggcagcgtcagcaacggtggaaggatcagctgtatgcaggtgtggccgattgaaggcatcaagaagtttgagaccctgtcgtacctgccaccgctcacggtcgaggacctcttgaagcagatcgagtacctgctccggtccaaatgggtgccttgcctcgagtttaagtaggtcgggttcgtctaccgtgagaaccacaggtcttctgggtactatgat

SEQ ID NO: 398175 - DNA, 401 bp, Oryza sativa nipponbare
ccacgcgtccgcccacgcgtccgcccacgcgtccgcccacgcgtccgcccacgcgtccggtctctcggcccgccgcttccatcgttcgtcctcgtctccacgctaccgtttcgcaaccacccgcttcctcctccggagaccgctcggccgccgctcgctccagcatggccgccgcgccgtccgccacctccgtccacgacttcaccgtcaaggatgcaagcggaaaagacgtgaacctgagcacctacaaggggaaggttctcctcatcgttaacgtcgcatcccaatgtggcttaactaactccaactacactgagctgagccagctgtatgagaagtacaaggtccaaggctttgagatattggctttcccgtgcaatcagtttggagggcaggaaccc

SEQ ID NO: 398176 - DNA, 392 bp, Oryza sativa nipponbare
ccacgcgtccgcggacgcgtgggcggacgcgtgggcggacgcgtgggcggacgcgtgggctgtggctctctggtctttggttacttcagggtaggaagatgagcacgttagatgccacgcgagcagagctcggccttgttgttctgtacttgaacaaagccgaggccagggacaagatatgcagggcgatccaatacggctcgaagtttatcagtaacgggcagcctggcacggcacaggatgtcgacaggtccaccacccttgctcgcaaagttttccggcttctcaagtgggtcaatgatctgcatggtcttatcagccctcctgctaaggggactcctcttacactggtcttgcttgggaagtccaaaaatgcgctgctctcgactttc

SEQ ID NO: 398177 - DNA, 451 bp, Oryza sativa nipponbare
ccacgcgtccgcccacgcgtccgcccacgcgtccgagacggccaagtcggtgcgggtcttcttcgactggagggactacctcaagttctacaagatgggcacctactggccctacaccccatccatccagctcctctacggcctccgcaccgccctcgacctcatcttcgaggaaggcctcgagaacgtcatcaagaggcacaaccgcctcggcaccgccaccaggctggccgtggaggcgtgggggctcaagaactgcacgcagaaggaggagtggttcagcgacaccgtcaccgccgtcgtcgtgccgccgtacatcgacagcgccgagatcgtgaagcacgcctggaagcggtacaacctcagcctcggcctcggcctcaacaaggtcggcggcaaggtgttcaggatcggccacctcggccacctcaacgagctgcaattgatgggt

SEQ ID NO: 398178 - DNA, 465 bp, Oryza sativa nipponbare
ccacgcgtccgcttgctcaatgatccatctataaaggagatggctgagcagattgcaagcgaccctgtgtgcacccagatggcagagcagctgcagaagagtgctcatgtgaccggggaacagggtggccctgcattggatcctcagcagtacatggaaacaatgacacaagtcatgcaaaaccctcaattcatgtcaatggcagaacgtcttgggaatactcttatgcaggatcctggaatgtccagtatgctcgagagtttgactagtccttctcataaggagctgcttgaagagcggatgtcccgtattaaagaagatccctctttgaaggggattcttgatgagatagagagtggtggtccatctgctatggtgaagtactggaatgaccctgaagttcttcaaaagattggtcaggctatggcaattaattttccaggagatgctgctacttccactaca

SEQ ID NO: 398179 - DNA, 247 bp, Oryza sativa nipponbare
gtttaattaattcatatactggacctgttgctatataagagcaagttcaatagtatagccaactactagctccaattcatctatagtcaatctaatagcccattcataccactgtgacgtactagagcatgaacatcggctggctcctggcctagtcccaccgtgttttgcggtgcgtgctccagatggatacgagcctcgggctccgggttcttagcctgctggagctaggactccaagacacagt

SEQ ID NO: 398180 - DNA, 317 bp, Oryza sativa nipponbare
  unsure (1)..(317): unsure at all n locations
ccacgcgtccgcccacgcgtccgcaggcaggcaatcagcggcgagtcactcagcccaccggccggcaatggcgtgcaccttctgcttcctccaccagtccacggcccgcgtcgccgcgcgcgtcgccttcccgtccccggcgacacggacccacctcctcgtctgccgcgcccagaagcaggacgacgccgacgtctcccgccgcgcggcgctcgcgctgctggccggagcgacngcggcngtggggggtgaggtggcncccgcccgcgcggcctacggcgaggcggtgaacgtgttctgggagcccaagacgaaca

SEQ ID NO: 398181 - DNA, 430 bp, Oryza sativa nipponbare
ccacgcgtccgcccacgcgtccggatgctttaaagcacccgaactggaatatggggaagaagattactgtagattctgctacattattcaacaagggtttagaagttattgaagcacattatttatttggtgctgaatacgatgacattgaaattgtgatccacccacaatctatcatacactctatgattgaaacccaggattcatctgtgttggctcaactgggatggccagatatgcggataccaatcttatacaccatgtcttggccagacagaatctattgctcagaggtcacctggccccgactagatctttgcaagctgggttcactgacattcaaagctcctgacaatgtgaaatacccgtcgatggatctcgcctatgcagctggaagagctgggggcaccatgacaggagttctgagtgc

SEQ ID NO: 398182 - DNA, 373 bp, Oryza sativa nipponbare
ccacgcgtccgggagcgcgccgtgcaccgcctctcacaatgtcttccgttgccgccgccgccgctgcccagagctggtgcttcgccactgtcaccccgcgctcccgcgccacagtcgtcgccagcctcgcctccccatcaccgtcctcctcctcctgctcctccaacagcagcaacctaccggcccccttccgcccccgcctgatccgcaacacccccgtcttcgccgaccccgtcgcccccgccgcgatggacgccgacgtcgaccgcctcaaggatgggttcgccaagttcaagaccgagttctatgacaagaagccggagctcttcgagccgctcaaggccggccaggcacccaagtacatggtgttctc

SEQ ID NO: 398183 - DNA, 444 bp, Oryza sativa nipponbare
ccacgcgtccgcgatcacaccgtccgccaccggaagagagtagcccccctacgacgacgacgaccatggggctcgcctccacctccgccaccgcgtccgcggccgtgctcaagacgcccttcctcggggcgaagcgcgcgctcgccaatgccgtcggcgtcgcgggcgccaagcccgcgccgcgccgcgcgctcgtcgtgtcggccaagaagtcgtggatcccggccttcaagagcgacgccgagttcatcaacccgccgtggctcgatggctcgctccccggtgacttcggcttcgacccgctggggctgggcaaggacccggcgttcctcaagtggtacagggaggcggagctgatccacgggcggtgggcgatggcggcggtgctggggatctttttcgggcaagcgtggaacggcgtgcccgggttcgaggccggcgcgc

SEQ ID NO: 398184 - DNA, 379 bp, Oryza sativa nipponbare
ccacgcgtccgagctcactgcatcaatggccgcggccaccatggtgctctcctccccggtgatggcccgcgcggcgccgtcgacctcctccgcgctcttcggcgaggcgcggatcaccatgcgcaagaccgccgcgaagcccaagccggcggcgtcgtcggggagcccgtggtacggcgccgaccgcgtcctctacctcggcccgctctccggcgagccgccgagctacctcaccggcgagttcccgggcgactacgggtgggacaccggggggctctccgccgacccggagacgttcggcaaagaaccgggagctggaggtgatccactcccggtgggcggatgctgggcgccgctcgggctgcggtttttccggagc

SEQ ID NO: 398185 - DNA, 400 bp, Oryza sativa nipponbare
  unsure (1)..(400): unsure at all n locations
cacgcgtccggtttgtcaagacccagaagacccatgcctacttcaagcgattccaagtcaagttcaagagacggaggcagggcaagactgactacagggccaggattaggctcaccaaccaagataagaacaagtacaacacaccgaagtaccgcttcgttgtgagatttacaaacaaagatatcacagctcaaattgtctatgctaccattgcgggtgatatcgtgatggctgctgcctactcccatgagctgcctcgttatggtcttgaagttggtctcaccaactatgcggcagcttactgcactggctngcttctggctcgtcgtgtgctcacgctccgtggtttggaccaggagtacgagggcaatgttgaggccacntggggaggactactatg

SEQ ID NO: 398186 - DNA, 427 bp, Oryza sativa nipponbare
aaaggaaggacctattttttatagtagaaagcaaccgtatttctttctacattgaaatatagaagatgtacattgaaatgtgtcaagaagagatgtaggagcaccctcatggagagggatttttagaagttccattgcatggtttcacaagttatgcaatgaccatcctactttcttctagctgtaatatttccaaaactagttacaagaaatgcgaggatgcccattgtcattgatatggtatggtgatgaagagattcacgaaatatgaatgtggagctcattaaacttttgccgcttcagtaggtgcaccggccctctcagcaataatctgctcatagagatctctaatcttcagtcctaccatagtttggaagagacctgttccattgttgctgccgcgggagtctgcatgctttagcatttg

SEQ ID NO: 398187 - DNA, 413 bp, Oryza sativa nipponbare
tcgtaactgcactatgaaatatgaataggccattctgtcgcataaataggaatttacagccatgtaatgagtactctgaaaccccaattgctggattacctacacaaccatacaggagaagattacatgcactgggctaattcatgtccttatgatcttatattcacaagaaagtttcagtttctgtatacccatcttcatccttggacagaaaaatatattattgaggccaactaaattgacacaatggaactaatccgtgggcacctcatgcaacaatagggtaggatgcgcaagtagcaataccgcacatgttcttgcccatttccatcttgaagtaaccattgtcaccccagtctgcaccccatgagttcttgatgagccagtagggaacgccattttcgacaccatag

SEQ ID NO: 398188 - DNA, 390 bp, Oryza sativa nipponbare
aaccaagtcaacctagctttgattgtgagttgactattagaatgactcggttatattggtcccaaatataaaccgtttctcatcttctaattctacccccttgccagttttggttatcaacactaagtgaggctatgaaatgctacactctcttcagcgatgtatgtatgtatgtacgtatagttgtatatacggagtatatatactacactactataccctgtacgccatgccgacctcgatgagggaggtatgcgggatgccgagcaccaccgccggccgccgcgagtttcgccggaggaagccgtacaccacgttgacggcgaacttcttcaccgccgacgatgacttgtgccccaacacccacgtgtgcccgatcatgtacgacac

SEQ ID NO: 398189 - DNA, 448 bp, Oryza sativa nipponbare
ggtgcgggcggcgatgctggcgctcggggagtggcaggacgcgcacctcgaggtgcggtacaccgacgtcgactacctcgtcttctccgacgccgcggcgtccgtcgccgcgggcgggtcccccttcgcccgcgccacctaccgatactccccgctcctcgcctacctgctcgtccccaactctctcctccaccccacgtgggggaagctcctcttctccgcagcagatttgcttgttgggttgttcattgacaccattctgaaactacgtggtgtccctgacagcactcggatctggtctgttgtagcttggttgttcaaccccttcacgttcacaattggcacaagaggaaactgtgagcccatagtctgcgctgtcatactttggatcctgatatgtttgatgaatggtagagtattgcaggcatcattctggtatgggctgatt

SEQ ID NO: 398190 - DNA, 335 bp, Oryza sativa nipponbare
atccatgcaggcagcctgtttgtgcccttgtgcagatgcatttcatttatacaagtagaaggcactcaaatcagccaccacatgaacacacacatgttccatcatcgatcgatctacacatgcatcacccggtcatgcacttacaaacaaaagatctacttgaagaagtacgggaggtcgagcacgtagaggaggaagtaggcccagaggacgccggagatgccgccgaagaagaagccgccggtgaacttggcccagccgtcggcggtttgcagcttgtcggcctcctttttgcggccgggagcgtaagcgttggcgccgtggacggttcgccc

SEQ ID NO: 398191 - DNA, 391 bp, Oryza sativa nipponbare
cagggttactcccctgttcccacgtctcctcctttatattctcttaacatttacaaatgggtcctaggaacatcacttatttacaccaacactcccccttaagatgggtaaaagatatcaatcatacccatcttgttacatattgattgaatttcactaggacctaaccccttagttagacaatcagctagttgttcacatgacttgatatactctagcataagtaccccactatcaatcttctccttaataaagaacctatcaatctccacatgcttagtgcgatcatgttgaacaaggttgtttccaatgttgatggctgatttattgtcacaatgaagcatcacagtatcacttcttaacactcgcaattcagtcaacaagcttctta

SEQ ID NO: 398192 - DNA, 448 bp, Oryza sativa nipponbare
ttgtactgaatttttgttcaagggaagagaggattaggaacaggattaattaaggcataagtacaccacattccacgtcactaccactccactccactccaccaccctcaaaacacaccacgtacacacatgtacggatgcaatcttcaagctcaagctctcagtctgaccgcatgcggtttagctggttcaacgccggctgcaggatgttgtagagaacccaggcgatcgccggcgccaccacgaacagcagcagcaggccgcggttgtcgccgccctccgccgccgtcgcctccgtcgccagcctcgccacctcctgcgccgccgacgcctcgggcgggaacgcgagcccggcacccgccgccgcgcccaggccgagcccggcgacgagcacctgctccgaccgcatgcggtttagctggttcagcgccggctggatggtgttatt

SEQ ID NO: 398193 - DNA, 380 bp, Oryza sativa nipponbare
aatgcaattttttttaatagaaatagattcaatttagtaatttcttttagattaagtcttagatctcgtttgacctgtgaaagacctcctttgttgaaatgttcccaaaattcctaaaataaaaggaaaaatactttccactgccctaaacaaagggcgggaagcaagacggcgaacatatcctctaaattgatcatcctcaaatcagctattcctggggtggggtattgtctgtccccataaatagaaaactctaggagtaataaattaggagtaaagtattgatataattggaattgcagaagcaaataccaatttactaaaaaaagaagaaagtatctaatctaaaggactcgttttcttttttaggattaaaccaa

SEQ ID NO: 398194 - DNA, 401 bp, Oryza sativa nipponbare
aaccaacacccatcccattatccattatctctgcggggttttgattgatgtgcgaccaaccatgtatattattctcaaagtttaaccactctcaccaccactcattattccatccaatcttccatccatccatccaaggcaagctcagcaaatcaatcaaaaaaaacaaataaaaagagaaaacaaaatggtgtatatgaagaagtctagcaaccggcgaggcgggcgcacaccctgcgctggatgggggtccggcacgatgggcactccttcatcccttgcttgtcatggaggtcattgcatttcgcgcagaccacctggtgcgcgcaagggaggaagacgaccgacatcttctcgctcaggcacatgacgcactcccggtcacgctgtatgtcgtcaaa

SEQ ID NO: 398195 - DNA, 309 bp, Oryza sativa nipponbare
gtataaatatatatagccggagcttccatatatttcattcacatatgcctcacccaacaacatatagtcgtagcagataccactcttacatcaagtcagagagagatcaggtgaaacaaaaacaaaagcagagcacggccggtaaaatcaaaagacgatgaacaaactgggaacacacgaaacaaggtgggagacatcatcgaatcagagatgaacaattaaacaaggctatatatgacgatgacggcttagttgccaccagactcctcgcagcccgggggcttgtaggcgatgaagccggacgcgtgg

SEQ ID NO: 398196 - DNA, 448 bp, Oryza sativa nipponbare
aataacaagttaaatttgccattttgataaaccaatacgattaaatgtggcccgtacagaagcgtatcggtatttggtaacatcaatcaaccttttttgctttcacgtttcgacatgatataaaacttctgtaaggagcgaaattgttacaaagaagcatcaataggaaaaaaaaagaacagatggaaactaggtatccaaaagttagaccagcttcattgaagctatctgggtagcaacctccatagcttcctttagttgagaggcctcagttccctggccctgggcaattccattcttgccaccacctccctttcctttgaggggcgcaatcgatggtgtcaaccaatccaacaccttcaagctgttagcagcgctgggaggcacaccagcataaatgactgccttattcgtggcttcatccgtgctgaatagcatgattggcaaa

SEQ ID NO: 398197 - DNA, 399 bp, Oryza sativa nipponbare
ccaaaaaaagggattataattaaataattaatttactgtatataaattattgataaaaggtgtgcttacaataatgatgaagtatcaggagaaacgtgtcttcaggttacagattattacatgatggtggtacacgaattgtgcggtgatagaaatcatatatgtcctctttccaaaatagactcgatcgatcggtattgctagagtatgagtagcaattattatccgatagagtgaggctgaggccttccgtgactgaagcagattgcaacgctgatcgatctccttacatgctcggcttcgcgctgagaccggctcgcagtttctgacccagagacctgtcagcctgagaccagtaggagagccagatgctcctgatctcgtgggtgaggcagggtc

SEQ ID NO: 398198 - DNA, 471 bp, Oryza sativa nipponbare
  unsure (1)..(471): unsure at all n locations
aaatgttggcaatgcaattacacccaacacagccagtataagttcatccattgcaacacaaagaatacgagctagttcaccgaacaccttcagagttgagcaatggcgtacgagagatttacaacccagcttcgtttgagcgtggcatggacatcttgttatgcattccatggaatcaattgacaagttaaatcagaaccaccagaaaaacacatccgcggacatctgacaacgctaaaaaatcgcaggagttcgttgggcaggaagacaggaagaagctaaaatccgtaagctgtacatncgtgaagtctagagtgcaccaggtgcgtccctcatgctgatattcaagctgtttctcattgttcttcgtccgactcccatattgcccttggtcatcatggcaacaaattctccatagtcaatgcgcccatcattgtcctgatcagcttcattgatgacatcatcaagaaa

SEQ ID NO: 398199 - DNA, 324 bp, Oryza sativa nipponbare
gggaaacgaataaaatcattattgcaaaaacatcatcttcttcttcatgttcttagtgtacacaacaccaactcgatcatcatctcgtcgcactaaacccatcttccccaacccaaagacaacgaactcgctggccacaaatccatccaaccacaattaaccactgctaagctacggtcccccacttcacttgccggggacgaagttggtggcgtacgcccaggcgttgttgttgacggtgtcggcgaggtggtcggcgaggttctcgagggggcccttgccggtgacgatggcctggacgaagaagccgaacatggagaacat

SEQ ID NO: 398200 - DNA, 470 bp, Oryza sativa nipponbare
tttaaatatatatagccggagcttccatatatttcattcacatatgcctcacccaacaacatatagtcgtagcagataccactcttacatcaagtcagagagagatcaggtgaaacaaaaacaaaagcagagcacggccggtaaaatcaaaagacgatgaacaaactgggaacacacgaaacaaggtgggagacatcatcgaatcagagatgaacaattaaacaaggctatatatgacgatgacggcttagttgccaccagactcctcgcagcccgggggcttgtaggcgatgaagctgatgagctgcacctgcctgacgttatcgaagccgatgatacggacgaatgcatcaaggtacgccttcttggccttctcgagctccttgagcacctgggtggcgtcagggcacccgaacatgggcaggtttcacatggtccaagacctggcatcgtagtattcgggggatctg

SEQ ID NO: 398201 - DNA, 449 bp, Oryza sativa nipponbare
aagcagaagaggtagaaataaacacaggatatttaaatctgatcatgcaaaaggacaaagattatacacatcaaaatacccacatttcagacacggttttcggacttacaacacctctaagctctagagcggttgctcatactagtaacagtaaaatggtgcctttaagtggcacctgtttttattttttattttttttatgatatccttgcaagttgatgcagagcttggtgaactggcagcatggaataaaccacagcgttaaaagttgattgcttgatgtgcactggagatcagatcaccatatgctgcaaggcccaaccttatgtacagtggtgattggttgcctttatatgactgttccgctagggattaaggcgtccttgatcacagtgacaatgccacttttgatgaagtatccatcaggctcccttgaagcttcttggata

SEQ ID NO: 398202 - DNA, 183 bp, Oryza sativa nipponbare
gttctgcttgtgtagcaatggggaacacagtgtgttagccttgtagtgttaaacagtttacattttatcttccctgtatatcagaaccctttacatgggcatttgtcagccagtgtgaatgaaataaagcatcatatgatttgtctcaaaaaaaaaaaaaaaaaaaaaaaaacggacgcgtgg

SEQ ID NO: 398203 - DNA, 466 bp, Oryza sativa nipponbare
ttttgcaagagcaaaagatggcatgtgcttcatttggcaagaagtaaaacagactacaaaagtaaggagacgccaaatagttgtagcactggccgaggagactaggatgggcacaagaggatacagaagacaccgtgccaaatcaaatacgttcctaaaaacacattttcattcatgagaatctgaataaacatttgtctcgtgtcactggtgccaatcagttcatgaatgaaaggggatataacttcgaggcagctgctcaggtgtccactggtttgaaacatgagattgttgagacaaattattccacctcttccaagaaatccttgatctctgcagggctcagaaccttgaattcacggtcagatcggattatcccaatttcaatgttgttggcggagatttgtccttcatatccttctttcagagttaaaatagcagtatgaatggcatcgtcaagctccat

SEQ ID NO: 398204 - DNA, 461 bp, Oryza sativa nipponbare
ttttgttctcaagaatcttaagatggtaaatacacacaagagagaggtacggtatacaagacttagtttttcttaagtacaacagatcttccattcctccatgatcctatcagcttctacacccaaaccacacaaatcaccatgcacgagccctcttcctccactgccaaatcaactggggcttgagtagccaagcatccatgtggtgatcagtagccgatgtcagcgtcgtcgacgacgaggttgccggtgatgagctcacggtaggcggcgacgggccagatgaaccccctcgggaggagcttgacggcgagctcgacgtcgatgatgatctccctcatggccggcttcttctcgccgctgatggcgatgaggtagctcctgccgacccagccgatccagccggcgatgtagaggaagagcaacgcccgggtgatgaactcgccccagtgccgctggtc

SEQ ID NO: 398205 - DNA, 402 bp, Oryza sativa nipponbare
aatataacccgaaaagcatgcggattaacataatttgatacagtgagacaacctaggatcacagaattaacagtacaaaaacagatacagttgctcggcaattacagcgagattcaagctcacatgttctcacatcaacagaccgcaataatttcgggccacaatgttctctccctaaaaactaggtaaaaacaagcagcagcttaccgtacaagtttgtcatgactgcttgtgaagtttgaagccaaaaacttttggaacatactgctgagatggcttttgtggcttcaagtgtggatatgtcatcaggaagagatgtgggaatgttgtcccaaagtacgctccgtcaatgttgccttggtacttggatcttggataatgtaaatcttcacattttggaca

SEQ ID NO: 398206 - DNA, 363 bp, Oryza sativa nipponbare
acgtgataccatccattttttttattgtcgacgaatttatcagatatgctctagatacatatcttgtgtgtatatagccggagctttgttttcacatatcctcacccaacgataattgtagtactcttacaataaaaccggccggagagggagggaagagattattacatatgtgttaagagcagaggccattgagatggtacataaccaaactgtaaaataaaaatatatagcatattatatattgatatatcatcaacatagcccaaaacaaagctgcatactattattataggcagcaatccaccagcgcgatgcttgatcttagcttagttgccaccagactcctcgcaacctgggggc

SEQ ID NO: 398207 - DNA, 371 bp, Oryza sativa nipponbare
tcgatcatcccttggatgcggcctgcggcttacattaaatctcgatccaaagaagcaaagatgatgacagacagaaattaattaagctagaaatctcctcgatcgatcacacacacacacacaattaaggtacatacatacatgcactgctgcaactgcaactgcagggtcggtgcgtggctactacaagtgtacacatggtacgttggttggcaccatctcgatcgtgtcgttgtgctcacttgccggggacgaagttggtggcgtatgcccaggcgttgttggcgacggggtcggcgacgtggtcgaagaggttctcgatggggcccttgccggtgacgatggcctggacgaagaagccggacgcgtgg

SEQ ID NO: 398208 - DNA, 385 bp, Oryza sativa nipponbare
ttttattaacaaggagatatgtaccattacatgatgattaacatataaatctgtagctacatggaattaaggtagtggagcagaggaggaaggatgatagaagactccaattctccatggatgggaatgggatcaggtggccttgcagaactctccgcccagatcgtcgcacgcctcctcggggaacaccgtggtgggctcgtcgtaggataggtagtccctgtcgacttcctccgccgccgcacgagaaacagcaacagcagccgatgatgagagcttggcctctgggtacatctgcacgttgcacgcctcgccgccgatgaggtcgcacgcctccatcggaaacaccgagatgttagagctgtagtccacctccgcaggcttc

SEQ ID NO: 398209 - DNA, 352 bp, Oryza sativa nipponbare
gaatcatacgtaagtgcttgctgatacaatatcaacatggagggtacattgccggttccatatgaacaaacataaaaacaccggaaccccatatggccattatgccgatcctagcctagcttggcgaggacatcgccaagagcagatttggtcaacgtgtagtacttgtccgactgttacgggctcttgatcttggctgcatggtcaagcccgtcaatggtggcgaatagcttgccggagaggtccttgaggcccttcttcttgtccttgggctgggagttgatgacggttttgaggtcgtagcgcaagtaagaagccctgaggcggaggtagtccatgacgaacggccaat

SEQ ID NO: 398210 - DNA, 397 bp, Oryza sativa nipponbare
ttttaaaaatatcaactgaccccacaaagaacaagggcctgttgattttattatcaaggtttccaccacaaattaagttgtcccgagtctaataaacatgaacaaaataacgggaggcagctagatgagtaacaacacaacacagcggctcagctcagataaggcagccaacaatagcaccatatgcttcagagcacagggcatcaccatctctgcttccctaccctgtatgttttatcagcacaacttcaatcctcatcgtcatcatcgtcatccttcttgatgcgagtggttccaccctctttgctaatgggcagcttcatgttcccgaacggagtatcgacatcgatcttgcccttgatggtgtagccagtgcccctccccctgatcatgtccc

SEQ ID NO: 398211 - DNA, 461 bp, Oryza sativa nipponbare
aagtctaaaaaagcagattccatttcttgtgtagcttttttggagacatttctagtgtggctacgcattctaataagggtttgtttacaacagaagaaacagaaacaaaaagggataaaacagtagataagtaacagaattttctttgttgccaaggacatccctagtggtagacaaggctaggaaaacgtccattgctcatgcaatttattcttctcatacttctgtacaaaggacatctaaataattgttgtgttgtactgcaaagacattttgctccatctaattaaccaactgatccctcaagcttcaggttcataagtgcatccatctcatgtgcaaactcgtaaggaagattctcgaaaacagccctgcagaatccaccaatcatcgctgcaacagccttttcatggtctatccccctttgttggaaataaaatagctggtcctcccctattttg

SEQ ID NO: 398212 - DNA, 467 bp, Oryza sativa nipponbare
  unsure (1)..(467): unsure at all n locations
tttactaggcaaaccacacgaatacacgattgattaatttcactgagaatagcacgggtacatcacatcacacaaattcatacgttgatacacgcatagtcgccgaagcgaccagctgcttaattaatcgataacacacgggtttaattcagcaataatcagcacacacacaaaccacactcatatgggtggtttttattgtggactaattaaggtaggtgactcgccggcggcgagtgttcggttgcttcgtgacttcacttgccgcacttgcagtcggtgcaggagcagctggtgccgcacttgcagccgccgttctcctcgccggcggcgacctccttgaagtggctcttctcggcttcaactatgacgacgccatagctggtacctttcttcacgcactggctcttgtcagcacnagtcgagttgccgcacttgtccgacatggtcgaagatttaattagcta

SEQ ID NO: 398213 - DNA, 337 bp, Oryza sativa nipponbare
gaaagtaactgatacatgagcatagagaaagatcatcaaactgacaaatttcatgcggccaatatacacacgcgattgcactactgttccaaattaatcaaccttttttcttttcttttttacccatctcatacataatcacgtagaaacaccagagatccattcagattacattgcatccatccaagatgagaatgatcagaagaagtttgggttgtatccgttgctgcaggtggcgaggatgtagtaggcgacgatgtggccgagggagccccaggcgaggacgtcgacgaggttgaagccgacggggtcgttggacccggagaggccggcgaac

SEQ ID NO: 398214 - DNA, 348 bp, Oryza sativa nipponbare
actcatgtatagtatagcccatatctttatattatattattattaacaaaaacttgtcatgcccagctatggcttgggcgcgatctgatacacagaacaaagagaaaacataaaaaggagaaataattaatagcaagcgtcaagccggcctgcttaaaaggtgtaaaggcagctgccgtcgtcgctcctcgccgttgggtcgaagttcttggcaacagggtcggtgcaaccttccggcacaggcaggttacctgcttgctgtgctccttgccctcctcctcctatgcaggccgcctacgatgcatcgatgggatgcgaatagctagagatcttttattcagctggatg

SEQ ID NO: 398215 - DNA, 251 bp, Oryza sativa nipponbare
aagctagaaatctcctcgatcgatcacacacacacacacaattaaggtacatacatacatgcactggtgcaactgcaactgcagggtcggtgcgtggctactacaagtgtacacatggtacgttggttggcaccatctcgatcgtgtcggtgtgctcacttgccggggacgaagttggtggcgtatgcccaggcgttgttggcgaccgggtcggcgacctggtccaagagggtcttgatggggcccttggc

SEQ ID NO: 398216 - DNA, 350 bp, Oryza sativa nipponbare
gggaaacgaataaaatcattattgcaaaaacatcatcttcttcttcatcttcttagtgtacacaacaccaactcgatcatcatctcgtcgcactaaacccatcttccccaacccaaagacaacgaactcgctggccacaaatccatccaaccacaattaaccactgctaagctacggtcccccacttcacttgccggggacgaagttggtggcgtacgcccaggcgttgttgttgacggggtcggcgaggtggtcggcgaggttctcgagggggcccttgccggtgacgatggcctggacgaagaagccgaacatggagaacatggcgaggcggccgttcttgatctcct

SEQ ID NO: 398217 - DNA, 400 bp, Oryza sativa nipponbare
agggatcacttattcattatagttcttccatgctgctctaccacagcaaaacgtttcagacaccatcaaaccagacttaaggatacacattacaggtaaatagtacacaatgaaacgggacacgaccaaggaccagaccagacaaccatagctccattggggaagacaaataggcagacttgtgaaccctagaacagcagcagctccatggctgaggacttactggccaccacggaggcggagcaccaggtggagtgtggactccttctggatgttgtaatccgcaagggtgcggccatcctcaagctgcttaccagcaaagatcagacgctgctggtccggggggatgccctccttgtcctggatcttcgccttcacgttgtcaatagtgtcggacgac

SEQ ID NO: 398218 - DNA, 430 bp, Oryza sativa nipponbare
tggcaggcaaattacatagtattatacggattataaagaagaaaccaccaccattacactaatacacacaaagctcgatcaagcagcttaattaatttcttccacatgtacgacatgcatcctctcctcactccgtgatcaatttaagatgattctttgcagctccagctcgacgacgatccatccgaattaaaatcatttgacctcctggatctcgtccagggcgtagttgttggtcgacacgccggcgtagttcaccttggcgaaccgaaccaccaccgggtagcgagtgttgggatcctgatcaacggtgacgacggagccagtgccgttgtaccagtaggactccctccttaggatcttcaccttggtgcctctcttggggccaatgggaggcggcttggcggcggcgggctccttggtcgccacg

SEQ ID NO: 398219 - DNA, 444 bp, Oryza sativa nipponbare
ttagctagaacactgctgctaccatgagatagtttatccccctgtagtactgtacatcagaaattcaccactcaactcaccccctcacccatgcatccagatccatgcatgcaggaaacaattaccacaacacacacagtaagtctgaatctcatcacatccatctctctctctctcctccccccaattcattaacatcttatacatgcatactccacaaaaaaaaaagaagaaacaagaagagaacatcttccatcgcccaatcatcggtttcaccagcctgaactcatcaagctccttgagatgccctggccctgatgaaatcgatcacacgctcagcctgacagcgtctggatgatggtgtgtgccacgggtcagacaggtgctgcagcaggttgtcgaagggccccttctgcgtcacgttggctgaccaggaacccaaga

SEQ ID NO: 398220 - DNA, 364 bp, Oryza sativa nipponbare
gttaaaactttttctttccattttaaattatctgcaaagtaagaaagtaacactcccaagttacaacagcacaccatccatatatccatgcaggcagcctgtttgtgcccttgtgcagatgcatttcatttatacaagtagaaggcactcaaatcagccaccacatgaacacacacatgttccatcatcgatcgatctacacatgcatcacccggtcatgcacttacaaacaaaagatctacttgaagaagtacgggaggtcgagcacgtagaggaggaagtaggcccagaggacgccggagatgccgccgaagaagaagccgccggtgaacttggcccagccgtcggcggtctgcagcttgtc

SEQ ID NO: 398221 - DNA, 445 bp, Oryza sativa nipponbare
  unsure (1)..(445): unsure at all n locations
agataagcactgattccacgcacaatttacatgatcattacatcgtccatcacacaggcactcatgcatcgattacacataggagtattgattcgtgtgactagcttaatgaatttgattagccgatgatctggtccaggacgccgatgttcttgaggccgagacgacgccgacgcccatgatgtggccgacggcgccgcaggccagcgtgtcggcgagcgtgaacccggcggggtcgccggtctgcaggccggagtcgcgcgcctncagcttcagccccgccgtcgacttcctgttcgccgacggcgccagcccgaacctccccgcgaacagcatcagcgtcgtcgtcgtcaccatgataacgttggtggctgagccgatgtagtcccaccggatgccctgggaccctttcttgctcatccttaacgatggcagcgtcaccatg

SEQ ID NO: 398222 - DNA, 456 bp, Oryza sativa nipponbare
atccaacaaacacaaaatgctgggaagttattcaaacgatttccagcatctctataaaacattggtctcttacatttcgagtggttgaagaggtgcgagaaaggagtagaatatagcaagtttagaatggtacatgaagaagatgcaacaaaatgaaacttagcctcatacggccacagtgacagcttcatcaagtgcaatgactccaggaagttcctttccttccaacagctccaagctagcaccacctcccgttgaaatgtggctcataacatctgcaactcccaccttctcaacagcggcaacagaatcacctcctccaataatggttgtaacacccttgccgctaaggtctgccaacttctttgcaatagcctcagttcctactgcaaacttgtcaaattcgaagacacccataggtccattccaaatgactgtctgttgtcggacgcgtgg

SEQ ID NO: 398223 - DNA, 405 bp, Oryza sativa nipponbare
acagcaaggaaatttattgacatgaaaactatacaggtacagagtacaataaagattcaggatgcaaggagtatagtgcaaatgcaacctgtgaagtacatgtcaccaatttattaatacaactctcagtgctgaatacagtgcataagtgcaggttgctctacagatcccgacctttaggtttaagagctcccaagcagcttcttgatatccttctcaatactaagagggggagtggtgggcgcatagcgatccaccacgcgaccctccttgtcaaccaagaatttggagaagttccacttgatgctatcaccgaaaagcccacctttggtagacttcaaatacttgtacaggggtgcagcattgttaccgttgacatcaaccttgttaaaaatgggatactta

SEQ ID NO: 398224 - DNA, 405 bp, Oryza sativa nipponbare
  unsure (1)..(405): unsure at all n locations
taagaggcattagggaatgatgattaatttaactgttcactgttgtatacatcgaggttcaagattaattaagtaaaagctgcagtaccttcacaaaattatactccttactccttagcatagagctgatcgatggagcgtataaaaatttaactttacatacagagaccaaattatatgcaataggattaatttgccgctgttccgttctgccaaactgcaggcagaaccatcgctgctgagaattgctttccttccttcgttcgttgtgcttcagatcctggacgggatgagcggcgtcgaattcgacaggtacgccgncgccgccgccacgccggagccgagcttcaccgggtagccgatgtccttgagcaccatctccactccactcagggcacccatcaa

SEQ ID NO: 398225 - DNA, 357 bp, Oryza sativa nipponbare
ctgcaacaccagactcagcaacataggaatacaaaggatgaaacggagtgatgcagtgtaacggggaagtgaaacagattacaaatcggagcaccaaacatagcaacgattcaacgaatgtaccaccaccacaccaaaaccaaagctaaaagagtcgatgatgatttgggtatgcagtaaaaatctgaactgtaaagcgacgagccggtgatgatgagcgtgagatttggcattggtttctttataggaaagcgtccatctcgagcaccttgaggacctcatcctggttgttcagcttggccacctcgatgggggtcttcccgtccagattctggggcgtgacagcagcgccatgct

SEQ ID NO: 398226 - DNA, 239 bp, Oryza sativa nipponbare
ttgtttccgcacaacaaatttgtttcagtgctccctcagttttctggcgccaactttccaatagttgtgagataattaattcatatactgtacctgttgctatataagagcaagttcaatagtatagccaactactagctccaattcatctatagtcaatctaatagcccattcataccactgtgacgtactacactatgaacatctactggctcttggcctagtcccaccgtgttttg

SEQ ID NO: 398227 - DNA, 390 bp, Oryza sativa nipponbare
ttcacagaaaatcaatccttgcatgcaggggaaatcgatggatcgacctctctccttaacttgttcttaattctcatgtacaatcaaagaaacacacacgcacacacacatgcgtgcactgcatctctctgagcaacgaactcgattgatttgattttgattcgctagggattaaagagaagctgagatagagatttcgacgatcatgcgacgctgaaggagctggctgcgctctcgacgaacttcctggcgcccttgaaccacctcttgtcgccggcctgcgccttgcagatgtacagcttgccgtcgttgacggtggccgtgatcagctggtgcttgccgccctcgtcgccgtccgccgtcctcgtcagcaccgttacgctgtagtac

SEQ ID NO: 398228 - DNA, 434 bp, Oryza sativa nipponbare
tttaaattaatttgccattgttatttttacttgaccatccgtcaaaatttacatgaatacacaacgcacggacgaacgatttattcatgtgaaggcatgatttacatccttaaaattctctcgcatctagatatagctagagagtggccagctgctgactatgcatggagctggcacggcagtagtgtacaatgctactgtaattttgtattgctacaagtactagacaggtacagggctgaggccagtggatggctgtaggctggcagcatactccctcgcccacagatcataatgtatgatctcctccagtgatggccttgttactagctcattccgatgagcgtcgcatgtcagctccaccaccttgaagatgtccaggtacccgatcttttcatcgatgaacaactccacagccttctcattagcagcac

SEQ ID NO: 398229 - DNA, 454 bp, Oryza sativa nipponbare
  unsure (1)..(454): unsure at all n locations
tcaatgaaatatccttgctcatcctgcagccttaattatatatattacatatggtacatacactgggaagaaaaataaaaaaaaataactccttgattaattcccccatttggttcacgcacaccacccaacccaaaagcggccacgaacacaacaagatacattttgctactgctcctccgacctccaatcgttcgatccgagcccatgcacgcgcccgatcgatgcaacagctagcgatcaaacacgaagcgcgcatgcaagcgaaacccaactctgtgtgtcagatccatggcgagcgagagcgggttgattgctcataggccgagggcgccgagcggcgtcttgccctggccggcctcgaagtagaagatgagcatggcgagcatggcgaggcggncgtgcttgatctcggcgagcttgagccggtcgagcttgtcggtgtccgggatgt

SEQ ID NO: 398230 - DNA, 469 bp, Oryza sativa nipponbare
  unsure (1)..(469): unsure at all n locations
attgcaaaaacatcatcttcttcttcatcttcttagtgtacacaacaccaactcgatcatcatctcgtcgcactaaacccatcttccccaacccaaagacaacgaactcgctggccacaaatccatccaaccacaattaaccactgctaagctacggtcccccacttcacttgccggggacgaagttggtggcgtacgcccaggcgttgttgttgacggggtcggcgaggtggtcggcgaggttctcgagggggcccttgccggtgacgatggcctggacgaagaagccgaacatggagaacatggcgaggcggccgttcttgatctccttcaccttgagctccgcgaacgcctcggggtcatcggcgaggccgagcgggnttgaggcgccgccggggtagagcgggtcgacgacctcgccgagcggcccgccggcgatcggtacccctcgacggcgcccatgagcacc

SEQ ID NO: 398231 - DNA, 456 bp, Oryza sativa nipponbare
ccacgcgtccgcgtccatctctcctctcctcgctctcgctcgctcgttctctcgctcgctgctcccagagggcggccacctcgagcctcacggcgaccgccgcctcccctccgctcctcctcaaacccgccccttccccgctcgctgcctcctttctccggcccgtctctcgcttctccaggttccagtccgtcaagaccaaggccacagaaaatgatcagaccgaaaagagtcctccgaagggaagcagccttgtctgccaggactgcgaaggaaacggtgcaatagtgtgcaaccagtgcaagggagatggggtgaattctgtcgatcacttcaacggccgatttaaagctggagcattatgctggctttgcagaggaaagcgggaaatcttgtgcggtagctgcaatggtgctggcttcttaggtggattcatgagtacttccgattcaactg

SEQ ID NO: 398232 - DNA, 316 bp, Oryza sativa nipponbare
ccacgcgtccgcccacgcgtccgggccgcgtcggcgctgcaccagaccaccagcttcctcggcaccgcggctcggcgggatgagctcgtccgccgcgtcggcgactccggtggccgcatcaccatgcgccgcaccgtcaagagcgcgccccagagcatctggtatggacctgaccgtcccaagtacctgggcccgttctcggagcagacgccatcgtacctgaccggagagttcccgggagactacgggtgggacacggcggggctatcggccgacccggagacgttcgcgaggaacaggtgagttggaggtgatc

SEQ ID NO: 398233 - DNA, 481 bp, Oryza sativa nipponbare
ccacgcgtccgagaagtataacgctggaacaaacaaggcggcgtccagtggttcatccctcaacaccaagcgggtggaggacgacaccgagagccttgcccatgagcgtgtctcaagtgacctgaagaaaaacctcatgcaagcaaggctggacaagaagatgacccaggcacagcttgcacagatgatcaatgagaagccccaggtgatccaggagtacgagtcaggtaaagctattccgaaccagcagatcatcgggaagcttgaaagggctcttggaacaaagctgcgcggcaagaaataatgttctactattaggccctgaagcatagtgttggagcaaccaaagccaaaatgtttgcgtaacctatgctgggtcttttgataccatgccagatggttctgttggtgcctgagtgaatactgaataacttattatgttgtcgcaaaccttgtaatgctgccgctctttgtgtgtcat

SEQ ID NO: 398234 - DNA, 363 bp, Oryza sativa nipponbare
ccacgcgtccgcaaaaaaccaacccaaccgccgccgcatcgccctcgttagaacgatggccgcgtcggcgctgcggcaagccaccagcttcctcggcaccgcccctcgccgggatgagctcgtccgccgcgtcggcgactccggtggccgcatcaccatgcgccgcaccgtcaagagcgcgccccagagcatctggtatggacctgaccgtcccaagtacctgggcccgttctcggagcagacgccatcgtacctgaccggagagttcccgggagactacgggtgggacacggcggggctatcggccgacccggagacgttcgcgaggaacagggaggctgaggtgatccaactcgcgtgggg

SEQ ID NO: 398235 - DNA, 213 bp, Oryza sativa nipponbare
ccacgcgtccgcccacgcgtccgcccacgcgtccgtccactcgttcttccacgctttcgcccacacgtgcggggtgctagttataacatagctgatgcaacatatgatcttaatgatactcggcaccaggagccctacccggatgcactgtgtcatgcactccatacctgactgctcagtcaagtctggaggcattattcctgagcagcccta

SEQ ID NO: 398236 - DNA, 217 bp, Oryza sativa nipponbare
  unsure (1)..(217): unsure at all n locations
gtaccgggtcctgtattccgcggtcgacccacgcgtccgcccacgcgtccgcccacgcgtccgcgcctttttcgtcttcagccacggttgtgagnagaacggttaagaagccgaggacgccgaggtcgtctgaggggcaggctagggtgccgcatcggaggaggtcgctgtagagggcgttacttttttctattgcattacttttgtttttttattt

SEQ ID NO: 398237 - DNA, 439 bp, Oryza sativa nipponbare
ccacgcgtccgcccacgcgtccgcccacgcgtccgagcttatgcatttcaggggattaactcatcactgagcttggctaattaaatcttcgaccatgtcggacaagtgcggaaactgcgactgtgctgccaagagccagtgcgtgaagaagggtaccagctatggcgtcgtcatagttgaagccgagaagagccacttcaaggaggtcgccgccggcaaggagaacggcggttgcaagtgcggaaccagttgttcctgcaccgactgcaagtgcggcaggtgaagtcacgaagcaaccgaacactggccgccggggagtaacctaccttaattagtccacattaaaaaccacccatttgagtggggtttgggtgtgtgctgattatggctgaattaaacccgtgtgttttcgattaattaagcagttggtcgctttggc

SEQ ID NO: 398238 - DNA, 493 bp, Oryza sativa nipponbare
ccacgcgtccggcggaacaaagagcacaagaagttccagcctctcaagacaatcctgtgtgtgaagaaccactacaagagaagccactgtgacaagagctacacctgcagccgttgcaacaccaagaagttctcagttatcgcggacttgaagactcatgaaaagcactgtggccgcgacaagtggctatgctcgtgtggaactaccttctcaagaaaagacaagttatttgggcatgttgctcttttccaagggcacacgcctgcactccctatggatgatatcaaagtaacaggagcatcagagcaacctcaaggcagcgaggcgatgaacaccatggtggggagcgctgggtataacttccccggtagctcatcggacgacatcccaaatcttgacatgaagatggctgatgatccacgctatttctcgccattgagctttgatccttgcttcggtgggcttgatgacttcactcgacctggatttgaca

SEQ ID NO: 398239 - DNA, 269 bp, Oryza sativa nipponbare
ccacgcgtccgggtggcaactaagccgtcatcgtcatatatagccttgtttaattgttcatctctgattcgatgatgtgtcccaccttgtttcgtgtgttcccagtttgttcatcgtcttttgattttaccggccgtgctctgcttttgtttttgtttcacctgatctctctctgacttgatgtaagagtggtatctgctacgactatatgttgttgggtgaggcatatgtgaatgaaatatatggaagctccggctatatatatttaa

SEQ ID NO: 398240 - DNA, 366 bp, Oryza sativa nipponbare
  unsure (1)..(366): unsure at all n locations
cggtcgacccacgcgtccgcccacgcgttcgcccacgcgtccgcccacgcgtccgtgcagtagcctgaggtgctgacgaagagcnagttgatcgacgcgccgcagtgttactactccggcatggccacctacttcgcgtcgtcgtcgacgctgttcggtattgagtttatcctgtttcactacttgtagatgctttagtgcgtgttttatatgtttatttgtttgtgtttgtgttttcttttttttttaattttttttatgttttatcttttttttgtttttattttagatttttatatgtttcttttttttttataattttattttagcttaggctgttttagtgtcgttttttttttgttttta

SEQ ID NO: 398241 - DNA, 233 bp, Oryza sativa nipponbare
ccacgcgtccgaggagaggagcagccatggcgtcgtcggtggcagctgcggttagcacgttcctggggacgaggctggcggacccggcgccgcagagcgggaggatcgtggcgaggttcgggttcggcggcgggaagaaggcggcggcgaagaaggcggcgaggccgtcggcgccgacgacggacaggccgctgtggttccccggcgcggtggcgccggactacctggacggg

SEQ ID NO: 398242 - DNA, 409 bp, Oryza sativa nipponbare
ccacgcgtccgcccacgcgtccgctcctctctcctcctccgaccactatggccatggccacgcaagcctccggcgccaagtgccacctcctcgccgcctgggcaccggcgaagccgcgctcatccaccctctccatgcccacctcgagggcacccacctccctcagagcggcggcggaggatcagcccgccgcggcggcgacggaggagaagaagccagcccccgcggggttcgtgccgccgcagctggaccccaacacgccgtccccgatcttcggcgggagcacggggggactccttcggaaggcgcaagtggaggagttctacgtcaatacatggacgttgcccaaggagcaggtgttcgagatgcccacgggcggcgccgccatcatgcgcgagggccccaacct

SEQ ID NO: 398243 - DNA, 312 bp, Oryza sativa nipponbare
ccacgcgtccgagagcatctagctagggagagaaaggaagatacgagtaggagagagatggccactgctgatgcggccatggcgagccagctgatgaagagcagcttggtgtgctccaagccgagggggctgtctggtgcttcgctgacaaggaggccccgcttcacagtcaaggccatccagtctgagaagccaacgtaccaggtggtgcagcccatcaatggcgaccccttcatcggcagcctggagacgccggtgacctccagcccgctggtcgcctggtacctctccaacctcccggcgtaccgcacc

SEQ ID NO: 398244 - DNA, 491 bp, Oryza sativa nipponbare
  unsure (1)..(491): unsure at all n locations
ccacgcgtccgctcagctcttcagcttctgctcgaatggagtctacttccaccactgtgccttccattgttgtgtatgtgacagttcctaataaagaagcaggaaagaggctagctgggagcattataagtgagaagcttgctgcttgtgtgaacatagtgcctggtattgaatctgtttactggtgggaaggaaaggtgcaaactgatgctgaagaactgctcatcataaagacaagggagtctcttcttgatgcgttgaccgaacacgtgaaagccaaccatgagtatgacgttcctgaagtcatcgcgctgcccataaaaggaggcaacctcaagtacctggagtggctaaagaacagcactagggaaagctaactctgtgccgtggcatgctttttcactacatttcgaagcgtctggtgatacgtatactctgcatctccatggctttggtgggaatgtgaatggtntcctatttttacagcttat

SEQ ID NO: 398245 - DNA, 425 bp, Oryza sativa nipponbare
ccacgcgtccggtaaccatgtaatgggatacatatatgatcagtactatatgatcgatattttcaatgtgtatgcacctaagtgcaacactgatgactcatccctcttttccacctcctacagtacagctgatatgaatgctaagaagaggcttaaaggcacgaggatgtactcagggtatgatccgtgctattcgtcacatatcgaagattacatgaacaagatggatgtgcagaaatcacttcatgcgaatacgagtggattgatcaaggacagaaaatggagtatctgcagttattcaatattcgacaattacgacatcacggtcttctctgttcttcctatttactctaagcttatcaaggctggcctacgaatatgggtctacagtggagacgtggatggcagggttccagttattggat

SEQ ID NO: 398246 - DNA, 495 bp, Oryza sativa nipponbare
ccacgcgtccggacagcctaaccaacacacgggagcaactaaccactaactttgctcatgaaatactataccatgctggacatgtacggcaactgccactgcgctcacacgatccagtgcgtgaagaaagggaccatctatagcatcaccatagttgcagccctgaagagccacttcaaggaggtcgacgacgccaaggtgaacggccactgcaagtgcggcaccagctgctcctgcacccactgcacgcgcggaaagtgactccaccaagcaaccgaacactcgcctgcaggaagtcacctaccttaattagtccacaataaaaaccacccatatgagtgtggtttgtgtgtgtgctgattattgctgaattaaacccgtgtgttatcgattaattaagcagctggtcgcttcggcgactatgcgtgtatcaacgtatgaatttgggtgatgtgatgtacccgtgctattctcagtgaaattaatcaatcgtgt

SEQ ID NO: 398247 - DNA, 343 bp, Oryza sativa nipponbare
  unsure (1)..(343): unsure at all n locations
ccacgcgtccggccgcgcccccactgcgctctcctcttcgttatcccgtcttacctcgccccatcaccctctggctcgaccacactacaccccgctccactctcaggcaggcaatcagcggcgaggcaccagcccaccggccggcaatggcgtccacctcctgcttcctccaccagtccacggcccgcgtcgtcgcgcgcgtcgtctccccgtccccggcgacacggacccacctnctcgtctgccgcgcccagaagcaggacgacgccgacgtctcccgccgcgcggagctcgcgctgttggccggagcgaccgcggcgatggtgggtgacgggccccctct

SEQ ID NO: 398248 - DNA, 422 bp, Oryza sativa nipponbare
  unsure (1)..(422): unsure at all n locations
ccacgcgtccgcccacacgtccatccaatcgtccgatactacccagtaagctttctaactaactacgctgctgtggtcggtaacatgatggcctcttctgacacctccgaggttccattcctagggcgntaaagctcacactgtcgagtcttcaagatagccgtcgatctaccaactctggctttggaaacgtcagcaatggcggaaggatcaagtgcatgcaagtgtggccaacttacaacatcaagacgttagagaccatatcacacatgccagcactcaccgtgggggatcttatgaatcagatctcgtacctgcttggatccaagcgcgtgccttgcctagagttatgcaaagcttgattagcctaccatgagaaccacaggcctcccggctgctacgattaaacgtcttgtaccata

SEQ ID NO: 398249 - DNA, 483 bp, Oryza sativa nipponbare
ccacgcgtccgcccacgcgtccgcaacttcttgatccggcggcggcggcattatgttcggcggcggcggcggcggcgggaggaagccgctggactacgaggagctgaacgagaacgtgaagaaggtgcagtacgcggtgcggggggagctgtacctgcgcgcctccgagctccagaaggagggcaagaagatcatcttcaccaacgtcggcaacccacacgcgctcggccagaagccgctcaccttcccccgccaggttgtggcgctgtgccaggcccccttcctgctcgatgatcccaacgtcggccttatcttccccgccgacgccatcgcgcgggccaagcactaccttgccatggcacccggtggactaggtgcttacagtgatttccgaggtattcctggtattaagaaggaagtcgccgaggttattgagaggcgtgatgggttattcaagtgattcaaaacttattttccttacag

SEQ ID NO: 398250 - DNA, 494 bp, Oryza sativa nipponbare
ccacgcgtccgggccagcaactgagaagctccatacaagtaagcagtagctagttgccgacaaggccagagaaggaagaagaagctctcatcatcatcaccatgtcgtgctgcggtggcaactgcggatgcggctccagctgccagtgcggcaacggctgcggcggatgcaagtactctgaggtggaacccacgaccacgaccaccttccttgccgatgcaaccaacaaggggtctggtgctgcttccggaggatcagagatgggggcggagaacggcagctgcggctgcaacacctgcaagtgcggcaccagctgcggctgctcctgctgcaactgcaactagaagaaacttatctccatccaattcatcacctgatcaacgagctaccagtaccactacatatgccatgtactagctacctagcttgcatgcaagtccttaatttgctgctagctagctagctacctaccttagcgtctcatgatgtcatgt

SEQ ID NO: 398251 - DNA, 468 bp, Oryza sativa nipponbare
ccacgcgtccgcccacgcgtccgcaattacctgaccagcgtgtatgtagaaggcgacgcaaggtcagctttgattgccatggttcagtcacttcaacatgccaaaaatggtgtggatatcgtctccggcagcaggattcgcacacattttgcgaggcctaactggagaaaggtgttctctgacttggcgaatgcccacaaaaactcacgcataggtgttttctattgtggatcccctacactcacgaaacaactcaaggatctttcaaaagaattcagccagacaaccacaactagattccacttccacaaggaaaacttttaagaccgtaccaaaggacgtctaaacagactgcatatacttgtataggaaagaaatacgatagcattgggatagcaaatatagtcttacaagttttgctctacgatggattgtacaaaatatatgttgaaagctagtgtcaccatc

SEQ ID NO: 398252 - DNA, 467 bp, Oryza sativa nipponbare
ccacgcgtccggttattaagagcaagcaaacagtagtctagcgaagcgagactgcgagagcagagcattgttcgtcttctctagctattagtggtggggaataatggctcccgccaccaccgcagcaatggccctcgcgccgcctccttcccatcaccatcaccatcaccatgtcaagcagctgcagctccctccgtctgtctccgtctccgtgcccctccgctccggtttccttggccgcgcactgcctgctgctgcccacccacagccgctgctcgccgccgagagccgccgcagcagcgccgtgtccgtgcggatgtcgtgggacgggcccctctcctcggtccgcctcattatgcagggccgcaacgtcaagctgaatgagaaggtgaaggagcacatcgaggagaaggcggggagagcagtggcgaagcacagccagcttgtgaaggagggtgacgtgcgcc

SEQ ID NO: 398253 - DNA, 491 bp, Oryza sativa nipponbare
ccacgcgtccgacaggacaaagggcatttgatcttgctcgtcttgcaaacgatgatgatgtgatgttgctcgattgggtgaaagggctcctgaaagagaagaaggtggagatgctggtggacccggacctccagagcggcttcgtggagcatgaggtggagtcactcatccaggtggctctgctctgcacgcagggctccccgatggaccggcccaagatgtcggaggtggtgaggatgctggagggcgatggcctcgcggagcggtgggaggagtggcagaagggtggagtggtccggcaggaggcggagctggccccccgccacaacgactggatcgtcgactcgacctacaatctccgggcaatggagctgtccggcccgaggtaaaagaaacgaaagacaaaatcacaaagcatccaacctttgctcgacggctttctcgcccttgttttgtatatgacagacagatcgatagcttgcaaatctgga

SEQ ID NO: 398254 - DNA, 442 bp, Oryza sativa nipponbare
  unsure (1)..(442): unsure at all n locations
ccacgcgtccgctctgctctccacacgcggagtggaggagggattaatcggaagcatatcaatcggcggccatgacgatcggcggcgcgtcctccagcgtcgtagtagtgccacgcaacttccggttgctggaggagctggagcgtggcgagaagggcatcggcgacggcaccgtcagctacggcatggacgacgacggcgacgacatcttcatgcgctcctggaccggcacaatcattggaccactcaactctgtgcacgaggggcgcatctaccagctgaagctcttctgcgacaaggactaccccgacaagccgcccaccgtgcgcttncactccaggatcaacatgccctgcgtcaaccctgacaccggactggtcgaaagcaagaagttccatatgctggcaaactggcagagggagtacaccatggagaatattct

SEQ ID NO: 398255 - DNA, 440 bp, Oryza sativa nipponbare
ccacgcgtccgcactcgcgtgggcggacccttggctacaactcacgcatttagctaatgagcgccatctggccagaggacgagacacttgcctgaattatccgacagcctaacctgcggcctataatacgaacgcttggacttgaccatgagaggctgatacagaaggagcttattgacaaggctctcaaggagcacgttatgcaaacatggctggcacccagtattgctcttcttgagaggatgatataccaccttccatctccgtccaaggaccagaggtaccgtgtggagaatttgtatgagggtcctcttgatgatgtctacgcaactgctattcaaaaacttggatccataatgtcctcttatgctgtatgtttccaagatgaattccgtatcaatcaaaaggtaggttctttcgtcttttgtctttcttctttt

SEQ ID NO: 398256 - DNA, 482 bp, Oryza sativa nipponbare
ccacgcgtccgtttctgaacacagcaccaccccttctgctgcatctcccacctccctctgaattgtgggcctgaggcgagggcggcgctcgccccgtccaagatgctcggcacccggctcaacttcgccggctcctcccgctacgccaccgcggcaccgaccaccggagcgcagaagatcgtctccctcttcagcaagaagcccgccccgaagcccaagcccgccgccgtcacctcctcgagccccgacatcggcgatgagctcgccaagtggtacggccctgacaggaggatcttcttgccggagggtctcctggaccgctcagaggtgccggactacctcaacggagaggtccccggagactacggctacgacccttttggcctcagcaagaagccagaggacttctccaagtaccaggcctatgagctgatccatgccaggtgggcgatgctcggcgccgctgggttcatcatccccga

SEQ ID NO: 398257 - DNA, 408 bp, Oryza sativa nipponbare
ccacgcgtccgccacgcgtccgtgcaaatcctctgtactgtactgctagtcccccatggccggatcgccatggagtaaggccccctgtttatgatgttgatataattgtactattcctatggctatataagttgtaaaggatccaattcgatgctgcaaaaaaaaaaaaaaaaaaaaaaaaaaaaaaaaaaaaaaaaaaaaaaaaaaaaaaaaaaaaaaaaaaataaaaaaaaaaaaaaaaaaaaaaaaaaaaaaaaaaaataaaataaaaaataaaaaattaaaagggggcggcctttttaagggacccaggtttacttccgcgtgcttgcaacgttaaagttttttattggggccgccaaaattaaattcacgggccgttgttttaaaacgtttggtttggaaaaa

SEQ ID NO: 398258 - DNA, 442 bp, Oryza sativa nipponbare
ccacgcgtccggaaagtgtgattaagaagaatgagaacataaatgggcatcacaagaacataacctttatgtgcgctgatgtcacgtctccggacctgacgatcgaagataactctattgatctcatattctcaaactggctactaatgtacctttcagatgaggaggtcgagaagctagtaggaagaatggtgaaatggctgaaggtaggtggccatatattctttagggagtcatgctttcaccaatctggagattccaaaaggaaggtgaatccaacacattaccgggagccaaggttctatacaaagatatttaaagaatgccattcctatgataaaagatgggggttcttatgaactttctctagaaacatgcaagtgcattggggcttatgtgaaaagcaagaaaaatcaaaatcagttatgttggctatgggaaa

SEQ ID NO: 398259 - DNA, 489 bp, Oryza sativa nipponbare
ccacgcgtccgcccacgcgtccggtcgcccaggcactgaggaaggagcccttgacggtgtacggcgacggtaagcagacgaggagcttccagtacgtctccgatctggtggaggggttgatgaagctgatggaaggggagcacgtagggccattcaacctgggaaacccaggggagttcacaatgctggagcttgccaaggtggtgcaggacaccatcgacccaaacgcgcggatcgagttcaggccgaacaccgccgacgacccgcacaagcggaagccggacatcagccgcgccaaggagctcctcggctgggagcccaagatccccctccacaagggcctcccgctcatggtccaggacttccgcgaccgcatcttcggcgaccacaagccccactccgtcggcggcgacaactgaatctgaatctgaactcgatcgatcttatcttaccggcattttctggagaagttgatcaagatatacacag

SEQ ID NO: 398260 - DNA, 295 bp, Oryza sativa nipponbare
ccacgcgtccgggccgccgccaccatggccctctcgtccccggcgctggccggcaaggccgccgcgagggtggggggcgaggggcgcatcaccatgcgcaagtcggcggcgaagcccaagcccgccgcgtcggggagcccgtggtacggcgccgaccgcgtgctctacctcggcccgctctccggcgagccgccgagctacctgaccggcgagttccccggcgactacgggtgggacaccgtggggctctccgccgacccggagacgttcgccaagaacctagagctggaggtga

SEQ ID NO: 398261 - DNA, 472 bp, Oryza sativa nipponbare
ccacgcgtccgcgccgtcgtacctgaggggcgagttcccgggcgactacgggtgggacacggcggggctctccgcggacccggaggcgttcgcgaggaacagggcgctggaggtgatccacggccggtgggcgatgctcggcgcgctgggctgcatcacgccggaggtgctcgagaagtgggtgcgcgtcgacttcaaggagcccgtgtggttcaaggccggcgcccagatcttctccgacggcggcctcgactacctcggcaaccccaacctggtgcacgcccagagcatcctcgccgtgctgggattccaggtcgtcctcatgggcctcgtcgagggctaccgcatcaacggcctccccggcgtcggcgacggcaacgacctttaccccggcggccagtacttcgacccgctcggtctcgccgacgaccccgtcaccttcgccgagcttaaggtcaaggagaacaagaat

SEQ ID NO: 398262 - DNA, 454 bp, Oryza sativa nipponbare
tcctgggagctggagaggctgggacaggcattgcagaacttatagctctcgagatatcaagacagaccaaagcaccgattgaggagtgccgcaagaaaatatggcttgttgattcaaagggcttgattgtcagttcacgaaaggagacccttcaacacttcaagaaaccatgggcccatgagcatgaacctgttggaaatctcttagatgcagtcaaaactatcaaaccaacagtattgattggcacatctggaaaggggcaaactttcactcaggaggttgttgaagccatttcctcatttaatgagaggcctgtcatttttgccttgtccaacccaacatctcagtctgagtgcaccgctgaacaagcgtacacatggagcaagggcccggcggtgtttgcaagtggaagccatttgatccggtggagtatgatggcaaaatatacgtgcct

SEQ ID NO: 398263 - DNA, 330 bp, Oryza sativa nipponbare
ccacgcgtccgccagcagcagcagcagtagctgagcttgaagcagtatagcgaggtagacatggccggcgccaccatggccctctcgtccccggcgctggccggcaaggccgccgcgaaggtgttcggcgaggggcgcatcaccatgcgcaagtcggcggcgaagcccaagcccgccgcgtcggggagcccgtggtacggcgccgaccgcgtgctctacctcggcccgctctccggcgagccgccgagctacctgaccggcgagttccccggcgactacgggtgggacaccgcggggcttttcgtcgacccggagacgtttgtcaagaac

SEQ ID NO: 398264 - DNA, 482 bp, Oryza sativa nipponbare
ccacgcgtccggagggatttcaggcattgcagctgctcgtgcgctgtctaatgcttcgtttaaggtcacactattagagtcacgggaccgacttggtggccgtgtgcatactgactattcttttggctgcccaattgacatgggagcatcttggttgcatggtgtatgcaatgagaattcattggcaccactgattaggttgcttggccttagattatatcgcaccagtggtgataactctgtgctatatgaccatgatctggagagctatgctctctttgataaggatggtcgtcaagttccccaagagatagtgacaaaagtcggggaaacatttgagaaaattcttaaggagacggtgaaaagtagagctgaacatgaagatgacattgcctttattcaagccatcttaattgtgcttgacaggaatccacacctaaagcttgatggtttgcaatatgaagtactggagtggtgcatat

SEQ ID NO: 398265 - DNA, 497 bp, Oryza sativa nipponbare
ccacgcgtccgcccacacattctcgaagaaggagaagaaggagaggagcagccatggcgtcgtcggtggcagcggcggcgagcacgttcctggggacgaggctggcggacccggcgccgcagagcgggaggatcgtggcgaggttcgggttcggcggcgggaagaaggcggcggcgaagaaggcggcgaggccgtcggcgccgacgacggacaggccgctgtggttccccggcgcggtggcgccggactacctggacgggtcgctcgtcggcgactacggcttcgacccgttcggcctcgggaagccggcggagtacctgcagttcgagctggactcgctggaccagaacctggccaagaacaacgccggcgagatcatcggcacccggttcgagaccggcgaggtgaagtccaccccgttccagccctacaccgaggtgttcgggcttcagcgcttccgcgagtgcgagctcattcacgggcgttgggccatgctc

SEQ ID NO: 398266 - DNA, 491 bp, Oryza sativa nipponbare
ccacgcgtccgaaaaaattaataacgccctccacttcgccaacttgttggccactacgaactccaagttcctgcgcacgaggcaaggcggactccatcccgttctcctctaaagaactacccgagatcctggaccggttcggggtgcggccgggctccgacgacgcggctgagatgagtgctacgctgcaggactgcgagctgccggcgaataagggagagaagaaggcctgcgccacgtcgctggagtctatagtcgacttcgtcacatccagctttggggccagtgacgtcgacgccgcctccaccgttgtgctcagtaaagcgggggagtcttcttcgctggcgcaggactacacggtgagcggcgtgaggcgaatggccggaaccggccagctcatcgcttgccattcggagtcgtacccgtacgctgtgttcatgtgccacctcacaaaggcgacgacgagggcgtacaaggccttattggtcgga

SEQ ID NO: 398267 - DNA, 403 bp, Oryza sativa nipponbare
ccacgcgtccgcccacgcgtccgccaagccttcccgttgataggcttaaaaggctggggaaatgttcgattgggtccatttttatgggaggcttcttacttctaacaaggcaacttctaaaggcccttgggtggaaagaccttcccgtcaggttgggccttctttcaagatttatgtgggccatctcccttggcaaggggattactttaggttggttccagtggtcaatgagccttggaaaataatccacccccgaattgggtattacaaaaaaacctggccgttaccaggattttgtttttgaacaattgcctcacaagaaggattggatcaccctcttttgattcctttaatgacatttaatttgaaggtgccttcttcttaatgagaattgtatttttaa

SEQ ID NO: 398268 - DNA, 417 bp, Oryza sativa nipponbare
ccacgcgtccggtttcagagtcttggtgttgcattctaccgtggagttgattgctgtgttctagtttatgatgggaatgctatgaagtcatttgataatcttaacaactggcgtgaagaatttctaattcaggcaagcccatcagaccctgataacttcccttttgttcttttgggcaacaaagttgatgtagacggtggcaacagccgtgtggtctctgagaagaaggcaaaggcatggtgtgcctctaaagggaatatcccatactttgagacatctgccaaggatggtacaaacgtggaggaggctttccagtgcattgtaaagaatgctctgaagaatgaaccagaggaagaactgtatgtgccggacaccgtagatgtggtgggtggcaacctgttcccaaggtctttaagc

SEQ ID NO: 398269 - DNA, 468 bp, Oryza sativa nipponbare
ccacgcgtccgggctcaacttcgccggctcctcccgctacgccacctcggcaccgaccaccggagcgcagaagatcgtctccctcttcagcaagaagcccgccccgaagcccaagcccgccgccgtcacctcctcgagccccgacatcggcgatgagctcgccaagtggtacggccctgacaggaggatcttcttgccggagggtctcctggaccgctcagaggtgccggactacctcaacggagaggtccccggagactacggctacgacccttttggcctcagcaagaagccagaggacttctccaagtaccaggcctatgagctgatccatgccaggtgggcgatgctcggcgccgctgggttcatcatccccgaggcctgcaacaagtttggcgcaaacttgcggcccgaggccgtctggttcaagaccggcgccctcctcctggacggcaacacccttaacta

SEQ ID NO: 398270 - DNA, 341 bp, Oryza sativa nipponbare
ccacgcgtccggtgaggtgcagaaaaatttgagctgaagctgaggatggcaacatccatgatcacctcgccggtggtggcgccggcccgggccaagggccttccgtccatctcccgccggggatcctccttcgccatcgtctgcagcggtgggaagaagatcaagaccgacaagccctacgggattggaggtggcatgtcagtcgatattgatgcatctggcaggaagagcacggggaagggtgtgtaccaattcgttggcaagtacggcgcaaacgtctacggctacagcccaatctactcgccggaggaatggtctcccacccggtacacctactttgg

SEQ ID NO: 398271 - DNA, 275 bp, Oryza sativa nipponbare
ccacgcgtccggatcgcaaatactctctctcgccgatagcttcagcatcagcaatggccgccctcgccgccgcatccaccgccttcgccgccaagccgcgcctggcgcgcgcgccgtcgtccccggccgcgcggttctccgtgtcgtgctccgcgtcgggcaacaacggcggcgccggcgagatggcgcagtcgctggcggcgtcggccaagacgttctccgcggcgctggcgctgtcctcggtgctgctctcctcggctggttttatttattgg

SEQ ID NO: 398272 - DNA, 154 bp, Oryza sativa nipponbare
tcccggtcgacccacgcgtccgcccactccgatcgcaaatactctctctcgccgatagtcagcatcagcagcaatggccgccctcggcgccgcatccaccgccttcgccgccaagccgcgcctggcgcgcgcgccgttgtccccggccggcggt

SEQ ID NO: 398273 - DNA, 241 bp, Oryza sativa nipponbare
ccacgcgtccgcggacgcgtgggttcagcgacaccgtcactcgccgtcgtcgtgccgccgtacatcgagagcgcggagatcgtgaagcacgcctggaagcggtacaaccttagcctcggcctcggcctcaacaaggtcgccggcaaggtgttcaggatcgggcacctcggccacctcaacgagctgcaattgatgggtgccctgagtgtggtggagatggtgcttatggacatctgcttcc

SEQ ID NO: 398274 - DNA, 331 bp, Oryza sativa nipponbare
ccacgcgtccggcgagcgaagccagcagcagaagcagtagagagaaagtagagagatggaggggaaggaggaggatgtccggctgggagccaacaagttctcggagaggcagccgatcggcacggcggcgcagggctccgacgacaaggactacaaggagccgccgccggcgccgctgttcgagccaggggagctcaagtcgtggtccttctaccgcgcagggatcgccgagttcatggccaccttcctctttctttacatcaccgtgctcaccggcatgggggtcaacaacttcaccttcaagtgcgccaccgtcggcattcaaggcatt

SEQ ID NO: 398275 - DNA, 428 bp, Oryza sativa nipponbare
tttatcttaggcatgtctgttttcccatggtaggatacttccacccagcttccctcctctcacccttatataaagttcttgctgctgtgactctgctttgcttgcttcttcacccaactaccaccacctctgtgttttcctgcactctccttgctagtggtgtgactgtgaaggtggcggagcctgcatggaagggctgacgagcgagcagatggtggcgttccaggaggcgttcttgctcttcgacaagaacggcgatggatgcatcaccttggaagagctggctgcggtgactcgttctcttggccttgagccgaccgatcaggagctcaacgacatgatgaagggaagttgatacagatggcaatgggatcatagattttcaggagttcctgagcctcattgccaggaagatgaaggatggggat

SEQ ID NO: 398276 - DNA, 491 bp, Oryza sativa nipponbare
  unsure (1)..(491): unsure at all n locations
ccacgcgtccgcccacgcgtccggctgaacaccgcatcagcagcagcaagcagctaatcgcgcacgtacgcacaccgcgacccggggcgagatggcgcagtcgatgctggtgtcgggagccaatggcacggtggccgccgcgagcaccagcaggctgcagcccgtgcggccgacgccgttctcgcggctcgtgctgtcgcagccgtcgtcgtcgctggggcgcgcggtgtccgtcaagacggtggcgctgttcggcaggtccaagaccaaggccgcgcccgcaagaaaggctgagccgaagccaaagttcaagaccgaggacggcatcttcggcacgtccggtgggatcggtttcaccaaggagaacgagctgttcgtcgggcgtgtcgccatgctcgggtttgccgggtcgatcctgggtgaggccatcaccgggaagggaatcctggcgcagctgaacctggagacggngatcccgatctacgaggcgg

SEQ ID NO: 398277 - DNA, 440 bp, Oryza sativa nipponbare
ccacgcgtccgctctgctctagcacctcaccaagcagaaagctagagagctagcaatggcgcccaccgtgatggcctgggcggccacctccgttgctcccttccaggggctcaaatccaccgccgggctccccgtcagccgccgctccaacagcgccggcctcggcagcgtcagcaacggtggaaggatcagctgtatgcaggtgtggccgattgaaggcatcaagaagtttgagaccctgtcgtacctgccaccgctcacgggcgaggacctcttgaagcagatcgagtacctgctccggtccaaatgggtgccttgcctcgagtttagtaaggtcgggttcgtttaccgtgagaaccacaggtcttctgggtactatgatggcaggtactggaccatgtggaagctgcctatgttcggatgcactggtgccacccagg

SEQ ID NO: 398278 - DNA, 475 bp, Oryza sativa nipponbare
ccacgcgtccgcggagcgtgggcacgcctgatgacagatggtttcaatagttgccgaaatgttgtctgcaatggcacagaaggagctatgtactctttcccccaaatacgcttaccaccaaaagctatagatgcagccaaaagggctggcaaagcggccgatgttttctactgcctcaagcttcttgaagcaactggaatatccactgttccagggtcaggtttcggacaaaaagaaggggtgttccacctgaggacgaccatcctgccagctgaggaggacatgcctgccatcatgaccagcttcaagaagttcaacgacactttcatggatcagtacgatggctactccaggatgtgaaatgaaaacaagatgagcactaccccaggagaagagagaaagaatctgccttagcgtggctgatcgagcagttataattaaaaggcactgttaattaattaattaatcaatcaat

SEQ ID NO: 398279 - DNA, 446 bp, Oryza sativa nipponbare
ccacgcgtccgccacgcgtccggtcgggccgtggcaagggaggcatggggctgggcaagggaggcgcgaagaggcacaggaaggtgctgcgcgacaacatccaggggatcacgaagcccgcgatccggaggctggcgaggaggggcggcgtgaagcgcatctccgggctgatctacgaggagacccgcggcgtgctcaagatcttcctcgagaacgtcatccgcgacgccgtcacctacaccgagcacgcccgccgcaagaccgttaccgtcatggacgtcgtctacgcgctcaagcgccagggccgcaccctttacggcttcggcggttgattccttcctttctttcttcctggtggctgtgcgggtggtggtggtttttattttatcttttatattttttattttttctcttttaatttatttattatattttgcttcttttat

SEQ ID NO: 398280 - DNA, 415 bp, Oryza sativa nipponbare
ccacgcgtccgattgggaagccattgaatcagaggcccattatcaaatcttgggtatttttctgtgtagttcaggtatgtattcttggtgctgaaagacttccaagaagtaatttatcaacaatagctagttcgattaaccaaatctcatctggaggctatccttcatcaagaggtcgaggtgtccctgttctaaatgaagatggaaatataatcagcgacatccgccatgggaaaactgcagatttggctactagttcagaggcatccaggggtaagagcaaatgcaccctttgtctcagttcccttcagaattccactgtcacaacctggggccatgttcttttgctggaggtgcattatgtgaggtgggttatcggtaagccttaattcccctctttactgtacttcttctt

SEQ ID NO: 398281 - DNA, 488 bp, Oryza sativa nipponbare
  unsure (1)..(488): unsure at all n locations
ccacgcgtccgcaacgaattgcaattgctagggtggttttgaagaatgcacctattttgttgttagatgaggggggctgggcaattgagtctgaatcaagtagggtggtgcaggaagctcttgacacattggtcatggggaacaaaacaaccatcctcattgcgcacagggcagcgatgatgaagcatgtggataacattgtcgtcctaaatggtggtaggatagttgagcagggtacacatgactctctgatggacctgaatggtctctatgttagattgatgcaaccccattttggcaagggccttcgccagcatcggctaatgtaattagtgttgagtttgttaggtgtaaattatcctagcgcgtgatcaagttccttttcgctctgttcagccagnggtcatgggtctgtggcttaccgttttgtcggaggaaaaatgttaggtgtcgctggcgctgctctgaatgagcggaatggtgacctg

SEQ ID NO: 398282 - DNA, 61 bp, Oryza sativa nipponbare
  unsure (1)..(61): unsure at all n locations
cgacccacgcgtccgcccacgcgtccgcccacgcgttcgcccactcgtnctataaacccta

SEQ ID NO: 398283 - DNA, 464 bp, Oryza sativa nipponbare
ccacgcgtccgtgctgatattgttagcgttcactgtgagcaatcgttaaccatccatctacaccgaacagtcagagcaggtcaaaagtcttggagcaaaggctggagttgttttgaatcctgcaacccctctcactgcgatagattatgtacttgatgttgttgatctagtattgattatgtcggtgaatcctgggtttggtgggcagagctttattgaaagccaagtgaagaagattgcagagttgagaagattatgtgcagagaagggagtaaacccttggattgaggttgattggggagttggtcccaaaaacgcctacaaggtcattgaagctggggccaacgccattgttgctggttcagccgttttcggggctccagactatgcagaagctatcaagggaatcaagaccagccaaaaacctgtggctgtaccagcatgaggatcctaaagtagtatgc

SEQ ID NO: 398284 - DNA, 490 bp, Oryza sativa nipponbare
  unsure (1)..(490): unsure at all n locations
ccacgcgtccgggaaatgtattctacggagtgcatgttgataatggtcgtgtcgcagggcaagcaaagaaaacgctacgagagattattgagaagtacaatttggaagttagcattactccaaaccagaatcttatcttatgtgggattgatcaagcatggaaagatcccatcacagcagctcttgctcaatctggcctgctggaaccaaaggatgttgatcccctgaatattacttccatggcatgtcctgccttaccactgtgccctctagcacaaacagaagctgaacgagggattctgccgattcttaaacgaattagagcagtttttgataaggttggcatcaaggaccatgagtcggtagtggtgaggataacaggctgccctaatggatgcgctagaccatatatggcagaggttgnctttgttggtgatggcccaaacagttaccagatatggcttggaggaacaccaaaccagagtaccct

SEQ ID NO: 398285 - DNA, 232 bp, Oryza sativa nipponbare
ccacgcgtccgggttcagataggctcttcttgacaggatcaccatgtctgcctttgtgggaaaatacgcagatgagctgatcaagacggccaagtacatcgcgacgccggggaagggcatcctcgccgccgacgagtcgacgggcaccatcggcaagcgcctggccagcatcaacgtggagaacgtggagcccaaccgccaggcgctccgggagctcctctttacgacgccc

SEQ ID NO: 398286 - DNA, 250 bp, Oryza sativa nipponbare
ccacgcgtccgggtagacatggccgccgccaccatggccctttcgttcccggcgctggccggcaagggcgccggtaaggtgttcggcgaggggcgcatcaccatgcgcaagtcggcggcgaagcccaagcccgccgcgtcggggagcccgtggtacggcgccgaccgcgtgctctacctcggcccgctctccggtgagccgccgagctacctgaccggcgagttcctcggcgactacggttgggacaccg

SEQ ID NO: 398287 - DNA, 436 bp, Oryza sativa nipponbare
ccacgcgtcctgctactgctataaggagcgcgccgtgcactttctcttacaatgtcgaccgccgccggggccagcgctgcccagagctggtgcttcgccactgtcaccccgcgctcccgcgccacagttgtggtcagcctcgcctccccatcaccgtcctcctcctcctcctcctccaacagcagcaacctcccggcccccttccgcccccgcctcatccgcaacacccccgtcttcgccgcccccgtcgcccccgccgcgatggacgccgccgtcgaccgcctcaaggatgggttcgccaagttcaagaccgagttctatgacaagaagccggagctcttcgagccgctcaaggccggccaggcacccaagtacatggtgttctcgggcgccgactctcgcgtgtgcccgtcggtgaccatgggcctggtacccg

SEQ ID NO: 398288 - DNA, 299 bp, Oryza sativa nipponbare
  unsure (1)..(299): unsure at all n locations
ccacgcgtccgcccacgcgtccgtctacagctcggtacaaccatgnatttataacgtgttgtgaagcatgtgtggtaaaatcgtggaatgggagtgttctgcgatccccatatgttgttgtaatgttgtatattgatgaccatgctgcaacggcagcatgtttgtaaaaaaaaaaaaaaaatataaaaaaaaaaaatggtcgtccgttctagaaggttccaatgattacatacgcatgcatgcaaattaaataatcttttctatagtagaaccttaggggcggttcatttaaaggatcc

SEQ ID NO: 398289 - DNA, 458 bp, Oryza sativa nipponbare
ccacgcgtccgcccacgcgtccgcggacgcgtgggcttcatattgtcaccattgaagtacgcaactgtggatggatgttctgatgctactggtgttcttggtgctattgctaaggttgttaaggtggagcattgggaaagagctcatactattgcagctgataaatggattcagtattgctaactgtcgagagtgcatattgtacctgggagtaaatcaccaacctcttattgtgggggacaaccattaattacaagttgctccatttaatacctactacccacaattgggtgaacatctggcaaaagttggtgtggatcctgcaatcaataaatgggaccagccttttgtgttgggagttgttgatccgcaccgattattatcccatcccgcgggggtttctgatgtttaggctgaatctgcagcttggctagatcctggactattcacaaacttta

SEQ ID NO: 398290 - DNA, 459 bp, Oryza sativa nipponbare
ccacgcgtccggctcagtactcctcaagcaagttcttgaagaatgcctcaaataaattcctgaagaagaggttaaaaccagactattggtcagaagatgaactcgatgctttgtggattggggttcgcaggcatggaagaggaaattgggaggccatgcttagagatccaaagctgaagtttttgagccaccgatctcatgaagagctggcctcaagatggattttggaggagcagaaaattatagaggaaccaatgcctacagccaccagaagctccaactctacatcatttcctggcatatcggatgcaatgatgtctcgggcacttaatggaagtagcttttccaaactgaggatggagccgccaaagttgcagtcccacctaactgacattcagttaggttgcaatgatataccaaccagattttctcatgttgagcccactaattacatgaatt

SEQ ID NO: 398291 - DNA, 461 bp, Oryza sativa nipponbare
ccacgcgtccgctcacgcattaccacaaccaagaaggagaaagtcttggtcatgctgcatagacggccacatgcgtgagtggctcttctgccaccacccccccttactaacaaagactcaagtacaccaacttgatgcacgccttcctcccgtactacatctccagctttggccacgtcagcaatggcggctatgatcaggtccatgcaagtgttgcctatttgagtcatcaagaatttcgagaccctctcctacctgccaccgctcaccgtggaggaccttctgaaacagatcgagtacctgctccgttccaagtgggtgccctgcctccagttcagcaaggtcggattcgtctacccggagaaccacaaatcccccggatactacgattgcaggtactggaccatgtggaaactgcccatgttcgggtgcactgacgccccccaggtgctcaaggagct

SEQ ID NO: 398292 - DNA, 411 bp, Oryza sativa nipponbare
ccacgcgtccgatctacttcgtggtcttggggttccttcgtttttaatttccggccactatttccagtgagctcggatccacgttttggcccatgcttactgccggctggaagttgtggccttttgcacacttggttacatatggcctagttcctgttgaacaaagacttctgtgggttgactgcgtggagttaatctgggttacaatactgtcaacttactccaacgagaaatctgaagcaaggaactccgaggacgcatccacatcaaatgcttccaatgacaattcaatatagcgaacggtatagccagccaagctgccctttaccttcatcattttgggcttgtatatattgtacaatttgtagctgcagctctgcaagtgtaacctttttgcaaaggataattaaa

SEQ ID NO: 398293 - DNA, 465 bp, Oryza sativa nipponbare
ccacgcgtccgcccacgcgtccgcccacgcgtccgctcgccgtttcgcgtattccggcggcgacccacctgcccggcggccggctacccccgccacgcaccaccgtcggatcaagcctccctgccacaaaccaggagctcttcctcgccggcgctctcctcatccacccgtagcaggaatggagaagtatcacagcaactcccgatttgctcccttcagagatgctccatttgctctccgtggtgcccttggtagctcaggctcatctttcagcagcatcgacagcctcagacgctcctcaacccttgagcaagctagggggtacacatctcgtcccctaggagctgtgcggccaaagatgctcccatctggatgccgacccctgcacacaagccatcctctgtcggctcctgttgctaaccgccccctgtcaccccaccttcctctgaagaagccacagctgag

SEQ ID NO: 398294 - DNA, 457 bp, Oryza sativa nipponbare
ccacgcgtccgcggacgcgtgggcggacgcgtgggcttacgcttgggcggacgcgtggggagatatgggagcacacatgcgatgttgaccgggaaccaaaagtttttggggagagaccgaatcctgcatggaaagcgcctgatgttacaagcttcaggaactctcttctgaaagagctccaaattgttgcttttagaccactaaaacaacagttagagttcatcagggttgtgatgcagcaagctcccaacctggggacgatcattctgaaatacgacgatccttgtgaatactgcgaagcattaggcatttttccacctcgttcttcaacagaatgtgtattccctaagagcaaggatgagcaagatagggtgatcaatcttctcaaagatggggtctgctcccctgcacaaatagtttttcggaagccgacgatgacgatatgctctccatgttg

SEQ ID NO: 398295 - DNA, 400 bp, Oryza sativa nipponbare
ccacgcgtccgctcacacgcattgcagaggagaggcgacaatttaggggaaggaggaggacgtgcggctgggggcgaacaggtactcggagaggcatcctatagggacggcggcgcatggcgcctgggacgacaaggactacaaggagccgccgccggcgccgctgttcgagccaggggagctcaagtcgtggtctttctaccgggccgggatcgccgagttcgtcgccaccttcctcttcctctacatcaccatcctcaccgtcatgggggtctccaagtcctcctccaagtgcgccaccgtttgcatccagggcatcgtctggtccttcggaagcatgatcttcgcgctcgtctactgcaccggcgttattttctgttgacacattaacccaggctgt

SEQ ID NO: 398296 - DNA, 291 bp, Oryza sativa nipponbare
ccacgcgtccgatcagagatcaggtagaacagtgagagtgaggtgcatataaatttgagctgaagctgaggatggcgacatccatgatcacctcgccgctggtggcacctgcccgggccaagggccttccgtccatctcccgccggggatcctccttcgccatcgtctgcagcggtgggaagaagatcaagaccgacaagccctacgggattggaggtggcatgtcagtcgatattgatgcatctggcaagaagagcacggggaagggtgtgtaccaattcgttgacaagt

SEQ ID NO: 398297 - DNA, 441 bp, Oryza sativa nipponbare
ccacgcgtccgcccacgcgtccgcccacgcgtccgcccactcgttcgcccacgcgtccgggtgaagtacgtggggccattctcggcgcagacgccgtcgtacctgaggggcgagttcccgggcgactacgggtgggacacggcggggctctccgcggacccggaggcgttcgcgaggaacagggcgctggaggtgatccacggccggtgggcgatgctcggcgcgctgggctgcatcacgccggaggtgctcgagaagtgggtgcgcgtcgacttcaaggagcccgtgtggttcaaggccggcgcccagatcttctccgacggcggcctcgactacctcggcaaccccaacctggtgcacgcccagagcatcctcgccgtgctgggattccaggtcgtcctcatgggcctcgtcgagggctaccgcatcaacggcctcccc

SEQ ID NO: 398298 - DNA, 374 bp, Oryza sativa nipponbare
ccacgcgttcgcggcgcgtgggctccccggtgatggcccggtcgggccgcgacctcctccggctcggggcgaggcgcggatcaccatgcgcaagaccgtcgtgaaccaaagccggcggcgtcgtcgggagcccgtggtacggcgccgaccgcgtcctctacctcggcccgctctccggcgagccgccgagctacctcaccggcgagttcccgggcgactacgggtgggacaccgcggggctctccgccgacccggagacgttcgccaagaaccgggagctggaggtgatccactcccggtgggcgatgctgggcgcactcggatgcatctttaaggagctccttttcctgaacgttgtcaagtttcgttaggcc

SEQ ID NO: 398299 - DNA, 461 bp, Oryza sativa nipponbare
ccacgcgtccgaccatatcacgtactaccgggcgtcctcacttttttcagcccacagagacgaaagacacggggaaataaacaaacaaaccaaaaaaaataaaatcgagaaaaaagtggagatataaattcaatcgcaggaagcgaagcgcggatccgcttcctcatccaccgatcgccccctccttcatcctccggtagcagtcatggcgtcgtcggcgctaatctgcgacaccgagcagtggaagggcctccaggcgcacgtcggggcgattcagaagacgcacctgcgcgatctgatggatgatgccgagcgctgcaaggcaatgacagctgagtatgaaggcatatttctggattactcgaggcagcgtgcaactggcgagaccatggagaagctgtttaaattggcagaggcggcaaagctcaaggagaagattgagaagatgtttagtggtgaca

SEQ ID NO: 398300 - DNA, 459 bp, Oryza sativa nipponbare
  unsure (1)..(459): unsure at all n locations
ccacgcgtccggaactactctcgcaacgaaggagagagcttgtgttagctgcagagatggccccctccgtgagggcgtcgtcggacaccaccgtcgctcccttccangggctcaagtccaccgccggcatgcccgtcgcccgccgctccggcaactccagcttcggcaacgtcagcaatggcggcaggatcaggtgcatgcaggtgtggccgattgagggcattaagaagttngagaccctntnctacctgccactgctcaccgtggaggacctcctgaagcagatcgagtacctgctccgttccaagtgggtgccctgcctcgagttcagcaaggtcggattcgtntaccgngagaaccacaaatnccccggatactacgatggcaggtactggaccatgtggaagcttgccatgtntggtgcactgacgccacccaggtgctcaaggagctcgagga

SEQ ID NO: 398301 - DNA, 123 bp, Oryza sativa nipponbare
  unsure (1)..(123): unsure at all n locations
ccacgcgtccgaaaaaaggagtcttcatgtcccgttatcgatgtcctttttttaaaaaaatacgccgtcgtgggagctttaccaggactcactaganaaacacctaaatccggaagtaatctg

SEQ ID NO: 398302 - DNA, 461 bp, Oryza sativa nipponbare
ccacgcgtccgaaaggctcccaggaagcaacttgccaccaaggctgctcttaagtctgctcccacaactggaggagtgaagaagcctcaccgttaccgccctggaactgttgctcttcgtgaaatccgcaagtaccagaagagcactgagctgctcataaggaagcttccattccagaggcttgttagggagattgcccaggattttaagactgatcttcgtttccagagccatgcggtgcttgcccttcaggaagctgccgaggcgtacctggtgggtctcttcgaggacaccaacctgtgcgccatccatgccaagcgtgtgaccatcatgcccaaggacattcagctggctaggaagatccgtggtgagagggcttaggctttctcatctctgggaggggctctggtgtttcatctgtgactactttctgcttttgctgctgaactcttatttggtgt

SEQ ID NO: 398303 - DNA, 433 bp, Oryza sativa nipponbare
ccacgcgtccgcccacgcgtccgcaaaacatgggcatgtaactgttagtgaagtgtgggaccctgggaatggaactgttcttcaactgctgctgtcccttcaagctcttgttctcaatgaaaaaccttacttcaatgaggctggctatgacaaattcatggggaaagcagatggagagaagaactccatcacttacaatgagaacgctttcctgctgtcatgcaagtccatgacgtacattttacacaagccaccaaagcatttcgagaattttgtcaaggagcacttcacttgttgcgcgccgcacattctggatgcctgcaaggcttatctcggcggcgatcttgttggacatgctcgtgacagcgcctatatatcggatgacggatgcaagaactcctcaaccggttttaagataatgctagccaagctc

SEQ ID NO: 398304 - DNA, 467 bp, Oryza sativa nipponbare
  unsure (1)..(467): unsure at all n locations
ccacgcgtccgcccacgcgtccgcggacgcgtgggattttatttacatctcacacctccaaaatcttatgctactacagtaaactgggtacagagatataataatactcatacaagtatgtacaacaacaagcacaccacacactgatcaacttttccttggattttttgctctgcagcaaaacaccaaggcaaaagcttaccactgctcatatgtatctcctcatactgaattatactaagtagtagtagtaactacatggctgcagtagctatatgcagaccaaatctcgtcaaaattaaaatcctaatatccaagaagaaaacaagaaggagtaacaaatcgaatgaaggtgtgcagtgcangtaggaggaaagtagcaatcaacggtgactcaaacacacccaagagcaagaaagatgacgacgaagaggagctagctcgagctcgagctcgagccatggcga

SEQ ID NO: 398305 - DNA, 249 bp, Oryza sativa nipponbare
ccacgcgtccggtgaagtaaagcaagaattttcactgtcctggaatattctactggaggagagctctccgaaatcattgcaactaatggaaggttgaaggcacaaaaatcaccaaaatactttcaacaacttatcaatgcacttgactactgccacagtaggggtgtgtaccacagaaacttgaagtcagaaaatttgctgcttaatgcttctgaaaacctgaaagtctctgactctgcttggagcgct

SEQ ID NO: 398306 - DNA, 463 bp, Oryza sativa nipponbare
ccacgcgtccgcccctctcctcggtccgcctcattatgcagggccgcaacgtcaagctgaatgagaaggtgaaggagcacatcgaggagaaggcggggagagcagtggcgaagcacagccagcttgtgaaggaggtggacgtgcgcctctccgcccgcggtggcgagctcagccgaggtcccaagatttgcaggtgcgagatcactctcttcaccaagcgccacggcgtcatccgcgccgaggaggacgccgagtccacctacgccagcatcgacctcgcctcctccatcatcaagaggaagctcaggaagatcaaggagaaggagaccgacgtccgccacctcaaggggaccaagccccccgtctccgactggccgccatcattgctcgacaacaacgacgacgacgcccaggcccagctcaaggatctggaggaggccgtcggcgccgaggacgaggacac

SEQ ID NO: 398307 - DNA, 421 bp, Oryza sativa nipponbare
ccacgcgtccggatgatctccggccagaaggcggcgcacctggcgctgaaggcgctcggccgggcgaacgccatcgacggcacgatcaagaaggcggcggcggcggcggctcacccggagctgatcctggcgtcgaaggacgacggcgagatcgtggacgcctgagcgaatagaacagggtaaaaaaaaatccgcaagacgtggtggtgacacggaggagttggggacgagaagaagatgtggactttcccctgtgtttttttttcgggatttgcattgatccccttgtttgttttagctctggatgttgattagcgtcttgttcatagcacttccactgccaccgggtgtgtgtgctctgcttgcctgatgagggcaagaaaactttcatggatccgtctctttgggaggaatgaataaa

SEQ ID NO: 398308 - DNA, 461 bp, Oryza sativa nipponbare
ccacgcgtccgcccacgcgtccgcccacgcgtccgcacccgcttcgctttctcccctctctaagccggggaggcgaagccatggcgtccgtcaccgcccgcaccccggtcgcagccctccgctcgtcggcgtcgctcaagtctaccttcctagggcaatcctccacccgcctcgcccgcgcaccgactacgaggcgtaatgttcgggcggaggccaagggagagtggctccccggcctcccttctcccacctacctcaacggcagcttgccaggcgataacgggttcgacccgttgggtctggcggaggacccggagaacctgcggtggttcgtgcaggcggagctggtgaacgggcggtgggcgatgctgggggtggccgggatgctgctgcctgaggtgctgacgaagatcgggttgatcgacgcgccgcagtggtacgacgccggcaaggccacctac

SEQ ID NO: 398309 - DNA, 417 bp, Oryza sativa nipponbare
ccacgcgtccggggagagagagcatctagctagggagagaaagttatatgttacgagaggagagagatggccggtgcggatgctcccatggcgagccaactgatgaacagcaacttggtgtgctccaagccgagggggctgtctggtgcttcgctgacaaggaggccccgcttcacagtcaaggccatccagtctgagaagccaacgtaccaggtggtgcagcccatcaatggcgaccccttcatcggcagcctggagacgccggtgacctccagcccgctggtcgcctggtacctctccaacctcccggcgtaccgcaccgccgtcagcccgctgcttcgcggcatcgaggtcggtctcgcccacggcttacctcttgttgggcccttcgggctcaccggcccgctccttaacacg

SEQ ID NO: 398310 - DNA, 412 bp, Oryza sativa nipponbare
  unsure (1)..(412): unsure at all n locations
ccacgcgtccgagggtctcctcctcaacatcaacaatggcggtctcatctctccttcgccacactcgccagcgcgcggccggcggcggagcgggccctcctcgcctccaaaaccccctcgccgctcctctccatccgcaccggcaccggcaccgcacgcctcccctcatcggccgtctttggaggtttcactcctgcgctttccgctgctcacagccgcgcgcgcttcgtctnctccgccaccgctgaccccaaggaagtggacctccagtccaaaatcacaaacaaggtgtactttgacataagcatcggaaaccctgttgggaagaacgttgggagggtcgttattggcctatacggggatgatgttccccagaccgcagagaacttccgtgctctttgcactggagaaa

SEQ ID NO: 398311 - DNA, 396 bp, Oryza sativa nipponbare
ccacgcgtccgcccacgcgtccgcccacgcgtccgcccacgctttcgccacgcgtccgcggacgcgtggggggaaaaaaaagagagagagatggcagcaacagcctccctgaagagcagcctcctgctaccatctcctatctctgacttcagtagtgcagcactctccatctcaacccaggacctcgccaagcagaagaaagtcccattcatctcagatgatctcgagatcgagtgcgaggggaaggagaagtacaagtgcggatccaacgtcttctggaaatggtgatgatctgatgatgatcatcgatcgattggccagccatgaaaacattcctgtacctagaacctttgtgatatgacacgacaagcgttcaattatgcatgcagttgtgtc

SEQ ID NO: 398312 - DNA, 458 bp, Oryza sativa nipponbare
ccacgcgtccggttccagtacgggttgggcaagctgttgatgttgttggtcaggctggaaggcccaagggaattactggtttccaaacacattcgacacccgtattgcttgcagcaggggaacgggctgaattagcaaccgaaaaatacattccgctgacttcggtattggagggctttgtaattctgaagaagaacccggaatataacgaggagtgagggacatttccaggcttgatacaatgctgatttctggggctcacaggcgtggcatactagggaaccatgctgcaacatgggacaggatctttgcctattgggttccctcctcggcgcctcctggtgttaatcggataggtcttttatctcttctaccggagtctcgagtgttggagcagagctctttgaattctgaaatcctttttggttgtgcaatgactgacgtgacgtatcacttgt

SEQ ID NO: 398313 - DNA, 460 bp, Oryza sativa nipponbare
ccacgcgtccgcccacgcgtccgccaggttggacctagtgtctgtattgaagctggagaccacatatggagttcaagatatattcttgagagaataacggagcaggctggtgtagtgcttacccttgaccccaaaccaattcagggagactggaatggagctgggtgccacacaaactacagcaccaagagtatgcgtgaagatggaggatttgaggtgatcaagaaggcaatcctaaacctatcacttcgccatgacttgcatataagtgcatatggtgaaggaaatgaaaggaggttgacaggtttacacgagacagctagcattgacaatttctcatggggtgtggcaaaccgtggatgctctattcgggtggggcgagacaccgaggcgaagggaaaaggctacttggaagaccgtcgcccggcatcaaacatggacccgtacgtcgtgacagcgc

SEQ ID NO: 398314 - DNA, 446 bp, Oryza sativa nipponbare
ccacgcgtccgcacccgcttcgcttcctcccctctctaagcctgtgaagctaagccatggcgtgcgtcggggcccgcaccccggtcgcagccctccgctcgtcggcgtcgctcaagtctaccttcctagggcaatcctccacccgcctcgcccgcgcaccgactacgaggcgtaatgttcgggcggaggccaagggagagtggctccccggcctcccttctcccacctacctcaacggcagcttgccaggcgataacgggttcgacccgttgggtctggcggaggacccggagaacctgcggtggttcgtgcaggcggagctggtgaacgggcggtgggcgatgctgggggtggccgggatgctgctgcctgaggtgctgacgaagatcgggttgatcgacgcgctccatggttcgacgcctgcaaggtcacctactttgcgttgt

SEQ ID NO: 398315 - DNA, 458 bp, Oryza sativa nipponbare
ccacgcgtccggctaatgtgtcactgaagaaatcgactgacccagaagccacttcagatgctccaagacgttcttctcaagaattaaaggatgagatacttgaggtggctggcaaaatatacaaggctggaatttcacttcttgttattgataccgagaacaagtttgtatccacaggatttgccaaggaaattgcaagggtcgcccaaggtaaatactattacctgccgaatgcttcagacgctgttatttccgccgccaccaagactgcactctcggacctgaagagttcgtgatcctggagagcgttttaccttcagataatgagtggtttttaccttttaccttgtttggtgcagcagtgtccatgtttcgtgtaactttgggacgtttcggctgtgataaccaattttggcataggatttttaccgtgagagttggaattcgggcgtagcacc

SEQ ID NO: 398316 - DNA, 225 bp, Oryza sativa nipponbare
ccacgcgtccgaagtactcgagcaaagaaggagagagcttggtgagctgcagagatggccccctccgtgagggcggggtcggccaccaccgtcgctcccttccaagggctcaagtccaccgccggcatgcccgtcgcccgccgctccggcaactccagctttggcaacgtcagcaatggcggcaggatcaggtgcatgcaagtgtggcccattgagggcatcaag

SEQ ID NO: 398317 - DNA, 413 bp, Oryza sativa nipponbare
  unsure (1)..(413): unsure at all n locations
ccacgcgtccggctagcttgggaagaggaggaggagcttgagcttggatagagacaacaatggcggctcaggctcgttctctctgggaggcagctgctggggaggccattgcaatcttcagtctccaggtcttcttcctccaggaaggcacccttcatggtcagggcagaggccactccccctgccaagcaaggtgctgacaggcagctgtggttcgcatccaagcagtccctgagctacctggatggcacgcttccgggagacttcgggttcgacccgctggggctatcggacccggaggggaccggtgggttcatcgagccacggtggctggcctacggcgaggtgttcaacggccggacggcgatgatgggcgtcgtcngcatggtcgcccccgagctccctcgcaagct

SEQ ID NO: 398318 - DNA, 460 bp, Oryza sativa nipponbare
ccacgcgtccgaaagaagaagaagaagaaagaagaagaagaagatgcagaccgctgctagcagtgtcgttggattgtcggccgtgttgcccgctgctgtgaaggggcgcagcctgcagattcaggctcctcgccgtgttgcgttgcgcgttcgtgcggcggcggcggcggtggcagtggaggctgcggaggtggactacagctctaacatctcggtgtttccgatggaggcgtgcgacctcatcggcggcgaggcgtgcaacgtgcagatgtacccagaggccaagctctcatcatcggctgctgttgctgtttctcgtgcggcggcggaggaagtcgacagggactacctatcctacgacgagcccaccacggtgttccccgaggaggcgtgcgacgatctgggcggagagttctgcaaggccacctgatcccattcccatccatggagaattggagtc

SEQ ID NO: 398319 - DNA, 443 bp, Oryza sativa nipponbare
ccacgcgtccgcgtacgacttcgacaacaccatgggaggcttttacatcgcccctgctttcatggacaggctcgtcgtccacatctccaagaacttcatgaccctccccaacatcaaggtcccactcatcctgggtatctggggaggcaagggtcagggaaaatccttccagtgtgagctcgtcttcgccaagatggggatcaaccccatcatgatgagcgccggagagctggagagcggcaacgccggagagccggcgaagctgatcaggcagcggtaccgtgaggcggcagacatcatcaagaaggggaagatgtgctgcctcttcatcaacgatctggacgcgggtgcaggtcgcatgggaggcaccacccagtacacggtgaacaaccagatggtgaacgccaccctgatgaacatcgtcgacaacccaaccaacgtgc

SEQ ID NO: 398320 - DNA, 425 bp, Oryza sativa nipponbare
ccacgcgtccggacctcctgaagcagatcgagtacctgctccgttccaagtgggtgccctgcctcgagttgagcggggtcggattcgtctaccgtgagaaccacagatcccccggatactacgatggcaggtactggaccatgtggaagctgcccatgttcgggtgcactgacgccacccaggtgctcaaggagctcgaggaggccaagaaggcgtaccctgatgcattcgtccgtatcatcggcttcgacaacgtcaggcaggtgcagctcatcagcttcatcgcctacaagcccccgggctgcgaggagtctggtggcaactaagccgtcatcgtcatatatagccttgttttaattgttcatctctgattcgatgatgtctcccaccttgtttcgtgtgttcccagtttgttcatcgtcttt

SEQ ID NO: 398321 - DNA, 452 bp, Oryza sativa nipponbare
ccacgcgtccgaaaaaccaacccaaccgccgccgcatcgccctcgttagaacgatggccgcgtcggcgcggcaccagaccaccagcttcctcggcaccgcccctcgccgggatgagctcgtccgccgcgtcggcgactccggtggccgcatcaccatgcgccgcaccgtcaagagcgcgccccagagcatctggtatggacctgaccgtcccaagtacctgggcccgttctcggagcagacgccatcgtacctgaccggagagttcccgggagactacgggtgggacacggcggggctatcggccgacccggagacgttcgcgaggaacagggagctggaggtgatccactcgcggtgggcgatgctgggggcgctgggctgcgtcttcccggagatcctgtccaagaacggggtgaagttcggggaggcggtgtggttcaaggccggcgcg

SEQ ID NO: 398322 - DNA, 448 bp, Oryza sativa nipponbare
ccacgcgtccgcggacgcgtgggcaaggcgggctcgcagatcttcagcgagggcgggctcgactacctgggcaacccgagcctgatccacgcgcagagcatcctcgccatctgggcggtgcaggtggtgctcatgggcgccgtcgaggggtaccgcatcgccggcgggccgctcggcgaggtcgtcgacccgctctaccccggcggcgccttcgacccgctcggcctcgccgatgaccccgaggcgttcgcggagctcaaggtgaaggagatcaagaacggccgcctcgccatgttctccatgttcggcttcttcgtccaggccatcgtcaccggcaagggccccctcgagaacctcgccgaccacctcgccgaccccgtcaacaacaacgcctgggcgtacgccaccaacttcgtccccggcaagtgaagtgggggaccgtagctta

SEQ ID NO: 398323 - DNA, 461 bp, Oryza sativa nipponbare
ccacgcgtccgggcacgcgggggcgcgggcgtctatttgttgttcgcgcgggcgcggcggcgagacgcgggtgtagctactgctataaggagcgcgccgtgcaccgcctctcacaatgtcgaccgccgccgccgccgccgctgcccagagctggtgcttcgccactgtcaccccgcgctcccgcgccacagtcgtcgccagcctcgcctccccatcaccgtcctcctcctcctcctcctccaacagcagcaacctcccggcccccttccgcccccgcctcatccgcaacacccccgtcttcgccgcccccgtcgcccccgccgcgatggacgccgccgtcgaccgcctcaaggatgggttcgccaagttcaagaccgagttctatgacaagaagccggagctcttcgagccgctcaaggccggccaggcacccaagtacatggtgttctcgtgcgccgact

SEQ ID NO: 398324 - DNA, 268 bp, Oryza sativa nipponbare
ccacgcgtccgcgcacgcgtggtaacactctcaatcccacattttctttagtaagcatacatatgcatagcagggatgaatcaaatcaagaggcatacaaagaccatataacaaaacttcaaaccaattcaaaacgccacatttatctcagaacatttggcgccaacaccacagtcgctagccctatatggcaacagtcgatcattcatcattatttgtggaagcttactgtgctgtaacatcacaatgccaatcctttactgtgatc

SEQ ID NO: 398325 - DNA, 283 bp, Oryza sativa nipponbare
ccacgcgtccgcccacgcgtccgcccacgcgtccgagcccaatccggcttcgtcgtcggggagcccgtagtacgtgtccgaccgcgtcctctacctcggcccgctctccggctaagcccctagctacctcaccggcgagttcccgggcgactacgggtgggacaccgcggggctctccgccgacccggagacgttcgccaagaaccgggagctggatgtgatccactcccggtgggcgatgctgggcgcgcttcgctgcgtcttcccggagctcctcgcccgg

SEQ ID NO: 398326 - DNA, 444 bp, Oryza sativa nipponbare
ccacgcgtccgttcttctggggctacctgctaactcagatagcatgatgaatctgggcagatacagttggagggagagactgtccttggcttcggcgtcatttggtggtcgatagccacagctcttacgccttttgcggcgaagctggggttaccattcctccttgtgacccgtgctttcatgggagttggtgagggagttgccatgcctgcgatgaataatattctttcgaaatgggttcctgtatcagagaggagcagatcattggctctcgtgtatagtggaatgtaccttgggtcagtgacagggcttgcattttccccattgctgatacataactttggctggccatcggtcttctactcctttgggtctctgggtgtatttttggtttcgacatgggcgagcaaagcgtatagtattccacttgaagatccaggaatt

SEQ ID NO: 398327 - DNA, 461 bp, Oryza sativa nipponbare
ccacgcgtccgaagaagtactcgagcaaagaaggagagagcttggtgagctgcagagatggccccctccgtgatggcgtcgtcggccaccaccgtcgctcccttccaggggctcaagtccaccgccggcatgcccgtcgcccgccgctccggcaactccagcttcggcaacgtcagcaatggcggcaggatcaggtgcatgcaggtgtggccgattgagggcatcaagaagttcgagaccctctcctacctgccaccgctcaccgtggaggacctcctgaagcagatcgagtacctgctccgttccaagtgggtgccctgcctcgagttcagcaaggtcggattcgtctaccgtgagaaccacagatcccccggatactacgatggcaggtactggaccatgtggaagctgcccatgttcgggtgcactgacgccacccaggtgctcaaggagctcgagga

SEQ ID NO: 398328 - DNA, 442 bp, Oryza sativa nipponbare
ccacgcgtccgtgcacagcaagtgctccttgtgcatttgcacgttggggctagatgtggcagttggaccggcatgttagattaccatcttgttggggacggttgaaattatttttcatttattgcctctctcatctgatactccctcatcaatcatcatcactaagttacatgattagtgctttctgaatacataaggcatttgataagatggtagaacaaaaggggaatattttgatgaagagatatgagataggaaaattacttgggcaaggaagtttcgctaaagtttaccatggccgtaatattaagaattcacaaagtgttgcaatcaaggtgattgacaaagaaaagatattgaaatgtgagcttatggatcaaataagaagagagatttcagtgatgaacctagtaagacatccgtgcattgttcaattgtttga

SEQ ID NO: 398329 - DNA, 384 bp, Oryza sativa nipponbare
  unsure (1)..(384): unsure at all n locations
ccacgcgtccgctctcgtgtccgtttattcatttttgtaagattttagacgacgcgtatcgttgtgggtgaaatttgctgtttgatttggtctccgttttctttgtaaaaatggtgatgctgtcgtgagctctgaacacgaagattttgttggtgctctgcaacctgcatattactagcttgggctatctcgttgtaaaaaaaaaaaaaaaaaaaaaaaaaaaaaaaaaaaaaaaaaaaaaaaaaaaaaaaaaanaaaaaaaaaaaaaaaaaaaaaaaaaannanataaaaaaaaaaaaaaaaaaaaaaaaaaaaaanataggggggggcctttttaggggtccaaatttatttaccggtggtttggaagtaataatttttttt

SEQ ID NO: 398330 - DNA, 197 bp, Oryza sativa nipponbare
ccacgcgtccgcacgacacgacgcaccaatggcgctcgtctccttctcctcctccaccaccgccggtggggcgctccccggcgccgccagggcctcctccttcctcggcggcgccggcaggagcggcaggctgctgctgaggcaggccgagtcgtcgtccgcgcgggctgttttcgtcttgcgcgccgtggcgcccg

SEQ ID NO: 398331 - DNA, 462 bp, Oryza sativa nipponbare
ccacgcgtccgcccacgcgtccggtgatcctctacaatcatcgactttcagcaaattaagatgggtgctggcttctcctccaccgttggagctccggcgtccactccgaccaacttcctggggaagaagctgaagaagcaggtgacatcggcggtgaactaccatggcaagagctccaacatcaacaggttcaaggtgatggccaaggagctggacgagggcaagcagaccgaccaggacaggtggaagggtctcgcctacgacatctccgatgaccagcaggacatcaccagggggaagggtttcgtcgactcccttttccaggctcccacgggtgatggcacccacgaggccgtcctcagctcctacgagtacctcagccagggtctcagaacgtacgacttcgacaacaccatgggaggcttctacatcgcccctgctttcatggacaagctcgtcgtc

SEQ ID NO: 398332 - DNA, 467 bp, Oryza sativa nipponbare
  unsure (1)..(467): unsure at all n locations
ccacgcgtccgcccacgcgtccggtgatcctgatctagatcacaactgttgggaaaggccggagactatggctgagaaaagaccactcacacagattaacacaaagtctcctggatcagatgttgctgctgaggcagcaacagctatggcatcagcatcaattgttttcaaatccagagacactacatatttctgattcacttcttcaacatgctcagaagttgtttacttttgctgatacttataaaggcctcgccagtgacacctatccaaagctccaaaactactataattctactggttatcaagacgaactcctgtgggcagcgagttggctctatcatgctacaggagaccaaacatacctcagttatgtgactgtagagaatggaaaagcttttgctgattggngaaggccaacatggttcagttgggatgacaaacttgcatggacacatgtgctcttg

SEQ ID NO: 398333 - DNA, 439 bp, Oryza sativa nipponbare
  unsure (1)..(439): unsure at all n locations
ccacgcgtccgatttttcatttattgcctctctcatctgatactcccttatcaatcatcatcactaaggtgcatgagtagtgctttctgaatacataaagcatttgataagatggtagaacaaaaggggaatattttgatgaagagatatgagataggaaaattacttgggcaaggaagtttcgctaaagtttaccatggccgtaatattaagaattcacaaagtgttgcaatcaaggtgattgacaaagaaaagatattgaaatgtgagcttatggatcaaataagaagagagatttcagtgatgaacctagtaagacatccgtgctttgttcaattgtatgaggtgatggctaccaaaactaagatatattttatcctanagtatgtgaaagggggagagttattcaacaaggttcgacgtggaagactaaaggaag

SEQ ID NO: 398334 - DNA, 378 bp, Oryza sativa nipponbare
ccacgcgtccgcacacacaccactccatttctgagctcttctattttgagtgagagagcagcagaagggggtagtgcaagatgccgatccgcaacatcgccgtggggagccaccatgaggtgtaccacccgggtgcactcaaggcggcgttggccgagttcatctccaccctcatcttcgtcttcgccggccagggctccggcatggccttcagcaagctgaccggcggcggagcgacgacccccgccgggctgatcgcggcggcggtggcccacgccttcgccctgttcgtggcggtgtccgtcggcgccaacatcttcggcggccacgtgaaccctgccgtgaccttcggcgccttcgtcggtggttacattaccc

SEQ ID NO: 398335 - DNA, 403 bp, Oryza sativa nipponbare
ccacgcgtccgccccgctccactctcaggcaggcaatcatcgtgtctaggcaccagcccaccggccggcagtgtcgtccacctcctgcttcctccaccagtccacggcccgcgtcgccgcgcgcgtcgcctccccgtccccggcgacacggacccacctcctcgtctgccgcgcccagaagcaggacgacgccgacgtctcccgccgcgcggcgctcgcgctgctggccggagcgacggcggcggtgggggtgaaggtggcgcccgccgccgcggcctacggcgaggcggcgaacgtgttcgggaagcccaagacgaacacggagttcattgccttcaagcggctaggggttcaagctgctgatcccgtccaagtggaaccccatcaagggatggcgagtttc

SEQ ID NO: 398336 - DNA, 453 bp, Oryza sativa nipponbare
  unsure (1)..(453): unsure at all n locations
ccacgcgtccgattaaatcttcgaccatgtcggacaagtgcggcaactgctactgtgctgacaagagccagtgcgtgaagaaaggtaccagctatggcgtcgtcatagttgaagccgagaagagccacttcgaggaggtcgccgccggcgaggagaacggcggctgcaagtgcggcaccagctgctcctgcaccgactgcaagtgcggcaagtgaagtcacgaagcaaccgaacactcgccgccggcgagtcacctaccttaattagtccacaataaaaaccacccatatgagtgtggtttgtgtgtgtgctgattattgctgaattaaacccgtgtgttatcgattaattaagcagctggtcgcttcggcgactatgcgtgtatcaacgtatgaatntgtgtgatgtgatgtacccgtgctattctcagtgaaattaatcaatcgtgtattc

SEQ ID NO: 398337 - DNA, 407 bp, Oryza sativa nipponbare
ccacgcgtccgcccactcgtccgagcgccggcctcgtcagcgtcatcttctgtggaaagatcatctgtgtgcaggtgtggccgatcgaatgcatcaagaagtttgaaaccctgtcttacctgtcaccgttcacggtctaggacctcttgaatcagatcgagtccctgctccagtccaaatgggtgccttgcctcgagtttaataaggtcggtttcgtctaccgtgagaaccacaagtctactgggtactatgatggcacgtactggactatgtggaagctgcctatgttcagatgcactgatgccacccaggtgctcaatgagctcgaggaggccaagaaagcatatccagatgcatttgttcgcatcatcggcttccacaacgtcaggcaagtgcagctgattatc

SEQ ID NO: 398338 - DNA, 464 bp, Oryza sativa nipponbare
ccacgcgtccgagcttggtgagctgcagagatggccccctccgtgatggcgtcgtcggccaccaccgtgggtccggtccaggggctcaagtccaccgccggcatgcccgtcgcccgccgctccggcaactccagcttcggcaacgtcagcaatggcggcaggatcaggtgcatgcaggtgtggccgattgagggcatcaagaagttcgagaccctctcctacctgccaccgctcaccgtggaggacctcctgaagcagatcgagtacctgctccgttccaagtgggtgccctgcctcgagttcagcaaggtcggattcgtctaccgtgagaaccacagatcccccggatactacgatggcaggtactggaccatgtggaagctgcccatgttcgggtgcactgacgccacccaggtgctcaaggagctcgaggaggccaagaaggcgtaccctgatgcattcgt

SEQ ID NO: 398339 - DNA, 237 bp, Oryza sativa nipponbare
  unsure (1)..(237): unsure at all n locations
ccacgcgtccgtaattaagcaaaagaagaagaagaagaaagatgaagattaagatgcagaccgctgctancggtgtggttggattgtcggccgtgttgcccgctgctgtgaatgggcgcancctgcatattcaggctcctcgccgtgttgcgttgcgcgttcgtgcggcggcggcggcagtggcagtggaggctgcggaggtggactacagctctaacatctcggcgtttccgatgg

SEQ ID NO: 398340 - DNA, 361 bp, Oryza sativa nipponbare
ccacgcgtccggcggtctgcttgcgaagttgcgatgcctgccatggccaagcccgcctcccgcgcgggcagtcccgcgtcggcgccgaagaagcataacgcaaagccctccgccgccgccggtggctcctcccacccgccttatttcgagatgatcaaggaggcgatcacggtgcttaaggagaggaccggctcgagcgcgcacgccatcgccaagtacatggaggagaagcacggggcgtcgctgccggccaactacaagaagatgctctccatccagctgcgcgggttcgcttccaagggcaagctcgtcaaggttaaggccttctacaagctcttcgacgccgtcaaggactcgccca

SEQ ID NO: 398341 - DNA, 459 bp, Oryza sativa nipponbare
ccacgcgtccggttacaggatccatccttaggtgttagaggcttacccctcttctaattctctcagagggctccatagttctttctgctccttttttctcatgaccacaatgcttgcagctagctctgtagtgaacagcaaccttccttgctcatcaaggatatcctcctgctcagacttcacatctggctactcctggcgtcctatagaggctgcaaaactctgccggacacgagctgtgcgctcgctgcagataacctgtactgccacaaagcctgcaaagtcaccagctgaagaagaatggaagatcaagaggcaagtgctagtagaaaagcgggtccgtagtgttgatgtgaaggaagcactgcgtcttcagaaggaaaacaattttgcaattcttgatgtcaggccagtagcggactttaaagaggctcatccacctggtgccgttaatgtgca

SEQ ID NO: 398342 - DNA, 130 bp, Oryza sativa nipponbare
ccacgcgtccgccatcgtgctggccagcatctccacggcgtgcaagcattacgcctcgctggtgcagcgcgcacgcatctttaacctcaccggcgtccactgccccttcaactttcatgtctagtaccat

SEQ ID NO: 398343 - DNA, 437 bp, Oryza sativa nipponbare
ccacgcgtccgcccacgcgtacgcttcttcctacttcgtctttttgctggtgtgttcgaggaggaggaggaggaggagaagctagcggcggcggcggccatggcgacgagcgggctgacgagctgcatcgcggtggtcgtgccgagcctgctggcgccgtcctcgaacacgagccgcctgtcggtctgcgcctacgccaccacctccgtgcgcgtcaccatgttcgccgagtggatgccgggccagccactccccggccaccttgacggctactatcccggtgacttggggttcgacccgatgggccttgacaccgtgccgcagaacttcgagcggttcaaggagtcctaggtgtaccactggcggtgtgccatgctcgctgtgcctggggtgttgctgccggtggccctatggctggacaactgggtgcaggcgca

SEQ ID NO: 398344 - DNA, 471 bp, Oryza sativa nipponbare
ccacgacgtcacgcgtacgcgtaggcgtacgcgtgcgcttgcactacactattatgctatctaatcatgaagtggttaaggtcgtacaatcaagaatggcgtacaccttctaattactacaggcggccacaagaataatgtgcacgctcgtgccctgttcgtccccggctacaatgacccaccttctcatctgacgcgcccaaaagcaggacgacgccgacgtctcccgccgcgcggcgctcgcgctgctggccggagcgacggcggcggtgggggtgaaggtggcgcccgccgccgcggcctacggcgaggcggcgaacgtgttcgggaagcccaagacgaacacggagttcatcgcctacagcggcgaggggttcaagctgctgatcccgtccaagtggaaccccagcaaggagcgcgagttccccggacaggtcctccgctacgaggacaacttcgacgccaacagct

SEQ ID NO: 398345 - DNA, 141 bp, Oryza sativa nipponbare
ccacgcgtccgatcgattaattaagcagctggtcgcttcggcgttctatgcgtgtatcaacgtatgaattggtgtgatgtgatgtacccgtgctattctcagtgaaattaatcaatcgtgtattcgtgtggtttgcctagt

SEQ ID NO: 398346 - DNA, 484 bp, Oryza sativa nipponbare
gtacgggttcggagttcgagcgcacgcgtccgcaacaggttcgaatagtacagtcggtgttaatggtaccatagggtatattcctccaggtggagttaggatggctacttctgagttcagtttcagcttttgttatagacagctaaatagataactgtactttctcttcatacctatgtagagtacgcgggaggtggtcatccatctacttctggggatgtttatagtttcgggatagtgatcctggagcttataacaggaaaaagaccgactgatcctatgttcaaagacggactcgacattatcagctttgtcgagagtaactttccacaccagatatttcaagtgattgatgctcgactcgcagaaaagtccatggactccaatcaaacaaatatgacactggaaaatgctgtccaccagtgcttgatatctctgctacaacttgcgctttcttgtacgcgcaaattaccaagtgatcgca

SEQ ID NO: 398347 - DNA, 457 bp, Oryza sativa nipponbare
ccacgcgtccgctctactactactagccagtaagctagctaactaactacgtggctatggccccgaccgtgatggcctcctcggccacctccgtggctccattccaagggctcaagtccaccgccgggctccccgtcagccgccgctccaccaactcgggcttcggcaacgtcagcaatggcggaaggatcaagtgcatgcaggtgtggccaattgagggcatcaagaagttcgagaccctatcgtacctgccaccactcaccgtggaggatcttttgaagcagatcgagtacctgcttcgatccaagtgggtgccttgcctcgagttcagcaaggttggattcgtctaccgtgagaaccacaggtctcccgggtactacgatggcaggtattggaccatgtggaagctgcccatgttcggctgcaccgatgccacccaggtgctcaaggagctcga

SEQ ID NO: 398348 - DNA, 423 bp, Oryza sativa nipponbare
ccacgcgtccgcggacatggcgtcgcccatgctctccgccgccaccgttccactccagggaggcggcttgtcggaggtctccggcctgaggagctcgtcgtcgctgccgctgcggcggaatgccacctccgacgacttcatgaacgcggtctccttcaggacccacgcggttggcacgagcggcggggcgcggcgggcgccgacggaggcgaagctgaaggtggcgatcaacgggttcggccgcatcgggcgcaacttcctgcggtgctggcacgggcgcggcgacagctcgcccctcgacgtcatcgccatcaacgacaccggaggcgtgaagcaggcgtcgcacctcctcaagtacgactccacgctcggcatcttcgacgccgacgtcaagcccgtgggcgacaacgccatctccgtcga

SEQ ID NO: 398349 - DNA, 301 bp, Oryza sativa nipponbare
cacgcgtccgcggacgcgtggttcacatccattttttttggccggtttagtagcatctagctagggagagaaaggaaagtacgagaggagagagatggccactgcttatgctcccatggcgagccagctgatgaagagcagcttggtgtgctccaagccgagggggctgtctggtgcttcgctgacaaggaggcccggttcaacagtcaacgccatccagcctgagtagccaacgtaccaaggggtgcaccccaggggtggctaccccttcatcgtcggtctggagacgccggcgaccttc

SEQ ID NO: 398350 - DNA, 384 bp, Oryza sativa nipponbare
ccacgcgtccggcataagcaacacaagggattaactcatcactcactttgcttattaaatcttcgaccatgtcggagagagtcggcaactgcgactgtgctgacacgagccagtgcgtgaagaaaggtaccagctatggcgtcgtcatagttgaagccgagaagagccacttcgaggaggtcgccgccggcgaggagaacggcggctgcaagtgcggcaccagctgctcctgcaccgactgcaagtgcggcaagtgaagtcacgaagcaaccgaacactcgccgccggcgagtcacctaccttaattagtccacaataaaaaccacccatatgagtgaggtttgtgtgtgacctgattattgctgaattaaacccgtgtttttc

SEQ ID NO: 398351 - DNA, 315 bp, Oryza sativa nipponbare
  unsure (1)..(315): unsure at all n locations
ccacgcgtccgcccactcgtccgcccacgcgtccgcggacgcgtggggtcnctactgccttgcctcgcgcgaggcggcagactaccttcagggcgctcgcttccccacgccccccactgttgtcagcatccccaacggtccatctgaactcgccgtgaaggatgctgcctggggccttgcccgctacgccgtcatttctcatgacaacggtctggtgccgattgtcgagcctgatatcctcctagtcggtgagcatggcatcgacaggaccttcgaggtggctcataaggtgttggcgttaaacctattatttac

SEQ ID NO: 398352 - DNA, 430 bp, Oryza sativa nipponbare
ccacgcgtccgcggacgcgtggggaagatttgcgacgcagtcgaagttgctggaacgaatgttctgtccacatatgaactgtgactaccggtcttgtatcccacaaatatggggagaaagccgcggctgcgaccaatgaagggatggatgcagcaggccacgcaatcgggacagcatgggcagtgttcaagattcggcaggccttgaacccgaagagcgtcctaaagccaacctcactcgccaagtctaccatcaaagcagcagctgctgactatcgtgcaaagcaaaagaaatagttcgtcctcaacgatcaacccagtgttggaacgttcctgactaatagaagctctgccccaatccatcccagctagtttttgcagatgtcttctcttggtttctttttttcacgagtcatgggtgtgctgcacta

SEQ ID NO: 398353 - DNA, 379 bp, Oryza sativa nipponbare
ccacgcgtccggataaggagtaggagagaaggccatggcgtcgaaggtggaggtggccgtggagacggtggagggcggagcggcggcggcgaaggcgccgtactgggacccgccgtcggcgccgctgctggacacgagcgagctgggtaagtggtcgctgtaccgtgccctcatcgcggagttcatggcgacgctcatcttcctctacgtgagcatcgccaccgtgatcgggtacaagaaccagagggccaccgtcgacgcgtgcaccggcgtcggctacctcggcgtggcgtggtcgttcggtgccaccatattcgtcctcgtctactgcaccggcggcgtcttcggcgggcacatcatacccgcggtgacgctgggc

SEQ ID NO: 398354 - DNA, 438 bp, Oryza sativa nipponbare
ccacgcgtccgcccacgcgtccgaagtactcgagcaaagaaggagagagcttggtgagctgcagagatggccgcctccgtgatggcgtcgtcggccaccaccgtcgctcccttccaggggctcaagtccaccgccggcatgcccgtcgcccgccgctccggcaactccagcttcggcaacgtcagcaatggcggcaggatcaggtgcatgcaggtgtggccgattgagggcatcaagaagttcgagaccctctcctacctgccaccgctcaccgtggaggacctcctgaagcagatcgagtacctgctccgttccaagtgggtgccctgcctcgagttcagcaaggtcggattcgtctaccgtgagaaccacagatcccccggatactacgatggcaggtactggaccatgtggaagctggccatgttcgggtgcact

SEQ ID NO: 398355 - DNA, 426 bp, Oryza sativa nipponbare
ccacgcgtccgcaacagttgagggaattggaaaggggcgttgaaatccttgtggcaactcctggtcggttgatggatctgctggagagggctagagtatcactgcaaatggtgaagtacttagctcttgatgaagctgatcgaatgcttgacatggggttcgagccgcaaattcgtaaaattgttgagcagatggacatgccccctcgcggtgtgaggcagacaatgttgtttagtgctacttttccaaaagaaatacagcgcatggcttcagatttccttgcggactacatcttccttgctgtaggaagagttggttcaagtactgacttgattgctcaaagggtagagtttgtccttgaagcggataaaagaagttacctcatggatctcctccatgcccaaaaagcgaatggttctcatggga

SEQ ID NO: 398356 - DNA, 321 bp, Oryza sativa nipponbare
ccacgcgtccgccagagagacatcagcaatattacgctgtttgcagattacaaagttgtagatttctacaagaactggggattcgaagctgaccctcaaggcatcaagggcatgttctggtaccccagattttagtgccagcggcctgacaccttcctgttcatcagtaatgcctggttctcaccgcccagggaccatagttttgtccagttgagtcgagctcagctgtgtaacagcaactctaactgaatggtggtgatatctgcaatatcttgttgtctgcaccacgagccatacaaattcagctgaattttcgagtca

SEQ ID NO: 398357 - DNA, 178 bp, Oryza sativa nipponbare
ccacgcgtccgcccacgcgtccgatggcctggcaatgacccaccgaagtcgactatcccttctctgctgcctccttgaggggtttacaattcacgccagggttgggattgggcctcccagggggccttggccttttttgggccaattaattaaatctggccaaggcccctttaactaa

SEQ ID NO: 398358 - DNA, 204 bp, Oryza sativa nipponbare
cggtcgacccacgcgtccgcggacgcgtgggcttgcacacgcgcagctcgagccatgtccttagtgagcaccagcgtcgtcggcctcaagcccgccgcggcggtgccgcagtcggccgcctcgccggtgccgaagcgcgtgcacgtcgctgtgccgcccaaggaggagcagggcggtggcaggcgctccgcgctgttgggtctc

SEQ ID NO: 398359 - DNA, 365 bp, Oryza sativa nipponbare
  unsure (1)..(365): unsure at all n locations
ccacgcgtccgcccacgcgtccggtttccagatcattcatttgatgatctnttgaagattgtgataatgaatgaccatcgagcttgtgatccagaagatggtggttgcccaaaaccaaaccatattcatcacattctttctagcccccctcatgtttttacagttgttatggggtggcagaacaacaaagaaagtgtggatgacatatctggaactttggctggtatttcaactgagatagacatcagtactttctaccgtggtctagaccaaggaagcaaacattctctggtgtcagtggtctgttactacgggcaacactatcattgttttgcttttgaggatggtcattttgtcatttacta

SEQ ID NO: 398360 - DNA, 445 bp, Oryza sativa nipponbare
ccacgcgtccgcttcgacccgctcggcctcgccgacgacccggtaggccttcgcggagctcaaggtgaaggagatgcgggaacggccgcctcgccatgttctccatgttcggcttcttcgtccaggccatcgtcaccggcaagggccccctcgagaacctcgccgaccacctcgccgaccccgtcaacaacaacgcctgggcctacgccaccaacttcgtccccggcaagtgagcgccgccgccgccgtgctgccatggcgacgcatcgccttcagctaagctagctaggttgacgacgatgcgcgtctctgcaggagagtgtgcgtgtgtgtacgcggtgcagtagatgtacgtacgtgtaccgtatagatgtacgtattcgtgtggaccgcgtggatggatgtacgagtattggagagagggtgagatctgtaccggtagtgt

SEQ ID NO: 398361 - DNA, 66 bp, Oryza sativa nipponbare
gtccgccacgcgtccgtagtactcgagcaaagaaggagagtgcttggtgagctgcagagatggccc

SEQ ID NO: 398362 - DNA, 187 bp, Oryza sativa nipponbare
cgtccgcccactcgttcgttgacgcgtgggcggacgcgtgggctggtctatagcaacagcagcaggaagggccggcttcgacgaaggatgcacagcctcccccgccaagccgtgcctggcgcgcgcgacgtcgaccacggccgcgcggttctcggtgaagagctcagcgtagggcaacaaaggcgga

SEQ ID NO: 398363 - DNA, 461 bp, Oryza sativa nipponbare
ccacgcgtccgcggaaagattccattatggtatcagagtacccatctgttgttaaggaatggacggatgataaaggggaaaatgagatagatattgccttagatactatcaacaaactaagatctctgaagccaccatctgatacaaatgagagacgacctgcttttgcactttgccgaggccaagagattactgccaccattcagtgttatcagtctctagttgtgtctctttcttccacatcatctctaaagatcctgacagagaatgatgaaacgccacctgactgtgcaacagctgttgtaaacaaagatttgtctgtataccttcaactccaaggagctctcaatgcagaagttgagcttgaaaagctgaggaaaaagagagaagaaattcaaaagctccaacacgcactgtcacagaaaatggaagcctctggttacaaagagaaggcttcacag

SEQ ID NO: 398364 - DNA, 399 bp, Oryza sativa nipponbare
ccacgcgtccgcaaccgccgccgcatcgccctcgttagaacgatggccgcgttggcgctgcaccagaccaccagcttccggggcaccgtccctcgccgggatgagctcgcccgccgcgtcggcgactccggtggccgcatcaccatgcgccgcaccgtcaagagcgcgccccagagcatctggtatggacctgaccgtcccaagtacctgggcccgttctcggagcagacgccatcgtacctgaccggagagttcccgggagactacgggtgggacacggcggggctatcggccgacccggagacgttcgcgaggaacagggagctggaggtgatccactcgcggtgggcgatgctgggggcgctgggctgcgtcttccctgagatcctgttcaagaac

SEQ ID NO: 398365 - DNA, 329 bp, Oryza sativa nipponbare
ccacgcgtccggaccccgtcgccaacaacgcctgggcatacgccaccaacttcgtccccggcaagtgagcacaacgacacgatcgagatggtgccaaccaacgtaccatgtgtacacttgtagtagccacgcaccgaccctgcagttgcagttgcagcagtgcatgtatgtatgtaccttaattgtgtgtgtgtgtgtgatcgatcgaggagatttctagcttaattaatttctgtctgtcatcatctttgcttctttggatcgagatttaatgtaagccgcaggccgcatccaagggaaaaaaaataaaaaaaataaaaaaaaaataa

SEQ ID NO: 398366 - DNA, 491 bp, Oryza sativa nipponbare
ccacgcgtccgcccacgcgtccgcccacgcgtccgcaaaaaaccaacccaaccgccgccgcatcgccctcgttagaacgatggccgcgtcggcgctgcaccagaccaccagcttcctcggcaccgcccctcgccgggatgagctcgtccgccgcgtcggcgactccggtggccgcatcaccatgcgccgcaccgtcaagagcgcgccccagagcatctggtatggacctgaccgtcccaagtacctgggcccgttctcggagcagacgccatcgtacctgaccggagagttcccgggagactacgggtgggacacggcggggctatcggccgacccggagacgttcgcgaggaacagggagctggaggtgatccactcgcggtgggcgatgctgggggcgctgggctgcgtcttcccggagatcctgtccaagaacggggtgaagttcggggaggctgtgtggttcatggcctgctcgcatatcttttccg

SEQ ID NO: 398367 - DNA, 474 bp, Oryza sativa nipponbare
gcccacgcgtccgcggacgcgtgggggctgatagggttgccttcctcccttggttctcaaggagcccacagatgtctcggtggtcaggctacatcactgtgaacagccagcatggcagggcactcttctactggttctttgaggctcaggcactgccttccaagaagcctctcctgctctggcttaatggaggtcctggttgctcatctgtgggctatggagcagcttctgaattgggtcctctcatggtcaatggaaatggaacaggtttggaattcaacaagtttgcatggaataacgaggccaatttgttgttcttggaatctcctgttggagtcggcttctcctacacaaatacctcgtctgacctagagagcatcgattgaccgtttgtcgctgaagacacctacaatttcttggtgaattgtgtcaagaggtctcctcagtaccaaaaaccatgacttttacatcttt

SEQ ID NO: 398368 - DNA, 317 bp, Oryza sativa nipponbare
ccacgcgtccggcgcaaacgtcgacggctacagcccaatctactcgctggaggaatggtctcccaccggtgacacggtacgttggtggaaccaccgggcttctgatctgggccgtgaccctcgccgggctcctcggcggcggcgccctcctcgtctacaacaccagcgccctcgccggctaaatttcacccaaatccagtctatgtatgtaacaccaagctgggtgtctgcatattcatctgtaatctaagatagccttcctctgaatgcgatgtgatgatgcccactgcttaatcaaactgcattgtgattaatct

SEQ ID NO: 398369 - DNA, 416 bp, Oryza sativa nipponbare
ccacgcgtccgatgagctgatccatgccaggtgggcgatgctctcgtctctgggttcatcatccccgagggggtgaacaagtttggcgcaaactgcggcccccaggccgtctggttcaagaccggcgccctcctcctggacggcaacaccctcaactacttcggcaacagcatccccatcaacctcatcgtcgccgtcgccgtcgaggtcgtcctcgtcggcggcgccgagtactaccggatcatcaacggcctggatctggaggacaagctccacccaggtggcccattcgacccgctggggctggcgagcgacccggaccaggcggcgctgctgaaggtgaaggagatcaagaacgggcggctggccatgttctccatgctggggttcttcattccaagcctactttaccggcg

SEQ ID NO: 398370 - DNA, 400 bp, Oryza sativa nipponbare
  unsure (1)..(400): unsure at all n locations
ccacgcgtccggcagcgagtaagttcgggctgccgttcctgccgccgtcgaagtcgacgagcgccgacttgaagagangagcgaacatggcgatcaccggagccaccgccatggacgccaacttcttccgctccctcggcctctccgacaagatctggaacaacggccccatcagctttcaaatccagtggttccagcaaatctcctcctccgtctgcggccagaattgcaagagctacctggcgaactcgctgttcgtgttcggggagttcggcggcaacgactacaatgcgatgctgttcggagggtacagcgcggaccaggcgagcacgtacacgtcgcatatcgtggacaccatctccaacggcgtctagaagctcatcgccatgggcgccgtcga

SEQ ID NO: 398371 - DNA, 476 bp, Oryza sativa nipponbare
ccacgcgtccgcccacgcgtccgccagattctgcaaccaagactgcgtttgctttgctggacttcaaccgtgaaggattacctctgttcatcctcgctaactggagaggcttctctggtggacaaagagatctttttgaaggaattcttcaggctggctcgactattgttgagaaccttaggacatacaatcagcctgcctttgtctacattcccatggctgcagagctacgaggaggggcttgggttgtggttgatagcaagataaacccagaccgcattgagtgctatgctgagaggactgcaaaaggcaatgttctggaaccgcaagggttaattgagatcaagttcaggtcagaggaactccaggattgcatgagtcggcttgacccaacattaattgatctgaaagcaaaactcgaagtagcaaataaaaatggaagtgctgacacaaaaatcgcttcaagaaaatataga

SEQ ID NO: 398372 - DNA, 506 bp, Oryza sativa nipponbare
ccggtcgacccacgcgtccgcacgacacgacgcaccaatggcgctcgtctccgccttctcctccaccaccgccgtcgcggcgctgcccggcgccgccagggcctcctccttcctcggcggcgccggcaggagcggcaggctgctgctgaggcaggccgagtcgtcgtccgcgcgggcgtcgttcgccgtgcgcgccgcggcgcccgacaggccaatctggttccccggcagcaccccgccgccgtggctcgacggcagcctccccggcgacttcggcttcgaccccctgggtctcggatcggacccggagagcttgcggtggaacgtgcaggcggagctggtgcactgccggtgggcgatgctgggcgcggcgggcatcttcatcccggagttcctgaccaagatcggcatcctcaacacgccgtcgtggtacaccgtcggcgagcagcaatacttcaccgacaccaccaccctttttatcatcgagctcattctcatcggctggg

SEQ ID NO: 398373 - DNA, 318 bp, Oryza sativa nipponbare
  unsure (1)..(318): unsure at all n locations
cacgcgtccgcccacgcgtccgccacgcgtccgccacgcgtccgggtaggtctgagctgaggttgagagataagancagcaatggcgtccatgaccgggctgccgcacggcgtgcagctgccggccgggcccaggcgcgccggcggcaggtccaggctcgccgtcgtcagggccgacgccgccgtctccgacgtacacaccggacgtcgggcacagctaggcgtggtgttgcatattcatttgtaatctaagatagccttcctttgaatgcgatgtgatgatgcccactgtttaatcaaactgcattgtgattaatct

SEQ ID NO: 398374 - DNA, 418 bp, Oryza sativa nipponbare
  unsure (1)..(418): unsure at all n locations
ccgcgcgtccggcttgagctgtggaaggagaagagcactggcaagtacgtgaagaaggtgtacgttcttcccanaggccgtggctagaaggtggccgccctccacttgcccaagcttggtgccaggctgaccaagctctccaagtcgcaggctgactacatcagcgttccagttgagggtccctacaagcccgcgcactaccggtactaggctgcccagcacgactagcggctgtggcatgagaagtgtcaacttgaagttcgccatgacgactctggagtatcctgctttgttttcatcatcttatatgccgtcacttaggaggatttgttgtggggtttatggtttgagactggtgaaggggaggaatgggaagccgtttgcttttgcccagaaataatggcgtaattgggtggag

SEQ ID NO: 398375 - DNA, 467 bp, Oryza sativa nipponbare
  unsure (1)..(467): unsure at all n locations
ccacgcgtccgcccacgcgtccggagccagccacaaacgcccgctgattggcgcgcgcacgccggccaatcctaggacatccccggcctccgcggctcgcgagcgccgctgccatccgatccgctgagttttggctatttatacgtaccgcgggagcctgtgtgcagagcagtgcatctcaagaagtactcgagcaaagaaggagagagcttggtgagctgcagagatggccccctccgtgatggcgtcgtcggccaccaccgtcgctcccttccaggggctcaagtccaccgccggcatgcccgtcgcccgccgctccggcaactccagcttcggcaacgtcagcaatggcggcaggatcaggtgcatgcaggtgtggccgattgagggcatcaagaagttcgagaccctctcctacctgccaccgctcaccgtggaggacctnctgaagcagatcgagtacctgc

SEQ ID NO: 398376 - DNA, 401 bp, Oryza sativa nipponbare
ccacgcgtccgaacaaggaggacaacccccgtgtccccatcatcgtcacctgttacgacttctccacgctgtacgcgccgctcatccgtgacgggcgtatggagaagttctactgggctcccacccgcgacgaccgtgtcggcgtctgcaagggtatcttccgcaccgacaacgtccccgacgaggacatcgtcaagatcgtcgacagcttcccaggccaatccatcgatttcttcggcgctcttcgtgcccgtgtttacgacgactaggtgcgcaagtgggtgtcggacacgggtgtggagaacattggcaagaggctggtgaactcgagggagggcccaccggagttcgagcagcccaagatgacgatcgaaaagctcatggagtacggatacatgctt

SEQ ID NO: 398377 - DNA, 484 bp, Oryza sativa nipponbare
ccacgcgtccgcccacgcgtccgggctttcatagagaaagaaatgggttgcccaattgaagttgtgtacaaggaatttgacaatcgtccgatagctgctgccagtcttggtcaggtacatcgtgcagtgcttcacaatggagagagagttgcagttaaagtgcagcgaccagggctcagaaaactttttgacattgacctaaggaatctaaaactagtagctgagtattttcagagcagtgaggcatttggtggtccttcaagggattggattggtatttatgaggaatgttccaaaattttgtatgaagaaattgattacatcaatgaaggaaagaatgctgacagatttcgccgagatttcagaaatataaagtgggtccgtgtgccacttatcatgtgggactacacaactgaaaaggtgttaaccctcgagtatgttcctggtattaaagataacaacttgactttggtggataatcggg

SEQ ID NO: 398378 - DNA, 491 bp, Oryza sativa nipponbare
ccacgcgtccgcacagtctccactcacacgcattgcagaggagaggcgacaatggaggggaaggaggaggacgtgcggctgggggcgaacaggtactcggagaggcagccgatagggacggcggcgcagggcgccggggacgacaaggactacaaggagccgccgccggcgccgctgttcgagccaggggagctcaagtcgtggtctttctaccgggccgggatcgccgagttcgtcgccaccttcctcttcctctacatcaccatcctcaccgtcatgggggtctccaagtcctcctccaagtgcgccaccgtcggcatccagggcatcgcctggtccttcggaggcatgatcttcgcgctcgtctactgcaccgccggcatcttcggaggacacatcaacccagcagttacttttgggctgttcttggccaggaagctgtccctgaccctggccatcttctacatagtgatgcaatgcctaggggccat

SEQ ID NO: 398379 - DNA, 484 bp, Oryza sativa nipponbare
ccacgcgtccggcgcgccgtgcaccgcctctcacaatgtcgaccgccttcgccgccgccgctgcccagagctggtgcttcgccactgtcaccccgcgctcccgcgccacagtcgtcgccagcctcgcctccccatcaccgtcctcctcctcctcctcctccaacagcagcaacctcccggcccccttccgcccccgcctcatccgcaacacccccgtcttcgccgcccccgtcgcccccgccgcgatggacgccgccgtcgaccgcctcaaggatgggttcgccaagttcaagaccgagttctatgacaagaagccggagctcttcgagccgctcaaggccggccaggcacccaagtacatggtgttctcgtgcgccgactctcgcgtgtgcccgtcggtgaccatgggcctggagcccggcgaggccttcaccgtccgcaacatcgccaacatggtcccagcttacttgaagatcaagcacgc

SEQ ID NO: 398380 - DNA, 473 bp, Oryza sativa nipponbare
ccacgcgtccgcccacgcgtccggaaagcataagcaacacaagggattaacttatcactcacttagctaattaaatcttgaccatgtcggacaagtgcggcaactgcgactgtgctgacaagagccagtgcgtgaagaaaggtaccagctatggcgtcgtcatagttgaagccgagaagagccacttcgaggaggtcgccgccggcgaggagaacggcggctgcaagtgcggcaccagctgctcctgcaccgactgcaagtgcggcaagtgaagtcacgaagcaaccgaacactcgccgccggcgagtcacctaccttaattagtccacaataaaaaccacccatatgagtgtggtttgtgtgtgtgctgattattgctgaattaaacccgtgtgttatcgattaattaagcagctggtcgcttcggcgactatgcgtgtattaacgtatgaatttgtgtgatgtgaggtacc

SEQ ID NO: 398381 - DNA, 419 bp, Oryza sativa nipponbare
ccacgcgtccgcggacgcgtggggttcgccaagaaccgggagctggaggtgtctactcccggtgggcgatgctgggcggtctcggttgcgtcttcccggagctcctcccccggaacggcgtcaagttcggcgaggcacagtggatcaaggcgggctctcagatcttaagcgagggcggtcataactaccttgacatcccgcgcctgaaccacacacagagcatctctcgatatctaggaccagcaggcatttctgaggtcctcaagggattggaacggtatttatgaggaatggtccaaaaatttggatgaagaaattgattaccatcaatgaaggaaagaatgctgacagatttcgcccaagatttagaaatataaagtgggtccgtgtgccacttatcatgtgggactacacaactg

SEQ ID NO: 398382 - DNA, 432 bp, Oryza sativa nipponbare
ccacgcgtccgggatgatggcaaggaactccatgtcggagaagctcgcggtttacatcgataccgctgtgaagcggttgggcgatgaggcctacgagatcgctttgagccagatcaggagcaaccgggaggccatggacaagatcgtggaggtgctccttgagaaggagacattgagtggtgacgagttcagggcgattctctccgagttcacggagatccctgtcgagaaccgggttcccccagccacgccggcagctctccctgcctaaatcccactagttttgtaggaatggaacatgctgtaagatgttcatattttcgattcttggtgtacactaactttactttgccggccggattttttggcatactacatgtaacttactcttggttaattataaaatgtaattagctgaaaaaggtttcttgc

SEQ ID NO: 398383 - DNA, 491 bp, Oryza sativa nipponbare
ccacgcgtccgcccacgcgtccgcaccactgctagcttgggaagaggtggatgagcttgagcttggagagagacaacaatggcggctcaggctcttctctctgggaggcagctgctggggaggccattgcaatcttcagtctccaggtcttcttcctccaggaaggcacccttcatggtcagggcagaggccactccccctgccaagcaaggtgctgacaggcagctgtggttcgcatccaagcagtccctgagctacctggatggcacgcttccgggagacttcgggttcgacccgctggggctatcggacccggaggggaccggtgggttcatcgagccacggtggctggcctacggcgaggtgttcaacggccggacggcgatgatgggcgtcgtcggcatggtcgccccggagctcctcggcaagctgggcctcgtccccgccgagacggcgattccctggttccagaccggcgtgatcccccccgc

SEQ ID NO: 398384 - DNA, 471 bp, Oryza sativa nipponbare
ccacgcgtccggtgacaggcacgcaggctagatgatgacgcaatctctgcataaaacatattgaagagagctggggggtgccaattgtagaagcctgagatcctcctcgacggtgagacatggcatagacaggacacttagaggtggcgcagaaggtgtgggcggagaccttcttctacatggccgagaacaatgtgatgttcgagggcattctcctcaagccaagcatggtgacacccggtgccgagtgcaaggacagggccacccctgagcaagtatctgactacaccctcaagctcctccacagaaggatcccccctgccgtccccggcatcatgttcttgtcgggtgggcagtcggaggtggaggcgacgcataacctgaacgcgatgaaccaggggcccaacccgtggcacgtgtcgttctcgtacgcgagggcgctgcataacacgttccttaagacgtggggcg

SEQ ID NO: 398385 - DNA, 446 bp, Oryza sativa nipponbare
ccacgcgtccgggggcggcgactactcacgggagcgcggcggttcccgtcgtcgcggcgccgtcgcggaggtgggcgccaggggtcgcctacgccaccgccgccaccgggaagagcgtccacgacttcaccgtcaaggacattgatggaaaagatgttgcgcttagcaagttcaagggaagggcgctgctaattgttaatgttgcatctcagtgtgggctgacaacagcaaattacacggaactatctcatctttatgagaagtacaagactcaaggatttgagattcttgcatttccttgcaatcagtttggtgcacatgaacctgggtcaaacccgcagattaagcagtttgcttgtacaaggtttaaagctgaatttcctattttttgacaaggttgatgtcaacgggcctaacacatcccctatttataagtttcttaagtc

SEQ ID NO: 398386 - DNA, 490 bp, Oryza sativa nipponbare
ccacgcgtccgggagaaggtaggctccagccatggcttcccagctctccgcctccacatccgtgccgcagttccatggcctccggacctactcctctcctaggtccatggtgacgctgccatcgttgaggatgagcaagaagaggtcccagggcatccggtgcgactacatcggctcagccaccaacgttatcatggtgacgacgacgacgctgatgctgttcgcggggaggttcgggctggcgccgtcggcgaacaggaagtcgacggcggggctgaagctggaggcgcgcgactccggcctgcagaccggcgaccccgccgggttcacgctcgccgacacgctggcctgcggcgccgtcggccacatcatgggcgtcggcgtcgtcctcggcctcaagaacattggcgtcctggaccagatcatcggctaatcaaattcattaagctagtcacacgaatcaatactcctatgtgtaatcgatgcatga

SEQ ID NO: 398387 - DNA, 488 bp, Oryza sativa nipponbare
ccacgcgtccggcttgaaaaagctgcttcaggagaggacaaacagtctgtagttgaaaaatctgcttcagtggagggcaaacaatctgtatcggagaaaggtgacaaggcagttggtaaggaggtaaagacaactagatcacaaaaaggtgattcaacaaaagatgaggtcgttgataaagagctgctgcaggcttttagatacttcgaccaaaacagagccggttatttgaaggtggatgatttaaggtgcattcttcataatttggggaagttcttatctaacagggatgtgaaggatttggttcaaatcgcccttgttgagagcaattctgcaagggataatcgcatcatctatacaaagcttgcgaagaaagttgacctctgatcaggtccgaccttggctaaggagtatgttgagatgggccgcaaattaaacgaataaccttctttgaagaggccaactacggcgatgtcgatttgagttac

SEQ ID NO: 398388 - DNA, 490 bp, Oryza sativa nipponbare
ccacgcgtccgcccacgcgtccgggggaatgggatcggggatgtgaggcggcccggcgtgtgctggagcatccgacgccgacggacgcgtcgtcggcggcggcgctgccctccgggttctacgacgccttcgtgctgaggggcatccgcgtggaggccgcggagcccggccgcctcctctgccgcttcaccgtcccctcccgactcctgaattcgggcggcttcctgcacggcggcgccacggcctcgctcattcacctcgtcgcctccgccgtcttccacaccaccggcaacagcagctctagctctagctctacctcgcccctggagatgaacatctcctactcggatgcagctttccccgatgaagagattgagatcgaagcaaaggttcttcgtgccggcaaggcagttggggtggcgcttgtggacctcaaaagaaatcgggcaaactcattgctcaagcccgctacttcaactaccctgcacca

SEQ ID NO: 398389 - DNA, 447 bp, Oryza sativa nipponbare
cgtccgtatttcccggtcgacccacgcgtccgcccacgcgtccgtccacgcgtccgcccacgcgtccgttcactcgtccgcccacgcgttcgcccacgcgtgcgcccacgcgtccgcccacgcgtccgcccacgcgtccggtcgtcgtcaacgccaagcccaccgccgcctccgccgtcggcctcgccggcccaggcgccgcggatgtgctgccgttcgtggaggcggacctgaagaagagctccatgcgcgtcatcgagaaggccagggagctctgcgcccaggtgagtgatgctctgtttgaagtgctggaaggggatgccaggaatggtctttgtgagtctgctgagaggcatcaggcggagatgttggttgtctgaagccatggctatggagcaatttaacgagctgttcttggatgcgtgtgtgactactgttctcatcatg

SEQ ID NO: 398390 - DNA, 436 bp, Oryza sativa nipponbare
ccacgcgtccgcccacgcgtccggaaggaggcaccaaatttgccgatttgtttttcttttaaaaatctgctacaggggagggcaaacaatctgtatcggagaaaggtgacaaggcagttggtaaggaggtaaagacaactagatcacaaaaaggtgattcaacaaaagatgaggtcgttgataaagagctgctgcaggcttttagatacttcgaccaaaacagagccggttatttgaaggtggatgatttaaggtgcattcttcataatttggggaagttcttatctaacagggatgtgaaggatttggttcaaatcgcccttgttgagagcaattctgcaagggataatcgcatcatctatacaaagcttgcgaagaaagttgacctctgatcaggtccgaccttggctaaggagtatgttgagatgggccgcaa

SEQ ID NO: 398391 - DNA, 496 bp, Oryza sativa nipponbare
ccacgcgtccgcccacgcgtccgagaccatgtaccacttcatcagtggctacactgctctggttgccggcacggaggatggcatcaaggagccgcaggctacgttctctgcttgcttcggtgcagcgttcatcatgctccacccgaccaagtacgccgccatgctcgccgagaagatgcagaagtatggcgccaccgggtggctcgtcaacaccggttggtccggtggaaggtacggagttggcaagcggatcaggctgccgtataccaggaagatcatcgacgccatccactccggtgagctcctcaccgccaactacaagaagacggaggtgtttggcctggagatccccactgaaatcgacggcatcccgtctgaaatcctcgacccgatcaacacctggacggacaagggcgcgtacaaggagacgctcctgaagctggctggcctgttcaagaagaacttcgaggtgttcgccaactacaagatcggggga

SEQ ID NO: 398392 - DNA, 282 bp, Oryza sativa nipponbare
ccacgcgtccgcgtcttcttgctggtgtgttcgaggaggaggaggagtaggagaagctagcggcggcggcggcaatggcgactagcgggctgaggagctgcagcgcggtgggcgttccgagcctgctggcgccgtcgtcgaacaggatccgcctgccggtctgcgcctacgccaccacctccgggcgcgtcaccatgtccgccgagtggatgccgggccatccacgcccctcccaccttgacggctcctctcccggtgacttcgggttctacccgcttgtcc

SEQ ID NO: 398393 - DNA, 317 bp, Oryza sativa nipponbare
ccacgcgtccgcgccatcaggttcagccccatcaaggagtccatcgtgtctcgcgagatgacccggcggtacatgaccgacatgatcacctacgccgacaccgacgtcgtcgtcgtcggcgccggctccgcggggctctcctgcgcgtacgagctctccaaggacccctccgtcagcgtcgccgtcatcgagcagtcggtgtcccccggcggcggcgcgtggctcggcgggcagctgttctccgccatggtggtgcgcaagccggcgcacctgttcctcgacgagcttggggtcgcgtacaacgagcaggaggacta

SEQ ID NO: 398394 - DNA, 446 bp, Oryza sativa nipponbare
ccacgcgtccgtgttgttcgaattgatgcacctatctactttgccaacataagttacataaaagacagggggcgtgaatatgagcttaatctcccaaattcaaaccgtggacctgatgtcggaagagtgtactttgtgatcctcgagatgtcccctgttacatacatcgattcaagtgctgttcaggctctcaaggacttgtatcaagaatacagggatcgccatatccagattgcaatagcgaacccaaaccggcaggtacacctgctgctttcgagatcgggcatcatagacatgattggtactgggtggtgcttcgtgcgagtgctcgacgctgtgcaagtatgcctccagaaggtgcagagctcatcatcaagtcccataaagctgtcgccacagtcatctagggacctaattgactccgttaccactccaaagggttcaac

SEQ ID NO: 398395 - DNA, 371 bp, Oryza sativa nipponbare
gtcgactcacgcgtccgcggacgcgtgggtggtaagactactctgactggcgttgaggttggagttgacgtcacttgagccgagaagatctggctcgcgttccaagcgctcggtgacatcgcgttcgcctactcctactccatgatccttatagaaattcaggacacggtgaagtctccaccggcggagaacaagacgatgaagaaggcaacgctgctgggggtgtcgaccacgacggcgttctacatgctgtgcgggtgcctggggtacgcggcgttcgggaacgcggcgccggggaacatgctcaccgggttcggcttttacgagccctactggctgttcgacttctccaacgtcttgatttgtggttc

SEQ ID NO: 398396 - DNA, 485 bp, Oryza sativa nipponbare
ccacgcgtccgcccacgcgtccggaggctgcctggggccttgcccgctacgccgccatttctcaggacaacgggctggtgccgattgtcgagcctgagatcctcctcgacggtgagcatggcatcgacaggaccttcgaggtggcgcagaaggtgtgggcggagaccttcttctacatggccgagaacaatgtgatgttcgagggcatcctcctcaagccaagcatggtgacacccggtgccgagtgcaaggacagggccacccctgagcaagtatctgactacaccctcaagctcctccacagaaggatcccccctgccgtccccggcatcatgttcttgtcgggtgggcagtcggaggtggaggcgacgcataacctgaacgcgatgaaccaggggcccaacccgtggcacgtgtcgttctcgtacgcgagggcgctgcagaacacgtgccttaagacgtggggcgggcagccggagaacgtg

SEQ ID NO: 398397 - DNA, 311 bp, Oryza sativa nipponbare
ccacgcgtccggaagaagaagaaagaagaagaagaagatgcagaccgctgcttgcagtgtcgttggattgtcggccgtggggcccgctgctgtgaaggggcgcatcctgcagattcaggctcctcgccgtgttgcgttgcgcgttcgtgcggcggcggcagcggtggcagtggaggctgcggaggtggactacagctctaacatctcgttgtttccgatggaggcgtgctacctcatctggcgtcgaggcgtgcaacgtgcatatgttcccagtggccatgctctcatcatcgtctgctgctgttgtttct

SEQ ID NO: 398398 - DNA, 454 bp, Oryza sativa nipponbare
ccacgcgtccgcccacgcgtccgatcgtccacaacgagaccgccactggagtcaccaacgacctttccgccgtccgcaaaatcctcgacaagcacaggcacccggcgctactactggtggacggggtgtcatcgatatgtgcgttggacttccgcatggatgagtggggagtggacgtggcgctgacgggttcgcagaaggcgctctcgctgccgacgggtctgggcatcgtgtgcgcgagccccaaggcgctggaggcgagcaagacggccaagtcggtgcgggtcttcttcgactggaaggactacctcaagttctacaagatgggcacctactggccctacaccccattcatccagcttctctacggcctcctgaccgtcctcgacctcatcttcgaggaaggcctcgagaacgttatcaagaggcacaaccgtctcggtaccgccaccag

SEQ ID NO: 398399 - DNA, 496 bp, Oryza sativa nipponbare
ccacgcgtccgcacgcgactagcagaagccgagcgaccgcctcctcgatccatatcttccggtcgagttcttggtcgatctcttccctcctccacctcctcctcacaggttcttggtgtagcttgccactttcaccagcaaagtttcatgtctgatctcgacattcagatcccaactgccttcgatccctttgctgaggccaatgctggagactctggtgcggctgcaggatcaaaggactacgttcatgtacgcatccagcagcgtaatggccgtaagagcctgaccactgtccagggattgaagaaggaattcagctacaacaagatcctcaaagatctcaagaaagagttttgctgcaatggtactgttgtccaggacccagagcttggccaggtcattcaacttcagggtgatcagaggaaaaacgtatcaaattttcttgttcaggccggcattgtgaagaaggaacacatcaagattcattggttctgag

SEQ ID NO: 398400 - DNA, 286 bp, Oryza sativa nipponbare
gcccacgcgtccggctatcatctccaagatgagagacatcggtgagaagcagtttagcatagttgcatctgggggggcgagaaccaaattcatggaccttgctggacttcggcgatgttgttgtccatatatttcttccgttacagcgagcattctacaactcggaagagttctatgtgtacacaacctccattgtacttcccttgtgagaagcagttgcagttgactgttgttttaatctgctcctggagaaattgcaggtttccacataatcctagcatctttg

SEQ ID NO: 398401 - DNA, 457 bp, Oryza sativa nipponbare
ccacgcgtccgaccactcgttcgagatgctcttcgactaccacgacaactacatgtccaacgtcctgccgtggctgtccatcagcgtgcccaccatcagcacgctggtgtacaggcaggtgttcgagcgcgtgaaggagatcgcgccggtgaggttccggctggacttcgcgcatagccacgcgcagacgaacacgacggacgtgaagacgcacatgcagacgcgcatggccgagctcaaggacctgctgagggagctcatcacgtacgactacacctacgtctacatgtgcgtgctgaaaggcatggacaacggcatgatcgacatcattatcgacctcggtgtaaaatacctcgtctactggcttgacttcaagaagcagctgcagaagtctgagcaatggtacgtgggagtctacagatggatataaataatgtaatcatttatatatcccttt

SEQ ID NO: 398402 - DNA, 492 bp, Oryza sativa nipponbare
ccacgcgtccgcccacgcgtccgcggacgcgtgggccaacattaaggtcccactcatcctgggtatctggggaggcaagggtcagggaaaatccttccagcgtgagctcgtcttcgccaagatggggatcaaccccatcatgatgagcgccggagagctggagagcggcaacgccggagagccggcgaagctgatcaggcagcggtaccgtgaggcggcagacatcatcaagaaggggaagatgtgctgcctcttcatcaacgatctggacgcgggtgcaggtcgcatgggaggcaccacccagtacacggtgaacaaccagatggtgaacgccaccctgatgaacatcgccgacaacccaaccaacgtgcagctccccgggatgtacaacaaggaggacaacccccgtgtccccatcatcgtcaccggcaacgacttctccacgctgtacgcgccgttcattcgtgacgggcgtatggagaagttctactg

SEQ ID NO: 398403 - DNA, 380 bp, Oryza sativa nipponbare
gggccacccactttattttcccgctccacaccaccatcttggacaccttctcctcatcctcttaatttaagctctttcgcgcgcaattcaaacgggatcgatgcgttggtgtgcgttcgcgcgcgctgtttagttttgtgatgacgagcgagctgggagggtatggagagaggagaggtcatccttttgttgattactacttaaattaggaaagctgggttggtggttaatggcgacttgcatggtggtgatttgtaatataagaacacccaagatgatgaattaatgcatccacttgtacatcgatcgatcgatcttggtatttgactaaaaaaaaaatattattatatattattatttaatataattttaattttttt

SEQ ID NO: 398404 - DNA, 489 bp, Oryza sativa nipponbare
ccacgcgtccgtctcacctcaccttcgaaatccggcggcggcgatggctgctgcggctacggcgaggtccggattccggcgcatgttctccatctcggccttctccccgcccaagccgtccaccccgcccccgaaggccgacccctcccccaacctcttcatctcaggcttaagcaagcgtacaacaacagatgggcttaaagaagcttttgcaaagtttggggaagtcatacatgctcgagttgtcacagatcgggtcactggattctctaaggggtttggcttcgtaaggtatgctacagttgaggatgcagctaaaggaatagaaagaatggatggaaagtttctcgatggatgggttatttttgctgaatatgctagacccagaacaccaccgcaacaaccagaaatgaactcacagccacaacaatcatggggccctccatccagttcctggggtgcacagtagatgaagatacaatcttgggg

SEQ ID NO: 398405 - DNA, 492 bp, Oryza sativa nipponbare
ctgcagggtcgacccacgcgtccgagctctcacagctcactgcatcaatggccgcggccaccatggcgctctcctccccggtgatggcccgcgcggcgccgtcgacctcctccgcgctcttcggcgaggcgcggatcaccatgcgcaagaccgccgcgaagcccaagccggcggcgtcgtcggggagcccgtggtacggcgccgaccgcgtcctctacctcggcccgctctccggcgagccgccgagctacctcaccggcgagttcccgggcgactacgggtgggacaccgcggggctctccgccgacccggagacgttcgccaagaaccgggagctggaggtgatccactcccggtgggcgatgctgggcgcgctcggctgcgtcttcccggagctcctcgcccggaacggcgtcaagttcggcgaggcccggtggttcaaggcgggctcgcagatcttcaacgagggcgggctcgactaccttgggaacc

SEQ ID NO: 398406 - DNA, 461 bp, Oryza sativa nipponbare
aagttcaagaccgagttctatgacaagaagcacggatctcttcgagccgctcaaggccggccaggcaccgcaagtacatggtgttctcgtgcgccgactctcgcgtgtgcccgtcggtgaccatgggcctggagcccggcgaggccttcaccgtccgcaacatcgccaacatggtcccagcttactgcaagatcaagcacgctggcgtcgggtcggccatcgagtacgccgtctgcgccctcaaggtcgaactcatcgtggtgattggccacagccgctgcggtggaatcaaggccctcctctcactcaaggatggagcaccagactccttccacttcgtcgaggactgggtcaggaccggtttccccgccaagaagaaggttcagaccgagcacgcctcgctgcctttcgatgaccaatgcgccatcttggagaaggagccgtgaaccaatccctggaga

SEQ ID NO: 398407 - DNA, 376 bp, Oryza sativa nipponbare
ccacgcgtccggagagttactacactaacaaaggagttaagatcgtgtagggtacagtagctgttggttttgatgctgatgctaatggtgatgtcacagcagttaacctgaagaatggcagtgtgcttgaagctgatattgttgttgttggtgttgggggcagaccgctgactactctctttaaaggtcaagttgctgaggagaaaggtggaattaagaccgatgctttctttgaaacaagtgttcctggagtctatgctgtcggtgatgtggccaccttccccatgaagatgtacaatgagttgaggagagtggaacatgttgaccatgctaggaagtctgcatagcatgctgtaaaggcaattaagggaaaaga

SEQ ID NO: 398408 - DNA, 485 bp, Oryza sativa nipponbare
ccacgcgtccggcgagctcatccacggccgctgggccatgctcgccactctctcggcgccctctccgtcgagtggctcaccggcgtcacctggcaagacgccggcaaggtggagctggtggatgggtcgtcgtacctggggcagccgctgccgttctcgatctcgacgctgatctggatcgaggtgctcgtcatcggctacatcgagttccagcgcaacgcggagctggacccggagaagaggctgtacccggtggggtcctacttcgacccgctcgggttggcgtcggacccggagaagaaggagcggctgcagctggcggagatcaagcacgcccgcctcgccatggtcgccttcctcggcttcgccgtgcaggccgccgccaccggcaaggggcccctcaacaactgggccacccacctcagcgacccggtccacaccaccatcttcgacaccttctcctcatcctcttaatttaagctctt

SEQ ID NO: 398409 - DNA, 263 bp, Oryza sativa nipponbare
ttcgccctttttttagttagaacacggttgctaccataacatagctaatccccttgtagtactggacataaaaaattcaccacttaactaaccccttaacccatgcttccagatccatgcatgcaggaaacaattcccacaacacacacagtaggtctgaatctcatcacatccatatctctttttttcctcccccaaagccattaacattttatacatgcgtcctccacaaaaaaaaaaggaggaaccaggaggggaccttt

SEQ ID NO: 398410 - DNA, 327 bp, Oryza sativa nipponbare
gcagtaaccaaatcgattcacaggccacacatacaggtagtatacagattcgtctacacacaaggttattgcagaggcaaaacacgaggtatgtatatcaaacgctctagaaaagattcatgtgatgaaatacatgatgaaccacgtatgttctcaaggtaaaattaattaatgcagtatagttataactttgtccatcgatctcaacctgtaactgtgacgacacactggctacagtgccctcgaggtactagcaagtatagagtagctgtagtacgtagcagcagcagcagcaggttcactgtcctgattggattggatcggatt

SEQ ID NO: 398411 - DNA, 368 bp, Oryza sativa nipponbare
gtataaatatatatagccggagcttccatatatttcattcacatatgcctcacccaacaacatatagtcgtagcagataccactcttacatcaagtcagagagagatcaggtgaaacaaaaacaaaagcagagcacggccggtaaaatcaaaagacgatgaacaaactgggaacacacgaaacaaggtgggagacatcatcgaatcagagatgaacaattaaacaaggctatatatgacgatgacggcttagttgccaccagactcctcgcagcccgggggcttgtaggcgatgaagctgatgagctgcacctgcctgacgttgtcgaagccgatgatacggacgaatgcatcagggtacgccttctt

SEQ ID NO: 398412 - DNA, 321 bp, Oryza sativa nipponbare
tgactcgaaaattcagctgaatttgtatggctcgtggtgcagacaacaagatattgcagatatcaccaccattcagttagagttgctgttacacagctgagctcgactcaactggacaaaactatggtccctgggcggtgagaaccaggcattactgatgaacaggaaggtgtcaggccgctggcactaaaatctggggtaccagaacatgcccttgatgccttgagggtcagcttcgaatcccaagttcttgtagaaatctacaactttgttatctgcaaacagcgtaatattgctgatgtctctctggcggacgcgtgg

SEQ ID NO: 398413 - DNA, 418 bp, Oryza sativa nipponbare
tcctgtatactgtacagcgctcgccctttttttttttgcgagagaaattttttttcaaaactccactcaatggttccaaattccaatttagcacaatacgtgtccaattatgcatacacttatatattatcacaaaggttctagggccagaaatgtacacttgggtggccatgcgatcgatgatcataatcaaatcatcaccatttccagaaaacgttggatcctgacttgtacttctctttcccctggcactcgatctcgagatcatttgagatgaatggaacttttttctgcttggcgaggtcctggcagccggtgaagttgtaggggaactggcagttgccgaactcgacggtgtacgcccttgcgagttggcgccgctcgtcgccagcctctttttgcgttcagctcctgttgg

SEQ ID NO: 398414 - DNA, 288 bp, Oryza sativa nipponbare
  unsure (1)..(288): unsure at all n locations
aattcacaacaccatatttcattgatcaggttcagaacctgcacagaaatacacactaccggtacagatctcaccctctctccaatactcgtacatccatccacgcggtccacacgaatacgtacatctatacggtacacgtacgtacatctactgcaccgngtacacacacgcacactctcctgcagagacgcgcatcgtcgtcaacctagctagcttagctgaaggcgatgcgtcgccatggcagcacggcggcggcggcgctcacttgccggggacgaagttggt

SEQ ID NO: 398415 - DNA, 143 bp, Oryza sativa nipponbare
ttaaatatatatagccggagctgccatatattgcattcacatgtgccggacccaacaacatatagtcgtagcatataccactcttacatcaagtcattgagagatcaggtgtaacaaaaacaaaacctgagcacggccgatac

SEQ ID NO: 398416 - DNA, 425 bp, Oryza sativa nipponbare
gcacgaaggaattgttctcaagaatcttaagatggtaaatacacacaagagagaggtacggtatacaagacttagtttttcttaagtacaacagatcttccattcctccatgatcctatcagcttctacacccaaaccacacaaatcaccatgcacgagccctcttcctccactgccaaatcaactcacctggggcttgagtagccaagcatccatgtggtgatcagtagccgatgtcagcgtcgtcgacgacgaggttgccggtgatgagctcacggtaggcggcgacgggccagatgaaccccctcgggaggagcttgacggcgagctcgacgtcgatgatgatctccctcatggccggcttcttctcgccgctgatggcgatgaggtagctcctgccgacccagccgatccaaccggcgatg

SEQ ID NO: 398417 - DNA, 417 bp, Oryza sativa nipponbare
aattcgatcatcccttggatgcggcctgcggcttacattaaatctcgatccaaagaagcaaagatgatgacagacagaaattaattaagctagaaatctcctcgatcgatcacacacacacacacaattaaggtacatacatacatgcactgctgcaactgcaactgcagggtcggtgcgtggctactacaagtgtacacatggtacgttggttggcaccatctcgatcgtgtcgttgtgctcacttgccggagacgaagttggtggcgtatgcccaggcgttgttggcgacggtgtcggcgacgtggtcgaagaggttctcgatggggcccttgccggtgacgatggcctggacgaagaagccgaacatggagaacatggcgagggcggcgttcttgagctccttcaccttgagct

SEQ ID NO: 398418 - DNA, 298 bp, Oryza sativa nipponbare
ccctgggatgcggcctgcggtttacattaaatctcgatccaaagaagcaaagatgatgacagacagaaattaattaagctagaaatctccttgatcgatcacacacacacacacaattaaggtccatacatacatgcactgttgcaactgcaactgtagggtcggtgcgtggctactacaagtgtacacatggtacgttggttggcaccatttcgatcgtgtcgttgtgctcacttgccggggacaaagttggtggcgtatgcccaggcgttgttggcaacgggttccggacgcgtgg

SEQ ID NO: 398419 - DNA, 474 bp, Oryza sativa nipponbare
  unsure (1)..(474): unsure at all n locations
taattaagctagaaatctcctcgatcgatcacacacacacacacaattaaggtacatacatacatgcactgctgcaactgcaactgcagggtcggtgcgtggctactacaagtgtacacatggtacgttggttggcaccatctcgatcgtgtcgttgtgctcacttgccggggacgaagttggtggcgtatgcccaggcgttgttggcgacggggtcggcgacgtggtcgaagaggttctcgatggggcccttgccggtgacgatggcctggacgaagaagccgaacatggagaacatggcgaggcggccgttcttgagctccttcaccttgagctcggcgaaggtgtcaagggcgtcggcgaggccgagcgggtcgaaggcgccgcctgggtacaccttgtcgaggccctcgccgagcgggccgncgncgnaccggtagcccctcgacgaatcccatgagcaccacctggacc

SEQ ID NO: 398420 - DNA, 316 bp, Oryza sativa nipponbare
agattaatcacaatgcagtttgattaagcagtgggcatcatcacatcgcattcagaggaaggctatcttagattacagatgaatatgcagacacccagcttggtgttacatacatagactggatttgggtgaaatttagccggcgagggcgctggtgttgtagacgaggagggcgccgccgccgaggagcccggcgagggtcacggcccagatcagaagcccggtggttccaccaacgtaggtgtcaccggtgggagaccattcctccggcgagtagattgggctgtagccgtcgacgtttgcgccggacgcgtgg

SEQ ID NO: 398421 - DNA, 391 bp, Oryza sativa nipponbare
ggatgaaaaccacttcgagacaatttactcaggtagcaaatatttctcagccacaaatccaaacacttggtccttcctatcagaagatcagaatgaacaggttttcaaattcatctcccaactcgacgataatttacacgtacatttaacacattcttccacccttctcaaactcctcccttcttcttcccgggtaagattaaaattaacttgaggccagccagcgtcgccggcggcgagatgtttacaggctgggcgtcctctcggcggcgccggagatgacggtgagcaggttgttgccgaaggggtcgctgaggtgcttgggagaggtctcgacggggcccttcccggtgacgtaggccctgatgaagaaccccagcatggagaacat

SEQ ID NO: 398422 - DNA, 547 bp, Oryza sativa nipponbare
  unsure (1)..(547): unsure at all n locations
acgtctgacgcacgctgccggcagccgggagccttatagcgtgccgcgctcgcccttttttttttacataaatcacaacaaagatacagggatgaagagaacttgggttctgaaagagtatcaacttgccatcaacatatggtacatgatagtacaggtacacaatcaacaaggcatgcagtgctgcatccacaattacatcccaatacaccaccaccattcacagcctactccgatcccataaaagagaggtaaggtgggtcgacgaacagtcttttcatcttcctccattggcagccattgctaacactccaacacctgaagaactcctcatttgggggtgaaggcctggaagatggtggcgtggccggtgtcggcgagatgggccaagaggttgtcgatggggccggtgccggtgtactctgcctggaaccaagctcccatgacggcgagcatggcgagcacgccgttcttgatcttcatggtgcgcagnnccttgatcatatgcggcaagccggtgccccagacgaacggttaaaccacatac

SEQ ID NO: 398423 - DNA, 374 bp, Oryza sativa nipponbare
  unsure (1)..(374): unsure at all n locations
ctaatgccacacacaccatgctcttcttttgcttaaatagataaatgttagacaaaacttttggatgcatcgacaaattggggtagaggggcatcataacagtagcctacgtgcatcaactcgtggccacaaccaacagttaacaagaaaggagcagtaaacagcaggcatgagaaaggacttgggaggatacagaaccaagaatcgcaagaaagctactatttgagggactaaaccagtatcagacgtgctatgatgcctccgatgctgttaaacccccacaaagcctgctatcccattaaaagcctcngcgcggggtcgctcctctgcaacattcactctcagcgcacggccatccaaactctgtccatcga

SEQ ID NO: 398424 - DNA, 493 bp, Oryza sativa nipponbare
  unsure (1)..(493): unsure at all n locations
tgtactgtgacgtgtgtttgcctggttagcaacttaaagcatttcagttagcattggttagcagcactagtgttagaatatatacttactaactcgaaaaaagtgaggtgctattgtaaaattagtcaccttttgagatcacaacaaaaacatcgtctagcgaccacttcctaatctcagacttctgttctggattaatgattgcctggtcatcgttggcaaggcggtagccaatgacaacctcgtctctttcacgagccctgaccattatatcaaagaaactcaattcctcttgctcatagaggtaaaactcagctgaacgtatgcacatctcgttgccctcctcggcaaaaagttcttcaagaactctgttgatttgtttgtcctctgctaccattgctaatgccatgctgacaagttcattngatagaacatagtcgctgattttggagacagatacaaagtttctggttctggaatccagaatttcact

SEQ ID NO: 398425 - DNA, 381 bp, Oryza sativa nipponbare
aaatatatatagccggagcttccatatatttgattcacatatgcctgacccaacaacatatagtcgtagcagataccactcttacatcaagtcagagagagatcaggtgaaacaaaaacaaaagcagagcacggccggtaaaatcaaaagacgatgaacaaactgggaacacacgaaacagggtgggagacatcatcgaatcagagatgaacaattaaacaaggctatatatgacgatgacggcttagttgccaccagactcctcgcagcccgggggcttgtaggcgatgaagctgatgagctgcacctgcctgacgttgtcgaagccgatgatacggacgaatgcattagggtacgccttcttggcctcctcgagctcct

SEQ ID NO: 398426 - DNA, 317 bp, Oryza sativa nipponbare
agtatagcccatatctttatattatattattattaacaaaaacttgtcatgcccagctatggcttgggcgcgatctgatacacataataaagagaaaacataaaaaggagaaataattaatagcaagcgtcaagccggcctgcttaaaaggtgtaaaggcagctgccgtggtcgctcctagccgatgggtcgaagttcttggcaacagggtcggtgcaaccttccggcacaggcaggttacctggttgctgtgctccttgccctgctcctcctatgcaggccgtctacgatgcatcgaagggatgcgaatagctaga

SEQ ID NO: 398427 - DNA, 425 bp, Oryza sativa nipponbare
ttttgagatgataacttaagaattaagatctccatcacataaaaacatacagtgactgagtactggattacacgattgagttgttcagggttcagataggaaaaacatcttggggactagagatagagggaatcgacagatgcgcagcagtagcgcgcgggaaacaggacatcacgattgcgttgcatgtcgtcggctgcgcagcggcggcgcggggcttaagacctgctcttgaatgggatcgccctgatgatcacctggtggtagatggcagccagggcagcgccaacgaagggaccaacccagaagatccaatggtcattccaggcatggtccttgttgtagatgatggcagcgccaaggctcctggctgggttgatgccagtacctgtgattggtgatggtggccaggtggaccaagaaca

SEQ ID NO: 398428 - DNA, 368 bp, Oryza sativa nipponbare
tcataataatattattaagacattatagctgatgtcttttgatcacactgcgatcaaattatgcatcataggcagtacaactccgcgtcaggaaaaagtagaggagatatatttcttgttattacttaatacagcattcacatatatcgaaccatccggtacgtacgtagtagtactccacgcgttcacatcgatgatcggggacgatatcctcaggtagtacttatgcaaaagcgttggcgtaaactgacgaactgaacggacggacggtcggatttagggctcccataagtccaagttgccggagacgaagtcgtagtggccgccgacgagcttgagggtgcgttggcgacccctccttgacaacg

SEQ ID NO: 398429 - DNA, 402 bp, Oryza sativa nipponbare
  unsure (1)..(402): unsure at all n locations
tttactaggcaaaccacacgaatacacgattgattaatttcactgagaatagcacgggtacatcacatcacacaaattcatacgttgatacacgcatagtcgccgaagcgaccagctgcttaattaatcgataacacacgggtttaattcagcaataatcagcacacacacaaaccacactcatatgggtggttgttattgtggactaattaaggtaggtgactcgccggcggcgagtgttcggttgcttcgtgacttcacttgcctgacttgcagtcggtgcaggagcagctggtgccgcacttgcagncgccgttctcctcgccggcggcgaccctcttcgagtggctcttctcggcttcaactatgacgacgccatagctggtaccttttttacgcact

SEQ ID NO: 398430 - DNA, 370 bp, Oryza sativa nipponbare
gggaaacgaataaaatcattattgcaaaaacatcatcttcttcttcatcttcttagtgtacacaacaccaactcgatcatcatctcgtcgcactaaacccatcttccccaacccaaagacaacgaactcgctggccacaaatccatccaaccacaattaaccactgctaagctacggtcccccacttcacttgccggggacgaagttggtggcgtacgcccaggcgttgttgttgacggtgtcggcgaggtggtcggcgaggttctcgagggggcccttgccggtgacgatggcctggacgaagaagccgaacatggagaacatggggaggcggccgtcctgatctccttcaccttgagctccgcgaacg

SEQ ID NO: 398431 - DNA, 323 bp, Oryza sativa nipponbare
gcaagaaaccttgttcagctaattacattttataattaaccaagagtaagttacatgtagtatgccaaaaaatccggccggcaaagtaaagttagtgtacaccaagaatcgaaaatatgaacatcttacagcatgttccattcctacaaaactagtgggatttaggcagggagagctgccggcgtggctgggggaacccggttctcgacagggatctccgtgaactcggagagaatcgccctgaactcgtcaccactcaatgtctccttctcaaggagcaccttcacgatcttgtccatggcctcccggttgctcctgatctg

SEQ ID NO: 398432 - DNA, 382 bp, Oryza sativa nipponbare
ctcaaggtaaaattaattaatgcagtatagttttaactttgggcatcgatctcaacctggaactgtgactacacactggctacagtgccctggaggtactagcagtatagcagtagctgtagtacgtagcagcagcagcagcaggttcactgtcttgattggattggatcggattagtagacgtagttcttgacgaacatgccctacttggcctcggcggcctcgccgtcgctggtgtacttgccgagctgcagccagcgagttggccttggcgcggaggagcagcgcgtcctgcgccgccttcacgttctccgtctgtccgtgccacgtctcgaggcacgtgttctgcatcgccctcgcgtacgagaacgacacgtgccac

SEQ ID NO: 398433 - DNA, 431 bp, Oryza sativa nipponbare
acgtgcacatatatataaccggtgagtaattttacgcaagaaaaaaatgatatataatcaagtaaaactctaattatgaggcaaggcatatgtacagaagagcttagctgaagtgtgacctctagtacttatgccgcaaggagtttctggatgtccttctcaatctggaatggtgaagttgtaggtgggtatctctcaacaacttttccagttttgtccaccaagaacttctcaaaattccatttcacaagatcacccaaaaatcctccagcactcgacttaagaaacttataaataggggctgtgttaggcccgttgacatcaaccttgtcaaaaataggaaattcagctttaaaccttgtacaagcaaactgcttaatctgcgggtttgacccaggttcttgtgcaccaaactgattgcaaggaaatgc

SEQ ID NO: 398434 - DNA, 334 bp, Oryza sativa nipponbare
  unsure (1)..(334): unsure at all n locations
taaattaagctagataagcactgattccacgcacaatttacatgatcattacatcgtccatcacacaggcactcatgcatcgattacacataggagtattgattcgtgtgactagcttaatgaatttgattagccgatgatctggtccaggacgccgatgttcttgagggcggagcgacgccgacgcccatgatgtggccgacggcgccgcaggccagcgtgtcggcgagcgtgaaccccgcggggtcgccggtctgcaggccggagtcacgcgcctncagcttcaggcccgccgtcgaactcctgttcgtcgacggcgccagtcagaacctac

SEQ ID NO: 398435 - DNA, 303 bp, Oryza sativa nipponbare
ggggacgcaatggcaaaaactttataacttttaatttttatttggaacttttcaactgtctcccgtttaccggaaaatccctttggccctaccggactccaagttgggtgtttccaccccctgtccaaggttgacccctgggattttactgtgggcttgaaaagccacctacgaaccctttacccccaattattccggataacgcttgcattctttttttttccggggtttgtggcacaaaattagcccatgctttttcctcaaatacccgcatttttttttttccgcggacccctgggtttc

SEQ ID NO: 398436 - DNA, 496 bp, Oryza sativa nipponbare
taaatcaagatgctttcaaattccaattcagaaaatagagatgtgtacaggggaagggggaatggagcatactgcatacacaccgtcaagctagacaaactgacagaacctaacagacacgcatgaaacttataggaagctagctaaactctaccggtagctgcacatcgatccaacattttcgtcatcatcattggcaaacacgcatagacccacttctttattgtaaccaactgactagcttcatcgcgttctttatctgcatattttttattcttcagtaactcaaaagtttggtccagcagcgaggattcttgctgtcaggctgctgtctcccccgatcttgtagttggcgaacacacttcagttcttcttgaacaggccagccagcttcaggagcgtctccttgtacgcgcccttgtccgttcaggtgtgatcgggtcgaggattcagacgggatgccgtcgatttcaagtgggatctccaagccaaacac

SEQ ID NO: 398437 - DNA, 407 bp, Oryza sativa nipponbare
cgagtttaactaagaccagtttgatttcgtgtttgatacaaaaattaagatggacggattcacaagagagcaccctctacttaagctttacattacaaggccaaccagcagctgcctgccggccgaccactgcgtgcgcacgcgcgcgcaataatcaaccaatcacacacagtacgcacgcacataaaaaccacccatagccttcacgtacgcccggacgcacgcaccggttcgtgccaagctcaagggtagatggttctcgggatgatgatgtcgccgatgttgttgtgccacgggtccgagaggtggctggccaggttctccagtgggccggtgcccgggtacgccgactgttggacgcagaaacccacaaaagccagcatggccaatccgcccgttctgatctc

SEQ ID NO: 398438 - DNA, 314 bp, Oryza sativa nipponbare
  unsure (1)..(314): unsure at all n locations
ctcaaggtaaaattaattaatgcagtatagttttaactttgtccatcgatctcaacctgtaactgtgacgacacactggctacagtgccctcgaggtactagcagtatagcagtagctgtagtacgtagcagcagcagcagcaggttcactgtcttgattggattggatcggattagtagacgtagttcttgacgaacatgccctccttggcctcggcggccctgncgtcgctggtgtacttgccgagctgcgccagcgagttggcctttgggcgcgaggagcagcgcgtcctgcgccgnctttacgttctccg

SEQ ID NO: 398439 - DNA, 369 bp, Oryza sativa nipponbare
  unsure (1)..(369): unsure at all n locations
gttcgatggagtaagtgtattatatgtatgtaaatattatatgattgtaaatcattttgaggagctagactagcgtgccttattaacaaggagatatgtaccattacatgatgattaacatataaatctgtagctacatggaattaaggtagtggagcagaggaggaaggatgatagaagactccaattcttcatggatgggaatgggacaggtggcnctgcagaactctccgcccagatcgtcgaacgcctnctcggggaacaacctggtgggctcgtcgtaggataggtagtccctgtcgacttcctccgccgtcgcacgagaaacagcaacagcagccgatgatgagagcttggcctttgggtaca

SEQ ID NO: 398440 - DNA, 146 bp, Oryza sativa nipponbare
tagcgctctcaaagtagcatatattattcaatcttgatgaaagagggacacaagccatcatctatagtgatggtgcctcttacaaacttcaacacacgggtaacaagcatacactcaagagtcaagaggtggctagggtttgtgtg

SEQ ID NO: 398441 - DNA, 453 bp, Oryza sativa nipponbare
tttacatcttggcctctactcctcttggcaccaataattatcgtctctaatgtgatagttaatacaatgattcacgtagtctaacaacagataaggagaatgttggcatcatggtgcctcacttctgaacttggcgagcagtcaccaggtgacattggcgagttagaccatgcaaatctatagctccgagcagttcgtcacatatgagcaggaagacgtggagaatccatggcgcaatgctgctcggtttttgtggaaacctgcaatttctccaggagaagatgaaaacagcagtcactgcaactgcttctcaaaagggagttcaaatggaggttgcgttgccatagaactcttccaagttgtagaatgcctcgtgttgcggaagaaatatatggacaacaacaatcgccgagtccaacaaggtccatgaaatttggtttgatcaccagatgc

SEQ ID NO: 398442 - DNA, 365 bp, Oryza sativa nipponbare
tttacagcagaaaatgggaaaccactttatagtcgacgaatcgtcagtataatatctacatgcatctcatcagatgagatcagatcgagtacaacaagatggcgtatgcaggttgcgcatgcatgcatgaaaatcgagataaaaagggattaattaattattaacatatatatatccatcagtagactcccacattccattgctccgacttcttcagctgcttcttgtagtcaagccagtcgatgccgtcttttgcagcgaggtcgatcatgatgtcgtcgatgcctttctccatgcccttgaggccgcacatgtagacgtaggtgtgtccttcttgagcagctcccacagctcgtccttgtact

SEQ ID NO: 398443 - DNA, 294 bp, Oryza sativa nipponbare
agggcaaataccaaaatcgatcgatcgatgtacaaggggatgcattaattcattattttgggggtttttattttacaaatcaccaccatgcaagtcgccattaaccaccaacccagttttcctaatttaaggtgttttcaacaaaagggtgacctttttttttttcataccctcccagtttggttggaataaaaaaattaaaaagggggcgcgaacccacaccaacccattgttcccgtttgaattgcgcccgaaagagcttaaattaaaaggattgggagaagggttccaaaa

SEQ ID NO: 398444 - DNA, 341 bp, Oryza sativa nipponbare
tagtagaaaacttctttattcaaatctcagcagctatagcaagtgcccatatttaagaggagtacagagtacagacgcatcacaatcagaaaaccaatagggggagtaccatgtggaaatgtacatcaaaactacaaaaatctcatattttgctggcgaactggaggccttccttcttgagctcctctatgttggcaacgggcggctgagttttcgcgaccttggcaatggccttgttctcatcaggtgacccaccctccaggaaggcacccaacaccttgccgtccttgatccagtaggacccgaacttgggcttggcagaggtcgggtcactgtctccg

SEQ ID NO: 398445 - DNA, 300 bp, Oryza sativa nipponbare
gcattcacagtcacactcacttagtcaaataccaagatcgatcgatcgatgtacaagtggatgcattaattcatcatcttgggtgttcttatattacaaatcaccaccatgcaagtcgccattaaccaccaacccagctttcctaatttaagtagtaatcaacaaagggatgacctgttctctctccataccctcccagctcgctcgtcatcacaaaactaaacagcgcgcgcgaacgcacaccaacgcatcgatcccgtttgaattgcgcgcgaaagagcttaaattaagaggatgagg

SEQ ID NO: 398446 - DNA, 428 bp, Oryza sativa nipponbare
ccacgcgtccgcaccatgacatctattcaatcgaggatctagcacagttaatttatgatcttcatcagatcaatccaaaagcgaaggtatctgtaaagcttgtagctgaagcaggaattggaactgtagcttctggagtatccaaaggaaacgcagacataattcagatatcaggtcatgatggtggcactggagctagcccaattagttcaatcaagcatgctgggggtccttgggaacttggtctttcagaaacgcaccaaacacttatacaaaatggattgagagagagggtagtacttaaggtggatgggggattcagaagtggcctaaatgtccttatggctgctgccatgggcgcggatgaatattggtttggttctgtggctattatagctactggatgtgtcatggcacgcatttgccac

SEQ ID NO: 398447 - DNA, 203 bp, Oryza sativa nipponbare
ccacgcgtccgctctatctcagcttctctttaatccctagcgaatcaaaatcaaatcaatcgagttcgttgctcagagagatgcagtgcacgcatgtgtgtgtgcgtgtgtgtttctttgattgtacatgagaattaagaacaagttaaggagagaggtcgatccatcgatttcccctgcatgcaaggattgattttcaaaaa

SEQ ID NO: 398448 - DNA, 231 bp, Oryza sativa nipponbare
ccacgcgtccgcccacgcgttcggaaatcgtgaaggaagtctcatcctacctgaagaaagtcggctacaaccctgacaagattcccttcgttcccatctctgggtttgagggtgacaacatgattgagaggtccaccaaccttgactggtacaagggccccaccttgcttgaggctcttgaccagatcaacgagcccaagaagccatcaaacaaggccctgtggtttcccc

SEQ ID NO: 398449 - DNA, 399 bp, Oryza sativa nipponbare
ccacgcgtccgcgaggaagtctgctccgaccaccggcggcgtgaagaagccccaccgctacaggccggggacggtggcgctccgcgagatccgcaagtaccagaagagcacggagctcctgatccgcaagctccccttccagcgcctcgtccgcgagatcgcgcaggacttcaagaccgacctccgcttccagagccacgcggtgctcgccctccaggaggccgccgaggcctacctcgtcggtctcttcgaggacaccaacctctgcgccatccacgccaagcgcgtcaccatcatgcccaaggacatccagctcgcccgccgcatccgcggcgagcgcgcgtaagccgccgcccttcgacgcggttgcgttgcgtagcgccgaaaccgatctggggg

SEQ ID NO: 398450 - DNA, 430 bp, Oryza sativa nipponbare
ccacgcgtccgtctctgtgtcactgcgtgtgaggagcgtagcttagagtgagaaaataatggcgttggagacgtgcttcagagcctgggcgactctgcacgccccacagccaccgtcctccggcggcagtagggacagactcctcctctccggcgccggcagcagccagtccaagccaaggttgtccgtcgcctcgccgtcaccgctccgacctgcctcccgcttcgcctgccagtgcagcaacgtcgtcgacgaagtggtggtggcggacgagaagaactgggacagcatggtgctggggagcgaggcgccggtgctggtggagttctgggcaccgtggtgcggaccgtgcaggatgatcgcgccggtgatcgacgagctggccaaggagtacgtcggcaagatcaagtgctgcaaggtgaacacggac

SEQ ID NO: 398451 - DNA, 407 bp, Oryza sativa nipponbare
ccacgcgtccgcccacgcgtccgcccacgcgtccgcttgagcaggcaaccgagcggaaggcaccaccgccggcgaggctcggctccatcaccaagctgacggcggcatcgtcgtccttcgccaacctcttctccaccttcctcgggccagtgagctcccccgagccgaggccgaggcgcagcttcgacggcggcgccaccggcgtcgggcttggcatcgtcgcggccatgagccacgcctgcctgacgaccgaggccgagccgatcgccaatcggcgcggcggctcggcgccgcgcgagagaggaggccgagctctctgagagctacacttgcgtcatcacgcacgtcgccggcgtcgatggcgccagcggcagcgtgaggaagcgggtgtactttgggttcggcga

SEQ ID NO: 398452 - DNA, 277 bp, Oryza sativa nipponbare
ccacgcgtccgcccacgcgtccgcccacgcgtccgctttgaggtgggttggcttctcctccccctctttaccttttcctcctcggttcggttccgtggttcgtctagggtttagtgggttgagatggcggcgccggatgtcgagtaccgctgcttcgtcggcggcctcgcctgggccaccgacgaccgctccctcgaggccgccttttccacctacggcgagatcctcgactccaagatcatcaacgacagggagacggggaggtcaccttgggttt

SEQ ID NO: 398453 - DNA, 400 bp, Oryza sativa nipponbare
ccacgcgtccggaggtcatggactacttccgcgccctctacttcgccggcgagcgcagcgtccgcgccctgcacctcaccgccgaggtcatcgaccttaatcccggcaactacacggtgtggcattttaggcgtcttgttctagaggcactggatgctgatctgcgtgaggaaatggattttgtggaccgaattgctgaatgtaacccaaaaaattatcaaatctggcatcacaagagatggctagcggagaaattaggaccagatattgcaaataaagagcacgaatttacaaggaagatactttctatggatgctaaaaattaccatgcttggtctcataagcagtgggttcttcaagcactgggtggatgggagactgaactacagtattgcaacca

SEQ ID NO: 398454 - DNA, 367 bp, Oryza sativa nipponbare
ccacgcgtccgcagtaagctagctaactaactacgtggctatggcccccaccgtgatggcctcctcggccacctccgtggctccattccaagggctcaagtccaccgccgggctccccgtcagccgccgctccaccaactcgggcttcggcaacgtcagcaatggcggaaggatcaagtgcatgcaggtgtggccaattgagggcatcaagaagttcgagaccctatcgtacctgccaccactcaccgtggaggatcttttgaagcagatcgagtacctgcttcgatccaagtgggtgccttgcctcgagttcagcaaggttggattcgtctaccgtgagaaccacaggtctcccgggtactacgat

SEQ ID NO: 398455 - DNA, 339 bp, Oryza sativa nipponbare
ccacgcgtccggggcgccgtcgaggggtaccgcatcgccggcgggccgctcggcgaggtcggcgacccgctctaccccggcggaaggttcgacccggtcggccttgacgacgacccggaggccttcgcggagctcaaggtgaaagagatcaagaacggccgacttgccatgttctccatgttcgagctttttgttcaggccaatgtcaccggaaagggccccctaaagaaccttgacaaccaacttggcgaacccgtcaacaacaacgcctgggcctacagcaccaactttgtgcccgggaagtgagcgcccgccccgccgggcttgcatggggacgca

SEQ ID NO: 398456 - DNA, 395 bp, Oryza sativa nipponbare
ccacgcgtccgccaccccaatccggcagcacagcagcagcagaagcagctcggatccctcctgcaatggcgaccgcgtgcccgccgctctcgctgcagccggcctacctctcggggaggtccgcgcgcgcgcgccgcccgccgcccgccgtccgctgcagcgccgtcggagaggttatggcggagacggcggcggtcgggacggcggaggagccgctgctggtgagcgcgatcaaggggaggaaggtcgagagaccgccggtctggctcatgaggcaggccgggaggtacatgaagagctatcaattgctctgcgagcgacatccttcattccgtgaaagatcagaaaatgttgaccttggtggtgagatctctctacaaccatggaaggttttc

SEQ ID NO: 398457 - DNA, 280 bp, Oryza sativa nipponbare
ccacgcgtccgcttcgacccgctcggcctcgccgatgaccctttcaacaacaacgcctgggcgtacgccaccaacttcgtccccggcaagtgaagtgggggaccgtagcttagcagtggttaattgtggttggatggatttgtggccagcgagttcgttgtctttgggttggggaagatgggtttagtgcgacgagatgatgatcgagttggtgttgtgtacactaagaagatgaagaagaagatgatgtttttgcaataatgattttattcgtttccca

SEQ ID NO: 398458 - DNA, 403 bp, Oryza sativa nipponbare
ccacgcgtccgcccacgcgtccgctcaactcaactctcttcggcagcgagcagcagcgccttccaccatgccgaagcagatccacgagatcaaggacttcctcctgacggcgaggaggaaggacgcgaggtcggtgcggatcaagaggaccaaggacgccgtcaagttcaaggtgcgctgctccaagtacctctacaccctctgcgtcttcgacgccgacaaggccaacaagctcaagcagtcgcttcccccgggtttgactgtccaggaggtttaagcatcaaagccagaccatgctgtttgtagcagcaggattgcttgctcccgttcgcattagtagctattagatgctgaaattttatctgtcttgagttttgaatgtaacacccaaagtttatgtgct

SEQ ID NO: 398459 - DNA, 259 bp, Oryza sativa nipponbare
ccacgcgtccgtccagtcgtccgccgatgcgtgaactacaatttgcgtaacgaaagaaaaggccgcaggctcaggaccctgcaactgtagctgattgagggcattaataatggcctgaccatgtgctacctgacatcgttcaccgtggaggacctcatggagcaaatcgagatcctgcttcgtaactagtgggtgcactgccatgagataagactggtaatattcatataccgtgagaaccacatatccagaggatact

SEQ ID NO: 398460 - DNA, 331 bp, Oryza sativa nipponbare
ccacgcgtccgccgtgccgtgcttgtggactgggtgactgagcagtggagcaagggtgcacttgttaacgtggtggacgcgaggattccgagctgttttgatcctgacgaggtttctctggttctaaaacttgggctgctctgctcgcatccattgcccaatgctaggccaacaatgcggcaggtcgctcagtacctcgacggtgatatggccctaccggatttgtcaccgacgtacctaagcttcacttcactagagcggatgtacaaggagttcaaccgcaattccatttcatacatctcatcagcaagcatgggtgccatttctgata

SEQ ID NO: 398461 - DNA, 427 bp, Oryza sativa nipponbare
ccacgcgtccgcccacgcgtccgtgtggctattaagtgtgcgacgattactccagatgaggctcgggttaaggagttcaacctaaagcaaatgtggaagagccccaatggcacaattaggaatattatcaatggcactgtattcagagagccaattatatgcaaaaatgtcccaaggcttgttccaggatggactaagcccatttgcattggaaggcatgcttttggtgatcagtaccgagcaactgatgcagttctgaaggggcctggcaagctcaagctggtttttgagggaaaggatgagcagattgatctggaggtgttcaacttcactggtgctggaggagttgctttgtctatgtacaacactgatgagtcaatccgagcttttgctgaagcttctatgacaactgcttatgagaagaaat

SEQ ID NO: 398462 - DNA, 369 bp, Oryza sativa nipponbare
ccacgcgtccggaaaccgataagggacacgaaacaggggaatccggagcaaagtgcgacgcgagcgcgcgaggaagcagcagccatggcgctctccctctccacctccttcctcccgacccaagccgccgcggcggccacgaggaccaccctccgctccctcgtcccctcccagaggatgcggtgctcgatgcggaagaaggggctgcacccggagatctacgaggacgcgaaggtgtactgcaacggggagctggtgctggtgacggggggaaccaagccggagtacacggtggacgtgtggtcggggaaccacccctactacgtcggcgacacgtcggcgatggtcgtcatggacagccagatcgag

SEQ ID NO: 398463 - DNA, 380 bp, Oryza sativa nipponbare
  unsure (1)..(380): unsure at all n locations
ccacgcgtccgccacgcgtccgcggacgcgtgggncggaccgcgttggtgtataagcataagcaacacaagggaggaactcatcactcacttagctaattaaatcttcgaccatgtcggacaagtgcggcaactgcgactgtgctgacaagagccagtgcgtgaagaaaggtaccagctatggcgtcgtcatagttgaagccgagaagagccacttcgaggaggtcgccgccggcgaggagaacggcggctgcaagtgcggcaccagctgcttctgcaccgactgcaagtgcggcaagtgaagtcacgaagcaaccgaacactcgccgccggcgagtcacctaccttaattagtccacaataaaaaccacccatatgagt

SEQ ID NO: 398464 - DNA, 392 bp, Oryza sativa nipponbare
ccacgcgtccgagagcatcgatgcttatgttgaggttgaagatgataaaattattgtgccccgcaattcagtggttgaggtgaatcagtctggtcttctaatggagacactgattgatataacaccaaaagatccactccctacaccttcagttggtcctcttgacccagactgttccaaagaaggtttaattctctgtgacaaagagaggatgaaaggacaacaaggagtaagcttagacgcactggttggaatatttactcgtctaggaagagatatggaggaaattggtgttcacaaaagctacaagttggctgaaaaagtagcatcaataatggaagaagcgcagcctcttctttcacggattgaagcattagctggagaaattcaac

SEQ ID NO: 398465 - DNA, 344 bp, Oryza sativa nipponbare
ccacgcgtccggcggcgggcacgccgtgatcgggttctacctctccaaggacctgctcgccgcgggccacgccgtcaccgtgctcaccgtcggcgacgagggctccgacaagatgaagaagccgcccttctcccgcttctcggagctgacgagtgccggggcgacgacggtgtggggcgacccggcggacgtcggcgcggcggtcggcggcggcgcctcgttcgacgtcgtcctcgacaacaacggcaaggacctcgacgccgtcaagccggtggtggactgggcgaaggcggccggcgtggcgcaattcctcttcgtcagcagcgccggcatctacaccccca

SEQ ID NO: 398466 - DNA, 375 bp, Oryza sativa nipponbare
ccacgcgtccgcccacgcgtccgcaggaggatacttcaagttttaacgatctagatgaacatagcaaaaatatcctcagaagattgtactatgactattattttgctcgccaagagaatctctggcgtcaaaatgcgctcaagactctgcctgtgcttttgaactcatcggatatgttggcatgtggggaagatcttggccttatccctgcctgtgttcaccctgttatgcaagaacttggattgattggattgcgtatccagagaatgcccagtgaaccaaacttggaatttggtattccatctcagtatagctacatgacggtttgggctccgtcatgtcatgattgctccacattacgtgcttggtgggaag

SEQ ID NO: 398467 - DNA, 308 bp, Oryza sativa nipponbare
ccacgcgtccgcacgaggaccgcttcgacttcgacccgctcgacgtcaccaagacgtggcccgaggacatcgtcccgctgcagcccgtggggaggatggtgctcaaccgcaacatcgacaactttttttcggagaacgagcagctggcgttctgccccgggatcatcgtgcccgggatctactactccgacgacaagctgctgtagacgaggatttttttctacttcgacacgcagaggcaccgccttggaccaaaatacctgctggttccgcccaacacggccaagtggggccaccacaacaaccac

SEQ ID NO: 398468 - DNA, 430 bp, Oryza sativa nipponbare
ccacgcgtccgatcgagatggacgccgtcgcggcgaatgggatcggggaggtggagaggaaggcgcagcggagctactgggaggagcactccaaggacctcaccgtcgaggccatgatgctcgactcccgcgccgccgacctcgacaaggaggagcgccccgaggtcctgtctgtactcccttcttacaaagggaaatcagtactggagcttggtgctggaataggacgctttactggggaactggcaaaagaagctggccatgttttagccctagacttcattgaaagtgtgattaagaagaatgagaacataaatgggcatcacaagaacataacctttatgtgcgctgatgtcacgtctccggacctgacgatcgaagataactctattgatctcatattctcaaactggctactaatgtacctttc

SEQ ID NO: 398469 - DNA, 398 bp, Oryza sativa nipponbare
ccacgcgtccgaaaaaccaacccaaccgccgccgcatcgcccttgttagaacgatggccgcgtcggcgctgcaccagaccaccagcttcctcggcaccgcccctcgccgggatgagctcgtccgccgcgtcggcgactccggtggccgcatcaccatgcgccgcaccgtcaagagcgcgccccagagcatctggtatggacctgaccgtcccaagtacctgggcccgttctcggagcagacgccatcgtacctgaccggagagttcccgggagactacgggtgggacacggggggggtattcggccgacccggagacgttcgcgaggaacagggagctggaggtgatccactcgcggtgggcgatgctgggggcgctgggctgcgtcttcccggagat

SEQ ID NO: 398470 - DNA, 329 bp, Oryza sativa nipponbare
ccacgcgtccgcccacgcgtccgcagaccgccggtgttaagccggaggaaggagagttctgcaaggccacctgatcccattcccatccatggagaattggagtcttctatcatccttcctcctctgctccactaccttaattccatgtagctacagatttatatgttaatcatcatgtaatggtacatatctccttgttaataaggcacgctagtctagctcctcaaaaaaaaaaaataaaaaaaaaaaaaaaaaactaatatataaaaaaatatatacttaattaaatgtttaattaaataataatattattatttattttctttata

SEQ ID NO: 398471 - DNA, 390 bp, Oryza sativa nipponbare
ccacgcgtccgcccacgcgtccggccacgcgtacgaagaagtactcgcgcaaagaccgagagagcttggtgagctgcatagatggccccatacgagatggcgtttgtatgctcaccactgtgcctcccttccaggggcttaagtgcaccggcgacatgcccgatgcccgacgatccgtcgactgcagcttgcgcatcctcagcagtggcggcaggatcaggtgcatgcatgtgtgtccaattgagggcattaagaagttcgatgaccatgtactacctgacaccgttcaccgtggaggacctactgaagcagatcgagtgcctgctacgttgcaagtgggtgccttgcctcgcgttcagcatggtatgattcttctaccgtgagaaccac

SEQ ID NO: 398472 - DNA, 401 bp, Oryza sativa nipponbare
ccacgcgtccgcccacgcgtccgaatccacccgcatcgcatcccacctacgaacgcttcgccgcttgataaaccaaattccccaccgccgcttcgttctcgccgatccggagggctcgagatgaaggcgaggtcgaggtccagcaatggcgactccaggctctcggtgaggaagaccaaggcggagaaggacccgaacaagccgaagaggccaccgagcgcgttcttcgtgttcatggagcagttcaggaaggactacaaggagaagcaccccaacgtcaagcaggtctcggtgattggcaaggctggtggtgacaagtggaagtccatgactgatgctgacaaggctcctttcgtgaccaaggctgagaagctcaaggctgagtacaccaagaagattga

SEQ ID NO: 398473 - DNA, 428 bp, Oryza sativa nipponbare
ccacgcgtccgagagaactggttaccagaaggccctatcacaatcggagttacttctggcgcctcaactccggacaaggttgttgaggatgcgttacagaaggtgtttgagatcaagcgccaggaagttttgcaggccgcgtaaattttcatcaggtttggtcacggtagctgatggcttggtgaaggttaatagaaccagtgcacaagcgatgtctgtacagtagtgaagaatgctacgcttttaggagcgcatactacggcatgtgctgagatttacgtagtatgttgggggcaaatgttgtaatcaattatcacacgaagaacagttgctgtatcggctgtcataactttctgaccccctcaaataacgttgcagaagtatctttcttcggtataaatatcacccaatttggtagcttgtactat

SEQ ID NO: 398474 - DNA, 329 bp, Oryza sativa nipponbare
ccacgcgtccgctcactcgtccggttcaaggagaagatttccaagaataaatctgtcgctgctgcgggagaagcagccggtgataggtggaaatccctgaccgaagcggacaaggctccctatgtagccaaggccaacaagctcaaggccgagtacaacaaggtcattgctgcctacaacaagggctagagcactgccaagaaggcacccgccaaggaggaagaggaggacgactaggaggaatctgacaagtccaagttcgaggtcaatgatgaggatgacgacgagggcagctaataggatgaagactatgacgagtgagcctttca

SEQ ID NO: 398475 - DNA, 324 bp, Oryza sativa nipponbare
ccacgcgtccgcggacgcgtggggccggcgccagcggcgccagcgccgcgttcgccgagtcggacgtgaagcgcgggacgcccgaggcgaagaagaagtacgcgcagatctgcgtcaccatgcccaccgccaaggtctgccacaactgagctgtggttagagggaagaggggctatggatgcagtaaatacatgtacggttttttaatctcctgtctattaaaaattcgagctctgattagactgtcgccatggatggcatcgaaatcaagttgttgtaatatgatgatcattgcgaattcgaggtgaaaccgtacgttctctt

SEQ ID NO: 398476 - DNA, 390 bp, Oryza sativa nipponbare
ccacgcgtccgcccacgcgtccgcccacgcgtccgcccacgcgtccgccctgcgccattgccggccacactcctcttcctcctccatcgccaagaaccaccacgagcaatggcgtcgctgtccatggccacaacgctgccgtcgctggccggcgccgcaccggcggcgaggaagaggagcggcgtgacgtacgtggaggggatgaacgcgtacagcgggctcaaggcgctcaacaaggtgaccctgctcggcgtgcgcaagaccgccgactactcgttcgccaaggtggtggccaagctgagccccgtcggcgggaagagccgcggcggctcgttcggggcgcaatgcaacgccccccgggagatatttaggatcgccgtcattatgaac

SEQ ID NO: 398477 - DNA, 280 bp, Oryza sativa nipponbare
ccacgcgtccgcgaggttgagctgagctgagctctcgcagagacagggcgatgaacatcttgaaccagccgatcaaccctggcggccacccggcgttcccggcggcaagggagaccggccagctgatgccggcgtcagtccgcttcgacggcctgtcgacgcagcagagcacggccgccgccgtggggcgggcgcacgccgggcagtccccgcggtggcaggcgcagacgctgcgccggccaagcagctacgtcggcgtcgagcacgactagccggctga

SEQ ID NO: 398478 - DNA, 353 bp, Oryza sativa nipponbare
ccacgcgtccgactagcacaagaggagagtcatcgatgaaatactagtgcgatgtatagtatacgtttgagtttcttttttctgtgacacgtaggatgcgtttgtgttgcctgcactattggagtgagcaaatccagaggcgcatacatgccatgccaagaatagaaggatcctctctgaccatgttccacgccgatcgaggtctgctccgggtactacacgattcattgtaagcccggccttctatgatctccggtcgaaataggccaatttatttcccacgtggccgatactttgaagaatatagagtgctcaaaagcagccatcgctctggatacattagcatgggattt

SEQ ID NO: 398479 - DNA, 416 bp, Oryza sativa nipponbare
ccacgcgtccggcttccctagctcctcggttggatcaaagagaagagaagagaagagttaatgctgatggcctccgaggcgtggctgtcgccggcttcccgcctcttccaccctccccgctcctccaccgccgccttcttctccgcttccgggctcccccgcctgcctcgccgctcctcctgtgcactcgcaacctccacgcgtgggcggcgcctccgccttggcgccaccgatcagcagcagcagcaaggcaaacaagatggtgatgaggttgtggacagcaacgtgctccagtactgcagcatcgacgggaaggggaagaaggccgagaagaggtcgctgggtgagatggagcaggagttccttcaggctcttcaggccttctactacgaccaagaggccatcatgtccaacga

SEQ ID NO: 398480 - DNA, 155 bp, Oryza sativa nipponbare
ccacgcgtccgcccacgcgtccgcaaggagaaggagaaggttggctctagccatggcttcccagctctgcgccggcacatccgtgccgcagttccatggcctacggacctacttttgttctaggtgcatggtgactctgacataggtgaggatga

SEQ ID NO: 398481 - DNA, 338 bp, Oryza sativa nipponbare
ccacgcgtccgctgacatacacctcacacacactccccttcttgttggtttctcccccaattcgagccgaggttgagctgagctgagctctcgcagagacagggcgatgaacatcttgaaccagccgatcaaccctggcggccacccggcgttcccggcggcaagggagaccggccagctgatgccggcgtcagtccgcttcgacggcctgtcgacgcagcagagcacggccgccgccgtggggcgggcgcacgccgggcagtccccgcggtggcaggcgcagacgctgcgccggccaagcagctacgtcggcgtcgagcacgacgagccgggggacg

SEQ ID NO: 398482 - DNA, 430 bp, Oryza sativa nipponbare
ccacgcgtccgcccgtcttcgcgccctcctccaacgcgctcctctccccaaaggcgctcttcatctgggccatgctgccgttccagctcgggctcaactccatcaagacgctgacgctcctcgcgccgctcagcatcttcgccgatgtggttgacctcggcgccatgggcgtcgttctcggggaggacgtgtccgtctggctcgccaaaccaccacccgtcttcgccttcggcggcctgagcgcgatcctgtacggcatcggcgtgtccgtgtacgccttcgagggaatcggcatggtccttccgcttgaggcggaggccgccaacaagaagaagttcgggaccacgctcgggctatccatggggttcatcgccgtcatgtacggcctgttcggcgccatggggtacatcgctttcggcgacgccacgcg

SEQ ID NO: 398483 - DNA, 374 bp, Oryza sativa nipponbare
ccacgcgtccgcccacgcgtccgtgatgatgctctgatttcagctgccaagctatcttatcaatacatcagtgatcgtttcctcccagataaagcaattgatttgattgatgaagcaggttcacgtgtaaggcttcgacatgcccaggttcctgaagaagctagagagcttgacaaggagctcaagcaaatcacaaaagataagaatgaagctgtccgtagccaggacttcgaaaaggctggagagttacgtgatcgtgaaatggaattgaaggcccagataacagctctcattgacaagagcaaggagatgagcaaagcagagactgaatcaggggagacagggccactggtcaatgaagcagatatccagca

SEQ ID NO: 398484 - DNA, 421 bp, Oryza sativa nipponbare
ccacgcgtccgccacgcgtccgcggacgcgtgcgcaatttggtccgcccaaagttcaagttctgggacttgctgacgaagctgaagaaggtgaagaagagcaatggacagatgctcgccatcaacgagatctttgagcgtaaccctacaacgatcaagaactacggcatctggctgcgttaccagagcagaacaggttaccacaacatgtacatggaataccgcgacactactctgaatggtgctgtggagcagatgtacaccgagatggcctctcgtcaccgtgtgaggttcccctgcattcagatcatcaagaccgcaacagttcacttcaagctctgcaagagggacaacactaagcagttccacaacttcgaatattaagtttccgctcgtgtaccgcaaggtcaggccggccacca

SEQ ID NO: 398485 - DNA, 371 bp, Oryza sativa nipponbare
ccacgcgtccgcggacgcgtgggctgaaggtgatattcagattttcagagtgagtgctcgtgtgttgtgcgatcagtgcccgcagttcgatcgatccgtgttgatctttgaaagaaagatgtcgtgctgcggaggaaactgcggctgcggatccggctgccagtgcggcagcggctgcggaggatgcaagatgtacccggagatggctgaggaggtgaccactacccagactgtcatcatgggtgttgcaccttccaagggtcatgccgaggggttggaggccggcgccgccgccggagcaggagcagagaacgggtgcaagtgcggcgacaactgcacctgcaacccctgcaactgcggcaagtgaagca

SEQ ID NO: 398486 - DNA, 354 bp, Oryza sativa nipponbare
ccacgcgtccgagagcatcctcgccatctgggcggtgcaggtggtgctcatgggcgccgtcgaggggtaccgcatcgccggcgggccgctcggcgaggtcgtcgacccgctctaccccggcggcgccttcgacccgctcggcctcgccgatgaccccgaggcgttcgcggagctcaaggtgaaggagatcaagaacggccgcctcgccatgttctccatgttcggcttcttcgtccaggccatcgtcaccggcaagggccccctcgagaacctcgccgaccacctcgccgaccccgtcaacaacaacgcctgggcgtacgccaccaacttcgttcccggcaagtgaagtggggg

SEQ ID NO: 398487 - DNA, 425 bp, Oryza sativa nipponbare
ccacgcgtccgcactgctagcttgggaagaggaggaggagcttgagcttggagagagacaacaatggcggctcaggctcttctctctgggaggcagctgctggggaggccattgcaatcttcagtctccaggtcttcttcctccaggaaggcacccttcatggtcagggcagaggccactccccctgccaagcaaggtgctgacaggcagctgtggttcgcatccaagcagtccctgagctacctggatggcacgcttccgggagacttcgggttcgacccgctggggctatcggacccggaggggaccggtgggttcatcgagccacggtggctggcctacggcgaggtgttcaacggccggacggcgatgatgggcgtcgtcggcatggtcgccccggagctcctcggcaagctgggcctcgt

SEQ ID NO: 398488 - DNA, 354 bp, Oryza sativa nipponbare
ccacgcgtccgcggacgcgtgggcttaccccttctcacaagagagagagcgccagactctccccaggattcagccatgaagggggccaaattcaagggcgccgtcaagcccgacgccaagttggctgtgaagagtaagggcgcggagaagcccgccgccaagggcaggaaggggaaggccggcaaggaccccaacaagcccaagagggctccctccgctttcttcgtttttatggaggagttccgtaaggagttcaaggagaagaaccccaagaataaatctgtcgctgctgtaggaaaagcagccggtgataggtggaaatccctgaccgaagcggacaaggcttcctatgta

SEQ ID NO: 398489 - DNA, 428 bp, Oryza sativa nipponbare
ccacgcgtccgggccgtgaggcccgtgccggtgcccgggggcgacatggtggcatgccacaggatgccctacgcgtacgccgtgttcggggtgcacgggatcaagggcgcggcgtacacggtgacgctggccggcgccgacgggaccatggcggaggcggtggcggcgtgccacggggacgtggacgggcacggcgtggcggtggcggaggcgtacaagaggctcggcgtggcgcccgggaaggtggcagtctgccacttcctgcctcaggacgacatgctctgggtgcgcaactgaatgaagcagctacctgcgcgccatccatggctaattaagctccttcctatattttcgatctacctgccggctggctatcatgttatcatcgcgtgtgtgtgcgcgccgatccgacatgcccacactacacg

SEQ ID NO: 398490 - DNA, 432 bp, Oryza sativa nipponbare
ccacgcgtccgggcggcggcggcggtggcggcggcggcggggcggtgaagacgccctccgacttcctcaagtccatcagggggcgccccgtcgtcgtcaagctcaactccggcgtcgactaccgcggtattttggcttgtcttgatggttacatgaacattgcaatggagcaaacggaagaatatgtcaatggtcagctgaagaacaagtacggtgacgctttcatacgaggaaacaatgttttatacatcagcacatcaaagcgtaccctcactgatggtgcatgagaaggtgagacagcatgcagttcaatgcctgccactatcgcaactttgatttcctctgtgatcaatctctaaagaaatacttgcttacaatatcgtagttgctacatggaaagagatgttttctggaatggaggattatcaccag

SEQ ID NO: 398491 - DNA, 296 bp, Oryza sativa nipponbare
ccacgcgtccggcgcacacgacacgacgcaccaatggcgctcgtctccgcctcctcctccaccaccgccgtcgcggcgctccccggcgccgccagggcctcctccttcctcggcggcgccggcaggagcggcaggctgctgctgaggcaggccgagtcgtcgtccgcgcgggcgtcgttcgccgtgcgcgccgcggcgcccgacaggccaatctggttccccggcagcaccccgccgacgtggctcgacggcagcctacccggcgacttcggctttgaccccctgtgtataggatc

SEQ ID NO: 398492 - DNA, 383 bp, Oryza sativa nipponbare
gtccgcccacgcgtccgggagcttgagcttggagagagacaacaatggcggctcaggctcttctttctgggaggcagttgctggggaggccattgcatttttaattttcaagtcttttttcttcaagaaggcaccctttatggtcagggcagaggccactctccctgtcaagcaaggggctgacacgcagctgtggttcgcatacaaacagtccctgagctacctggatggcacgctttcgggagacttctggttcgacccgctggggctatctgacccgcgggggaccgcggggttcatcaagccacggtggctggcctactgcgaggtgttcaacggccggacggcgatgatgggcgtcgtctgcatggtcgccccggagc

SEQ ID NO: 398493 - DNA, 401 bp, Oryza sativa nipponbare
ccacgcgtccggcttgagcttggagagagacaacaatggcggctcaggctcttctctctgggaggcagctgctggggaggccattgcaatcttcagtctccaggtcttcttcctccaggaaggcacccttcatggtcagggcagaggccactccccctgccaagcaaggtgctgacaggcagctgtggttcgcatccaagcagtccctgagctacctggatggcacgcttccgggagacttcgggttcgacccgctggggctatcggacccggaggggaccggtgggttcatcgagccacggtggctggcctacggcgaggtgttcaacggccggacggcgatgatgggcgtcgtcggcatggtcgccccggagctcctcggcaagctgggcctcgtcccc

SEQ ID NO: 398494 - DNA, 388 bp, Oryza sativa nipponbare
ccacgcgtccgctgcaaggagaaggagaaggtaggctccagccatggcttcccagctctccgccgccacatccgtgccgcagttccatggcctccggacctactcctctcctaggtccatggtgacgctgccatcgttgaggatgagcaagaagaggtcccagggcatccggtgcgactacatcggctcagccaccaacgttatcatggtgacgacgacgacgctgatgctgttcgcggggaggttcgggctggcgccgtcggcgaacaggaagtcgacggcggggctgaagctggaggcgcgcgactccggcctgcagaccggcgaccccgccgggttcacgctcgccgacacgctggcctgcggcgccgtcggccacattatgggc

SEQ ID NO: 398495 - DNA, 430 bp, Oryza sativa nipponbare
ccacgcgtccgcccacgcgtccggtcggatgctaatcagctagagaaactggagaaactgctgacaaatgctttgagggatacgaaatcaaagaagatgttggcaaaacaaaatggtgaagggagtaggagcagagcaaactccagtggctctagggggcaggaggaaggaagtgcatgagcaggaagcacaggtgtcctgtgcataagtttggcagtgcatgcacctcccaaattaaaaagctaataaaaaaaagagaaaatggtgcatgctctgtttgctgccagtttctcccactgattgatcccaggtagagaaaagagttgccatggcctctggctctgcttgttagatcaagggggggagatgggattaaaagggtgggggaagtattcaggttcttgtaatgaagacctatgctgtggtgttt

SEQ ID NO: 398496 - DNA, 412 bp, Oryza sativa nipponbare
ccacgcgtccgaagaagtgcttaggacaatgttcaatgcagcttcttctcttaaggtacgtttcaaggtcactaaaggtgcttctagttcagatggggcacaaaagaggaagcgtgatgcattcagtgaaaccgatccacagcagtgtgttccttccgctgcattcggttctgatagtctcaagaatgatttggaacataaaactcaaaagcagctatatcctggtagccgtgctgaagtcctatcacaggacagcggtataaggggctgctggtttagatgctttgtattaaagaggcgcggagacaaaatcaaggtgcgatatgaagatcttcaggatgctgatgagacaggaaatctggaggagtgggttttgctaacaaggattgctaaacctgatcagttgggtata

SEQ ID NO: 398497 - DNA, 356 bp, Oryza sativa nipponbare
ccacgcgtccggcgatagctaaattatcttgtagtgaaacggattcacctagataggccagataacctgaacatgatcccatatttttcttcgtcagataagcagtgggaagcagttggaggaatttctggattacaaggactcgattgaattcatcttttatgagtagatagagtagtccttgagcatgagcctggctatttttacattatttgcacacgattaaaaaaagatggataaagaatatgaggtcccaataatttctacacagtttgatctgaaattcggaatattcatatcctgagactcagagaaccatcaagcatgtctacatggaggatggttttctttggtgc

SEQ ID NO: 398498 - DNA, 388 bp, Oryza sativa nipponbare
ccacgcgtccgcccacgcgtccggggaaagtgccaagagtttatatgcatcattgctcaagtctattgggagaggtcttgacataggcacattaattgaagtaaggagatcacaactagcatataaactttctgatgagattgcttctgagatgttcagggagcatgcaaagaagttagttgaagaaaacatttcaacagccttgaacaacttgaataaccgaacacaggttgttgaagaagtgaaaagcatcctttcatttaatggtatgcttacagtactgagcaatttcccgggagaagaaagatttgtccgcgggcttgggcctattacattaggtggagacagtgatcatgaaaagggggtagaggatctaaagatgctctat

SEQ ID NO: 398499 - DNA, 428 bp, Oryza sativa nipponbare
ccacgcgtccgtaatgtcagaataaaacgcggcgcagcacacaccccagctcctcctccggcgacaaaaaaaaaaaatggacgcgcagtacaacccgcgaacggtggaggaggtcttccgcgacttcaagggccgccgcgccggcctcgtccgcgcgctcaccgcagatgtggaggatttcttccggcaatgcgacccggaaaaggaaaacttgtgcctttatgggtttcccaatgagcattgggaagtaaatttgcccgcagaagaggtgccacctgagctcccagagccagcattgggcattaactttgcacgagatgggatgcaggaaaaagattggctgtccatggttgcagtgcacagtgatgcatggttactttctgttgcattttactttggtgctcgggtcggatttgataaaaatgaca

SEQ ID NO: 398500 - DNA, 422 bp, Oryza sativa nipponbare
ccacgcgtccgcccacgcgtccgcccacgcgtccgaaaccaacccaaccgccgccgcatcgccctcgttagaacgatggccgcgtcggcgctgcaccagaccaccagcttcctcggcaccgcccctcgccgggatgagctcgtccgccgcgtcggcgactccggtggccgcatcaccatgcgccgcaccgtcaagagcgcgccccagagcatctggtatggacctgaccgtcccaagtacctgggcccgttctcggagcagacgccatcgtacctgaccggagagttcccgggagactacgggtgggacacggcggggctatcggccgacccggagacgttcgcgaggaacagggagctggaggtgatccactcgcggtgggcgatgctgggggcgctgggctgcgtcttcccggagatcct

SEQ ID NO: 398501 - DNA, 73 bp, Oryza sativa nipponbare
gcaggaccacacgcctctccgccggcgagtcacctaccttaattagttcacaataaaaaccacccatatgagt

SEQ ID NO: 398502 - DNA, 262 bp, Oryza sativa nipponbare
ccacgcgtccgcccacgcgtccgcccacgcgtccgcccacgcgtccgagctgcacagagctagcgttagcttggttagttgttcttagcattctagctagctcaatggcgaaagacattgaggcgtcggcgccggagggcggcgagttctcggcgaaggactacaccgacccgccgccggcgccgttgatcgacgtggaggagctgcccaaggggtcgttggcccggccggggaccgcggagtcaatgggaccgttcttttt

SEQ ID NO: 398503 - DNA, 331 bp, Oryza sativa nipponbare
ccacgcgtccgggagatgtacacgctgaatgagaagaaggtgcatatagtcgatacaacgtgcccttgggtttcaaaggtgtggaacatggttgaaaagcacaagaagggtgactacacttctattattcatggaaaatactcccatgaagaaactgttgccactgctttctttgcagggacatacattattgttaagaacatagcagaggctagctatgtatgtgattatatacttgggggccaacttgatggttctagcttcacaaaagaagagttccttgagaaattcaaaaatgctgtttcttcaggatttgatcctgatgttgact

SEQ ID NO: 398504 - DNA, 435 bp, Oryza sativa nipponbare
ccacgcgtccggttggccatgcgcgagtatacaacgtcgatgacttgaaagaggttgtggaagccaacaaggaggaccggcttaggaaagcaatggaggcccaaacaatcatcacccaagaattgaaacggttcgaggcatggagggactcgctggagactgttccgactatcaagaagctgaggtcctacgccgacaggatcagggcttcggagcttgagaagtgcctccagaagatcggcgaagacgccctcaccaagaagatgagaagatccatcgaggagctcagcaccggcatcgtgaacaagcttctccacggcccattgcagcacctgagatgtgacggcagcgacagccgcaccctcgatgagacgctggagaacatgcacgccctcaacaggatgttcagcctcgacaccgagaaggcgatcattg

SEQ ID NO: 398505 - DNA, 283 bp, Oryza sativa nipponbare
ccacgcgtacgcccacgcgttcgcagctatggcggcgtcatagttgaagcctacaagagccacttcaaggggggcggcccccggctagaaaaacggcggctgcaagtgcggcaccagctgctcctgcaccgactgcaagtgcggcaagtgaagtcacgaagcaaccgaacactcgccgccggcgagtcacctaccttaattagtccacaataaaaaccacccatatgagtgtggtttgtgtgtgtgctgattattgctgaattaaacccgtgtgttatcgatt

SEQ ID NO: 398506 - DNA, 324 bp, Oryza sativa nipponbare
ccacgcgtccggtcggacccggagaagaaggagcggctgtagctggcggagatcaagcacgcccgggtcgccatggtcgccttcctcggcttcgccgcgcaggccgccgccaccggcaaggggcccctcaacaactgggccacccacctcagcgacccgctccacaccaccatcttcgacaccttctcctcatcctcttaatttaagctctttcgcgcgcaattcaaacgggatcgatgcgttggtgtgcgttcgcgcgcgctgttttattttgtgatgaccagcgagctgggaggttttggagagaggagaggtcttcctttt

SEQ ID NO: 398507 - DNA, 377 bp, Oryza sativa nipponbare
ccacgcgtccgcccacgcgtccgcccacgcgtccgccacgcgttcgcggacgcgtgggggcgtccactacttataggaggcattggtggaatagctgtttcactgttcttattagcagcttactacaagattctgaacagcttcccttttgtcgctgttggtgctttacttctgtatgtcggttcttaccaggtatcgtttggtccaataagttggctaatggtttctgagatcttcccactccgaacaagaggacgtgggatcagccttgcagtacttacaaatttcggctcaaatgcactggtgacatttgccttttcacccttgcaggaattccttggaccagccaatattttccttctatttggagccatatc

SEQ ID NO: 398508 - DNA, 420 bp, Oryza sativa nipponbare
ccacgcgtccgccgaaatccttgatgcccagagaggtcactggtgagcctgttggtgaagttagagcgggctctggcatgcacgagaggaaggctgaaatggcccggtttgctgatgcgttcattgcactgcctggcggctacgggactcttgaggagttgcttgaggtcatcacctgggcccaactaggaatccacaagaagccggttggccttctgaatgtcgacgggttttatgatccttttctatccttcattgacatggctgtcagcgaaggattcatagcggaggatgcgcggcgcattatcatctcggctccaactgccagggagctagttctgaagcttgaggagtatgttcccgagtacgaggtcggcttggtttgggacgatcagatgccggacagcttcgcgcctgacc

SEQ ID NO: 398509 - DNA, 407 bp, Oryza sativa nipponbare
  unsure (1)..(407): unsure at all n locations
ccacgcgtccgcccacgcgtccgcagctgccatagttgcaagtgagctagagctcagagaagaggaggtggcgaggctggcggcggaggcggcggcggcggagggcggcgacaaccgcggcctgctgctgctgttcgtggtggcgccggcgatcgcctgggttctctacaacatcctgcagccggcgttgaaccagctaaaccgcatgcggtcagactgagagcttgagcttgaagattgcatccgtacatgtgtgtacgtggtgtgttttgagggtggtggagtggagtggagtggtngtgacgtggnatgtggtgtacttatgccttaattaatcctgttcctaatcctctcttcccttgaacaaaaattcagtacagctcttcttcttatttgaattcatctag

SEQ ID NO: 398510 - DNA, 406 bp, Oryza sativa nipponbare
ccacgcgtccgattctgatgtgatcactcaagtcattgaggagtagtacccaaccccgtctcttgtcacccctcctgagtatgcatcagtgggatcaaaaattttctcatgcttcacaacgttcttgaagagcaaggatccaaatgatggttcagagaaggcacttcttactgaactgcaggcactcgaggagcatctgaaagctcatggcccctttatcaacgggcagaacatttcagctgctgaccttagcctggcaccaaagctctaccatctccaggttgctctggagcatttcaaaggctggaagatcccggaagacctaaccaatgttcatgcttacacagaggctctgtttagccgcgaatctttcatcaagacgaaggcagctaaggagcacctgatt

SEQ ID NO: 398511 - DNA, 406 bp, Oryza sativa nipponbare
cgcacgagaaggacttgcagccctggattgctcgagatgatgagcaaggtcagaagatgtggagagtcaaccagcgaatagttaagctgatagcagagcttatgaggaaccacgatagcccagaagcattggtgatccttgctagtgcttcagatcttcttcttcgagcaactgatggaatgcttgttgatggtgaagcttgtactttaccacaattagagctattggaagtaaccgccagagcagtccatctcatcgtcgaatggggagattcaggtgtatccgtcgctgatggcctctccaatctgctgaagtgccgtctatcaaccaccatccgctgtctttcgcaccccagcgcgcatgtccgtgcactcagcatgtccgtccttcgcgacatcttgaacag

SEQ ID NO: 398512 - DNA, 420 bp, Oryza sativa nipponbare
gttcgacccacgcgccacgcgtcggcaccatgtcgagcggcggcggcgcggtgtcggtggtggacccggaggcggcgacggagctggtgcggaagggcgccacgctcctcctcctcgacgtgccccagcgcaccctcctcggcgtcgacacccaggtgttctccgtcgggcccaagttcaaggggatcaagatggtgcctccggggccgcatttcctctactactgctcccccaacaggcacgcaaatgagttcgcacctactgtcggattctttcttactactcacccatctgaggtgattgttcggaagtggcatgcacaggaggagagattaataaaactaccagaagaggagatattctgaagcagtaagacatttcgagtttgacagtcagcttggaccatataatttggattca

SEQ ID NO: 398513 - DNA, 406 bp, Oryza sativa nipponbare
ccacgcgtccgcacaaaaaaccaacccaaccgccgccgcatcgccctcgttagaacgatggccgcgtcggcgctgcaccagaccaccagcttcctcggcaccgcccctcgccgggatgagctcgtccgccgcgtcggcgactccggtggccgcatcaccatgcgccgcaccgtcaagagcgcgccccagagcatctggtatggacctgaccgtcccaagtacctgggcccgttctcggagcagacgccatcgtacctgaccggagagttcccgggagactacgggtgggacacggcggggctatcggccgacccggagacgttcgcgaggaacagggagctggaggtgatccactcgcggtgggcgatgctgggggcgctgggctgcgtcttcccggagatcctgt

SEQ ID NO: 398514 - DNA, 412 bp, Oryza sativa nipponbare
ccacgcgtccgcccacgcgtccgcgccatctctctcagctctcacagctcactgcatcaatggccgcggccaccatggcgctctcctccccggtgatggcccgcgcggcgccgtcgacctcctccgcgctcttcggcgaggcgcggatcaccatgcgcaagaccgccgcgaagcccaagccggcggcgtcgtcggggagcccgtggtacggcgccgaccgcgtcctctacctcggcccgctctccggcgagccgccgagctacctcaccggcgagttcccgggcgactacgggtgggacaccgcggggctctccgccgacccggagacgttcgccaagaaccgggagctggaggtgatccactcccggtgggcgatgctgggcgcgctcggctgcgtcttcccggagctcct

SEQ ID NO: 398515 - DNA, 149 bp, Oryza sativa nipponbare
ccacgcgtccgcgtacgcgtgggcggacgcgtgggcggacgcgtggggtcgagtgattgatcacctgtacctaattaaatggtttattggattattggcggtttatactaaacgaacaaattaataccatacggtctcttcgtgattgc

SEQ ID NO: 398516 - DNA, 409 bp, Oryza sativa nipponbare
ccacgcgtccgcccgtcgccacctcgccccatcaccctctccctccaccacactacaccccgctccactctcaggcaggcaatcagcggcgaggcaccagcccaccggccggcaatggcgtccacctcctgcttcctccaccagtccacggcccgcgtcgccgcgcgcgtcgcctccccgtccccggcgacacggacccacctcctcgtctgccgcgcccagaagcaggacgacgccgacgtctcccgccgcgcggcgctcgcgctgctggccggagcgacggcggcggtgggggtgaaggtggcgcccgccgccgcggcctacggcgaggcggcgaacgtgttcgggaagcccaagacgaacacggagttcatcgcctacagcggcgaggggttcaagctgctgatcc

SEQ ID NO: 398517 - DNA, 389 bp, Oryza sativa nipponbare
ccacgcgtccgcccacgcgtccgcccacgcgtccggtgagttggtgattatctgtagggggtgaaaatggcgcaggcggtggtgccggcgatgcagtgccaggtcggggccgtgcgggcgaggccggcggcggctgcggcggcggcgggggggagggtgtggggagtcaggaggaccgggcgcggcacgtcggggttcaaggtgatggccgtgagcacggagaccaccggggtggtgacgcgtgtggagcatgtggtcaacatggacaccaccctcttcaccgacaagatcatctgcgagtgcattctggcttggaggaactggtattgaccttagaagcatatcaaggacaatatcaaaaccagtggtgggcccctcggagctaccaa

SEQ ID NO: 398518 - DNA, 416 bp, Oryza sativa nipponbare
  unsure (1)..(416): unsure at all n locations
ggttcgccccacgcgtccgcccacgcgtccgagctgcagcgcggtgggcgtgccgagcctgctggcgccgtcgtcgaacaggagccgtctgccggtctgcgcctacgccaccacctgcgggcgcgtcaccatgtacgccgagtggatgccgggccagccacgccccgcccacctngacggctcctctcccggtgacttcgggttcgacccgctgggcctcgccaccgtgccggagaacttcgagcggttcaaggagtcggaggtgtaccactgccggtgggccatgctcgctgtgcctggggtgttggtgccggaggcgctggggctgggcaactgggtgcaggcgcaggagtgggcggcggagcccggcggccaggccacgttcctcggcaacccggtgccatggggcacgctgc

SEQ ID NO: 398519 - DNA, 405 bp, Oryza sativa nipponbare
ccacgcgtccgcttgaaactgagtatgatgaatatgctggtactgatgctagtggtgctgcattctgccgttctgctgcacttatactaatggccttgttgctattgaggcatgctttgtctatctcagacaatgaaggagatgatgatgcttctaccatgttctcgctctttctacttcgagctgctggatttctgctgccatgctatatcatggcttggatattcagtattttgcatcgccggcgacaaagacaggaagcggctgcaattgctgcagcagaggtggcattcatcctgcaatcagcccaaggccatgcccttcagttcaccatcgctccagactcccccgccactccacagcatgagccacagcagcagcagccgcagccgcagccgcagcaat

SEQ ID NO: 398520 - DNA, 396 bp, Oryza sativa nipponbare
  unsure (1)..(396): unsure at all n locations
ccacgcgtccgcacgcgcgcaagcaacacacgtactccgtgcacccctcgtaactgggtcgttcatgctcttaatcccaacgattaattatactggtataatctttgtaatttcgagtactgtacacctatttggcatctgtatatctcgccttaagatatttacggaaccggtttatatactcctttaatttttaattaacggagttcaacatatatataagttacttcatgaaaaaaaaaaaaaaaaaaaaaaaaaaaaaaaaaaaaaaaaaaaaaaaaaaaaaaaaaaaaaaaaaaaaaannnnnnnngggggggnnagaaataaaggaaccaagattacaaacgcgtgcatgcaaaatattaagggggggccctttttaaagaaacaaaatt

SEQ ID NO: 398521 - DNA, 408 bp, Oryza sativa nipponbare
ccacgcgtccgaggtgccggacgacgtgtacatcctggaccagtcggaggaggaagggatcgacctgcctgactcctgccgcgcgggctcctgctcctcctgcgccggcaaggtggtctccggcgagatcgaccagtccgaccagagcttcctcgacgacgaccaggttgccgccggctgggtcctcacctgccacgcctaccccaagtccgacgtcgtcatcgagacccacaaggaggacgacctcatctaatcaatcaagcaagctccatatttataaatctctcgatccatctccatgcgttcttgagtttatcaattaagaatataatgtcgtcgtccctatgctatgcaagcaaagtattacgtacgtatatgttgagcgagataacaaaacacaggcgtgcc

SEQ ID NO: 398522 - DNA, 412 bp, Oryza sativa nipponbare
ccacgcgtccgcccacgcgtccgggaagatggtgtcgggttcggggctgtgcacgcggcgggtggtggtggacgcgcggcaccacatgctggggcggctggcgtcgctggtggcgaaggagctcctgaacgggcagcgggtggtggtggtgcggtgcgaggagatgtgcatctccggcgggctcgtccggcagaagatgaagtacctccggttcctccgcaagcggatgaacaccaagccctcccatggccccatccacttccgcgccccctcccgcatcttctggcgcaccgtccgcggcatgatcccccacaagaccccccgcggcgaggccgccctcgccaacctcaaggccttcgacggcgtcccccctccctacgaccgcaccaagcgcatggtcgtccccgacgcc

SEQ ID NO: 398523 - DNA, 313 bp, Oryza sativa nipponbare
ccacgcgtccgcccacgcgtccggcgctggagcggagcttcgaggtggttaacaagcttgagcctgagcggaaggcgcggctggcgcgcgacctcggcctgcagccgcgccaggtcgccgactggttccagaaccggcgcgcgcggaggaagaccaagcatctcgagcgcgactacgccgcgctccgccattcctacgactccctgcgcctcgatcacgacgcgctccgccgcgacaaggacgccctcctcgccgagatcaaggagctgaaggcgaagctcggggacgaggaggcggcggctagcttcacgtc

SEQ ID NO: 398524 - DNA, 410 bp, Oryza sativa nipponbare
  unsure (1)..(410): unsure at all n locations
ccacgcgtccgcggacgcgtgggtttatctgaagacatctttgttttgaataggattatatcccanaaagcctgggcagcgtggcaggattcgactctcctccgtcgcctgaacacagctatgatctccagctcccaggtgatgaggagtttgccaaggagccacctatactgccacctcagcttgtaatgtctgttcttggtgatactgataactctgaagaacaaactctgaagccaaagcatgttgtcctcaaccacctgtatatcgagaaaggatggggatcgcagtcgctgcttgctcttggagtcactcaccggtttcaatccaagtatgtaagcttcgtgctgtacaagccgctgcgaaggtcatccacggcgaagcgaacaaagaatggggttaaactcatg

SEQ ID NO: 398525 - DNA, 407 bp, Oryza sativa nipponbare
ccacgcgtccgcccacgcgtccgcccacgcgtccgctctgctctagcacctcaccaagcagaaagctagagagctagcaatggcgcccaccgtgatggcctcgtcggccacctccgttgctcccttccaggggctcaaatccaccgccgggctccccgtcagccgccgctccaacagcgccggcctcggcagcgtcagcaacggtggaaggatcagctgtatgcaggtgtggccgattgaaggcatcaagaagtttgagaccctgtcgtacctgccaccgctcacggtcgaggacctcttgaagcagatcgagtacctgctccggtccaaatgggtgccttgcctcgagtttagtaaggtcgggttcgtctaccgtgagaaccacaggtctcctgggtactatgatg

SEQ ID NO: 398526 - DNA, 402 bp, Oryza sativa nipponbare
ccacgcgtccgcttgtaccgcgattgtctgaacttctcggcatacaggtgactaaggcagaagatgttattggaccagatgttgagaaattggtatctgaattgccaaatggtagtgttttgctccttgaaaatgttagattttacaaggaagaggagaagaatgacccatagtttgccaagaagcttgcctccttagcagatctctatgtcaatgatgcattcggaacagcccacagagcacatgcatcaactgagggagttaccaagtttttaaagccttctgtcgcaggattccttttgcagaaggagcttgactaccttgttggagctgtttcaagccctaaacgcccatttgctgccatcgtgggtggttcaaaggtgtcatccaagattggggtta

SEQ ID NO: 398527 - DNA, 402 bp, Oryza sativa nipponbare
ccacgcgtccgcccaaatcttctccaagtccaatcgacctcatttcattcgattcatcgatcgctcggcgcggcttagggtttttggcggcagcgatggcgtcggagaagcacttcaagtacgtcatcctcggcggcggcgtcgcagcgggatatgcggcacgggagttcgccaagcagggtgttaagccaggggagctcgccatcatctccaaggaggccgtggctccttatgagcgccctgctctcagcaagggatacctctttcctcagaatgctgcaagactcccaggatttcatgtgtgtgtcggcagtggaggagagaggcttttgcccgaatggtactcagagaaaggcattgagttgatcctgagcactgaaattgtcaaagctgatcttgcct

SEQ ID NO: 398528 - DNA, 408 bp, Oryza sativa nipponbare
ccacgcgtccgcagcggccgaagcggaagcagcagcagcagcagcggcgacgaagccgtccatagattcttcttcctccccgtcactcctcaccaacaaccatcccccaccctccaagatggacgccgccgtcgaccgcctcaaggatgggttcgccaagttcaagaccgagttctatgacaagaagccggagctcttcgagccgctcaaggccggccaggcacccaagtacatggtgttctcgtgcgccgactctcgcgtgtgcccgtcggtgaccatgggcctggagcccggcgaggccttcaccgtccgcaacatcgccaacatggtcccagcttactgcaagatcaagcacgctggcgtcgggtcggccatcgagtacgccgtctgcgccctcaaggtcgaact

SEQ ID NO: 398529 - DNA, 328 bp, Oryza sativa nipponbare
ccacgcgtccgcccacgcgtccgcccacgcgtccggaacggcaagctgcggctgctgtacgagtgcgcgccgatgagcttcatcgtcgagcaggccggcggcaagggctccgatggccaccagaggatacttgacatcatgcctacggagatccatcagagagtgccgctgtacatcgggagcgtggaggaagtggagaaggtcgagaagttcttggcttgactgcaagtttcatatacgggggtgtttctaaaaaaaaaagtattgtaactaaattataatatatttgtagaaattttcttttctgatggcgaattaattaaaccca

SEQ ID NO: 398530 - DNA, 405 bp, Oryza sativa nipponbare
ccacgcgtccggtgaccccaccacaacaaccactacaacagctacatgaacttcatgcaccagaacgaggaggcaaactactttatatccggatactatcctggcaagcacgccccacgatacaacattcccttcggcacgctcaccaaccggcacaagaaggttgagagtgccaacgagaacaacttcaagcaaacaggagagaggttccgatcatgggatccggcaaggatagacccggtcatcaagaagagaggatcgacacactgtgtgaccctgctctgacccacgagatcagaagcatatggctctcctactggtctgaggctcacaggtatctgggtcagaaactgtctagccgactaagctctaagcctagcatgtaaggagatcgagcagcgcatc

SEQ ID NO: 398531 - DNA, 408 bp, Oryza sativa nipponbare
ccacgcgtccgcccacgcgtccgggcgtccacgctgaccaacgtcggcctgtctaccccggcggcggcggcgtcgtccctcgttaggccggtcgccggagctggacgcgtggtgtttccccgtgttggccgcggcgggttcgcggcggtgagggcgagcgggccggcgacgccgccggacatctcggacaagatgtcggagagcatcgacaaggcgaaggaggcgtgcgcggaggacacggcgagcggcgagtgcgcggcggcgtgggacgaggtggaggagctgagcgcggcggcgagccacgcgcgcgacaagctcaaggagacctccgacccgctcgaggcctactgcaaggacaacccggagaccgacgagtgccgcacctacgacaactgattcttaccatta

SEQ ID NO: 398532 - DNA, 408 bp, Oryza sativa nipponbare
ccacgcgtccggcgacgggcaagatggacgtgctctccgagcagcagatggtcgattgcgaccatgagtgtgattcatcagaacctgattcatgtgatgctggatgcaatggtggattgatgactaacgccttcagctatcttttgaaatccggtggccttgagagtgagaaggattacccctacactgggagggatggcacctgcaaatttgacaagtcgaagattgttacttcagttcagaacttcagtgttgtctctgtcgatgaggatcagattgctgccaaccttgtcaaacatgggccacttgcaattggcatcaatgctgcgtacatgcaaacatacattggtggtgtttcgtgcccgtacatctgtggcaggcaccttgatcacggtgttcttctcgttg

SEQ ID NO: 398533 - DNA, 379 bp, Oryza sativa nipponbare
ttcgagctggactcgctggaccagaacctggccaagaacaacgccggcgagatcatcggcacccggttcgagaccggcgaggtgaagtccaccccgttccagccctacaccgaggtgttcggcctccagcgcttccgcgagtgcgagctcatccacggccgctgggccatgctcgccaccctcggcgccctctccgtcgagtggctcaccggcgtcacctggcaagacgccggcaaggtggagctggtggatgggtcgtcgtacctggggcagccgctgccgttctcgatctcgacgctgatctggatcgaggtgctcgtcatcggctacatcgagttccagcgcaacgcggagctggacccggagaagaggctgtacc

SEQ ID NO: 398534 - DNA, 378 bp, Oryza sativa nipponbare
  unsure (1)..(378): unsure at all n locations
ccacgcgtccgacggcggctgcaagtgcggcaccagctgctcctgcaccgactgcaagtgcggcaagtgaagtcacgaagcaaccgaacactcgccgccggcgagtcacctaccttaattagtccacaataaaaaccacccatatgagtgtggtttgtgtgtgtgctgattattgctgaattaaacccgtgtgttatcgattaattaagcagctggtcgcttcggcgactatgcgtgtatcaacgtatgaatttgtgtgatgtgatgtacccgtgctattctcagtgaaattaatcaatcgtgtattcgtgtggtttgcctagttnaaaaaaaataaataaaaaaaaaaaaaaaaaaaaaaaaaaaaaattgggatat

SEQ ID NO: 398535 - DNA, 407 bp, Oryza sativa nipponbare
ccacgcgtccgcccacgcgtccgcccacgcgtccgcgccgtgcaccgcctctcacaatgtcgaccgccgccgccgccgccgctgcccagagctggtgcttcgccactgtcaccccgcgctcccgcgccacagtcgtcgccagcctcgcctccccatcaccgtcctcctcctcctcctcctccaacagcagcaacctcccggcccccttccgcccccgcctcatccgcaacacccccgtcttcgccgcccccgtcgcccccgccgcgatggacgccgccgtcgaccgcctcaaggatgggttcgccaagttcaagaccgagttctatgacaagaagccggagctcttcgagccgctcaaggccggccaggcacccaagtacatggtgttctcgtgcgccgactctcgc

SEQ ID NO: 398536 - DNA, 403 bp, Oryza sativa nipponbare
ccacgcgtccgggcgcttttatttgcgaacccttttgtttaatcctaaaaaagaaaacgagtcctttagattagatactttcttctttttttagtaaattggtatttgcttctgcaattccaattatatcaatactttactcctaatttattactcctagagttttctatttatggggacagacaataccccaccccaggaatagctgatttgaggatgatcaatttagaggatatgttcgccgtcttgcttcccgccctttgtttagggcagtggaaagtatttttccttttattttaggaattttgggaacatttcaacaaaggaggtctttcacaggtcaaacgagatctaagacttaatctaaaagaaattactaaattgaatctatttctattaaaaa

SEQ ID NO: 398537 - DNA, 405 bp, Oryza sativa nipponbare
ccacgcgtccgtgccttttgggaaagaatgggtggcgattcattatctacggatttgttgttctttgctttctactatcagcaaaacacataccagcaatttttaagtgccagagaactaaagaagcaatcgtggagatttcacagaaagtacaatacttggttccaacggcacgtggagccacaagttacaactgatgagtatgagcggggatcttatgtgtactttgatttccatgtcatagatgacggcacaggatcaggatggtgtcagagaatcaagaacgacttcacatttgagtacaacttccttgaggatgagctgtcagtacagacaaattagagagccaggatattagggctaatcaaatcattttcaccattgtgaatcttgtaacttttagaa

SEQ ID NO: 398538 - DNA, 411 bp, Oryza sativa nipponbare
ccacgcgtccgcccacgcgtccgcccacgcgtccgcaactttggccgctgcatactccatctctcgggctgtcacaattccagtgatgtgtgcatctgggctaagctcagtgactgcaccaatggcagtaactgcaggagctgccggtgtgggagttggttctgctgtcaacaaacttaacgacatcgtcgcaatggtcgctgaggtgaaaagtattgctgaagcattgggtttgccttcacggaacgtgtctagcaacttgagaacagttcaccattaggggctagttacctcctcttctagacaaactctagcgatcaataatattatcaaaagatgcagtagcttgacatttcacagtctactgcctttcgtaacatatatgcaaagcaatgcagaggtgccaattgg

SEQ ID NO: 398539 - DNA, 54 bp, Oryza sativa nipponbare
ccacgcgtccggtacactaagaagatgaagaagaagatgatgtttttgcaataa

SEQ ID NO: 398540 - DNA, 406 bp, Oryza sativa nipponbare
ccacgcgtccgcggacgcgtgggcggacgcgtgggcggacgcgtgggattgaggagcgcaatttcgctacggttggtcttgataactggcagaaagcttgctatgtgcccacatcatctgacaacatgatcatcaccttcagaaactggttcagaaagtactgcaagcatcagattggctgggcaaccccaataactaatcagctgccaccaactcctagcaaagatcagctcttggacaggtattggtcgcacgtcatgcagtgcacgagctgcagcggtgcactgaagaagatgaaggcgctggaggtcgccctgcaggtggcgtcggtcgccgtcgtcgggttcctcgccgtcgccaaggggacggtggtcacgtcggttgtgcagagatccgccgtcgtggc

SEQ ID NO: 398541 - DNA, 411 bp, Oryza sativa nipponbare
ccacgcgtccggtaccaactctaattgcttggctaaaaagaaggtcgagcattgtcctgatggccgcgtggtggaaatcatttacagaggaacacataatcatgaaccgccacaaaagaccagatttgtgaaagagagagtggctcatattactgcttcctctggagatgatgaaaccttgggacttgtgaacaatgaaattatagaatccccgtcaccgggatgtaaattagagccgggtgctgtctctgaagcttctgaacagcagcttttttgctcaagtgattgtgaaggtgatgctggtaacaaatcagaagatgatcatcctagcacagagcctcagccaaaacgaagcagaataattgaaactagcacacctttgactccagttctcagaactgttagagagca

SEQ ID NO: 398542 - DNA, 410 bp, Oryza sativa nipponbare
ccacgcgtccgcccacgcgtccgcctgactatgcaacttgtgtcaagatctccactgatgcatccatcaaggagatgatccctcctggtgctcttgttatgctcaccccacttatcgtcggaattctgttcggcgtcgagaccctctctggagtccttgctggtgctctcgtctctggtgttcagattgccatctccgcatcaaacactggcggtgcttgggacaatgcaaagaaatacattgaggctggagcttcagagcatgccaggacccttggtcccaaaggttccgatccccacaaggcggccgtcatcggtgacaccatcggagaccctctcaaggacacttcaggaccctctctcaacatcctcatcaagctcatggcggtcgaatccctcgttttcgccccc

SEQ ID NO: 398543 - DNA, 416 bp, Oryza sativa nipponbare
ccacgcgtccgcggacgcgtgggtcgagctcgccctcgtcggcttcgccgagcaccgccgcttccaggactggtacacgccgggctccatggggaagcagtacttcctcggcctcgagaagtacctcgccggctccggcgagccggcctaccccggcggcccgctcttcaacccgctcggcttcgggaccaagagcgaggcggagatgaaggagctcaagctcaaggagatcaagaatggcaggctcgccatgctcgccttcctcggcttttccgtccaggcgctcttcaccggggttggccccgtgcagaacctgcttgatcacctcgctgatcccgtccacaacaacatcctcaccagcctcaagttccattagagatgccatcaactacgtatttaattaattacgagttttt

SEQ ID NO: 398544 - DNA, 416 bp, Oryza sativa nipponbare
ccacgcgtccggtggatgccgggccagccacgccccgcccacctcgacggctcctctcccggtgacttcgggttcgacccgctgggcctcgccaccgtgccggagaacttcgagcggttcaaggagtcggaggtgtaccactgccggtgggccatgctcgctgtgcctggggtgttggtgccggaggcgctggggctgggcaactgggtgcaggcgcaggagtgggcggcggagcccggcggccaggccacgtacctcggcaacccggtgccatggggcacgctgccgacgatcctggtcatcgagttcgtcgccatcgccttcgccgagcaccagcgcaccatggagaaggaccccgagaagaagaagtaccccggcggcgccttcgaccccctcggcttctccaaggaccccgt

SEQ ID NO: 398545 - DNA, 406 bp, Oryza sativa nipponbare
ccacgcgtccgcccacgcgtccgccgccgctgagctctatctatctactagttagtttagtcgtctcgagggtaaattgagctttgtgtgcggttttgaggggagtacatcggcatgaggatccagtgcgacgcgtgcgaggccgcggcggccacggtggtgtgctgcgcggacgaggcggcgctgtgcgcgcgctgcgacgtctagatccacgccgccaacaagctcgccagcaagcaccagcgccttccgctcgacgccgcgctccccgccgtcctcccgcgctgcgacgtctgccaggagaaggcggcgttcatcttctgcgtggaggacagggcgctcttctgccgggactgcgacgagcccatccacgtcccggggacgctctccggcaaccaccagcgct

SEQ ID NO: 398546 - DNA, 406 bp, Oryza sativa nipponbare
ccacgcgtccgcaaaacggcttttgtcgataatacgggagaacagcctccttccggactttgtcctctgcatcggtgatgaccgctccgatgaagacatgttcgaggtgatcaccactgcagcacaggacaactgcctaagcccagacgccgaggtcttcgcctgcaccgttggtcgcaagcccagcaaggccaagtactacctggatgacctggccgacattgtgaggctgatccagggcctcgccaatgtctctgacgagatgcacagcacaatgcccacacctgtcgacgccgcagacaccgccctgaggtgaaaacacacctgccccagctccacccccaataaggcatgccatcttggaagaagggatcatcgatcgctgctccccccaggtgtacatact

SEQ ID NO: 398547 - DNA, 400 bp, Oryza sativa nipponbare
ccacgcgtccgcgcatcaccatgcgccgcaccgtcaagagcgctccccagagcatctggtatggacctgaccgtcccaagtacctgggcccgttctcggagcagacgccatcgtacctgaccggagagttcccgggagactacgggtgggacacggcggggctatcggccgacccggagacgttcgcgaggaacagggagctggaggtgatccactcgcggtgggcgatgctgggggcgctgggctgcgtcttcccggagatcctgtccaagaacggggtgaagttcggggaggcggtgtggttcaaggccggcgcgcagatcttctccgagggggggctcgactacctggggaaccccaacctggtgcacgcgcagagcatcctcgccatctgggcggt

SEQ ID NO: 398548 - DNA, 408 bp, Oryza sativa nipponbare
ccacgcgtccgggcaacgtcagcaatggcggaaggatcaagtgcatgcaggtgtggccaattgagggcatcaagaagttcgagaccctatcgtacctgccaccactcaccgtggaggatcttttgaagcagatcgagtacctgcttcgatccaagtgggtgccttgcctcgagttcagcaaggttggattcgtctaccgtgagaaccacaggtctcccgggtactacgatggcaggtattggaccatgtggaagctgcccatgttcggctgcaccgatgccacccaggtgctcaaggagctcgaggaggccaagaaggcctaccccgatgcctttgtccgtatcatcggcttcgacaacgtcaggcaggtgcagttgattagcttcatcgcctacaagcccccaggtt

SEQ ID NO: 398549 - DNA, 412 bp, Oryza sativa nipponbare
ccacgcgtccgagcagcagcagtagctgagcttgaagcagcagagcgaggtagacatggccgccgccaccatggccctctcgtccccggcgctggccggcaaggccgccgcgaaggtgttcggcgaggggcgcatcaccatgcgcaagtcggcggcgaagcccaagcccgccgcgtcggggagcccgtggtacggcgccgaccgcgtgctctacctcggcccgctctccggcgagccgccgagctacctgaccggcgagttccccggcgactacgggtgggacaccgcggggctctccgccgacccggagacgttcgccaagaaccgggagctggaggtgatccactccaggtgggcgatgctcggcgcgctgggctgcgtgttcccggagctcctcgcccgcaacggcgta

SEQ ID NO: 398550 - DNA, 410 bp, Oryza sativa nipponbare
ccacgcgtccgcccacgcgtccgcccacgcgtccgtccactcctccgtgctctgcgtcgccatggccgcgcgccccgttagtagcaccacctccacctgccgcccctgccgcccggcgcaggccgctgcttccaagccctccacctcctcgtcccctggtacgggtgtgctcgtgggtgtgccccgcgagcgcgggagctcggtttccaaggcagcgattcgtggagcgagattggaggccgcggcgaggtgctctctcgtccgccagcgccccatgctgctggcgaccgtggcggtggggagtctggttgctgctggcgctgcaaatgctacagaaattggtgattctctgttagggtcatctggacttgctttggctgaccttagcattggagattggtttggaaatt

SEQ ID NO: 398551 - DNA, 417 bp, Oryza sativa nipponbare
ccacgcgtccgggctcttcaaacgtaacatttgcgactatgttggtgataatctcaataaaggatttgaatcttttatagagaaaagagatttgggttcagaaggatttggtgatcttcttgcatgcataagaaattcaactgtacctcttcagaacatacattttgtgacataccgcaacaatcttaacaagatattggccacggcttatctaagagaaccatggaagatgggtgtgcacaaaagaaatggtgttgtatacctggacgtccataagctccccgaaagaccacaaagtgaggttgaacgccggagatgttattggggatattcttttgaaaatcttgcaactgagaattccattgatgaggatggaagaggtattgatgcaaatgtagagttctgtgctgtaataat

SEQ ID NO: 398552 - DNA, 412 bp, Oryza sativa nipponbare
ccacgcgtccgcggacgcgtgggccgtggtacggcgccgaccgcgtgctctacctcggcccgctctccggcgagccgccgagctacctgaccggcgagttccccggcgactacgggtgggacaccgcggggctctccgccgacccggagacgttcgccaagaaccgggagctggaggtgatccactccaggtgggcgatgctcggcgcgctgggctgcgtgttcccggagctcctcgcccgcaacggcgtcaagttcggcgaggcggtgtggttcaaggcggggtcgcagatcttcagcgagggcgggctcgactacctcggcaacccgagcctgatccacgcgcagagcatcctcgccatctgggcggtccaggtggtgctcatgggcgccgtcgaggggtaccgcatcgc

SEQ ID NO: 398553 - DNA, 378 bp, Oryza sativa nipponbare
ccacgcgtccgcgcaacagctacaaacgcccacatcacacgcagaaatccgcatcaacagccagccatggcgtccacgctgaccaacgtcggcctgtctaccccggcggcggcggcgtcgtccctcgttaggccggtcgccggagctggacgcgtggtgtttccccgtgttggccgcggcgggttcgcggcggtgagggcgagcgggccggcgacgccgccggacatctcggacaagatgtcggagagcatcgacaaggcgaatgaggcgtgcgcggaggacacggcgagcggcgagtgcgcggcggcgtgggacgaggtggaggagctgagcgcggcggcgagccacgcgcgcgacaagctcaaggagacctccgac

SEQ ID NO: 398554 - DNA, 395 bp, Oryza sativa nipponbare
ccacgcgtccggccaggcgtccgcccacgcgtccgcccaattcgagccgaggttgagctgagctgagctctctcagagacagggcgatgaacatcttgaaccagccgatcaaccctggcggccacccggcgttcccggcggcaagggagaccggtcagctgatgccggcgtcagtccgcttcgacggcctgtcgacgcagcagagcacggccgccgccgtggggcgggcgcacgccggtcagtccccgcggtggcaggcgcagactctgcgccggccaagcagctacgtcggcgtcgagcacgacgagccggcggacgccgccggcgccgtcgcgctggcgccgttccagccgctgacgctcgacttcctgcggtcgctcctggacaggaacgct

SEQ ID NO: 398555 - DNA, 409 bp, Oryza sativa nipponbare
ccacgcgtccggcagccgcaccctcactccctcctctctcctctcctcccccccacggcggcggcggcggcggcggcggcaggatggcggattcgacggcgaggacggtgaaggacgtgaaccctcatgagttcgtcaaggcctactccgcccacctcaagcgctccggcaagatggagctccctgagtgggttgacatcgtgaagactgcgaggttcaaggagctccctccttatgatccggactggtactacacgagggctgcctcgattgcaaggaagatctacctgaggcagggtattggtgtaggtggcttccagaagatctatggtggccgccagaggaatggctcacgttccccgcacttctgcaagagcagcggcgctatctcacgcaacatccttcagca

SEQ ID NO: 398556 - DNA, 412 bp, Oryza sativa nipponbare
ccacgcgtccggcgagacaccgatagctagctaactaatcttccccttcgtctccggcattattccacttggacgaacactagctcaccggccggccatggcgtcttcttccgttctgatcaagctgctcgtcgtcgtcggctgcgccgccgcggcctccgcggcgacgctcaccgtgggtggtagctccgggtggacgcttggccagaactacgatacttgggcaagtggccaaaccttcgcggttggagacaagctcgtgttcagcttcgttggggcgcacacggtgacggaggtgaacaagaacgattacgacaactgcgccgtcgcaagcaactcgatcagctcgaccagcaccagcccagccaccctcgacctcgccgccgccggcatgcactactacatctgcacc

SEQ ID NO: 398557 - DNA, 205 bp, Oryza sativa nipponbare
ccacgcgtccggatagcataagcaacacaagggattaactcatcactcacttagctaattaaatcttcgaccatgtcggacaagtgcggcaactgcgactgtgctgacaagagccagtgcgtgaagaaaggtaccagctatggcgtcttcatagttgaagccgagaagagccacttcgaggaggtcgccgccggcgaggagaacg

SEQ ID NO: 398558 - DNA, 171 bp, Oryza sativa nipponbare
ccacgcgtccgcaatacttctagcagatatggcacatatcagtgggcttgtcgcagctggtgttgttccatctccttttgattatgcagatgtagtgactaccactactcacaagtcactccgtggaccacgtggagccatgatcttttacaggaagggggtgaaaggagt

SEQ ID NO: 398559 - DNA, 405 bp, Oryza sativa nipponbare
ccacgcgtccgggcggccaacccgggcggtgtgggtagcatgtgtgaccttgtggcccgaacgggtcggcatcagcagcggtacgaggatggccggcggctggtggccgcatgcataccgctcaggtatagaactagtaatgatgaaacttctgatgatgaaccaaagaaaattgttgaagttctcatgataaactctcaaaggggtccaggtctcctgtttccaaagggaggatgggagaatgatgaaactgttgagcaggcagctgctcgagaggctgtagaagaagctggagttcgtggagatatagtgcaatttctgggtttctacggcttcaaaagcaagacgcatcaagatgcgtgctgccccgagggtatgtgcagagccgcggtgtttgcgctgcat

SEQ ID NO: 398560 - DNA, 411 bp, Oryza sativa nipponbare
ccacgcgtccgccgacccggagacgttcgccaagaaccgggagctggaggtgatccactcccggtgggcgatgctgggcgcgctcggctgcgtcttcccggagctcctcgcccggaacggcgtcaagttcggcgaggccgtgtggttcaaggcgggctcgcagatcttcagcgagggcgggctcgactacctcggcaacccgagcctgatccacgcgcagagcatcctcgccatctgggcggtgcaggtggtgctcatgggcgccgtcgaggggtaccgcatcgccggcgggccgctcggcgaggtcgtcgacccgctctaccccggcggcgccttcgacccgctcggcctcgccgatgaccccgaggcgttcgcggagctcaaggtgaaggagatcaagaacggccgcct

SEQ ID NO: 398561 - DNA, 416 bp, Oryza sativa nipponbare
ccacgcgtccgccaaaacactaggctgggatcccaaggagggctagagccatcttgatgtaatgcttagatcattgctcttgattgcccttgtcaaacttggacatgatgagactataaatgagggagttaggcggttccatatcttcataaaagaccgcaaaactaacattcttcccccagacactagaaaggcttcatatcttgctgtgatgcggactgttactacctccagcagagctggttatgatgccctcctgaaaatctacagagaaacagctgaagctcaggagaagtcacgcatcttaggttcattgtcttcatgcctggataaggatattgttcttgaggcactaaacttcatgcttaccgatgaggtacggaatcaagatgcattttatgtccttggtggtatca

SEQ ID NO: 398562 - DNA, 418 bp, Oryza sativa nipponbare
ccacgcgtccggtcaagtcttatctgccttcctccctcctctcgccttccgcctcgcgtgcgctccaccaccgaaaaaaaggacaggttccacataaagaccaacgagtaaaagcttgatctgtccggtgccaaccaatcaacaaacaagtttcatgtctgatctcgacgttcagcttccatctgccttcgatccgtttgctgaggcaaatgctgaggactccggcgctggccctggagcaaaggattatgtgcatgtgcgcatccagcagcgcaacggcagaaagagtctaactactgttcagggcttaaagaaggagtacagttacaacaagatcctcaaggatctgaaaaaggagttctgctgcaatggtactgtagtccaagatccagagcttggccaggtcattcagcttcaa

SEQ ID NO: 398563 - DNA, 416 bp, Oryza sativa nipponbare
ccacgcgtccgaagaagctcagctcctcctcctctcgcatggcagccatggccaccaccgcgtccagcctcctcaagacctccttcgctggcgcgcgcctccccgccgccgcccgcaaccccaccgtctccgtcgcgccgcgcaccggcggcgccatctgcaactccatctcgtcgtcgtcgtccactcccccctacgacctcaacgccatcaggttcagccccatcaaggagtccatcgtgtctcgcgagatgacccggcggtacatgaccgacatgatcacctacgccgacaccgacgtcgtcgtcgtcggcgccggctccgcggggctctcctgcgcgtacgagctctccaaggacccctccgtcagcgtcgccgtcatcgagcagtcggtgtcccccggcggcggcgcgtgg

SEQ ID NO: 398564 - DNA, 411 bp, Oryza sativa nipponbare
ccacgcgtccgcccacgcgtccggccgccgccaccatggccctctcgtccccggcgctggccggcaaggccgccgcgaaggtgttcggcgaggggcgcatcaccatgcgcaagtcggcggcgaagcccaagcccgccgcgtcggggagcccgtggtacggcgccgaccgcgtgctctacctcggcccgctctccggcgagccgccgagctacctgaccggcgagttccccggcgactacgggtgggacaccgtggggctctccgccgacccggagacgttcgccaagaaccgggagctggaggtgatccactccaggtgggcgatgctcggcgcgctgggctgcgtgttcccggagctcctcgcccgcaacggcgtcaagttcggcgaggcggtgtggttcaaggcggggt

SEQ ID NO: 398565 - DNA, 327 bp, Oryza sativa nipponbare
ccacgcgtccgctcatggactaagccgtactccagggagtacgctgcgttccctgcagcgtggcttcggggcgccaagttctggccaacaacatgtcgcgtggacaatgtgtatggggatcgcaacctcatctgcactctgcaacagggatcccaagtcgcagaagaagctgcagctgctaccgcatgatcttccaataatcacccagatttgtaaaacagcaccaagaagtcataatgcttcctgtaggagggaagcatgctctcttctcgttcagcttctgaacttgtatatagctttgtgagttgtgacagcttcatgattctc

SEQ ID NO: 398566 - DNA, 422 bp, Oryza sativa nipponbare
ccacgcgtccgcccacgcgtccgcccacgcgtccgcgaatccagcagcagaagcagcagcagcagctcagccgccgccgatggcgtccacgatcatggccccaacctcccgcgtcctcgccgccaagacccccttcctcggccatccccgcccctccaatgcccccgtccgcgacatcgccgccgccgccaccggccgcatcaccatgagcaaggagctgtggtacgggccggatagggtgaagtacctggggccattctcggcgcagacgccgtcgtacctgaggggcgagttcccgggcgactacgggtgggacacggcggggctctccgcggacccggaggcgttcgcgaggaacagggcgctggaggtgatccacggccggtgggcgatgctcggcgcgctgggctgcatcacgccgg

SEQ ID NO: 398567 - DNA, 367 bp, Oryza sativa nipponbare
ccacgcgtccggtcttcttgctggtgtgttcgaggaggaggaggaggaggagaagctagcggcggcggcggcaatggcgacgagcgggctgaggagctgcagcgcggtgggcgtgccgagcctgctggcgccgtcgtcgaacaggagccgcctgccggtctgcgcctacgccaccacctccgggcgcgtcaccatgtccgccgagtggatgccgggccagccacgccccgcccacctggacggctcctctcccggtgacttcgggttcgacccgctgggcctcgccaccgtgccggagaacttcgagcggttcaaggagtcggaggtgtaccactgccggtgggccatgctcgctgtgcctggggtg

SEQ ID NO: 398568 - DNA, 406 bp, Oryza sativa nipponbare
ccacgcgtccgcaatatttgttggtgatctggctgttgatgttacggatgaaatgttgatggatctttttgccaaaaaataccgatctgtgaaaggagctaaagttattattgatgcaaacaccggacgttctaggggctacggctttgttaggtttggagatgataacgacaaaactcatgcgatgactgaaatgaatggtgcatattgctctacccggccaattcgtataggacctgcaacacctagaagatcttcaggtgattctggctcctcgccaccaaggcagtcagatagtgactcaactaacaggacgatatatgttggcgggcttgatcccaacgctactgaagatgaactaaggaaagcatttgctaagtatggtgatcttgcctctgttaaaatt

SEQ ID NO: 398569 - DNA, 408 bp, Oryza sativa nipponbare
ccacgcgtccgccacgcgtccgggcgttcatccacggcggaagcgggggcggcgacgccgacgccgaccacccgctcggcatcttctccgccgccgacctctccggcttcggcttcgcggactcgagcaccatcacagggggcattcccaatcacatatggccccagtcccagaacctgaacgcacggcatcctgcggtctccacgacaattgagtcgcagtcatcaatctgtgcagcaagtcccacatcagctaccaatctgaacatgaaggagagccaaactctgggaggcacaagtggttcggattctgaaagtgaatcgctgttggatatagagggtggtccatgcgaacaaagcacgaacccgttggacgtgaagagagtgagaaggatggtgtccaatcggg

SEQ ID NO: 398570 - DNA, 406 bp, Oryza sativa nipponbare
ccacgcgtccgaggattcatctgtgttggctcaactgggatggccagatatgcggataccaatcttatacaccatgtcttggccagacagaatctattgctcagaggtcacctggccccgactagatctttgcaagctgggttcactgacattcaaagctcctgacaatgtgaaatacccgtcgatggatctcgcctatgcagctggaagagctgggggcaccatgacaggagttctgagtgctgctaatgagaaggctgtggagttgttcatcgatgaaaagatcgggtacctggacatcttcaaggtggtggagctgacatgcgacgctcatcggaatgagctagtaacaaggccatcactggaggagatcatacattatgatctgtgggcgagggagtatgct

SEQ ID NO: 398571 - DNA, 409 bp, Oryza sativa nipponbare
ccacgcgtccgcccacgcgtccgcccacgcgtccgcccacgcgtccgcatcaagcaggtcctgaaggttttcccatatccaataaacattacaacagttcaatttgctgttggtactgtcgttgctttgttcatgtggatcactggtatccttaggagaccaaagatttctggtgcacagctctttgccatccttcctctagctgtggtccatactatgggcaatcttttcactaacatgagcctggggaaggttgctgtgtcattcacacataccatcaaagctatggaacctttcttttctgttctcctctctgcaattttccttggcgagttgcctacagtttgggtgatactttcacttcttccgattgttggtggtgtagcattggcatctcttactgaggctt

SEQ ID NO: 398572 - DNA, 416 bp, Oryza sativa nipponbare
ccacgcgtccgcccacgcgtccggcgcgaggccggcggctccagtcggcatggcgcttgtgttgcattgcggaagtggcaacaaaaatgcctttaaggcacttattgctgcagagtacactggagtcaaggtcgagctgaccaagaattttgagatgggtgtctcaaacaagacccctgagtttctcaagatgaacccccttgggaagattcctgttctggagactcctgaaggtgctgtttttgagagcaatgctatcgcgcgctatgttgctcgcttgaaggacaacagctctctttgtggttcttctcttatcgactattctcagggtatcagctgtgccgacgtagcagatatctgtgtcaaggcattgcacgattcaacagcaagaaacaaaagctttgatgtgtgctatg

SEQ ID NO: 398573 - DNA, 414 bp, Oryza sativa nipponbare
ccacgcgtccggggtagttcgcgagtcaaaatacattgcggcacttaaggagaaagccgaacaacgtaaacgagagcaggacattatttatgagaggaagcttcaaaaagagaggagtaaggaagaccacctatatggtgacaaagacaaatttgttacatctgcctacaggaagaaacttgaggaggagcggaaatggctggaggaagagaagcggcggcagcttcaagaagaaaaggaagatgttactaagaagaaagacttgagtgatttttactttggtcttagtaagaatgttgctttcggtgcacagacacatgacaatacaaaacatgctaaacctgaaaagttagacgagaaagttcaagatgctaaaactagcaaggttggtgctgaagtatccgatcgctctcc

SEQ ID NO: 398574 - DNA, 407 bp, Oryza sativa nipponbare
ccacgcgtccgcccacgcgtccgccacgcgtccgtagcagtaggattaattcagtggctagcgtagcttgattagttggtttaattagttggagagtaaagaagatgttgggagtgttcagcggcgacgtggtggaggtgccggcggagcttgtggccgccggcagccggacgccgtcgccgaagacgcgggcgtcggagctggtcagccgcttcctcggcggcgccgagccggccgtgtccgtgcagctcggcgacctcggccacctcgcctactcccatgccaaccaagcccttcttcgcccaaggtcatttgcagcaaaagatgacatcttttgcctgttcgagggagtcctggacaatcttggcaacctgaaccagcagtttggtctgtccaagggtgccaat

SEQ ID NO: 398575 - DNA, 438 bp, Oryza sativa nipponbare
ggtaccgattcggggttcgacccacgcgtcacgcgtcccgtgacccgtcgcgtgggcggacgcgtgggctgacgcgtgggcggacgcgtgggtgcaaagaaaaggcctgtgtcaaggagagggtagtagcaccttgctctcctttgccttcagagaaaccggaagcaatggcgtctgctactctcctcaagtcatctttccttcccaagaagtctgaatggggtgccacccgccaggctgccgcccccaagccggtgactgtctccatggttgtccgcgctggtgcctacgacgatgagcttgtcaagaccgcgaaaaccattgcatcaccaggaaggggtatccttgccatggatgagtcgaacgcgacctgcggtaagaggcttgcgtcaattggccttgagaacaccgaggccaaccgccaggcttaccggaccc

SEQ ID NO: 398576 - DNA, 407 bp, Oryza sativa nipponbare
  unsure (1)..(407): unsure at all n locations
ccacgcgtccgccgcaccgccgtcagcccgctgctcctcggcatctaggtcggcctcgcccacggctacctcctcgtcgggcccttcgcgctcaccggcccgctccgcaacacgccggtgcacggccaggccggcgccctcggcgccgcatgcctcgtcgccatcctcagcgtctgcctcaccatgtacggcgtcgcctccttcggcgagggcgagccgtccacggcgccgacgctgacgctcaccggccgcaagaaggaggccgacaagctgcagaccgccgacggctgggccaagttcaccggcggcttcttcttcggcggcatctccggcgtcctctgggcctacttccttctntacgtgctcgacctcccgtacttcttcaagtagatcttttgtttgtaagt

SEQ ID NO: 398577 - DNA, 337 bp, Oryza sativa nipponbare
ccacgcgtccggtcgccgaccccgtcgccaacaacgcctgggcatacgccaccaacttcgtccccggcaagtgagcacaacgacacgatcgagatggtgccaaccaacgtaccatgtgtacacttgtagtagccacgcaccgaccctgcagttgcagttgcagcagtgcatgtatgtatgtaccttaattgtgtgtgtgtgtgtgatcgatcgaggagatttctagcttaattaatttctgtctgtcatcatctttgcttctttggatcgagatttaatgtaagccgcaggccgcatccaagggatgatcgaattaatgatgtatcgttattatagg

SEQ ID NO: 398578 - DNA, 406 bp, Oryza sativa nipponbare
ccacgcgtccgtaatgatcctgttgatgttgttgagattggtgtaagacgtgctaacattggagatgttcttaaggtaaaaccgttggcagctttagcaatgattgatgagggtgagcttgactggaaaattgtggctatttctttggatgatcctaaagcatctcttgtgaatgatgtggatgatgttgagaagcattttccgggaacattgactgccatcagagactggttcagggactacaagataccagacggtaagcctgcaaacagatttggtctgggcaacaaacccacaagcaaggaatatgctctgaaggtcatagaagaaaccaacgaatcatgggagaaattggtgaaaaggaatatccctgctggagagctctcactagcctaatcttgtccat

SEQ ID NO: 398579 - DNA, 427 bp, Oryza sativa nipponbare
ccacgcgtccgacgccccagttccccgctctctccccctcacctcctcatcctcctcctccgctgccgccgccgcctccgccatgggcagggggaagttcaagggcaagcccaccggccgccgcaacttctccacccccgaggagatcgctgctggtacttcaggtcgtccacgcacatttaagaagaatttagctgaggaggaaaaggaggaggaagaagacgacatataagaatctgaagaggaagaatctgaagatgagtctgaagggaaggctaaacatacaggaactgaaggtcttattcagattgaaaacccgaacttagtgaaagcaaagaatataaaagccaaggaagttgatctcggaaagacaactgagctctcgaggcgtgaaagagaggagatcgagaaacagaaagcttatgag

SEQ ID NO: 398580 - DNA, 333 bp, Oryza sativa nipponbare
ccacgcgtccgcccacgcgttcgaaaaaaaaatataaaaaaaaaaggaataaacaaatagactcacttagctaattaaaaaataggagcatgtcgagaaaagcgacggcaacgtgaaactgtgctgacatgagcttgttcgtgaagaaaggtaccagctgtggcgttcgcgtagtcgaagcttagaagagccacttggaggaggttgtcgtttgttaggtgaacagcaaatgcaattgcggcgcctgctgttcctgcacccactgcgggaaaggccgggggagtcccgaagtaaccgagcactcgccgcctgcgagttacctactttggttag

SEQ ID NO: 398581 - DNA, 383 bp, Oryza sativa nipponbare
ccacgcgtccgcaccactgctagcttgggaagaggaggaggagcttgagcttggagagagacaacaatggcggctcaggctcttctctctgggaggcagctgctggggaggccattgcaatcttcagtctccaggtcttcttcctccaggaaggcacccttcatggtcagggcagaggccactccccctgccaagcaaggtgctgacaggcagctgtggttcgcatccaagcagtccctgagctacctggatggcacgcttccgggagacttcgggttcgacccgctggggctatcggacccggaggggaccggtgggttcatcgagccacggtggctggcctacggcgaggtgttcaacggccggacggcgatgatgggcgt

SEQ ID NO: 398582 - DNA, 372 bp, Oryza sativa nipponbare
ccacgcgtccgaagaaagcataagcaacacaagggattaactcatcactcacttagctaattaaatcttcgaccatgtcggacaagtgcggcaactgcgactgtgctgacaagagccagtgcgtgaagaaaggtaccagctatggcgtcgtcatagttgaagccgagaagagccacttcgaggaggtcgccgccggcgaggagaacggcggctgcaagtgcggcaccagctgctcctgcaccgactgcaagtgcggcaagtgaagtcacgaagcaaccgaacactcgccgccggcgagtcacctaccttaattagtccacaataaaaaccacccatatgagtgtggtttggggggtgctgattatgctgaat

SEQ ID NO: 398583 - DNA, 442 bp, Oryza sativa nipponbare
ccacgcgtccgcccacgcgtccggagcacaagaaagcataagcaacacaagggattaactcatcactcacttagctaattaaatcttcgaccatgtcggacaagtgcggcaactgcgactgtgctgacaagagccagtgcgtgaagaaaggtaccagctatggcgtcgtcatagttgaagccgagaagagccacttcgaggaggtcgccgccggcgaggagaacggcggctgcaagtgcggcaccagctgctcctgcaccgactgcaagtgcggcaagtgaagtcacgaagcaaccgaacactcgccgccggcgagtcacctaccttaattagtccacaataaaaaccacccatatgagtgtggtttgtgtgtgtgctgattattgctgaattaaaacccggtgttatcgattaattaagcaagtggtcgcttcggcgacta

SEQ ID NO: 398584 - DNA, 442 bp, Oryza sativa nipponbare
ccacgcgtccgccacgcgtccgcaagaagtactcgagcaaagaaggagagagcttggtgagctgcagagatggccccctccgtgatggcgtcgtcggccaccaccgtcgctcccttccaggggctcaagtccaccgccggcatgcccgtcgcccgccgctccggcaactccagcttcggcaacgtcagcaatggcggcaggatcaggtgcatgcaggtgtggccgattgagggcatcaagaagttcgagaccctctcctacctgccaccggtcaccggggaggacctcctgaagcagatcgagtacctgctccgttccaagtgggtgccctgcctcgagttcagcacggtcggattcgtctaccgtgagaaccacagatcccccggatactacgatggcaagtactggaccatgtggaagctgcccatgttcgggtgcactg

SEQ ID NO: 398585 - DNA, 436 bp, Oryza sativa nipponbare
ccacgcgtccggtgggttctctccgggaaggacgactacaaaggtgtatggaagcacgaaaagagtgatggacatgaagactatggcctgcttgttagtgagaaggccaagaaatatgccataatcaaggagcttgatgagcctgttactttgaaggatgggactgttgtcctgcagtttgaagtgaggcttcagaatggccttgagtgtggaggtgcatatcttaagtacattcgtcctcaggatgctgcatgggatgccaaggagtttgataatgagactccttacactattatgtttggtcctgacaaatgtggatcaactaacaaggtgcatttcatccttaagcacaagaaccccaagactggcaagtatgttgaacaccacctcaagttcccaccttctgtcccatatgataagctctctcatgtctaca

SEQ ID NO: 398586 - DNA, 197 bp, Oryza sativa nipponbare
ccacgcgtccgcggacgcgtgggccgacaggctcccacgtagccggcgctccaccaactatggcttcggcaacctcagcaatggctgaaggatcaagggcatacaggcgtggccaattgagggcataaagaagttcgagaccctattgtacctgccaccactgaccgtggaggatcttttgaagcatatcgagttcc

SEQ ID NO: 398587 - DNA, 406 bp, Oryza sativa nipponbare
ccacgcgtccgcagcagcaaacgagcaccacacaccagcagcagcagcaaagtcgatcgatcgtcagcacacacgaccaagatcgagatggcccgtgcacagctggtgttggtcgccctcgtggcagctctgctcctggcgggcccacacaccaccatggccgacatcagctgcggccaggtcaactccggcgggtcttcctgccttagatgctcccgcgggggattcggcccgtcggcgggcttgtgcatcggcgtcaggagccttaactccgacgacaccaccaccgccgaccgacgtaccgcctgcaactgccttaagaacgtggccggcagcatcagcggcctcaacgccggcaatgccgccagcatccccttcaagtgcggcgtcagcatcccctacacca

SEQ ID NO: 398588 - DNA, 445 bp, Oryza sativa nipponbare
agcctccaatggtggtagaacattttcaaggctcaggggcaagtgatggtggatggatagcaaaaatcgctgctttacttgttggggaggatccgtcgcagtcgtacgctttgatatgtggaaactgtcatatgcataatggcttggccaggaaagaagattacccgcacattacttactactggccccattgtcatgcgctgaacacatcaaagcaatctttggggcatcattctggctccaattcaggaccggcgacaccagttgctcctgctgatggaatatctgctagcagttcagtagtatagagtgaagtgagtaacatgactacaatttaagagctgaaaaatgaagaaaatacctagaagcaagaagcgcaagcaagttgatcggacataaacttatactggtggtctgtgctaaaattagcacaactatttggtgt

SEQ ID NO: 398589 - DNA, 448 bp, Oryza sativa nipponbare
cgcacgcgtccgcccacgcgtccgcccacgcgtccgcccacgcgtccgaaagcataagcaacacaagggattaactcatcactcacttagctaattaaatcttcgaccatgtcggacaagtgcggcaactgcgactgtgctgacaagagccagtgcgtgaagaaaggtaccagctatggcgtcgtcatagttgaagccgagaagagccacttcgaggaggtcgccgccggcgaggagaacggcggctgcaagtgcggcaccagctgctcctgcaccgactgcaagtgcggcaagtgaagtcacgaagcaaccgaacactcgccgccggcgagtcacctaccttaattagtccacaataaaaaccacccatatgagtgtggtttgtgtgtgtgctgattattgctgaattaaacccgtgtgttatcgattaattaagcagctggtcgct

SEQ ID NO: 398590 - DNA, 398 bp, Oryza sativa nipponbare
ccacgcgtccgcccacgcgtccgccggagactacggctacgacccttttggcctcagcaagaagccagaggacttctccaagtaccaggcctatgagctgatccatgccaggtgggcgatgctcggcgccgctgggttcatcatccccgaggcctgcaacaagtttggcgcaaactgcggccccgaggccgtctggttcaagaccggcgccctcctcctggacggcaacaccctcaactactttggcaacagcatccccatcaacctcatcgtcgccggcgccggcgaggtcgttctacgcggcggcgcccagtactacccggtcattaacgggctggatctggaggacaagcctccaccaagtggcccatttgacccgcttgggctggcgagcgacc

SEQ ID NO: 398591 - DNA, 425 bp, Oryza sativa nipponbare
ctctcatcttcacgcaacgaacagcagcagcagctcaagctaagctaagctaaagtactacgtgttctttcgtcttcgtcggcgccggagtttgattcgtcggagctagctagcaagaggaagaagaaaatgttggccatattccagaagcaggtggcgcacgcgccggcggagctgaacagcccgcggagcagcgcggcgaagcccaagaaccccgacgagatcctcagggacttccacgccctccaccccatcgaggccttctccacctccttcggcggcggcgccgccctcgcctgcgtcgccggccacgcccgcaatggcctctctggctacgagaggatgttctgtgggctggatgacatctactgcgtgttcatggggaggctggacaacctgagcagcctgatccggcagtacgggct

SEQ ID NO: 398592 - DNA, 344 bp, Oryza sativa nipponbare
cgcgtccgggcgagcgagcggacatggcagcatcgctccaagccgcggccaccctgatgcagccggccaagctcggcggccgggcctcctccgccgcgctgccatcgcgcccgtcttcgcacgtcgccagggcgttcggcgtcgacaccggtgccgccggcaggatcacgtgctccctgcagtccgacatccgggaggtcgccaacaagtgcgccgatgccgccaagctcgccggcttcgccctcgccacctcagcttctgctcgtctcgggcgccagcgcggagggcgtgccgaggaggcttaccttcgacgagattcagagtaagacgtacatggaggtgaa

SEQ ID NO: 398593 - DNA, 430 bp, Oryza sativa nipponbare
ccacgcgtccggaagagcagaccgtttgttattcgtagcagtgatcgtgaggtgaaatgccatagtgtaatcattgctactggtgctgctgctaagcgccttcgattacctcgtgaagatgaattttggagtagaggtatcagtgcatgtgcaatatgtgatggagcatccccactatttaagggtcaagttcttgcagttgttggaggtggtgatacagctacagaggaagctatatatttgaccaaatatgcacgtcacgttcatttacttgttcgaaaggatcagctacgagcatccaaagctatgcaggaccgagtactcaacaatcccaacataacagtacatttcaatacagaagctgtggatgttgtcagcaatcccaaaggccagatgtctggtattcaactgaagagaaccgacacgggag

SEQ ID NO: 398594 - DNA, 425 bp, Oryza sativa nipponbare
ccacgcgtccggtccactctcacaccaaaaccagtaaaaaaatatcgtcaccttcgccggcgagatggcccaccgccgcatcatcctcctcctcgccgccgccgccgtcgccgcgacctccgccgtcgccgccgcgtcctccggcttcgacgactccaacccgatccgctccgtcacggaccacgccgcctccgcgctcgagtcaaccgtcatcgccgccctcggccgcacccgcgacgccctccgcttcgcccgcttcgccgtcaggcatgggaagaggtacggcgacgcggcggaggtgcagcggcgtgtccggatcttctccgagagcctcgagctcgtccgctccaccaaccggaggggccttccctaccgcctcggcatcaaccgtttcgcggacatgagctgggaggagtttcaggcga

SEQ ID NO: 398595 - DNA, 412 bp, Oryza sativa nipponbare
cgacccacgcgtccgggagctggcgcggctcgcctccgcgtaccggctcatttcccccaccgaggcgcgccgactcaacgcggtggagtccgatttcgaggaccccgaggcgatcgccaagtccatcggccctgcaactaaggtggtggttacagtcggcgcagctgagaaggggcccgacggcggtgtggtcaccaccgacgaggcgctccgagttgtgcaggctgctgaccttgccggcgtgacacacgttgtggtggtgtacgacctgggggccggtgaccccagtggtgagtcgacgtacaatgtgctcgacgggttcacgtccttcttctcgaacctcttctcccgtgtgcagtccttgccactaaacgagttcttggcttaggtggtggagaccgacgtcaggtac

SEQ ID NO: 398596 - DNA, 382 bp, Oryza sativa nipponbare
ccacgcgtccggtcgtgcaccatcgacgcgtcgctcagcatggtcatgggcgacgacatggtgaaggtcatcgcctggtacgacaacgagtggggatactcgcagagggtcgtcgacctcgccgacatcgtcgccaaccagtggaagtgagaacgtagaagctgctgctgctgctgcctttgtaactccacctcgctccaaaaattttccccagacttcttccttcttcctctcgatcctttgtaatgagaatttcgaagtttcgagcgcccaacacagtttcttgtttctttctttgcttttcttccccacctcatctgacttttcactgtccggcacgggattattatcgactttccggcaatttgaaaatcgcaatgct

SEQ ID NO: 398597 - DNA, 390 bp, Oryza sativa nipponbare
ccacgcgtccggctgccggaggacggggcgaggaaggccgggtcggtggggcgcgcggtgggtcaggagatggcgatcctggacgaggaagggcggcgggtggaggccgggaagagcggcgaggtgtgcgtgcgcggcgccaacgtgacgagcgggtacaaggggaacccggaggcgaacgaggcggcgttccggttcgggtggttccacaccggcgacatcggcgtcgtggacgaggaggggtacctgcggctggtggggcggatcaaggagctgatcaaccgcggcggcgagaagatatcgccgatcgaggtggactcggtgctgctcgggcacccggccatcgcgcaggccgtggcgttcggggtgcccgacgccaagtacggggga

SEQ ID NO: 398598 - DNA, 426 bp, Oryza sativa nipponbare
ccacgcgtccgtagatgtccttatggctgctgccatgggcgcggatgaatatggttttggttctgtggctatgatagctactggatgtgtcatggcacgcatttgccacacaaacaattgcccagttggagttgctagtcagagagaagaacttcgtgctaggtttcctggtgttcctggtgatcttgtaaactacttcctctttgttgcagaagaggtacgagcgacattggcccaattgggttttgaaaagctcgatgatataattgggcgaacagatatacttaaagcaaagcatgtctctttggcgaaaacacagcacattgacctcaaatacctcttatcgagtgctggattacccaaatggaggagctctcagataaggagtcaagatgtccacagtaatggccctgttcttgacgagac

SEQ ID NO: 398599 - DNA, 432 bp, Oryza sativa nipponbare
ccacgcgtccgcccacgcgtccgatggccactgcttatgctcccatggcgagccagctgatgaagagcagcttggtgtgctccaagccgagggggctgtctggtgcttcgctgacaaggaggccccgcttcacagtcaaggccatccagtctgagaagccaacgtaccaggtggtgcagcccatcaatggcgaccccttcatcggcagcctggagacgccggtgacctccagcccgctggtcgcctggtacctctccaacctcccggcgtaccgcaccgccgtcagcccgctgctccgcggcatcgaggtcggcctcgcccacggctacctcctcgtcgggcccttcgcgctcaccggcccgctccgcaacacgccggtgcacggccaggccggcgccctcggcgccgcaggcctcgtcgccatcctcagcg

SEQ ID NO: 398600 - DNA, 350 bp, Oryza sativa nipponbare
ccacgcgtccgcccacgcgtccgcccacgcgtccgccgatcgcaaatactctctctcgccgatagcagtaggagcagcaatggccgacctcgccggctcatccaccgccttcgccgccaagccgcgcctggcgcgcgcgccgtcgtccccggccgcgcggatctccgagtcgcgctccgagtcgggcaacaacggcggggccggctgagatggcgccatccctggcggagtagaaaagacgttctgcgaggcgctggcagcattatcttggtgcatgacttacacactgatgctcttctgtggcatttcaatcagattagcagaatggtatagtcctgaagctttcattt

SEQ ID NO: 398601 - DNA, 440 bp, Oryza sativa nipponbare
ccacgcgtccggacccagagtttgccaagaagcttgcctccttagcagatctctatgtcaatgatgcattcggaacagcccacagagcacatgcatcaactgagggagttaccaagtttttaaagccttctgtcgcaggattccttttgcagaaggagcttgactaccttgttggagctgtttcaagccctaaacgcccatttgctgccatcgtgggtggttcaaaggtgtcatccaagattggggttatcgaatcccttttggagaaatgtgatatccttcttctaggtggtggtatgatcttcacattttacaaggcacaaggactctctgttggttcttccttggttgaggaagacaaacttgagcttgcaacatctctccttgcaaaggcaaaagaaaagggtgtctcccttctgttgccatctgacgttatcatt

SEQ ID NO: 398602 - DNA, 448 bp, Oryza sativa nipponbare
ccacgcgtccgcccacgcgtccgggattacatcgacttctactacaagtccgacgaggaggtcgcctgcgacgaggaggtgcgggcgtggtgggaggaggtgcgcaccaaggggcacgccgacaagaaggacgagccgtggtggccggcggtggacacccgggacgggctcatcggcgtcttgaccaccatcatgtgggtgaccttcggccaccacgccgtcgtcaacttcgggcagtaccactacggcggctacttcccgaaccggccgacggtgatgaggaagaaaatgccggtggaggagaacaaggaggaggagatgaagaagttcatggagatgccggagcacgtgctgctggacaccatgccgtccaagatgcaggccatcacgatcatggcgacgctggacatcctgtcttcgcacttcctcgacgaggagtacatggggg

SEQ ID NO: 398603 - DNA, 445 bp, Oryza sativa nipponbare
ccacgcgtccgcgtggctatggcccccaccgtgatggcctcctcggccacctccgtggctccattccaagggctcaagtccaccgccgggctccccgtcagccgccgctccaccaactcgggcttcggcaacgtcagcaatggcggaaggatcaagtgcatgcaggtgtggccaattgagggcatcaagaagttcgagaccctatcgtacctgccaccactcaccgtggaggatcttttgaagcagatcgagtacctgcttcgatccaagtgggtgccttgcctcgagttcagcaaggttggattcgtctaccgtgagaaccacaggtctcccgggtactacgatggcaggtattggaccatgtggaagctgcccatgttcggctgcaccgatgccacccaggtgctcaaggagctcgaggaggccaagaaggcctaccccgatg

SEQ ID NO: 398604 - DNA, 406 bp, Oryza sativa nipponbare
ccacgcgtccgcccacgcgtccggggcgccagcgcggagggcgtgccgaggaggcttaccttcgacgagattcagagtaagacgtacatggaggtgaagggaaccggcacggcgaaccagtgcccgacggtggagggcggcgtcgactccttcgccttcaaggccggcaagtacaacatgaagaagttctgcctggagccgacgtccttcaccgttaaggcggagggcgtggccaagaacgcgccacccgagttccagaagaccaagctcatgacccgcctgacctacaccctcgacgagatcgagggcccgctcgaggtcagctccgacggaaccatcaagttcgaggagaaggacggaatcgactacgccgccgtcaccgtgcagctgccgggaggcgagcgcg

SEQ ID NO: 398605 - DNA, 443 bp, Oryza sativa nipponbare
ccacgcgtccggtctgatctcgacattcatatcccaactgccttcgatccctttgctgaggccaatgctggagactctggtgcggctgcaggatcaaaggactacgttcatgtacgcatccagcagcggcatggccgtaagagcctgaccactgtccagggattgaagaacgaattcagctacaacaagatcctcaaagatctcaagaaagagctttgctgcaatggtactgttgtgcaggacccagagcttggccaggtcattcaacttcagggtgatcagaggaaaaacgtatcaaatttgtcttgttcaggccggcattgtgaagaaggaacacatcaggattcatggtttctgagcaactgccaaaaccattgcgaagactatagtttggggtggacgtatacttggtgggtacatgcctgcgtgttccattcgccaca

SEQ ID NO: 398606 - DNA, 443 bp, Oryza sativa nipponbare
ccacgcgtccggcaggtgtggccgattgagggcatcaagaagttcgagaccctctcctacctgccaccgatcaccgtggaggacctcctgaagcagatcgagtacctgctccgttccaagtgggtgccctgcctcgagttcagcaaggtcggattcgtctaccgtgagaaccacagatcccccggatactacgatggcaggtactggaccatgtggaagctgcccatgttcgggtgcactgacgccacccaggtgctcaaggagctcgaggaggccaagaaggcgtaccctgatgcattcgtccgtatcatcggcttcgacaacgtcaggcaggtgcagctcatcagcttcatcgcctacaagcccccgggctgcgaggagtctggtggcaactaagccgtcatcgtcatatatagcccttgttaattgctcatctctgaatc

SEQ ID NO: 398607 - DNA, 443 bp, Oryza sativa nipponbare
ccacgcgtccgctcacatgggcattggatcctaaatctgctgctaacttcccagcttcaactaggacagtgaaagctcttactgaggttgaggcatttgcgttgtgtgctgaggagctgaaatttgtggccagtcagttcaggaggctccacagtaggcaagttcagcacacgttccggttctattcccagcactggaggacatgggcggcctgtttcattcaagcggcatggcgccgctattacaagaggaagatggccgagcagcatcgcaaggaagaagaggctgcaaaccggcaaagcagcagcagccaccaccctagcctcgcagcaaccatctacgcatctcgctttgcagctaatgcactccgaggagttcacaggctcagaagcagggccagcccgacaattgtgagattgccaaagcctccagaaccagatttt

SEQ ID NO: 398608 - DNA, 437 bp, Oryza sativa nipponbare
ccacgcgtccgcattctcgaagaaggagaagaaggagaggagcagccatggcgtcgtcggtggcagcggcggcgagcacgttcctggggacgaggctggcggacccggcgccgcagagcgggaggatcgtggcgaggttcgggttcggcggcgggaagaaggcggcggcgaataaggcggcgaggccgtcggcgccgacgacggacaggccgctgtggttccccggcgcggtggcgccggactacctggacgggtcgctcgtcggcgactacggcttcgacccgttcggcctcgggaagccggcggagtacctgcagttcgagctggactcgctggaccagaacctggccaagaacaacgccggcgagatcatcggcacccggttcgagaccggcgaggtgaagtccaccccgttccagccctacaccgaggtgttc

SEQ ID NO: 398609 - DNA, 447 bp, Oryza sativa nipponbare
ccacgcgtccgcagagagaaaagtttgcacacagctagcatggcgaacaagctgcagctcgccatcgcgttcgtcgtcgtcgtcgtcgtcctcggcgccatggcggcatcggcggcggcggcggtggcccccatgctgacgatgcacaacctgtgcccgtacacggtgtggccgatcgtgtcgccggacagtggctcgccgcccatcgccgacgggatacggctggagggccgcggcgtcgggctgaggtcgctcaacctcccggcggggttctggtcggggcgcgtcgtgccgcgcacatggtgcagggacggcgggcggtgcgacaccgggaacgcgccgccggcgacggtgggtgagctgtcgttcaacggcgccggcgggctggcggagtacagcgtcaacctcggggaagggttcaacgtgccgacggtggtgagcccgcac

SEQ ID NO: 398610 - DNA, 318 bp, Oryza sativa nipponbare
ccacgcgtccgattttgagtatttatctaaaggaaggaacaaatgaggataagagaaaattgcttctaatttgtccaagtgggatatatggcgtaatattcttccattttcatccgaaaggacttttttctatttctctattccactccatctagatctaagaaagaactcaatgcaatgaaattctactagtatagaaaaaagaggaatagatacaaggtctcaaaccttgttatagaatttttccttcaaagaaaaagaaatatcatatagagtcagcgaataaagcggattcattaacaactcaatttacagatc

SEQ ID NO: 398611 - DNA, 415 bp, Oryza sativa nipponbare
ccacgcgtccgcccacgcgtccggggaatccccagacgagagatttagttctgcagttgctcgaaagaattttgtctgcccccaaagctcgaggcatcttactgaatggtgctgttagaaagggggaacgcctgattccccctgttacatttgatctgttcatgagagctgcatttcctgtttccagcgctcgtgtaaaggctacagagaggtttgaagcagcctacccaacaatcaaggagttggcccttgctggtcctcctggctcaaaaaccgtgaaacaagcagcacagcagcttttgccattgtgtgtgaaagccatgcaagaaaataacgcagacctcaccggggagtctgctggtgtattcatttggtgcctgactcaaaatgcagagtcctacaagctgggggaaag

SEQ ID NO: 398612 - DNA, 348 bp, Oryza sativa nipponbare
ccacgcgtccgaaattcttgcacacgcgcagctcgagccatggccggagtgagcaccagcgtcgtcggcctcaagcccgccgcggcggtgccgcagtcggccgcctcgccggtgccgaagcgcgtgcacgtcgctgtgccgcccaaggaggagcagggcggtggcaggcgcgccgcgctgctgggtctcgccgccgtgttcgccgccaccgccgtcgggcaggccaaggccggcgtgttcgacgagtacctcgagaagagcaaggccaacaaggagctgaacgacaagaagaggctggcgacgagcggcgccaacttcgcgagggcgtacaccgtcgagtttcgcagc

SEQ ID NO: 398613 - DNA, 410 bp, Oryza sativa nipponbare
ccacgcgtccgcccacgcgtccggggagatgcaattgcactccagcggcaaaaggcagcttttcccccaaattttgtgcactctcttgatagttcacacatgatgatgactgctattgcatgcaaaaaggctggtcttcattttgcaggggtgcatgactcgttttgggtgcatgcatgtgatgttgataaaatgaatcagatactgagagaacaatttgtggagctttacagcatgccaattcttgaaaatttgctcaaggagttccagacatcattcccaacactagaatttcctccctgtccttcacaaggggacttcgatgtgagagaagttcttgcttcaacctacttcttcaactaagcttaatgggaaaggtttgcacattagcacatacgcagcaagtcagt

SEQ ID NO: 398614 - DNA, 447 bp, Oryza sativa nipponbare
ccacgcgtccgacgactccaacccgatccgctccgtcacggaccacgccgcctccgcgctcgagtcaaccgtcatcgccgccctcggccgcacccgcgacgccctccgcttcgcccgcttcgccgtcaggcatgggaagaggtacggcgacgcggcggaggtgcagcggcggttccggatcttctccgagagcctcgagctcgtccgctccaccaaccggaggggcctcccctaccgcctcggcatcaaccgtttcgcggacatgagctgggaggagttccaggcgagccggctcggcgcggcgcagaactgctcggcgacgctcgccggcaaccaccggatgcgcgacgccgccgctctcccggagaccaaagactggagggaggatgggatcgtgagccccgtgaaagaccagggtcactgtggttcctgttggaccttcagcac

SEQ ID NO: 398615 - DNA, 406 bp, Oryza sativa nipponbare
ccacgcgtccgccgccctccggtggactccctgggacgctgaactcggaccaggcgagggacacggacctgccgctgagggaaaggttctacctgcagccgctgccgccggcggaggcggcggcgagggcgaaggagtcggcccaggacatcatcaacctcaagccgctcatcgagaagaagcagtggccgttcgtcagggacgacctccgcctcagggcctcctacctgcgctacgacctcaaaaccgtcatcaactccaagcccaaggacgagaagaagggcctcaaggacctcaccggcaagctcttcgccaccattgacgggcttgaccatgcagccaagatcaagagccccgaagaggcggagaagtactacacgttgaccaaatctgctcttggcgatgt

SEQ ID NO: 398616 - DNA, 398 bp, Oryza sativa nipponbare
ccgggtcgacccacgcgtccgaagaagtactggggcctagaaggaacgagcaactcgagaccaggcaaaggacacggaccggacggtgagggaaaggatctacctgcagtcgctgccggcggctgaggccgcggccagggcgaaggagtcggcccaggacatcatcaacctcaagccgatcatcgagaagaagcagtggcacgacgtcagggacgacctgcgccttaggggctattacctgtgctacgaccttaaaatcgttatcaactctaagcccaaggaccagaagaagggcctcaaggaccttaccggcaagctattggccaccatggactgacttgaccatgcagtcaagaacatgagcccagaacaggcggagacgtactacactgcgacca

SEQ ID NO: 398617 - DNA, 452 bp, Oryza sativa nipponbare
ccgggtcgacccacgcgtccgcccacgcgtccgaatcccccaatccgatctgcctttcctcttcctcctcgtcaaaccctagccaaatccacgatcggggctagctcgtcggcggcggcgatggggaacccggagaagctgatgacccagatcttcgacctcaagttcacctccaagtcgctgcagcggcaggcgcgcaagtgcgagaaggaggagaaggagcagaagctcaaggtgaagaaggcgatcgagaaggggaacatggacggcgcgcggatctacgccgagaacgccatccgcaagcgcaccgagcacatgaactacctccgcctcgccttccgcctcgacgccgtcgtcgcgcgcctcgacacccaggcgaagatgcaggtcatcggcaagtccatggccaacatcgtcaagtcgctcgactccgcgctcgccacggtgaacct

SEQ ID NO: 398618 - DNA, 443 bp, Oryza sativa nipponbare
ccacgcgtccggaaaaattctccgatcgccgccgccgctggttcgattcgccgaggccgagccgagagagagagatcgagagggatggagtgcttggccgagatgccgcgcgcgccgctggccgaccgccgcccgcggaagaggcagcggctggggtgggacgtcggccccgagatccaccaggttcagatagggttatgtgggcaagaagttgcaaatgtcatcagtgctgtgacgctgggtctctcgtcccaggaaatccctcgttttgcttcccctcctctgagagaagatgacaaggatggacactttgtctttgctgttggagacaacctcacaccacgatacaggattaatgcaaaaatgggtgaaggtacctttggtcaggtattggaatgttgggatagggaaaggaaagaaatggtggccattaagatcatcag

SEQ ID NO: 398619 - DNA, 442 bp, Oryza sativa nipponbare
ccaccgattaaatgaccctttacgataccactagccgtatttgcaaggcatgttcaactttgacaaatgactaactggtggccaaggtgttattttattaccagtactttagctaagatatgtagtccatatgctgatggggtattattctgtcagaaaattcagaagatatttgttggatttgattaccactattcactttgcaaagtggcatactactacgttgagagtaagtttccgaaaagcactagagatttttcaggccacctaagtaacattgtttactacaagttaaattaatcaaggtcaaacacaaaaggatggtgcaaaatgacaagccactgcgaccgagagtaaattaaggcgagcgattcagagagaagttatggaggagtgcgtgctcaccggagtaggcgtatcccttcatggtgtagccgcgctg

SEQ ID NO: 398620 - DNA, 317 bp, Oryza sativa nipponbare
ccacgcgtccggttccccggcgactacgggtgggacaccgcggggctctccgccgacccggagacgttcgccaagaaccgggagctggaggtgatccactccaggtgggcgatgctcggcgcgctgggctgcgtgttcccggagctcctcgcccgcaacggcgtcaagttcggcgaggcggtgtggttcaaggcggggtcgcagatcttcagcgagggcgggctcgactacctcggcaacccgagcctgatccacgcgcagagcattctcgccatctgggcggtccaggtggtgctcatgggcgccgttgaggggta

SEQ ID NO: 398621 - DNA, 424 bp, Oryza sativa nipponbare
ccacgcgtccgcggacgcgtgggcggacgcgtgggtgtgggtgtgtccctgtctcccctctccttcctcctctcctttcccctcctctcttcccccctctcacaagagagagagcgccagactctccccaggtgaggattcagccatgaagggggccaaatccaagggcgccgccaagcccgacgccaagttggctgtgaagagtaagggcgcggagaagcccgccgccaagggcaggaaggggaaggccggcaaggaccccaacaagcccaagagggctccctccgctttcttcgtttttatggaggagttccgtaaggagttcaaggagaagaaccccaagaataaatctgtcgctgctgtaagaaaagcagccggtgataggtggaaatccctgaccgaagcggacaaggctccctatgta

SEQ ID NO: 398622 - DNA, 448 bp, Oryza sativa nipponbare
ccacgcgtccgcccacgcgtccgcccacgcgtccgcccacgcgtccggtcgcaacagctacaaacgcccacatcacacgcagaaatccgcatcaacagccagccatggcgtccacgctgaccaacgtcggcctgtctaccccggcggcggcggcgtcgtccctcgttaggccggtcgccggagctggacgcgtggtgtttccccgtgttggccgcggcgggttcgcggcggtgagggcgagcgggccggcgacgccgccggacatctcggacaagatgtcggagagcatcgacaaggcgaaggaggcgtgcgcggaggacacggcgagcggcgagtgcgcggcggcgtgggacgaggtggaggagctgagcgcggcggcgagccacgcgcgcgacaagctcaaggagacctccgacccgctcgaggcctactgcaaggacaacccgga

SEQ ID NO: 398623 - DNA, 447 bp, Oryza sativa nipponbare
ccacgcgtccgcggacgcgtgggccgacctcaccccggccgagttccgccgggcctacctcggcctccgcacgtcgcgccgcgccttcctgcgggggctcggcgggtccgcccacgaggcgcccgtcctccccaccgacggcctccccgacgacttcgactggagagaccacggcgccgtcggccccgtcaagaaccagggatcgtgcgggtcgtgctggtcgttcagcgcgtcgggggcgctagagggagcgaactacctggcgacgggcaagatggacgtgctctccgagcagcatatggtcgattgcgaccatgagtgtgatttatcagaacctgattcatgtgatgcttggagcaatggaggattgaagactaacgccttcagctttcttttgaaatccggtggcctttgagagtgagaaggtatatcccctacactgggagg

SEQ ID NO: 398624 - DNA, 450 bp, Oryza sativa nipponbare
  unsure (1)..(450): unsure at all n locations
gccggccaccggagtagactcctacggcgagggcgtctacacgtcggagacggtgaccaccgaggtggtcgccggcggccaggacgagtacgagaggtacaagaaggaggagaagcagcacaagcacaagcagcacctcggcgaggccggcgccctcgccgccggcgccttcgccctgtatgagaagcacgaggcgaagaaggacccggagaacgcgcacaggcacaagatcacggaggagatcgcggccacggcggcggtcggcgccggcggctacgccttccacgagcaccacgagaagaagaaggaccacaagagcgccgaggagtccaccggcgagaagaagcaccacctcttcggctgatcgacctcatcacaacgnntgcncgcggcgggacgacctcgccgtacgtcgccggccgccgggtcgtcgatttgtgtgtgtaataa

SEQ ID NO: 398625 - DNA, 425 bp, Oryza sativa nipponbare
ccacgcgtccggtttgtgtgtgtgctgattattgctgaattaaacccgtgtgttatcgattaattaagcagctggtcgcttcggcgactatgcgtgtatcaacgtatgaatttgtgtgatgtgatgtacccgtgctattctcagtgaaattaatcaatcgtgtattcgtgtggtttgcctagtaaaaaaaaaaaaaaaaaagaaaaaaaaaaaaaaaacaaaaaaaaaaaaaaaaaaaaaaatctctgtcactttaaaaaaacaaaacaaaaggtctcctcctttaaagagcacaaatgtggcgaactttgttaaggtacaaagtttattctcgcaggggtgaaaagaattactttctttttaggtgctccaacatcaaataatggggcagatgtctaaaatatcctaactgaaaaaccccgggc

SEQ ID NO: 398626 - DNA, 452 bp, Oryza sativa nipponbare
ccacgcgtccgagcataagcaacacaagggattaactcatcactcacttagctaattaaatcttcgaccatgtcggacaagtgcggcaactgcgactgtgctgacaagagccagtgcgtgaagaaaggtaccagctatggcgtcgtcatagttgaagccgagaagagccacttcgaggaggtcgccgccggcgaggagaacggcggctgcaagtgcggcaccagctgctcctgcaccgactgcaagtgcggcaagtgaagtcacgaagcaaccgaacactcgccgccggcgagtcacctaccttaattagtccacaataaaaaccacccatatgagtgtggtttgtgtgtgtgctgattattgctgaattaaacccgtgtgttatcgattaattaagcagctggtcgcttcggcgactatgcgtgtatcaacgtatgaatttgtgtgatgtg

SEQ ID NO: 398627 - DNA, 426 bp, Oryza sativa nipponbare
ccacgcgtccgcccacgcgtccgggcacccttcatggtcagggcagaggccactccccctgccaagcaaggtgctgacaggcagctgtggttcgcatccaagcagtccctgagctacctggatggcacgcttccgggagacttcgggttcgacccgctggggctatcggacccggaggggaccggtgggttcatcgagccacggtggctggcctacggcgaggtgttcaacggccggacggcgatgatgggcgtcgtcggcatggtcgccccggagctcctcggcaagctgggcctcgtccccgccgagacggcgatcccgtggttccagaccggcgtgatcccccccgcgggcacctacacctactgggccgacccttacactctcttcgtcttcgagctcgccctcgtcggcttcgccgagcac

SEQ ID NO: 398628 - DNA, 417 bp, Oryza sativa nipponbare
ccacgcgtccgatcatcagtaaccaattcgcaccgatcgatcgatcgatccagcaactagatcaacaggactagctaggaagcatggcccgtgcacagttggtgttggtcgccctggtggcagctctgctcctcgccgccccgcacgccggcgtggccatcacctgcggccaggtcaactccgccgtcgggccctgcctgacctacgcccgcggcggcgccgggccgtcggcggcctgctgcagcggcgtgaggagcctcaaggcggcagcaagcacgaccgcagaccggcgcaccgtctgcaactgcctcaagaacgcggcccgcggcatcaaggggctcaacgccggcaacgccgccagcatccccttcaagtgcggcgtcagcgttccctacaccatcagcgctttcatcgact

SEQ ID NO: 398629 - DNA, 360 bp, Oryza sativa nipponbare
ccacgcgtccgcccacgcgtccgagaaagcataagcaacacaagggattaactcatcactcacttagctaattaaatcttcgaccatgtcggacaagtgcggcaactgcgactgtgctgacaagagccagtgcgtgaagaaaggtaccagctatggcgtcgtcatagttgaagccgagaagagccacttcgaggaggtcgccgccggcgaggagaacggcggctgcaagtgcggcaccagctgctcctgcaccgactgcaagtgcggcaagtgaagtcacgaagcaaccgaacactcgcccgccgcgagtcacctaacttaattagtccacaataaaaaccaaccattttaaggggggtt

SEQ ID NO: 398630 - DNA, 450 bp, Oryza sativa nipponbare
ccacgcgtccgctcaagaagtactcgagcaaagaaggagagagcttggtgagctgcagagatggccccctccgtgatggcgtcgtcggccaccaccgtcgctcccttccaggggctcaagtccaccgccggcatgcccgtcgcccgccgctccggcaactccagcttcggcaacgtcagcaatggcggcaggatcaggtgcatgcaggtgtggccgattgagggcatcaagaagttcgagaccctctcctacctgccaccgctcaccgtggaggacctcctgaagcagatcgagtacctgctccgttccaagtgggtgccctgcctcgagttcagcaaggtcggattcgtctaccgtgagaaccacagatcccccggatactacgatggcaggtactggaccatgtggaagctgcccatgttcgggtgcactgacgccacccaggtgctc

SEQ ID NO: 398631 - DNA, 444 bp, Oryza sativa nipponbare
ccacgcgtccgagcagcagaagcagcagcagcagctgagccgccgccgatggcgtccacgatcatggccccaacctcccgcgtcctcgccgccaagacccccttcctcggccatccccgcccctccaatgcccccgtccgcgacatcgccgccgccgccaccggccgcatcaccatgagcaaggagctgtggtacgggccggatagggtgaagtacctggggccattctcggcgcagacgccgtcgtacctgaggggcgagttcccgggcgactacgggtgggacacggcggggctctccgcggacccggaggcgttcgcgaggaacagggcgctggaggtgatccacggccggtgggcgatgctcggcgcgctgggctgcatcacgccggaggtgctcgagaagtgggtgcgcgtcgacttcaaggagcccgtgtggttcaag

SEQ ID NO: 398632 - DNA, 321 bp, Oryza sativa nipponbare
ccacgcgtccgcccacgcgtccggttggcttctcctccccctctttaccttttcctcctcggttcggttccgtggttcgtctagggtttagtgggttgagatggcggcgccggatgtcgagtaccgctgcttcgtcggcggcctcgcctgggccaccgacgaccgctccctcgaggccgccttctccacctacggcgagatcctcgactccaagatcatcaacgtcagggagacggggaggtcacgtgggtttggctacgtcaccttctacttcgagcagtcaatgcgcgacgccatcgagggcatgaacggcatggtgct

SEQ ID NO: 398633 - DNA, 441 bp, Oryza sativa nipponbare
ccacgcgtccgcggacgcgtgggggcgccgctgatcgacgcggcggagctggggtcgtggtcgctgtaccgcgccgtcatcgccgagttcatcgccacgctgctgttcctgtacatcaccgtggccacggtgatcgggtacaagcaccagacggacgcgtcggcctccggcgccgacgcggcgtgcggcggcgtgggcgtgctcggcatcgcgtgggcgttcggcggcatgatcttcatcctggtctactgcaccgccggcatctccggcgggcacatcaacccggcggtgacgttcgggctcttcctggcgcgcaaggtgtccctggtccgcgccatcctctacatcgtggcgcagtgcctcggcgccatctgcggcgtcggcctcgtcaaggcggttcaaagcgcctacttcaacaggttacggggggggccaacaccc

SEQ ID NO: 398634 - DNA, 410 bp, Oryza sativa nipponbare
ccacgcgtccgcgaatccagcagcagaagcagcagcagcagctcagccgccgccgatggcgtccacgatcatggccccaacctcccgcgtcctcgccgccaagacccccttcctcggccatccccgcccctccaatgcccccgtccgcgacatcgccgccgccgccaccggccgcatcaccatgagcaaggagctgtggtacgggccggatagggtgaagtacctggggccattctcggcgcagacgccgtcgtacctgaggggcgagttcccgggcgactacgggtgggacacggcggggctctccgcggacccggaggcgttcgcgaggaacagggcgctggaggtgatccacggccggtgggcgatgctcggcgcgctgggctgcatcacgccggaggtgcttcgag

SEQ ID NO: 398635 - DNA, 366 bp, Oryza sativa nipponbare
catcaaaagaagataacacttgtggagctgtacagatcacctcctcagtgttggcaaagtcggccacaactgtcactacattcaaggggctcatgtctaccgacgatgtgtttgaggctcgacgctctggcatcgccagctgagctagcaccagcacgtggcatctgatcgggtggttcggggacgtcttagtggactctcgaacctggccatttcttggcccattgctgggaagcactgaaactagaggtcttgcagcccaatggggccctgctctagtaagcaaggtggtgttcgtctaccgcgagaagcacagataccccggatactactaaagcaggtgctcgtccatgtggaagctgccca

SEQ ID NO: 398636 - DNA, 432 bp, Oryza sativa nipponbare
ccacgcgtccgcccacgcgtccgcatggatgaggaagatgatcaatcggcaacgcttgaccaagtcttgaatgatacgacgagggttggttacttcaaaggatacctcgcgtcagttgcacaagcaatcaaggatggtgctgatgttcgtgggtacttcgcatggtcgttcctggacaacttcgagtgggctatgggatacaccaagaggtttggcattgtttatgttgattacaaaaatgggctttcccggcatcccaaagcatcggcccggtggttctcgcgcttcttaaagggcgatgacgctgagaacaaagctgacatgaactaggccatcctgaagaaagtaaaggaacattacacagtaatccgttctgctggtggtggatcttatattgatatatgtagtgtatctattcatcatcataatagt

SEQ ID NO: 398637 - DNA, 315 bp, Oryza sativa nipponbare
ccacgcgtccggactacacccgcttcgcttcctcccctctctaagccggggaagctaagccatggcgtccgtcaccgcccgcaccccggtcgcagccctccgctcgtcggcgtcgctcaagtctaccttcctagggcaatcctccacccgcctcgcccgcgcaccgactacgaggcgtaatgttcgggcggaggccaagggagagtggctccccggcctcccttctcccacctacctcaacggcagcttgccaggcgataacgggttcgacccgttgggtctggcggaggaccccggagaacctgcggtggttcg

SEQ ID NO: 398638 - DNA, 413 bp, Oryza sativa nipponbare
  unsure (1)..(413): unsure at all n locations
ccacgcgtccgcgatcagtgatgaaggggttactcatatagctcaaggatgcccaatgttagagtctatcaatatgtcctactgcacaaaattaacagactgttcactgagatcactttcaaaatgcataaagctgaacacattggagattcgtggctgccccatggtttcatctgctggtctctcggaaattgcaacaggatgcaggctactttctaagcttgatatcaagaaatgctttgagatcaatgacatgggaatgattttcctttcccaattctctcacaacctccggcagataaacttgtcatattggtcggtcaccgacattgggcttatatccctttcaagcatatgtggcttgcagaacatgaccatngtgcatttaacgggtgttacgcctaatggactga

SEQ ID NO: 398639 - DNA, 238 bp, Oryza sativa nipponbare
  unsure (1)..(238): unsure at all n locations
cgcgtccgcccacgcgtccgcccacgcgtccgccctttccattttttccacccacacagcggcggcgagggtttccgatggagaatggagacgagacgttcgcttcccccaccgccggcggcggcggcggcgagttcgagcagccgctgaccaacggcgggggaggaggagggggcggnctgctttactttccccagtatgctggctactttcttttttttgtttcagcaaactgctt

SEQ ID NO: 398640 - DNA, 448 bp, Oryza sativa nipponbare
ccacgcgtccgaccagcggcactggggcgagttcatcaccccgggcttgctcttcctctacatcgccggctggatcggctgggtcggcaggagctacctcatcgccatcagcggcgagaagaagccggccatgagggagatcatcatcgacgtcgagctcgccgtcaagctcctcccgagggggttcatctggcccgtcgccgcctaccgtgagctcatcaccggcaacctcgtcgtcgacgacgctgacatcggctactgatcaccacatggatgcttggctactcaagccccaggtgagttgatttggcagtggaggaagagggctcgtgcatggtgatttgtgtggtttgggtgtagaagctgataggatcatggaggaatggaagatctgttgtacttaagaaaaactaagtcttgtataccgtacctctctcttgtgtgtatt

SEQ ID NO: 398641 - DNA, 436 bp, Oryza sativa nipponbare
ccacgcgtccgcccacgcgtccggcgcaacgcggagctggacccggagaagaggctgtacccgggggggtcctacttcgacccgctcgggttggcgtcggacccggagaagaaggagcggctgcagctggcggagatcaagcacgcccgcctcgccatggtcgccttcctcggcttcgccgtgcaggccgccgccaccggcaaggggcccctcaacaactgggccacccacctcagcgacccgctccacaccaccatcttcgacaccttctcctcatcctcttaatttaagctctttcgcgcgcaattcaaacgggatcgatgcgttggtgtgcgttcgcgcgcgctgtttagttttgtgatgacgagcgagctgggagggtatggagagaggaagggtcatccttttggtgattactacttaaattaggaaagct

SEQ ID NO: 398642 - DNA, 428 bp, Oryza sativa nipponbare
ccacgcgtccggatcgatctaaaccaatccattttttctatatacatacgacatgccaacggttaaacaacttattagaaacgcaagacagccaatacgaaatgctagaaaatcggccgcgcttaagggatgtcctcagcgtcgaggaacatgtgctagggtgtatactatcaaccccggcaccggcaagttcgtcagcgacgacgacgaagagtagaattacgaggatcgatcgatctaccgaggtttcgccgccattgttgtgcttgcgcatcattgagactttctttcaagtgtatatgtactgtgtacgtgtaggtgtaaagacgtaccttgtttaattagttgttaattaatgcccatggagaaaaaaaataaaaaaataataaaaaaaaatataatattattaaatggtaaataataaaaat

SEQ ID NO: 398643 - DNA, 80 bp, Oryza sativa nipponbare
ccacgcgtccgccaaatcaaaagctctcgctgctcctcgagagggagtcggaggatagagaaagagagagagagagatgg

SEQ ID NO: 398644 - DNA, 475 bp, Oryza sativa nipponbare
cggaccggaacggcatgcccgacccacgcgtccggttcgcggaggtgagggcgagcgggccggcgacgccgtcggacatctcggacaagatgtcggagagcatcgacaaggcgaaggaggcgtgcgcggaggacacggcgagcggcgagtgcgcggcggcgtgggacgaggtggaggagctgagcgcggcggcgagccacgcgcgcgacaagctcaaggagacctccgacccgctcgaggcctactgcaaggacaacccggagaccgacgagtgccgcacctacgacaactgattcttaccattatatgtttgctaatctctctgtaattaattataagttactgggttgaaaagattatttgtcgtagaagacagaagggagtttggtggaaatggtggatttacggatagttcaagggggaaatgggaaaaaaaaggttttttacacttggttggctggatgaaattgtatgg

SEQ ID NO: 398645 - DNA, 445 bp, Oryza sativa nipponbare
ccacgcgtccgcggacgcgtggggcccatgttaaaaaaggttggctgatggcttacttctacaataccaaggttctgggggggtacgggaccaaagatcctgaccatgtggagggggctaaagtttttaagggccattacatgcctggttaacgggattttgttaataatcattacccttttggtctttcctggggtccagtagggggagcacatgattcccaaccaagggctactgttccagttcataaggtaccgggggctaaggttccccttccacctgctttaccttggtgacccttttttaccacagagaaatttcttaaattcgtccagcctaaagaaggaaggtcagttgtctttaaggaaataagttaaggcaaagctttgaccacaggtttgcaaaaggttactgttgacatgaaaactaaaaaccggtttgataa

SEQ ID NO: 398646 - DNA, 436 bp, Oryza sativa nipponbare
ccacgcgtccgaccagagccaaagccagagccaaagccaaagcctgagcccaagccacaccctaagcctgagcctaagcctgagcccaagccagaaccaaagccagagccaaaacctgaaccaaaaccagagccaaaaccagagcctgaaccgaagcctgagccaaagcctgaaccaaaaccagagcccaaaccatatccagagcctaaaccggatcccaaaccagaacccaaaccacacccagaaccaaagccagagcccaagccacagccggagccaaaaccagagccgaagcctgaacctaaaccagagcctaagcccgaaccaaaaccggagcctaaaccatacccagagccaaagcctgaaccgaaacctaagcctaagcctgagccaaaacctgaagcaccttcgaagaagcacaagccggcggacatac

SEQ ID NO: 398647 - DNA, 376 bp, Oryza sativa nipponbare
agcaaatcgatccatgcgagcatgcgtgcaaatcagttggagcacaaatttacatgttacacccacaccctacacccatgcataataatacatcgtatatacgtacgtacatacatacccctctcgatcacacgcaccatcgatcgtacaaagttgcgtacatacatacgtacacacatatacgcatacgcacgtacatacatacataattaaaaactcgtaattaattaaatacgtagttgatggcatctctaatggaacttgaggctggtgaggatgttgttgtggacgggatcagcgaggtgatcaagcaggttctgcacggggccaaccccggtgaagagcgcctggacggagaagccgaggaaggcgagca

SEQ ID NO: 398648 - DNA, 382 bp, Oryza sativa nipponbare
tactaggcaaaccacacgaagacgcgattgattaatttcactgagaatagcacgggtacatcacatcacacaaattcatacgttgatacacgcatagtcgccgaagcgaccagctgcttaattaatcgataacacacgggtttaattcagcaataatcagcacacacacaaaccacactcatatgggtggtttttattgtggactaattaaggtaggtgactcgccggcggcgagtgttcggttgcttcgtgacttcacttgccgcacttgcagtcggtgcaggagcagctggtgccgcacttgcagccgccgttctcctcgccggcggcgacctcctcgaagtggctcttctcggcttcaactatgacgacgccatagctg

SEQ ID NO: 398649 - DNA, 350 bp, Oryza sativa nipponbare
ttttgaaacaaaaacaaaagcagaggacggccggtaaaatcaaaagacgatgaacaaactgggaacacacgaaacaaggtgggagacatcatcgaatcagagatgaacaattaaacaaggctatatatgacgatgacggcttagttgccaccagactcctcgcagcccgggggcttgtaggcgatgaagctgatgagctgcacctgcctgacgttgtcgaagccgatgatacggacgaatgcatcagggtacgccttcttggcctcctcgagctccttgagcacctgggtggcgtcagtgcacccgaacatgggcagctttcacatggtccagtacctgccatcgtagta

SEQ ID NO: 398650 - DNA, 241 bp, Oryza sativa nipponbare
tagaggatatagccggaggtttgttttcacatatcctcacccaacgataattgtagtactcttacaataaaaccggccgtagagggagggaagagattattacatatgtgttaagagcagaggccattgaaatggtacataaccaaactgtaaaataaaaatatatagcgtcttatatatcgatatatcatcaacatagcccaaaacaaagctgcatactattattataggccgcaatcca

SEQ ID NO: 398651 - DNA, 389 bp, Oryza sativa nipponbare
tgtatacgaaaaagagctgtgtatctatgtataatccacaacgtacacgcacgtagtacaagtagtactccatgtacatgcagaagtacatatgcatatggtacaaaaactgatctctagctctcaggtacgtatagtcgatcgacgaataaattaaggaaacagatagcgtagtgaccggccgggcgatcaaccatgtatgcatggcgatggatcgacctagctagctagctctcattttattcagcataaacacagataacacaagatacaaagcgtgagacgacagctgcatctcggccggcgctgcatgtcatcctccggtagcgatcgatcggattagttcacgctggagcagtcgatggaggggctgatggtgtaggggatgc

SEQ ID NO: 398652 - DNA, 279 bp, Oryza sativa nipponbare
ggggtgggggactagacaaaccaaaccaaaccaccattgattaatttcactgaaaatagcacgggtacattacataacacaaattcatacgttgttacacccatagacgccgaagcgaccagctgcttaataaataaaaaacacacgggtttaattcagcaataattagcacacacacaaaccacactcatatgggtggtttttattgaggactaataaaagaaagtgactcccccgcggcgagtgttcggtagctttttgacttcacttgccgcactt

SEQ ID NO: 398653 - DNA, 374 bp, Oryza sativa nipponbare
  unsure (1)..(374): unsure at all n locations
tcctatcanaagatcagaaggaacaggttttcaaattcatctcccaactcgacgataatttacacgtacatttaacacattcttccacccttctcaaactcctcccttcttcttcccgggtaagattaaaattaacttgaggccagccagcgtcgccggcggcgagatgtttacaggctgggcgtcctctcggcggcgccggagatgacggtgagcaggttgttgcctaaggggtcgctgaggtgcttggagaggttctcgacggggccctcgccggtgacgtaggcctggatgaagaaccccagcatggagaacatggccagccgcccgttcttgatctccttcaccttcagcagcgccgcctggtccgggtc

SEQ ID NO: 398654 - DNA, 381 bp, Oryza sativa nipponbare
tttttatcgtacaatgtcctctccgcttgtcgaaatgcaaataacatcatcgggggatatgatcatcagttcacgagaacagaggaagaaacaaaagctaaaaattaaaaccatcaacagcccgatcgagtttgcattactagatacacacattgcagccttccttccctctctccatgtatcgatatatcaacccggccacgcacaaaacatttgttcattccctactcgagctgcgcgtaccacaccccttggatcttgacatccttgggcaccttggcgccgaggtctgtgtccgacggctgcacgctctcgaagacgccaatcacctcgccggtctctggcttgctcttggtgacgctcaacgtgatgttgcccgtc

SEQ ID NO: 398655 - DNA, 376 bp, Oryza sativa nipponbare
ttgcactatgaaatatgaataggccattctgtcgcataaataggaatttacagccatgtaatgagtactctgaaaccccaattgctggattacctacacaaccatacaggagaagattacatgcactgggctaattcatgtccttatgatcttatattcacaagaaagtttcagtttctgtatacccatcttcatccttggacagaaaaatatattattgaggccaactaaattgacacaatggaactaatccgtgggcacctcatgcaacaatagggtaggatgcgcaagtagcaataccgcacatgttcttgcccatttccatcttgaagtaaccattgtcaccccagtctgcaccccatgagttcttgatgag

SEQ ID NO: 398656 - DNA, 372 bp, Oryza sativa nipponbare
gcagagaatgttatacggttttgcagccaattttatacaactgtcactcattcactttccaagaatacaccaagagcttcatagatatagcatacaaaagattaagaaaaatggcagagtctgcattagctcagtcctcatccacaaagattgtttcttgcttgaagagtcccccaaacacgggcctcacatccggcttggattccggctgctttggtgttggtcttgtcttctgcgccgcgggcttcacaacagctctctgtggtgccagcttctttgcttttgcctggcctctcacggtggcgatctgcgcttttggttccacctcgtctgagtcctgagtggccactcctgcaagttgtgtgctgagct

SEQ ID NO: 398657 - DNA, 399 bp, Oryza sativa nipponbare
tacgggaaaccgaaattttgctactcgttagcacgggaaacccaaccctaaacgaagctactggttgtagccgaagtaaccagaaaaaatcaaatcaagacacgaacttgatagatacagtaggacgatggcatgcgatgggttggtcgggaggtagagacttttattacgccttggtgggcagcaccggcacgacgaagtgctgcgcgacgatgcggcgctggatcttgccggtggccgtcttgggaagctcgtcggcgatgtacaccttcttgggcaccttgaacgcggccaggttcctccggcagtaggccagcacctcctctttcccgagcgacacgccctcccgggggatcaccgcgcagttgatctcctccccgtacttggcgttgggcaccc

SEQ ID NO: 398658 - DNA, 369 bp, Oryza sativa nipponbare
gtatgcacatgcgagtcgcatgcccccactggacgggtataaatgtaagaactaatgtgtccagaaccaaaaatacgattacataggacacgaatcctgtacaggaatggagaagtttagaagtgtgtcttcactgcctctgcaaatagcaacctagcgtcagcaaaccaatttacaggggggtggttaactagggcgtgcaagtgcaagggcgcaaagaagaatcctccacgatcatgtgaaacttcgtttcaaaagatgccttgggcagagcttccacaaaatcgcagtctttgggggcacttcggtgcttcacaagtatgccagttgttattttgttttccttgatgcgggcccaggaaaaaatca

SEQ ID NO: 398659 - DNA, 373 bp, Oryza sativa nipponbare
tatatccatgcaggcaggcggtttgtgcccttgtgcagatgcatttcatttatacaagtagaaggcactcaaatcagccaccacatgaacacacacatgttccatcatcgatcgatctacacatgcatcacccggtcatgcacttacaaacaaaagatctacttgaagaagtacgggaggtcgagcacgtataggaggaagtaggcccagaggacgccggagatgccgccgaagaagaagccgccggtgaacttggcccagccgtcggcggtctgcagcttgtcggcctccttcttgcggccggtgagcgtcagcgtcggcgccgtggacggctcgccctcgccgaaggaggcgacgccgtacatggtgaggc

SEQ ID NO: 398660 - DNA, 371 bp, Oryza sativa nipponbare
  unsure (1)..(371): unsure at all n locations
tcaagaatcttaagatggtaaatacacacaagagagaggtacggtatacaagacttagtttttcttaagtacaacagatcttccattcctccatgatcctatcagcttctacacccaaaccacacaaatcaccatgcacgagccctcttcctccactgccaaatcaactggggcttgagtagccaagcatccatgtggtgatcagtagccgatgtcagcgtcgtcgacgacgaggttgccggtgatgagctcacggtaggcggcgacgggccagatgaaccccctcgggaggagcttgacggcgagctcgacgtcnatgatgatctccctcatggccggcttcttctcgccgctgatggcgatgaggtagc

SEQ ID NO: 398661 - DNA, 366 bp, Oryza sativa nipponbare
attcaaacgagttccagcatctctataaaacattggtctcttacatttcgagtggttgaagaggtgcgagaaaggagtagaatatagcaagtttagaatggtacatgaagaagatgcaacaaaatgaaacttagcctcatacggccacagtgacagcttcatcaagtgcaatgactccaggaagttcctttccttccaacagctccaagctagcaccacctcccgttgaaatgtggctcataacatctgcaactcccaccttcttaacagcggcaacagaatcacctcctccaataatggttgtaacacccttgccgctaaggtctgccaacttctttgcaatagcctcagttcctactgcaaact

SEQ ID NO: 398662 - DNA, 453 bp, Oryza sativa nipponbare
gtgagtaatttttcttgggtgatatgtgctgaatccagcagatcccatccgtccgcatgacatactgccaatttctagaaaactcagcgaactgagctttagttcaataacctctttactaatttgtggcattctagtaactcaaacacactagcaaatgcctctcccgtggcaggcaggcatacacgggagctattagtgttggtacatgatcttagtgtacaaatcttaaccatctccaatcttgtcccaaatgcagctagctatcttagctagcgaaactcacatggagatgctgtttgggatgcccctcccggtgaccccgggcgtggagaacggcttgagcagctcgtacggcacgatgccggcgccgcacctgttcctgagctccgggtcggtggttccctcgtggaccatgccctcgatctccttcatcctccctgcgaacctctc

SEQ ID NO: 398663 - DNA, 466 bp, Oryza sativa nipponbare
ttatcagatatgctctagatacatatcttgtgtgtatatagccggagctttgttttcacatatcctcacccaacgataattgtagtactcttacaataaaaccggccggagagggagggaagagattattacatatgtgttaagagcagaggccattgagatggtacataaccaaactgtaaaataaaaatatatagcatattatatattgatatatcatcaacatagcccaaaacaaagctgcatactattattataggcagcaatccaccagcgcgatgcttgatcttagcttagttgccaccagactcctcgcaacctgggggcttgtaggcgatgaagctaatcaactgcacctgcctgacgttgtcgaagccgatgatacggacaaaggcattcggggaaggccttcttggcctcctcgagctccttgagcacctgggtggcatcggtgcagccgaacatg

SEQ ID NO: 398664 - DNA, 362 bp, Oryza sativa nipponbare
ggaaggcggatgttcgtgaagataggcacatatatgtatcgtacaatgtcctctccgcttgtcgaaatgcaaataacatcatcgggggatatgatcatcagttcacgagaacagaggaagaaacaaaagctaaaaattaaaaccatcaacagcccgatcgagtttgcattactagatacacacattgcagccttccttccctctctccatgtatcgatatatcaacccggccacgcacaaaacatttgttcattccctactcgagctgcgcgtaccacaccccttggatcttgacatccttgggcaccttggcgccgaggtctgtgtccgacggctgcacgctctcgaagacgccaatcacc

SEQ ID NO: 398665 - DNA, 396 bp, Oryza sativa nipponbare
agaaaagtgaactgggtgttaggacagatttagtaacaaatttcaattaaagatatttcgatttcttattctattatgttcatatatgtactcctctatacataaataacaaatatcaatagtatataaagcaatgctgttcctcttgactcttgtatttggaatgattttatagagaccatttccgctttccataatcctgggcaagaatttatagaatttatatgatatgggtgaaattgaccgtctgctccttcagcttacaaattgtttctggaggaggttggcgcagaactccaaatcaaagcgtacttctggagggtcaccaatgcaatcgaacacagcatcagctgttgcaaagtcctcttctgcagtgtatccgctttttgttacgat

SEQ ID NO: 398666 - DNA, 464 bp, Oryza sativa nipponbare
gcgaggcccaggctctcggagatcgccttggtgagctccagcaacagggctctcgtgcaggtcgcgtactccgttgcaatctccctcagctttgcgggcttttcggggcagtggaattcaggatgagagaacatcttcaggtagtccctcctgcatggtacggcgtcgacgacagagtagaaacctgtaccgatccgtataggatccatcggcttggcacgcatgtactctttcttctcctccaaaggtaatctgaacagctccttgcaggcgtccatgattgcttctcggagagcctcgggcaccccatggttagtcaccatgaagaagccccaatcctcgcatgccctgcctaggtcgcggatcgcccgcgaccgctcgtcggccgcgccgttgatgaggacgccgagatcgacgaccgggattccttgggacggtgtggccgagccgtcggctgcggcggc

SEQ ID NO: 398667 - DNA, 367 bp, Oryza sativa nipponbare
tagcgctctcaaaggagcgtatattattcaatcttgatgaaagagggacacaagccatcatctatagtgatggtgcctcttacaaacttcaacacacgggtaacaagcatacactcaagagtcaagaggtggctaggttttgtgtgtacaatggaacacgcaggcatgtacacaaccaagtatactccaccccaaactatagtctttgcaatggttttggcagttgctcagaaaccatgaatcttgatgtgttccttcttcacaatgccggcctgaacaagaaaatttgatacgtttttcctctgatcaccctgaagttgaatgacctggccaagctctgggtcctggacaacagtaccattgcagc

SEQ ID NO: 398668 - DNA, 349 bp, Oryza sativa nipponbare
aaatatatatagccggagctgccatatatttcattcacatatgcctcacccaacaacatatagtcgtagcagataccactcttacatcaagtcagagagagatcaggtgaaacaaaaacaaaagcagagcacggccggtaaaatcaaaagacgatgaacaaactgggaacacacgaaacaaggtgggagacatcatcgaatcagagatgaacaattaaacaaggctatatatgacgatgacggcttagttgccaccagactcctcgcagcctgggggcttgtaggcgatgaagctgatgagctgcacctgcctgacgttgtcgaagccgatgatacggacgaatgcatc

SEQ ID NO: 398669 - DNA, 351 bp, Oryza sativa nipponbare
taccaagatcgatcgatcgatgtgcgagtggatgcattaattcatcatcttgggtgttcttatattacaaatcaccaccatgcaagtcgccattaaccaccaacccagctttcctaatttaagtagtaatcaacaaaaggatgacctctcctgtctccataccctcccagctcgctcgtcatcacaaaactaaacagagcgcgcgaacgcacaccaacgcatcgatccggtttgaattgcgcgcgaaagagcttaaattaagaggatgaggagaaggtgtcgaaaatggtggtgtggagcgggtcgctgaggtgggtggcccagttgttgaggggccccttgccggtggcg

SEQ ID NO: 398670 - DNA, 265 bp, Oryza sativa nipponbare
aatagaatctgggggtgggtttttaatgaatttcgtatattccctgactctatatgatatttctttttttttggaggaaaaattctataacaaggtttgagaccttgaatctattcctcttttttctatactagtagaatttaattgcattgagttctttcttacatctagatcgagtgggatggcaaaatagaaaaaaattctttcggatgaaaatggaagaatttaccccatatatcccacttgacaatagaacaatttctct

SEQ ID NO: 398671 - DNA, 367 bp, Oryza sativa nipponbare
ttttcgagagaaaattcggggcaaatctccactcagatgatacaaatacacagtgagcacgacaagcgttcaattatgcatgcagttgtgtcatatcacaaaggttctaggtacaggaatgttttcatggctggccaatcgatcgatgatcatcatcagatcatcaccatttccagaagacgttggatccgcacttgtacttctccttcccctcgcactcgatctcgagatcatctgagatgaatgggactttcttctgcttggcgaggtcctggcagccggtgaagttgtaggggaactggcagctgccgaactcgacggtgtacgccctcgcgaagttggcgccgctcgtcgccagcctcttctt

SEQ ID NO: 398672 - DNA, 380 bp, Oryza sativa nipponbare
acatttctctctttcagggtgcttgctatcaacagcatccagcaatcatgtacactagtatacatttctctttggcactttattctacacattattaccaggtcaccgcaccgatacagcaatcggctataattatagccctaagaggccaaaagataatgttacatgtatagacagtgaaattatggttcaactgtcgcctatgatcaaattggtcagggtggtcagcaggactagtatcgatcagtattctgtagttgataacctgttatgtcgcaaaatcgccttcattggctgggtgtagcatggtgaattccctgaactgaaatcctagtagatcctgcatgaatctaaaaacatcagcaggaagtactgggttt

SEQ ID NO: 398673 - DNA, 454 bp, Oryza sativa nipponbare
tcgtaactgcactatgaaatatgagtaggccattctgtcgcataaataggaatttacagccatgtaatgagtactctgaaaccccaattgctggattacctacacaaccatacaggagaagattacatgcactgggctaattcatgtccttatgatcttatattcacaagaaagtttcagtttctgtatacccatcttcatccttggacagaaaaatatattattgaggccaactaaattgacacaatggaactaatccgtgggcacctcatgcaacaatagggtaggatgcgcaagtagcaataccgcacatgttcttgcccatttccatcttgaagtaaccattgtcaccccagtctgcaccccatgagttcttgatgagccagtagggaacgccaattttcgacaccatagccaacggccagaacagcgtggttcacatccattggagaag

SEQ ID NO: 398674 - DNA, 315 bp, Oryza sativa nipponbare
ttttagccgtcaacggcagcgtcaagattgaatcatacgtaagtgcttgctgatacaatatcaacatggagggtacattgccggttccatatgaacaaacataaaaacaccgaaaccccatatgggcattatgccgatcctagcctagcttggcgaggacatcgccaagagcagatttggtcaacgtgtagtacttctccggctcttcagggctcttgatcttggctgcatggtcaagcccgtcaatggtggctaagagcttgcctgtgaggtccttgaggcccttcttctcgtccttgggcttggagatgatga

SEQ ID NO: 398675 - DNA, 367 bp, Oryza sativa nipponbare
  unsure (1)..(367): unsure at all n locations
ttttacctttnttgggggagaaatatatatagccggagcttccatatatttcattcacatatgcctcacccaacaacatatagtcgtagcagataccactcttacatcaagtcagagagagatcaggtgaaacaaaaacaaaagcagagcacggccggtaaaatcaaaagacgatgaacaaactgggaacacacgaaacaaggtgggagacatcatcgaatcagagatgaacaattaaacaaggctatatatgacgatgacggcttagttgccaccagactcctcgcagcccgggggcttgtaggcgatgaagctgatgagctgcacctgcctgacgttgtcgaagccgatgatacggacgaatgca

SEQ ID NO: 398676 - DNA, 339 bp, Oryza sativa nipponbare
cagccgggcgagggatttttaaaacacttaatttatgattcagactgatacagatcaacttgtaaatacaggtcttttatatacaaatgcttgctgaggttacaaacagaaatacaaacttcacgatttgtgaatagacttttcgagctcagacaatacaagttagaggtgtctgatgaaaatcgacatacgattttcgttatattctttgctcggactgctccttcaagaatggatgcctaagcgcctcttgtgtctgtaggcggctagctggatcataccttaacagaccttgcaaaaggtcaatgaactcgcccccagaatgatctacattttgca

SEQ ID NO: 398677 - DNA, 279 bp, Oryza sativa nipponbare
taactaaaaccaaatcgatgacgcggttgatacaaaaattaatatggacggatttacaagatagcaccctatgcttaagctgtacattacacagagccaaacagcgagatcactgcacggacaaccactgtgtgaacacgctcacgcaatattcaatcacatacacacagtactcacgcacataaaaaccacccatgggctttacgtacccccgtacacacacactcgttggtgcctagcacaatgatagatggctctcgagctgatgatgtcgaccat

SEQ ID NO: 398678 - DNA, 332 bp, Oryza sativa nipponbare
  unsure (1)..(332): unsure at all n locations
taacgtatttaccattcatgcatgcatgtgtaaaacacattgtaccgttcatgcgaatatgtatgtactgagttgagttctgactcgatcgaacaaatgctcatcagcgtggtggtacaagccagagtacatcatcaacgagctgaacgtgaactcggtgatcacgacgcccgggcacgacgagatcctgtctatcaacggtatcaccacgcagcgcggatacaccatgaagggatactcctactccggtgagcacgcactcctncataacttctctctgaatcgctcgccttaatttactctcggtcgcagtggcttgacattttgcacca

SEQ ID NO: 398679 - DNA, 384 bp, Oryza sativa nipponbare
tataattaattcacaacaccgtatttcattgatcaggttcagaacctgcacagaaatacacactaccggtacagatctcaccctctctccaatactcgtacatccatccacgcggtccacacgaatacgtacatctatacggtacacgtacgtacatctactgcaccgcgtacacacacgcacactctcctgcagagacgcgcatcgtcgtcaacctagctagcttagctgaaggcgatgcgtcgccatggcagcacggcggcggcggcgctcacttgccggggacgaagttggtggcgtaggcccaggcgttgttgttgacggggtcggcgaggtggtcggcgaggttctcgagggggcccttgccggtgacgatggcctgga

SEQ ID NO: 398680 - DNA, 456 bp, Oryza sativa nipponbare
  unsure (1)..(456): unsure at all n locations
tagaaacaatttaatgtaacatacgcaaactgatattatcacaatgttagccgatgacaatggaaagagtaatctaggtacaagcggatcattgacggtggagacaagacattggctgcaccacaacacccaccagtggcgccaacaaggagcgctatccgttataggacgagagaaaaagtaaaacatcacgatgtgaagtgaaactgaataattctagtagacgatgatgatgatggataggctccttaggacgcccgccgcccttagcgtcttgctgctcccatcttgtccactggaaggctcactcgtcatcgtcttcatcctcttcgctgccctcgtcgncatcctcatcattgacctcggacttggacttgtcagagtcctacttggcggccttctttttcttcctgggcgggtgccttcttggcagtgctctcgcccttgttgtaggca

SEQ ID NO: 398681 - DNA, 353 bp, Oryza sativa nipponbare
  unsure (1)..(353): unsure at all n locations
atgatcatcanttcacgagagcagaggaagaaacaaaagctaaaaattaaaaccatcaacagcccgatcgagtttgcattactagatacacacattgcagccttccttccctctctccatgtatcgatatatcaacccggccacgcacaaaacatttgttcattccctactcgagctgcgcgtaccacaccccttggatcttgacatccttgggcaccttggcgccgaggtctgtgtccgacggctgcacgctctcgaagacgccaatcacctcgccggtctctggcttgctcttggtgacgctcaacgtgatgttgcccgtcgacgacgaggcgttcttgacgttctcctta

SEQ ID NO: 398682 - DNA, 360 bp, Oryza sativa nipponbare
ttagcaaatcgatcgatgcgaccatgcgtgcaaatcagttggagcacaaatttacatgttacacccacaccctacacccatgcataataatacatcgtatatacgtacgtacatacatacccctctcgatcacacgcaccatcgatcgtacaaagttgcgtacatacatacgtacacacatatacgcatacgcacgtacatacatacataattaaaaactcgtaattaattaaatacgtagttgatggcatctctaatggaacttgaggctggtgaggatgttgttgtggacgggatcagcgaggtgatcaagcaggttctgcacggggccaaccccggtgaagagcgcctggacggaga

SEQ ID NO: 398683 - DNA, 344 bp, Oryza sativa nipponbare
ggggacgaaaaagagctatatgtatgtgtaataatccaaaacaagcacgtagtacaaggagttgcagtacatgcatgtagaatctctagctctctctggtacacgtacccctcgaaaaggagcaaaacgtacgagacgaacacacaagaagaagaaagctagctagcgtgaccgggccgatcaaccatggatgcatggtgattgatcgagaccttagctagctcatcttttattccagaatacagatatgatactactagtactggatacagaattcggctccacacatcgacccaggcagaatctactaggtggcaaccggcgcgctgctgtatatatatgat

SEQ ID NO: 398684 - DNA, 305 bp, Oryza sativa nipponbare
tactaggcaaaccagacgaatacacgattgattaatttcactgagaatagcacgggtacatcacatcacacaaattcatacgttgatacacgcatagtcgccgaagcgaccagctgcttaattaatcgataacacacgggtttaattcagcaataatcagcacacacacaaaccacactcatatgggtggtttttattgtggactaattaaggtaggtgactcgccggcggcgagtgttcggttgcttcgtgacttcacttgccgcacttgcagtcggtgcaggagcagctggtgccgcacttgc

SEQ ID NO: 398685 - DNA, 463 bp, Oryza sativa nipponbare
atatatagccggagcttccatatatgtcattcacatatgcctcacccaacaacatatagtcgtagcagataccactcttacatcaagtcagagagagatcaggtgaaacaaaaacaaaagcagagcacggccggtaaaatcaaaagacgatgaacaaactgggaacacacgaaacaaggtgggagacatcatcgaatcagagatgaacaattaaacaaggctatatatgacgatgacggcttagttgccaccagactcctcgcagcccgggggcttgtaggcgatgaagctgatgagctgcacctgcctgacgttgtcgaagccgatgatacggacgaatgcatcagggtacgccttcttggcctcctcgagctccttgagcacctggggggcggcagtggcacccgaacatgggcagcttccacatggtccagtacctgccatcgtagtatccgggggatct

SEQ ID NO: 398686 - DNA, 385 bp, Oryza sativa nipponbare
tagcaataatcaaacactaggtctggtatggatcattacaaagtacacaaatgtacaaattaaaacatcaaaagagttaactaagcttaaagcagcagctgacacataagttgcaaaccccaacttttttcagtttctgaattctggatggatcatatcagattcatcacagcatcgtacaatctgtgcaagcattggtacatcgagcgatggagagagagagtagtctacaatggcggctgggccattcacgagcccggcgtgaacttggtggcgtagacccaggcgttgttggcgacggggtcggcgaggtggtcgagcaggttctccaaggggcccttgccggtgacgatggcctggactaagaagccgaacatggagaaca

SEQ ID NO: 398687 - DNA, 394 bp, Oryza sativa nipponbare
  unsure (1)..(394): unsure at all n locations
gctatgacgtacgcatgcacgatgtacgcaagccttgaattctctagagcgaccgccctcgccctttttttttttntatatgatcatccattcaggagggcagaggacgaaacaaaagctaaaaattaacaccatcaacacgcccgatcgagtttgcattactagatacacacattgcagccttccttccctctctccatgtatcgatatatcaacccggccacgcacaaaacatttgttcattccctactcgagctgcgcgtaccacaccccttcgatcttgacatccttgggcaccttggcgcccaggactgcgtccgactgctgcacgctctcgaagacgccaatcaccttgccggtctctggattgctcttggcgactctcaacatgatg

SEQ ID NO: 398688 - DNA, 165 bp, Oryza sativa nipponbare
gggacggggggagtatattccaaataggaaaggcgggcatcgatgcttatcgtcgctaaattaaatgggagtacaggttaaacacatgagacattcctcgatttaaaaacagattacaaacacatggatgttcacttcacacacaccacaagcaggaggaggagc

SEQ ID NO: 398689 - DNA, 339 bp, Oryza sativa nipponbare
gcaaaccccaacttttttcagttgctgaattctggatggatcatatcagattcatcacagcatcgtacaatctgtgcaagcattggtacatcgagcgatggagagagagagtagtctacaatggcggctgggccattcacgagcccggcgtgaacttggtggcgtagacccaggcgttgttggcgacggggtcggcgaggtggtcgagcaggtactccaaggggcccttgccggtgacgatggccttgactaagaaaccgaacatggagaacatggcgaggcggccattcttgatctccttgaccttgagctcggcgaaggtgacggggtcgtcggcta

SEQ ID NO: 398690 - DNA, 377 bp, Oryza sativa nipponbare
agggaaggaaatttccttttccataaacaattaatgtagttatgcatccggtgaatctccattttcataacacatggacttggcaattgcgtagtgagttacttatgttgtccacgaacattgtgaatgtgttgattgatagattaattaagatgaagaaaggaacaaaaagtttgacggtccaggatattttcaagaagaggagagggtgtggatgatatttttgttgaacgggtctgaaagatgtgtcaaaagattgtcgattggtccaacatgagtcacagatgcttgcacaataaacccaagcatagcaaccatagccaacctcccattcttgatttctttcagtttcgcttcatctgcattctctatatcct

SEQ ID NO: 398691 - DNA, 364 bp, Oryza sativa nipponbare
ggagcaatgacaaactaaatagcacatctgagatgtatatcaatataagatacactattatgatgatgaatagatacactacatatatcaatataagatacaacaacagcagaaacgattactgggtaatgttcctttactttcttcaggatggcctagttcatgtcagctttgttctcagcgtcatcgccctttaagaagcgcgagaaccaccgggccgatgctttgggatgccgggaaagcccatttttgtaatcaacataaacaatgccaaacctcttggtgtatcccatagcccactcgaagttgtccaggaacgaccatgcgaagtacccacgaacatcagcaccatccttgattgctt

SEQ ID NO: 398692 - DNA, 341 bp, Oryza sativa nipponbare
acggcccgggcaggggagtttctatctactttatgctggagtacatacgattgaaaatctctctgcagctgcagcgacaacagcacgagaattgcacgaaggaattgttctcaagaatcttaagatggtaaatacacacaagagagaggtacggtatacaagacttagtttttcttaagtacaacagaacttccattcctccaggatcctatgagcttctacacccaaaccacacaaatcaccatgcacgagccctcttcctccactgccaaatcaactcacctggggcttgagtggccaagcatccatgtggtgatcaggagccgatgtcagcgtcggcg

SEQ ID NO: 398693 - DNA, 355 bp, Oryza sativa nipponbare
tgtgatcgatcgatgtacaagtgggtgcattaattcatcatcttgggtgttcttatattacaaatcaccaccatgcaagtcgccattaaccaccaacccagctttcctaatttaagtagtaatcaacaaaaggatgacctctcctctctccataccctcccagctcgctcgtcatcacaaaactaaacagcgcgcgcgaacgcacaccaacgcatcgatcccgtttgaattgcgcgcgaaagagcttaaattaacaggatgaggagaaggtgtcgaagatggtggtgtggagcgggtcgctgaggtgggtggcccagttgttgaggggccccttgccggtggcggcggcctgcac

SEQ ID NO: 398694 - DNA, 273 bp, Oryza sativa nipponbare
  unsure (1)..(273): unsure at all n locations
actatgcaaaccaggcgggtgcactattgaataatttcaccgataatagcacgggaacattacatcacacaaattcatacgttgatacacgcatagtcgccgaagcgaccagctgcttaattaatcgataacacacgggtttaatttagcaataatcagcgcacacacaaaccacacttatatgggnggggtgtattgtggactaattaaggtaggtgacttaattgcggcgagagaacagttgcttcgtgacttcactcgccaaacttgcag

SEQ ID NO: 398695 - DNA, 291 bp, Oryza sativa nipponbare
gctaaagaacgatatttattatgaacaatttcgtgagcacggtagtatcacatgacactgagaatatgtagtatatcttcgcggacagtgagaaaaacggtcgccctccacgttttcttcttccttcaatttctccaatataacgtacagcttggcacatatctgtacaaaccgcggtactggtaaacaaaaacaacgtacacagcatactactttaggatcctcatgctggtacagccacaggtttttggctggtcttgattcccttgatagcttctgcatagtctggag

SEQ ID NO: 398696 - DNA, 360 bp, Oryza sativa nipponbare
ggcagaaagaatgatcatcaatcagcttaaacatacaacagtagtttgttggcatgcaaatacaccaaccaacacagtgagtagggcagaagaaacagcaatcgtaggcaccatccaacactccaaacagcattttcaacaaacatcaaatactgttacaacttttaacacacaaccaatgcacagacaaacccagaaaggccggtatgattgtagctatgctccggaatgagacaccggtgaggtgatgaattgcccgtctttgaagctgtggatgtactgttggggcaaagcatgttccacccaatcaccatcagtagcaccacttggaaccatcacattgatttcactagatttagc

SEQ ID NO: 398697 - DNA, 244 bp, Oryza sativa nipponbare
agataatatatcggggaaggggtcgtctcattgctattgataattgatacacacttgcatacacacaagagaaaactgaggaacagatcatcggtacgtagtatattcgcgatggacaaatcgatatatatatatataggatagagccgtaggaggcatatttagattgagaagaaagaataattagttgacggtgaccttgccgaccatcccagcttctgcgtgcggctcgccggacgcgtgg

SEQ ID NO: 398698 - DNA, 184 bp, Oryza sativa nipponbare
ccacgccgtccggtgagcataagcaacacatgggtatgaacgcattactcactgatgctaattgaagacatggccatgtcggacaagggcgggcctgctactgtgctgacaagagccagagcgtgaagaaaggtactcagatatggcgtcgtcataggggaagccgacaagagccactgcgagg

SEQ ID NO: 398699 - DNA, 399 bp, Oryza sativa nipponbare
ccacgcgtccgcccacgcgtccgcccacgcgtccgcccacgcgtccggaggtcatggattttgtgtcgcgctacctaccagcataccacgcatatttgcccactctatataaagagggaccaaacggctcgaacccagaccacctgctggtcgttgacatagacgaaaagaggaatcctatgtggggtagatgagccctgaatgtacattgctgaaagaaaatggatcttctgacccaatggtggagtttgggatatctgatctttctgagaccacatattccaagcaagcaccactggcctcttgtttcttgtggcttgaacaagtactaaacgtgtaaaactttgatgtatacgaaatcttgctattacttataaggaaatcggaatcccaattcag

SEQ ID NO: 398700 - DNA, 482 bp, Oryza sativa nipponbare
ccacgcgtccgcccacgcgtccgaaaaaagaagctttatgaggttgggacagtgactgcaatctgctgtgcttgtttcctgataaggtgcatagtggtggcgatatcagcatttgattctgatgtatctctggaggttttggaccatccaattcttgatttcttctactatatgttgacagagatactgccttcagctcttgtccttttcatcctccggaagctccctcctaagcgggtgtcagcgcagtaccacccaatcaactagctagaggcctcctagttagttactacataatatgatgttattatatactactgtacttagtatgttagttatgggaaaactttgaactcctcccaaaaagaagaaagaaaacaaactagaattgcgcctggcaagcaggagcgggatgctggtagtgctttgagctgtaaatgattgaaagcgtcaacaaggccttgttacttggatggataaaa

SEQ ID NO: 398701 - DNA, 672 bp, Oryza sativa nipponbare
ccacgcgtccggagagcggcaacgccggagagccggcgaagctgatcaggcagcggtaccgtgaggcggcagacatcatcaagaaggggaagatgtgctgcctcttcatcaacgatctggacgcgggtgcaggtcgcatgggaggcaccacccagtacacggtgaacaaccagatggtgaacgccaccctgatgaacatcgccgacaacccaaccaacgtgcagctccccgggatgtacaacaaggaggacaacccccgtgtccccatcatcgtcaccggcaacgacttctccacgctgtacgcgccgctcatccgtgacgggcgtatggagaagttctactgggctcccacccgcgacgaccgtgtcggcgtctgcaagggtatcttccgcaccgacaacgtccccgacgaggacatcgtcaagatcgtcgacagcttcccaggccaatccatcgatttcttcggcgctcttcgtgcccgtgtttacgacgacgaggtgcgcaagtgggtgtcggacacgggtgtggagaacattggcaagaggctggtgaactcgagggagggcccaccggagttcgagcagcccaagatgacgatcgaaaagctcatggagtacggatacatgcttggggaggagcaggagaacgtcaagcgtgtgcagctggctgagc

SEQ ID NO: 398702 - DNA, 670 bp, Oryza sativa nipponbare
  unsure (1)..(670): unsure at all n locations
ccacgcgtccgcggacgcgtgggcggacgcgtgggggacagtacagtggaattatccaatacatgcttctgggtaatgttggggaaacagatgatggtctgatccggtttgcattggggtgtgagaacctgcggaagcttgagctaaggagttgttgcttcagtgagcaagctttagcccgcgctatacggagtatgccttccctgagatacgtgtgggtacagggctacaaggcttctaagactggtcacgatctcatgctcatggccaggcccttctggaacatagagtttacacctcccagttctgagaatgcaaatcgaatgagagaagatggtgaaccttgtgtagatagtcaagctcagatacttgcatactactcccttgccgggaagaggtcggactgcccacgatctgtggttcctttgtatcctgcgtgactgtaaataccgatatggtatctctctgcttcgttcttgcctcttgccttttttgggtgatatgttgatatgtggttattgtatgggtctagaactctagatggctagctgctatgtaccgtaataagctactggtagctgagatgtactggaataagcacttctatntcccactctactactatctaatcctaggaagatgtatactaaggaacactctgtgccactac

SEQ ID NO: 398703 - DNA, 672 bp, Oryza sativa nipponbare
  unsure (1)..(672): unsure at all n locations
ccacgcgtccgcggacgcgtgggttttcctcctcggttcggttccgtggttcgtctagggtttagtgggttgagatggcggatcctgatgtcgagtaccgctgcttcgtcagcgaactcctctgggacacatgacaaatattagatcgagttccattctataaaacacatagtagatactgactgcaagatcataatatacagagagacgggcagaaaacttctgttatgaatggcaacatcttcatttcatgatgggaatcaccacctccaccaggtcataaacgaacatgagcacaactgtcagagcatgatcaaaggtgcatccaaatgatgtccatatggcgataaatagaggcatatccttggttgaagtttgcattgaccaaatcggatgtatgagcttggataatcaagcgggcgaaacagaactccagatactcctgcagttgataggattgacggcgaagagaacagcttttgcaggatgtatactntcaaggagcggagatgaagtcagaatcaaaagatagctcttgcggtagaaagaatgtcaataattctgaaacctgattcttgaagtgtgaatatcgatccaaagttagatcgtactcgcgctaccaatgccttgatgtgaactgtaaatagaacttgtggaattgctccattgaat

SEQ ID NO: 398704 - DNA, 391 bp, Oryza sativa nipponbare
aacacgacttaattaacatctgattgattaactatgtattatatatatcattcacgatcttgatcgatcgatcgatctcgctatatatatatatttgttcttcatcgatcgatggatcatatcatcatcatcatcagtattaacaaataattattaatttgatcatgaggagacgctgaatggcttgtaatgtgcgacggatttgatgaggccccggcggagaacgaggtgatgaagaaggcgtccttcatcggagtctcgacgacgacgacgttctacatgctgtgcggcgtgctcggctacgcggcgttcggcaaccgcgcgccggggaacttcctcaccggcttcggcttctacgagcccttctggctcgtcgacgtcggcaacgtct

SEQ ID NO: 398705 - DNA, 683 bp, Oryza sativa nipponbare
  unsure (1)..(683): unsure at all n locations
ccacgcgtccgcccacgcgtccgcaagcttggcatccatgaggattccaccaacaggaccaagattgctgagctcctgaggtatcactccaccaagagtggtgatgagttgaccagcctcaaggactacgtaacccggatgaaggagggccagagtgagatctattacatcactggtgagagcaagaaggctgttgagaactcccccttcctcgagaagctgaagaagaagggttatgaggtcctgtacatggttgatgccattgatgagtacgctgttggtcagcttaaggagtttgaaggcaagaagctcgtctctgccaccaaggaaggtctgaagcttgatgagagtgaggacgagaagaagcggcaggaggaactcaaggagaagttcgagggtctgtgcaaggtgatcaaggaggtgctcggtgacaaggtggagaaggttgttgtctctgaccgtgtggtggactctccctgctgtctagtcactgnggagtatggctggactgctaacatggagaggatcatgaaggcccaggctctgagggactccagcatggccggctacatgtctagcaagaagaccatggagatcaacccggagaatgccatcatggacgagctccgcaagcgtgccgatgcggacaagaatgacaagtncgtgaaggaccctgtgatgct

SEQ ID NO: 398706 - DNA, 553 bp, Oryza sativa nipponbare
ccacgcgtccgcaactgcaattttttctttaaaaaaaaataggattctaagttgtgaagcaaaactaaaggggatgtagataaaaggaaggatgatagaaagaaggaagagaaataagaaagatataggattccaatatgtatggtctatgaattacatcataaaaagcaatgtgataaagcatcaatataataaaaataacagagaattcgaaatcgtaatttgattgaaacaagaaatacaaatttcaaggaataacaaagagcgtcccgagttaataaaactgagaaattgactcggaaagaaattttttggaagctccattgcgagattcaaacctaaccattaaaggagaagcagtgggaacgacagaacctatgactggataggattttcttgaaaagaatcccaatacttcattgggtgggatggcggaacaaaccaaaaaaattgtcttatttgataaggttatgaattaacaaataagacaggaaagagtaaatattcgcccgcgaaatttttattgaattagaatactttaccgcgattcaat

SEQ ID NO: 398707 - DNA, 541 bp, Oryza sativa nipponbare
ccacgcgtccgcccacgcgtccgcttagcgaatccagcagcagaagcagcagcagcagctcagccgccgccgatggcgtccacgatcatggccccaacctcccgcgtcctcgccgccaagacccccttcctcggccatccccgcccctccaatgcccccgtccgcgacatcgccgccgccgccaccggccgcatcaccatgagcaaggagctgtggtacgggccggatagggtgaagtacctggggccattctcggcgcagacgccgtcgtacctgaggggcgagttcccgggcgactacgggtgggacacggcggggctctccgcggacccggaggcgttcgcgaggaacagggcgctggaggtgatccacggccggtgggcgatgctcggcgcgctgggctgcatcacgccggaggtgctcgagaagtgggtgcgcgtcgacttcaaggagcccgtgtggttcaaggccggcgcccagatcttctccgacggcgggctcgactacctcggcaaccccaacctggtgcacgcccagagca

SEQ ID NO: 398708 - DNA, 607 bp, Oryza sativa nipponbare
ccacgcgtccgggcgacatccgcgcgctccgcaacatggacgacgacgaggtcttctcctacgccaagcgcatcgccgcgccctacgaccttgtcatgcagaccaagcagctgggccgtctaccagtcgttcagtttgcggccggcggtgtggccacccccgccgacgctgccctcatgatgcagctcggctgcgacggcgtcttcgtcggctccggcatcttcaagagcggcgaccccgcgcgccgcgcccgcgccatcgtgcaggccgtcacccactacagcgaccccaagatcttggcggaggtcagcagcgggctcggcgaggccatggttggcatcaacctctccgatcctaaggtggagcgcttcgccgcccgctccgagtagcccatccatcatcattcatatccgccttatccttctttcgctatatatatatgctccttccttcgattaagtaataattacatctactatcatcgtcgtgataagaagaaaatgaattagacaccagccagccaggactttgttggcttggctcacttcccttcccttcccttcttggtgatgatgtaacatggaacagcacatgtatcgattaggag

SEQ ID NO: 398709 - DNA, 541 bp, Oryza sativa nipponbare
ccacgcgtccgcaatggcggaaggatcaagtgcatgcaggtgtggccaattgagggcatcaagaagttcgagaccctatcgtacctgccaccactcaccgtggaggatcttttgaagcagatcgagtacctgcttcgatccaagtgggtgccttgcctcgagttcagcaaggttggattcgtctaccgtgagaaccacaggtctcccgggtactacgatggcaggtattggaccatgtggaagctgcccatgttcggctgcaccgatgccacccaggtgctcaaggagctcgaggaggccaagaaggcctaccccgatgcctttgtccgtatcatcggcttcgacaacgtcaggcaggtgcagttgattagcttcatcgcctacaagcccccaggttgcgaggagtctggtggcaactaagctaagatcaagcatcgcgctggtggattgctgcctataataatagtatgcagctttgttttgggctatgttgatgatatatcaatatatatgctatatatttttattttacaggttggtt

SEQ ID NO: 398710 - DNA, 566 bp, Oryza sativa nipponbare
  unsure (1)..(566): unsure at all n locations
ccacgcgtccgcacaccagcagcagcagcaaagtcgatcgatcgtcagcacacacgaccaagatcgagatggcccgtgcacagctggtgttggtcgccctcgtggcagctctgctcctggcgggcccacacaccaccatggccgccatcagctgcggccaggtcaactccgccgtgtcgccctgcctcagctacgcccgcggcggctccggcccgtcggcggcctgctgcagcggcgtcaggagcctcaactccgccgccaccaccaccgccgaccgccgcaccgcctgcaactgcctcaagaacgtggccggcagcatcagcggcctcaacgccggcaatgccgccagcatcccctccaagtgcggcgtcagcatcccctacaccatcagcccctccatcgactgctccagcgtgaactaatccgatcgatcgctaccggaggatgacatgcagcgccggccgagatgcagctgtcgtctcacgctntgtatcttgtgttatctgtgtttatgctgaataaaatgagagctagctagctaggtcgatccatcgccatgcatacat

SEQ ID NO: 398711 - DNA, 488 bp, Oryza sativa nipponbare
gcacagcacacgtcacgaagatgcgtacgatgtacctggctggggcgtgcaccgactactaggcttaatgtgggctcggaggctacagtagagtgactccttgcttggcttcttgacagtacgtaatggctgtcgccaggcgataaactgtccgacccgttgggtctggcggaggaccagcagaacctggggaggctcgcgcaggcagagctgctgaacgggcgcaggaccatgctgagagtggccgcatatgctactgactgatgtgctgacgaagatcgggttgatcgacgcgacctattgatgactacgcctgaagcggtcacctactccagggttgtcagatgacgctggtcgcatcgatgcatcctggaccactacgttgagatcctgcggaggaaagacataaagaaccctggctgtgtccaccagaaccccatgtaaaatagctacagactgccgccgcacgagtgcggctacaccggcag

SEQ ID NO: 398712 - DNA, 552 bp, Oryza sativa nipponbare
ccacgcgtccgcaaaattattcccagccgcaccctcgaggccgatggccgaggcggtcgcaagcggcgcagcggggagatggaccctccgcggcaagacggccctcgtcaccggcggcacccgcggcatcgggcatgcggtggtggacgagctggcggcgctgggggcggccgtgcacacctgctccaggaaggaggccgagctgggcgagcgcctcagggagtgggagggcaagggcttccgcgtcaccggctcagtctgcgacgtctccgtgcgggagcagcgggaacgcatgctccgcgaggtcgccggcctctacggtggcaagctcgacatcctcgtgaacaacgtgggaacaaacttttcaaaacaaaccactgaatactctgcagatgattactcgttcataatggccaccaatcttgaatctgcgtatcatctgtgccaacttgctcatcctcttctcaaatcatctgggtcaggaagcgttgtcttcatatcgtcagtctctggagtggtggctgtaagttctggctctgtctatgcgatgac

SEQ ID NO: 398713 - DNA, 421 bp, Oryza sativa nipponbare
ccacgcgtccgcccacgcgtccgcggacgcgtgggtatatatactacaactccggcgacttctccggccggccggcaacatgcttgcttaattagctagcttgcttggttgatgtgtactactgcgttaagcctgcatagagatgaggtgtctagctactgtgtatattatggccatatgttatgtagtactacgtgctttgttttggattattactaaaatagttgcataaagagagtgaaagctagagctgtggctacgtgttctgaattgtgattacgtgtacgaactagaaacgacacgtctgttgtcgattgaattggtcttttttggagcggtagctaggccgggtgaaggggcggagttaatcaatcaattgtttggttgaaccgataggtaagctctctatgatgatatgaat

SEQ ID NO: 398714 - DNA, 486 bp, Oryza sativa nipponbare
ccacgcgtccgcttcttctctagctattagtggtggggaataatggctcccgccaccaccgcagcaatggccctcgcgccgcctccttcccatcaccatcaccatcaccatgtcaagcagctgcagctccctccgtctgtctccgtctccgtgcccctccgctccggtttccttggccgcgcactgcctgctgctgcccacccacagccgctgctcgccgccgagagccgccgcagcagcgccgtgtccgtgcggatgtcgtgggacgggcccctctcctcggtccgcctcattatgcagggccgcaacgtcaagctgaatgagaaggtgaaggagcacatcgaggagaaggcggggagagcagtggcgaagcacagccagcttgtgaaggaggtggacgtgcgcctctaccgccgcggtggcgagctcagccgaggttccaagatttgcaggcgcgagatcactctcttcaccaagcgccacggc

SEQ ID NO: 398715 - DNA, 582 bp, Oryza sativa nipponbare
ccacgcgtccgcgagctcgccctcgtcggcttcgccgagcaccgccgcttccaggactggtacacgccgggctccatggggaagcagtacttcctcggcctcgagaagtacctcgccggctccggcgagccggcctaccccggcggcccgctcttcaacccgctcggcttcgggaccaagagcgaggcggagatgaaggagctcaagctcaaggagatcaagaatggcaggctcgccatgctcgccttcctcggcttctccgtccaggcgctcttcaccggggttggccccgtgcagaacctgcttgatcacctcgctgatcccgtccacaacaacatcctcaccagcctcaagttccattagagatgccatcaactacgtatttaattaattacgagtttttaattatgtatgtatgtacgtgcgtatgcgtatatgtgtgtacgtatgtatgtacgcaactttgtacgatcgatggtgcgtgtgatcgagaggggtatgtatgtacgtacgtatatacgatgtattattatgcatgggtgtagggtgtgggtgtacatggaaatttgtgctccaactgat

SEQ ID NO: 398716 - DNA, 578 bp, Oryza sativa nipponbare
ccacgcgtccgcaccccaccagcagcagcagcagtagctgagcttgaagcagcagagcgaggtagacatggccgccgccaccatggccctctcgtccccggcgctggccggcaaggccgccgcgaaggtgttcggcgaggggcgcatcaccatgcgcaagtcggcggcgaagcccaagcccgccgcgtcggggagcccgtggtacggcgccgaccgcgtgctctacctcggcccgctctccggcgagccgccgagctacctgaccggcgagttccccggcgactacgggtgggacaccgcggggctctccgccgacccggagacgttcgccaagaaccgggagctggaggtgatccactccaggtgggcgatgctcggcgcgctgggctgcgtgttcccggagctcctcgcccgcaacggcgtcaagttcggcgaggcggtgtggttcaaggcggggtcgcagatcttcagcgagggcgggctcgactacctcggcaacccgagcctgatccacgcgcagagcatcctcgccatctgggcggtccaggtggtgctcatgggcgccgtcgaggggtacc

SEQ ID NO: 398717 - DNA, 618 bp, Oryza sativa nipponbare
ccacgcgtccgcggacgcgtgggcgcagctggaccccaacacgccgtccccgatcttcggcgggagcacggggggactcctccggaaggcgcaggtggaggagttctacgtcatcacatggacgtcgcccaatgagcaggtgttcgagatgcccacgggcggcgccgccatcatgcgcgagggccccaacctgctgaagctggccaggaaggagcagtgcctggccctgggcaccaggctccgctccaagtacaagatcaactaccagttctaccgcgtcttccccaatggcgaggtgcagtacctccaccccaaggacggcgtctacccggagaaggtcaacgccggcaggcagggcgtcggccagaacttccgcagcatcggcaagaacgtcagccccatcgaggtcaagttcaccggcaagaacgtcttcgacatctagacttcttcttcttcttcttcttctctcataatcgacctattaattacttgtgttttgggtggatggacatgtaattttaatcatctgtcaggctgctcttcagttattgatgatggtgtaatcgatcgatggtgggatataatctcttcttataatattgtagtatatgtttggtg

SEQ ID NO: 398718 - DNA, 565 bp, Oryza sativa nipponbare
ccacgcgtccggcagcagcagcagtagctgagcttgaagcagcagagcgaggtagacatggccgccgccaccatggccctctcgtccccggcgctggccggcaaggccgccgcgaaggtgttcggcgaggggcgcatcaccatgcgcaagtcggcggcgaagcccaagcccgccgcgtcggggagcccgtggtacggcgccgaccgcgtgctctacctcggcccgctctccggcgagccgccgagctacctgaccggcgagttccccggcgactacgggtgggacaccgcggggctctccgccgacccggagacgttcgccaagaaccgggagctggaggtgatccactccaggtgggcgatgctcggcgcgctgggctgcgtgttccccgagctcctcgcccgcaacggcgtcaagttcggcgaggcggtgtggttcaaggcgggttcgcagatcttcagcgaggggcggctcgactacctcggcaacccgagcctgatccacgcgcagagcatcctcgccatctgggcggtccaggtggtgctcatgggcgccgtcgaggggt

SEQ ID NO: 398719 - DNA, 544 bp, Oryza sativa nipponbare
ccacgcgtccggaacaggagtacactttgctccagagagacgtaaactggcctcttggctggcccgttggaggctaccctgggccccagggtccatactactgcgctgtaggatcggacaaatcgtttggccgtgacatatcagatgctcactacaaggcatgtctttatgctggaattaacattagtggaacaaatggagaggtcatgcctggtcagtgggagtaccaggttggacctagtgtcggtattgaagctggagaccacatatggatttcaagatatattcttgagagaataacggagcaggctggtgtagtgcttacccttgaccccaaaccaattcagggagactggaatggagctgggtgccacacaaactacagcaccaagagtatgcgtgaagatggaggatttgaggtgatcaagaaggcaatcctaaacctatcacttcgccatgacttgcatataagtgcatatggtgaaggaaatgaaaggaggttgacaggtttacacgagacagctagcattgacaatttctcatg

SEQ ID NO: 398720 - DNA, 687 bp, Oryza sativa nipponbare
  unsure (1)..(687): unsure at all n locations
ccacgcgtccgcccacgcgtccgcccacgcgtccgccacgcgtccgcggacgcgtgggggccggaggacgaggtgccgctccggcccgtggggcgcctcgttctcaaccgcaacgtcgacaacttcttcaacgagaacgagcagctggcgttcgggccggggctggtggtgccggggatctactactccgacgacaagatgctgcagtgcagggtgttcgcgtacgccgacacgcagcgctacaggctggggccaaactacctgatgctgccggtgaacgcgcccaagtgcgcccaccacaacaaccactacgacggcgccatgaacttcatgcaccgggacgaggaggtggactactacccatcgcgccacgcgccgctccgccacgcgccgccgacgcccatcacgccgcgccccgtggtggggaggaggcagaaggcgacgatacacaagcagaacgacttcaagcagcccggggagaggtacaggtcgtgggcgccggatagacaggagaggttcatccgccgcttcgccggcgagctcgcgcaccccaaggtctcccctgagctccgcgccatctgggtcaactacctctcccagtgtgatgagtcgttgggggtgaagattgcgaataggctcaacgtgaagccaagcatgtgaagaactaaggcacangatgcatcatct

SEQ ID NO: 398721 - DNA, 628 bp, Oryza sativa nipponbare
ccacgcgtccgcggacgcgtgggttcttggcagggtcatcccgaaatccttgatgcccagagaggtcactggtgagcctgttggtgaagttagagcggtctctggcatgcacgagaggaaggctgaaatggcccggtttgctgatgcgttcattgcactgcctggcggctacgggactcttgaggagttgcttgaggtcatcacctgggcccaactaggaatccacaagaagccggttggccttctgaatgtcgacgggttttatgatccttttctatccttcattgacatggctgtcagcgaaggattcatagcggaggatgcgcggcgcattatcatctcggctccaactgccagggagctagttctgaagcttgaggagtatgttcccgagtacgaggtcggcttggtttgggacgatcagatgccgcacagcttcgcgcctgacctcgagaccaggatcacctcatcctgatctctcggctctggccctattcttacccaagcttctaaccggcggacgacgataccttcttctcgtgccgaagccgaatatgatcctggaggaagtttgtttttctcagccaggggaaagtaacatccactaaccgaaagatttagccaaagg

SEQ ID NO: 398722 - DNA, 674 bp, Oryza sativa nipponbare
ccacgcgtccgctcatcaagcctcaatcaaaaggcttgaagggaagaagagcaactccagcaggtagaaaggccagaagcaaagatggcgatctccagcctacatgccaccacctccctgcactccccatgcaccaccaacacaagcttcaggcagaatcaggtcatcttcttcaccaccagaagcaacaggaggggtagcacaaggtacggaggagcaagaacctttcaggtttcatgctcagtcgacaagccagtggtgattggccttgcagcagactcaggatgcgggaagagcacctttatgcgccggctcaccagtgtgtttggtggtgctgcagagccacccaagggtggcaacccagactcaaacacactcatcagtgacacgacaacggtgatatgcctcgatgactaccattccttggacaggactggcaggaaggagaaaggtgtgactgccctggaccctagggcaaacgattttgatctcatgtatgagcaggtgaaggcaatcaaagaaggcaaggcaattgagaagccaatctacaaccatgttactggtctcctagacccaccggagcttatccagccccccagatttttgtcattgagggcttacatcccatgtttgatgaacgtgtgagggacctcctagatttcagcatctacctg

SEQ ID NO: 398723 - DNA, 449 bp, Oryza sativa nipponbare
ccacgcgtccgctggaccatgtggaagctgcccatgttcgggtgcactgacgccacccaggtgctcaaggagctcgaggaggccaagaaggcgtaccctgatgcattcgtccgtatcatcggcttcgacaacgtcaggcaggtgcagctcatcagcttcatcgcctacaagcccccgggctgcgaggagtctggtggcaactaagccgtcatcgtcatatatagccttgtttaattgttcatctctgattcgatgatgtctcccaccttgtttcgtgtgttcccagtttgttcatcgtcttttgattttaccggccgtgctctgcttttgtttttgtttcacctgatctctctctgacttgatgtaagagtggtatctgctacgactatatgttgttgggtgaggcatatgtgaatgaaatatatggaagctccggctatatatattta

SEQ ID NO: 398724 - DNA, 566 bp, Oryza sativa nipponbare
ccacgcgtccgcccacgcgtccgcccacgcgtccgcccacgcgtccgcccacgcgtccgcccacgcgtccgagcaacacaagggattaactcatcactcacttagctaattaaatcttcgaccatgtcggacaagtgcggcaactgcgactgtgctgacaagagccagtgcgtgaagaaaggtaccagctatggcgtcgtcatagttgaagccgagaagagccacttcgaggaggtcgccgccggcgaggagaacggcggctgcaagtgcggcaccagctgctcctgcaccgactgcaagtgcggcaagtgaagtcacgaagcaaccgaacactcgccgccggcgagtcacctaccttaattagtccacaataaaaaccacccatatgagtgtggtttgtgtgtgtgctgattattgctgaattaaacccgtgtgttatcgattaattaagcagctggtcgcttcggcgactatgcgtgtatcaacgtatgaatttgtgtgatgtgatgtacccgtgctattctcagtgaaattaatcaatcgtgtattcgtgtgggttgcctagt

SEQ ID NO: 398725 - DNA, 613 bp, Oryza sativa nipponbare
ccacgcgtccgatcagcagcgactccattccaggtgccatgaacatgtaaggtggtgacacggacagagcgagagaggcactgacgatgaccggcatcattcacaggagcgaggagaagtctacatgggcggaggcgagcactagaaggaagaccagcacaagaaggagggcgagcaccacaagaaggacggggagcacaaggaaggcgtggtgtacaagatcaaggacaagatcaccggcgaccacggcgacggcggcgagcacatggagaagaaggacaagaagaagaagaaggagaagaagcacggcgaggagggccaccaccacgacggccacagcagcagcagcagcgacagcgactgagccgccgcgcccccacaccggcgccgtgcgtgcgtgcatgcaggtgatgctgcagatgattggaggagttcgtagcaggattaattagtatctgtgcaatacgtgatgcagtgatctgtctcatgcatgtatctgtgcttgattgcaagaaaaaaaaaaggcatggtttgcctttgtgatgtactgataataatggctgcacggtgccttgtaataagaacgctaattatgatgaaattgatgtgtatt

SEQ ID NO: 398726 - DNA, 490 bp, Oryza sativa nipponbare
ccacgcgtccggcggccaccatggcgctctcctccccggtgatggcccgcgcggcgccgtcgacctcctccgcgctcttcggcgaggcgcggatcaccatgcgcaagaccgccgcgaagcccaagccggcggcgtcgtcggggagcccgtggtacggcgccgaccgcgtcctctacctcggcccgctctccggcgagccgccgagctacctcaccggcgagttcccgggcgactacgggtgggacaccgcggggctctccgccgacccggagacgttcgccaagaaccgggagctggaggtgatccactcccggtgggcgatgctgggcgcgctcggctgcgtcttcccggagctcctcgcccggaacggcgtcaagttcggcgaggccgtgtggttcaaggcgggctcgcagatcttcagcgagggcgggctcgactacctcggcaacccgagcctgatccacgcgcagagcatcctcgccatctgggc

SEQ ID NO: 398727 - DNA, 593 bp, Oryza sativa nipponbare
  unsure (1)..(593): unsure at all n locations
ccacgcgtccgcgaaactcagctgcaaggagaaggagaaggtaggctccagccatggcttcccagctctccgccgccacatccgtgccgcagttccatggcctccggacctactcctctcctaggtccatggtgacgctgccatcgttgaggatgagcaagaagaggtcccagggcatccggtgcgactacatcggctcagccaccaacgttatcatggtgacgacgacgacgctgatgctgttcgcggggaggttcgggctggcgccgtcggcgaacaggaagtcgacggcggggctgaagctggaggcgcgcgactccggcctgcagaccggcgaccccgccgggttcacgctcgccgacacgctggcctgcggcgccgtcggccacatcatgggcgtcggcgtcgtcctcggcctcaagaacatcggcgtcctggaccagatcatcggctaatcaaattcattaagctagtcacacgaatcaatactcctatgtgtaatcgatgcatgagtgcctgtgtgatggacgatgtaatgatcatgtaaattgtgcgtggaatcagtgcttatctagcttaattntgtttctgtc

SEQ ID NO: 398728 - DNA, 632 bp, Oryza sativa nipponbare
ccacgcgtccgggacacggccacaccacccaccaactgagagctgagcaggcgagcgagcggacatggcagcatcgctccaagccgcggccaccctgatgcagccggccaagctcggcggccgggcctcctccgccgcgctgccatcgcgcccgtcttcgcacgtcgccagggcgttcggcgtcgacaccggtgccgccggcaggatcacgtgctccctgcagtccgacatccgggaggtcgccaacaagtgcgccgatgccgccaagctcgccggcttcgccctcgccacctcagctctgctcgtctcgggcgccagcgcggagggcgtgccgaggaggcttaccttcgacgagattcagagtaagacgtacatggaggtgaagggaaccggcacggcgaaccagtgcccgacggtggagggcggcgtcgactccttcgccttcaaggccggcaagtacaacatgaagaagttctgcctggagccgacgtccttcaccgttaaggcggagggcgtggccaagaacgcgccacccgagttccagaagaccaagctcatgacccgcctgacctacaccctcgacgagatcgagggcccgctcgaggtcagctccgaccgaaccatcaagttcg

SEQ ID NO: 398729 - DNA, 386 bp, Oryza sativa nipponbare
ccacgcgtccggtgacgacgacgacgctgatgctgttcgcggggaggttcgggctggcgccgtcggcgaacaggaagtcgacggcggggctgaagctggaggcgcgcgactccggcctgcagaccggcgaccccgccgggttcacgctcgccgacacgctggcctgcggcgccgtcggccacatcatgggcgtcggcgtcgtcctcggcctcaagaacatcggcgtcctggaccagatcatcggctaatcaaattcattaagctagtcacacgaatcaatactcctatgtgtaatcgatgcatgagtgcctgtgtgatggacgatgtaatgatcatgtaaattgtgcgtggaatcagtgcttatctagcttaattttgtttctgtc

SEQ ID NO: 398730 - DNA, 296 bp, Oryza sativa nipponbare
ccacgcgtccgcggacgcgtgggcgccccatcaccctctccctccaccacactacaccccgctccactctcaggcaggcaatcagcggcgaggcaccagcccaccggccggcaatggcgtccacctcctgcttcctccaccagtccacggcccgcgtcgccgcgcgcgtcgcctccccgtccccggcgacacggacccacctcctcgtctgccgcgcccagaagcaggacgacgccgacgtctcccgccgcgcggcgctcgcgctgctggccggagcgacggcggcggtgggggtg

SEQ ID NO: 398731 - DNA, 613 bp, Oryza sativa nipponbare
ccacgcgtccgcagccaaagaaggtgatataccagttagagttaagaattcatataaccgtcgagcacctggtactgttattactaaaacaagagatttgagcaagagtatattaaccagcattgtattgaagtcaaacattactatgctggatatagtgagcacaaggatgcttggccagtatggttttctggcgaaggttttctcaatatttgaagatttaggtatctctgttgattgtgtggctaccagtgaagtcagtatatcattgacactagatccatcaaaactatggtgtcgtgaattgatccagcaggaacttgatcatgtagttgaagaacttgaaaaaattgcagttgttcatctactgcagcacaggtctatcatctcactgatagggaatgtacagagatcgtcattgattcttgagaaggctttcaatgttctacggagaaatggcgttaacgtccagatgatctcacaaggggcatccaaggtgaacatttcattggtggtccatgatagcgaggcgaaacagtgtatacaggcccttcattcagcattctttgagaaggtttcttgtcagaagttgaggaagaggatcttcaacaca

SEQ ID NO: 398732 - DNA, 552 bp, Oryza sativa nipponbare
ccacgcgtccgcccacgcgtccgcccacgcgtccgcccacgcgtccgcccacgcgtccgcccacgcgtccgcccacgcgtccgcccacgcgtccgggcggggtcgcagatcttcagcgagggcgggctcgactacctcggcaacccgagcctgatccacgcgcagagcatcctcgccatctgggcggtccaggtggtgctcatgggcgccgtcgaggggtaccgcatcgccggcgggccgctcggcgaggtcgtcgacccgctctaccccggcggcagcttcgacccgctcggcctcgccgacgacccggaggccttcgcggagctcaaggtgaaggagatcaagaacggccgcctcgccatgttctccatgttcggcttcttcgtccaggccatcgtcaccggcaagggccccctcgagaacctcgccgaccacctcgccgaccccgtcaacaacaacgcctgggcctacgccaccaacttcgtccccggcaagtgagcgccgccgacgccgggctggcatggcgacccatcgccttcaggttagctagct

SEQ ID NO: 398733 - DNA, 667 bp, Oryza sativa nipponbare
ccacgcgtccggacttcttcccggccgtcgcgccgctcgacccgcagcggctgcggaggcgggtggcgagggtgttcgagcggctgcaggccgtgttcgacgggcacatcgaacggcgcctgcgggaccgcgctgccggggagccgcccaagaacgatttcctggacgctttgctcgactaccgcagcccggaggatggccggggttttgatcggccaacgctacagtttctgtttacggatttgtttagcgcgggaagtgatacaagcgcagtaactgtagaatgggcaatggctcagctgctacagaacccaccagcaatggcgaaagctcgtgaggagcttgctcgagtgattggctccaaacaagaaattgaggaatccgacattagccagctcaagtacctcgaagccgtcgtgaaggagacattacggcttcatcctccggcgccatttctgcttcctcaccaagccgaaacgaccacacaggttggtggctacacggtgcccaagggcacccgtgttctggtgaatgtttgggcgattggtcgggacagcaggtgtggtctgaccctgacagttcatgccggagaggttcctgcagagcgaggtggacctgcgtggccgtgacttcgaactgattccatttggctctggtcgaaggatct

SEQ ID NO: 398734 - DNA, 570 bp, Oryza sativa nipponbare
ccacgcgtccgggcctggtgacaagctgacaggcgtcaccggtggagaccaagttgctgctgccatgggcatctatggccctcgcactacttacattatcgctctcaaagattgtcctggaactcatgaattccttcttcttgatgaaggaaaatggcagcatgtcaaggacaccacaaccattggagaggggaaaatgttctctcctggtaacctgagggctacatttgataatcctgaatatgacaagctcatcaactactatgtcaaggagaagtacacattgcgttacactggaggaatggttcctgatgtcaaccagatcatagttaaggagaagggcatcttcaccaacgtgacgtctccgacagccaaggccaagctgaggctcctgttcgaggtggcgccgttgggtttcttgatagagaaagccggcgggtacagcagcgacggcaaacagtcggtgctggacaaggtgatcaacaacctcgacgagcggactcaagtggcctacggttccaagaacgagatcatccggttcgaggagactctctacggctcgtcgaggct

SEQ ID NO: 398735 - DNA, 646 bp, Oryza sativa nipponbare
ccacgcgtccggtcagccgccgctccaccaactcgggcttcggcaacgtcagcaatggcggaaggatcaagtgcatgcaggtgtggccaattgagggcatcaagaagttcgagaccctatcgtacctgccaccactcaccgtggaggatcttttgaagcagatcgagtacctgcttcgatccaagtgggtgccttgcctcgagttcagcaaggttggattcgtctaccgtgagaaccacaggtctcccgggtactacgatggcaggtattggaccatgtggaagctgcccatgttcggctgcaccgatgccacccaggtgctcaaggagctcgaggaggccaagaaggcctaccccgatgcctttgtccgtatcatcggcttcgacaacgtcaggcaggtgcagttgattagcttcatcgcctacaagcccccaggttgcgaggagtctggtggcaactaagctaagatcaagcatcgcgctggtggattgctgcctataataatagtatgcagctttgttttgggctatgttgatgatatatcaatatataatatgctatatatttttattttacagtttgggtatgtaccatctcaatggcctctgctcttaacacatatgtaataatctcttccctccctctc

SEQ ID NO: 398736 - DNA, 501 bp, Oryza sativa nipponbare
  unsure (1)..(501): unsure at all n locations
ccacgcgtccgcccacgcgtccgccaaactcgtaaacctctccctctccccactctcgcgcctcctcccatggcttccttcccgaccaccgccgccgccgccgccgcgcaggcattcgccttcgccctcgcgccgaagccatcctcctccgccgccgcaccatccgcgctcttcccccgcaccgccgcggcggcggcgttcccgacgctggctgtgcgaggaagcgggaaggcgaggcagccggtggtggccgcggcggcggnggcggngacggngagcgagcagagggagacgatactgctccccgggtgcgactacaaccactggctgatcgtgatgggagttcccaaggaccccgccccgacgcgggagcagatgatcgacacctacctcaacaccctcgccaccgtccttggcagcatggaggaagccaagaagacatgtatgccttcagcacaaccacctacactgggtttccagtgcactgtcgacgagggaaca

SEQ ID NO: 398737 - DNA, 535 bp, Oryza sativa nipponbare
  unsure (1)..(535): unsure at all n locations
ccacgcgtccgcccacgcgtccggccatggccaccaccgcgtccagcctcctcaagacctccttcgctggcgcgcgcctccccgccgccgcccgcaaccccaccgtctccgtcgcgccgcgcaccggcggcgccatctgcaactccatctcgtcgtcgtcgtccactcccccctacgacctcaacgccatcaggttcagccccatcaaggagtccatcgtgtctcgcgagatgacccggcggtacatgaccgacatgatcacctacgccgacaccgacgtcgtcgtcgtcggcgccggctccgcggggctctcctgcgcgtacgagctctccaaggacccctccgtcagcgtcgccgtcatcgagcagtcggtgtcccccggcggcggcgcgtggctcggcgggcagctgttctccgccatggtggtgcgcangccggcgcacctgttcctcgacgagctcggcgtngcgtacgacgagcaggaggactacgtcgtcatcaagcacgccgggctcttcacctccaccgtcatgag

SEQ ID NO: 398738 - DNA, 546 bp, Oryza sativa nipponbare
  unsure (1)..(546): unsure at all n locations
ccacgcgtccgcgccatctctctcagctctcacagctcactgcatcaatggccgcggccaccatggcgctctcctccccggtgatggcccgcgcggcgccgtcgacctcctccgcgctcttcggcgaggcgcggatcaccatgcgcaagaccgccgcgaagcccaagccggcggcgtcgtcggggagcccgtggtacggcgccgaccgcgtcctctacctcggcccgctctccggcgagccgccgagctacctcaccggcgagttcccgggcgactacgggtgggacaccgcggggctctccgccgacccggagacgttcgccaagaaccgggagctggaggtgatccactcccggtgggcgatgctgggcgcgctcggctgcgtcttcccggagctcctcgcccggaacggcgtcaagttcggcgaggccgtgtggttcaaggcgggctcgcagatcttcagcgagggcgggctcgactacctcggcaacccgagcctgatccacgcgcagagcatnctcgccatctgggcggtgcaggtggtgc

SEQ ID NO: 398739 - DNA, 557 bp, Oryza sativa nipponbare
ccacgcgtccgggccggcaaggaccccaacaagcccaagagggctccctccgctttcttcgtttttatggaggagttccgtaaggagttcaaggagaagaaccccaagaataaatctgtcgctgctgtaggaaaagcagccggtgataggtggaaatccctgaccgaagcggacaaggctccctatgtagccaaggccaacaagctcaaggccgagtacaacaaggccattgctgcctacaacaagggcgagagcactgccaagaaggcacccgccaaggaggaagaggaggacgacgaggaggaatctgacaagtccaagtccgaggtcaatgatgaggatgacgacgagggcagcgaagaggatgaagacgatgacgagtgagccttccagtggacaagatgggagcagcaagacgctaagggcggcgggcgtcctaaggagcctatccatcatcatcatcgtctactagaattattcagtttcacttcacatcgtgatgttttactttttctctcgtcctataacggatagcgctccttgttggcgccctggtg

SEQ ID NO: 398740 - DNA, 667 bp, Oryza sativa nipponbare
ccacgcgtccgcggacgcgtgggcggacgcgtgggttagcgaatccagcagcagaagcagcagcagcagctcagccgccgccgatggcgtccacgatcatggccccaacctcccgcgtcctcgccgccaagacccccttcctcggccatccccgcccctccaatgcccccgtccgcgacatcgccgccgccgccaccggccgcatcaccatgagcaaggagctgtggtacgggccggatagggtgaagtacctggggccattctcggcgcagacgccgtcgtacctgaggggcgagttcccgggcgactacgggtgggacacggcggggctctccgcggacccggaggcgttcgcgaggaacagggcgctggaggtgatccacggccggtgggcgatgctcggcgcgctgggctgcatcacgccggaggtgctcgagaagtgggtgcgcgtcgacttcaaggagcccgtgtggttcaaggccggcgcccagatcttctccgacggcggcctcgactacctcggcaaccccaacctggtgcacgcccagagcatcctcgccgtgctgggattccaggtcgtcctcatgggcctcgtcgagggctaccgcatcaacggcctccccggcgtcggcgacggcaacgacctctaccccggcggccagtactt

SEQ ID NO: 398741 - DNA, 683 bp, Oryza sativa nipponbare
ccacgcgtccgaagacattctgcattccacatggtgggggtggtcctggaatgggtcctattggtgttaagaagcacttagcaccatttttaccatctcatccagtgatcaccaccggtggcttccctctccctgagaaaaccgaccctcttggtaccatttctgctgccccatggggatcagcgttgattctaccaatttcctacacatacatagccatgatgggttctaagggtctcactgatgcttcaaagattgcaatcttgaatgcaaactacatgacaaagcgtctggagaaacactacccagttcttttccgtggagtcaatggaactgttgcccatgagttcattattgatttaagaggatttaagacgactgctggtatagagccagaggatgttgcaaagcgtttgatggactatggattccatgcacctactatgtcatggcctgttccaggcacacttatgattgaaccaactgaaagtgaaagcaaggccgaactagataggttctgtgatgctctaatctcaatcagggaagaaattgcagagatagaaagtggcaaagcagatgtgaacaacaacgtcctcaagagtgctcctcacccgccccaacttctgatgagcgactcatggactaagccgtactccagggagtatgctgcgttccctgcagcg

SEQ ID NO: 398742 - DNA, 671 bp, Oryza sativa nipponbare
ccacgcgtccgcggacgcgtgggttcttcgccagttttgccttgggctgggcaataactacgttctctggagcctgcgcctatccatttgatacactccgtcgcagaatgatgttaacttctgggcagccattgaaatataagaacgccttccatgcagcaaaacagatagtttctactgaagggttcttcacactattcagaggggtcggcgcaaatattctctcaggaatggcaggagctggagttcttgctgggtatgaccagctccaccggtttgcaggtcaacatggttacaattttgagagcaagatgaaaggggcattgaaatgatgtgcaaatggggataaatagaggcatatccttggttgaagtttggattggccaaatgggatgtatgagcttggataatcaagcgggcgaaacagaactccagatactcctgcagttgataggattgacggcgaagagaacagcttttgcaggatgtatactttcaaggagcggagatgaagtcagaatcaaaagatagctcttgcggtagaaagaatgtcaataattctgaaacctgattcttgaagtgtgaatatcgatcgaaagttagatcgtactcgcgctaccaatgccttgatgtgaactgtaaatagaacttgtggaattgctccattgaat

SEQ ID NO: 398743 - DNA, 628 bp, Oryza sativa nipponbare
ccacgcgtccgcccacgcgtccgcaaaaaaccaacccaaccgccgccgcatcgccctcgttagaacgatggccgcgtcggcgctgcaccagaccaccagcttcctcggcaccgcccctcgccgggatgagctcgtccgccgcgtcggcgactccggtggccgcatcaccatgcgccgcaccgtcaagagcgcgccccagagcatctggtatggacctgaccgtcccaagtacctgggcccgttctcggagcagacgccatcgtacctgaccggagagttcccgggagactacgggtgggacacggcggggctatcggccgacccggagacgttcgcgaggaacagggagctggaggtgatccactcgcggtgggcgatgctgggggcgctgggctgcgtctcccggagatcctgtccagaacggggtgaagttcggggaggccgtgtggttcaaggcccgcgcgcagatcttctccgaggggggctcgactacctggggaccccacctggtgcacgcgcagagcatcctcgccatctgggcggtcaggtggtgctcatgggattcgtcgagggctaccgcgtcggcggcgggccgctcggcgagggcctcgacaaggtgtacccaggc

SEQ ID NO: 398744 - DNA, 655 bp, Oryza sativa nipponbare
ccacgcgtccggctccttcctcccagtgtctctcaagagcggtgcagggttcacaaggcaggagaaaatgggggagatcaccaatgtcatggagtaccaggccatcgcgaagcagaagcttccgaagatgatctacgactactacgcctctggagctgaggatgagtggactctcaaggagaacagggaggcattctccaggatcttgtttcgtccccgcatcctgatcgatgtctcaaagatcgacatgtccgcaactgttcttgggttcaagatatcaatgcccataatgattgctcccagtgccatgcagaagatggctcaccctgacggagagtatgcaacagccagggcagcttcagcagcaggaactataatgacactgtcatcttgggctacttcaagtgttgaggaggtcgcctcaactggaccaggaatccgtttcttccagctatacgtgtacaaggacaggaatgtggttgagcagcttgtcagaagagccgagagagctgggttcaaggcgatcgcactgaccgtggacactccgcgactgggacgcagggaagctgacatcaagaacaggttcgttctgccaccatacttgacactgaagaatttcgaaggcctggacctcgcagagatggacaagagcaac

SEQ ID NO: 398745 - DNA, 672 bp, Oryza sativa nipponbare
ccacgcgtccgcggacgcgtgggcggacgcgtgggcggacgcgtgggcgccgtgcaccgcctctcacaatgtcgaccggcgccgccgccgccgctgcccagagctggtgcttcgccactgtcaccccgcgctcccgcgccacagtcgtcgccagcctcgcctccccatcaccgtcctcctcctcctcctcctccaacagcagcaacctcccggcccccttccgcccccgcctcatccgcaacacccccgtcttcgccgcccccgtcgcccccgccgcgatggacgccgccgtcgaccgcctcaaggatgggttcgccaagttcaagaccgagttctatgacaagaagccggagctcttcgagccgctcaaggccggccaggcacccaagtacatggtgttctcgtgcgccgactctcgcgtgtgcccgtcggtgaccatgggcctggagcccggcgaggccttcaccgtccgcaacatcgccaacatggtcccagcttactgcaagatcaagcacgctggcgtcgggtcggccatcgagtacgccgtctgcgccctcaaggtcgaactcatcgtggtgattggccacagccgctgcggtggaatcaaggccctcctctcactcaaggatggagcaccagactccttccacttcgtcgaggactgggtcagga

SEQ ID NO: 398746 - DNA, 345 bp, Oryza sativa nipponbare
tattgcaaaaacttgcattagattaatagcaacaaggtgaatttcaaacaagtttacttgcagttcttcactgccagaatctaagtactacattgaaatcagcaatctacacagggcaaccaacacgcgacgcctcgacacgaagagagagaaatatttggggggagcctagccgccgaagccgtagagggtgcggccctggcgcttgagcgcgtagacgacgtccatggcggtgacggtcttgcggcgggcgtgctcggtgtaggtgacggcgtcacggatgacgttctcgaggaagatcttgagcaccccgcgggtctcctcgtagatgagccccgagatgcg

SEQ ID NO: 398747 - DNA, 491 bp, Oryza sativa nipponbare
tatcaccaaatcgacgtaccataccagatcgagtttaactaagaccagtttgatttcgtgtttgatacaaaaattaagatggacggattcacaagagagcaccctctacttaagctttacattacaaggccaaccagcagctgcctgccggccgaccactgcgtgcgcacgcgcgcgcaataatcaaccaatcacacacagtacgcacgcacataaaaaccacccatagccttcacgtacgcccggacgcacgcaccggttcgtgccaagctcaagggtagatggttctcgggatgatgatgtcgccgatgttgttgtgccacgggtccgagaggtggctggccaggttctccagtgggccggtgcccgggtacgccgactgttggacgcagaaacccacaaaggccagcatggccaatcgcccgttcttgatctccttgagcttgtactcctcgaacttgacggggtccttggagaagccgagggggtcg

SEQ ID NO: 398748 - DNA, 495 bp, Oryza sativa nipponbare
ttttatccatccaagtaacaaggccttgttgacgctttcaatcatttacagctcaaagcactaccagcatcccgctcctgcttgccaggcgcaattctagtttgttttctttcttctttttgggaggagttcaaagttttcccataactaacatactaagtacagtagtatataataacatcatattatgtagtaactaactaggaggcctctagctagttgattgggtggtactgcgctgacacccgcttaggagggagcttccggaggatgaaaaggacaagagctgaaggcagtatctctgtcaacatatagtagaagaaatcaagaattggatggtccaaaacctccagagatacatcagaatcaaatgctgatatcgccaccactatgcaccttatcagggaaacaagcacagcagattgcagtcactgtcccaacctcataaagcttcttttttcggacgcgtgggcggacgcgtgggtcgacccggga

SEQ ID NO: 398749 - DNA, 344 bp, Oryza sativa nipponbare
atagtatagcccatatctttatattatattattattaacaaaaacttgtcatgcccagctatggcttgggcgcgatctgattcacagaacaaagagaaaacataaaaaggggaaataattaatagcaagcgtcaagccggcctgcttaaaaggggtaaaggcagctgccgtcgtcgctcctcgccgttgggtcgaagttcttggcaacagggtcggtgcaaccttccggcacaggcaggttacctgcttgctgtgctccttgccctcctcctcctatgcaggccgcctacgatgcatcgatgggatgcgaatagctagagatcttttattcagctggatggcgc

SEQ ID NO: 398750 - DNA, 376 bp, Oryza sativa nipponbare
  unsure (1)..(376): unsure at all n locations
taaattcatgtaaagcaaattctttcagaaatntaggatatacagcattgtctatttctttataagatccgacagggttcaacaagacanaggcagcgttttttccttggctgcttgcttgctgctgctgctgctgctgctgctaatcatccgtcgtaagcctgtgcatgatcatctccacaacggcaggagcatcaacggtcacagcaaccttcacggttggcttaccggtccacgcagttatctncccataccttttcttggttgtgtcgaaaactgtgagaccctttgtgatgccatcagtctgcaccctcactacaccttccgtgtaagtcatcagtgacggatctaccgcagcaataagtgttgctggatc

SEQ ID NO: 398751 - DNA, 367 bp, Oryza sativa nipponbare
  unsure (1)..(367): unsure at all n locations
caaataccaagatcgatcgatcgatgtacaagtggatgcattaattcatcatcttgggtgttcttatattacaaatcaccaccatgcaagtcgccattaaccaccaacccagctttcctaatttaagtagtaatcaacaaaaggatgacctctcctctctccataccctcccagctcgctcgtcatcacaaaactaaacagcgcgcgcgaacgcacaccaacgcatngatcccgtttgaattgcgcgcgaaagagcttaaattaagaggatgaggagaaggtgtcgaagatggtggtgtggagcgggtcgctgaggtgggtggcccagttgttgaggggccccttgccggtggcggcggcctgcacg

SEQ ID NO: 398752 - DNA, 385 bp, Oryza sativa nipponbare
  unsure (1)..(385): unsure at all n locations
catgaagtaacttatatatatgttgaactccgttaattaaaaattaaaggagtatataaaccggttccgtaaatatcttaaggcgagatatacagatgccaaataggtgtacagtactcgaaattacaaagattataccagtgtaattaatcgttgggattaagagcatgaacgacccagttacgaggggtgcacggagtacgtgtgttgcttgcgcgcgtgtggatcgacgagattcttttgcaaaaattacctaattaattaatcggcgtgctctctggcgtcgncgatattgtttattgtttggctagagttcgccggcggcggcggcggcgaggtcctcacaacctggggaaggggcggccgaggcggtcggcgtcggtgt

SEQ ID NO: 398753 - DNA, 507 bp, Oryza sativa nipponbare
tttactcgcagaatcatcttaacatagcataacacttgcagtatggatcatcttaacaacataaatataactcaacataggtaacaggcaaaaccatattccagagactagagtagagtcttaaacatttcaatcacatccatttcacaatgtcaaaaaggcaaggttcagggctaagttttaaaagactaaacttgaaagtaatgcagtagctagatagatgtagaacaagccaagtagctccattgatagggtggaaaagagaacaccgctccgaatcggtccggcgagcgctcagcggtacgacttctggaaccttgcgcgggcgccgcgaccaccgaacttcttgggctcgcagcgcctggggtcggcgaccaggagggtgcggtcgtaacgggcaaaagaggtctctggacctccttcttggacgcctcgtcgacgtacttctggtagtaggcgacgagggccttggcgatggcctggcggatcgcgtagatctgcgacgtc

SEQ ID NO: 398754 - DNA, 253 bp, Oryza sativa nipponbare
cgaactcttttttttctccttggggggtatttcatttgatgccgataggtagcaacaagcagttcaaacaccataaccaaagcgaactcaattcatggtaacatcacggacgaagaaacacctaacactgggtggatggatagagggcttttcgactcgagagagccactggacacgataacgactcgactcgatgataagatgattctgacacggatagctaaagataactggccacgatgggccccaccaa

SEQ ID NO: 398755 - DNA, 491 bp, Oryza sativa nipponbare
agcaaatcgatccatgcgaccatgcgtgcaaatcagttggagcacaaatttacatgttacacccacaccctacacccatgcataataatacatcgtatatacgtacgtacatacatacccctctcgatcacacgcaccatcgatcgtacaaagttgcgtacatacatacgtacacacatatacgcatacgcacgtacatacatacataattaaaaactcgtaattaattaaatacgtagttgatggcatctctaatggaacttgaggctggtgaggatgttgttgtggacgggatcagcgaggtgatcaagcaggttctgcacggggccaaccccggtgaagagcgcctggacggagaagccgaggaaggcgagcatggcgagcctgccattttttgattctccttgagccttgagcttccttcattttccgccttcgcttcttgggtcccgaaagccgagccgggttgaaagaggcgggccgcccggggt

SEQ ID NO: 398756 - DNA, 371 bp, Oryza sativa nipponbare
ggaataagaagctggcatatacttcggctagtagcattgcaacgcaaacagtatgacaaggtaccacgcattgtttaagagctaagacaaagacaaaactgatgcatccaacgtaccaaaaagaaagcgaacagcagcagtcagatagctatgagaagagaactaggagagggataactagaagggacagaatggcatccatgggtccatgacgtttagtcgacctcctccatcttgctctcgccggcgtcgtcctccagcggcggcatgtcggcgtcagcctcggcggactcgtcctcgtcgatgctcaggccgagcttgagcatgcggtggatcctggtgccgaaggtgttggggtcctccaagctgaa

SEQ ID NO: 398757 - DNA, 176 bp, Oryza sativa nipponbare
  unsure (1)..(176): unsure at all n locations
ttaatccncttttgggatggtactcttatagaatcgccgggaactattctaatccaataatatattgcgcgggcgaatatttactctttcctgtcttatttgctaattcataaccttataaaataagacaatttcttttgcttacatccgacataccacccactgaaggattggga

SEQ ID NO: 398758 - DNA, 520 bp, Oryza sativa nipponbare
  unsure (1)..(520): unsure at all n locations
ttaaaaaaatcctgaagtctgtaccaaagttcagtattacacctcacagaaaatggcccgtgtctgcagctgtgtttcttcttcgacagtcatgcgttcctctgtcgaaggggaacaacgtacgggcagccaatccgagcacagtatatatagtatagcagttctgcccggggacagtcaatgtgtgtgcttcgttacattataggagtatatatttctgcacctacgcgagcccgtacttggacagaggtcttagttttcgtacactttgcactcgtcggtcttcgggttgtccttgcagaagtcctccagtgggtcgncgctgtcctgcaccgccgcgccgggccacttgctcgccaccagatgcgccagatcgaccacgcgttggctgtagccccacttcgttgtcgtaccaggcgaccaccttgaccatgtcgtcgcccatgaccatggtgagcgaggcgtctatggtggaggagacgtcggagcaacggaagtcgacggacaccagcggcacgtt

SEQ ID NO: 398759 - DNA, 338 bp, Oryza sativa nipponbare
gggtggcgttttttttttttttttttgagggatttgttaaccaaactgtaaaataaaaatttttagcatatatattggtatatcatcaacatagcccaaaacaaagctgcatacttttattataggcagcaatccaccagcgcgaggcttgatcttagcttagttggcaccagacttcttgcaacctgggggcttgttggcgatgaagctaatcaactgcacctgcctgacgttgtcgaagcccatgattccgacaaagggattggggtaggcctttttggccttcttgagctccttgagcacctgggtgggattggtgcagccgaacatgggcaggt

SEQ ID NO: 398760 - DNA, 361 bp, Oryza sativa nipponbare
  unsure (1)..(361): unsure at all n locations
gacagaaacaaaattaagctagaggagcactgattccacgcacaatttacatgatcattacatcgtccatcacacaggcactcatgcatcgattacacataggagtattgattcgtgtgactagcttaatgaatttgattagccgatgatctggtccaggacgccgatgttcttgaggccgaggacgacgccgacncccatgatgtggccgacggcgccgcaggccagcgtgtccgcgagcgtgaacccggcggggtcgccggtctgcaggccggagtagagcgccttcagctttagccccgccgtggacttcctgttcgccgacggcgccagcccgaacctacccgcgaacagcattagc

SEQ ID NO: 398761 - DNA, 349 bp, Oryza sativa nipponbare
ggggggagcagatagcgtagtgaccggccggcctatcaaccatgtatgcatggcgatggatcgacctacctagctagctctcattttattcagcataaacacagataacacaagatacaaagcgtgagacgacagctgcatctcggccggcgctgcatggcatcctccggtagcgatcgatcggattagttcacgctggagcagtccatggaggggctgatggtgtaggggatgctgacgccgcacttggaggggatgctggcggcattgccggcgttgaggccgctgatgctgccggccacgttcttgaggcagttgcaggcggtgcggcggtcggcggtggtggtgg

SEQ ID NO: 398762 - DNA, 382 bp, Oryza sativa nipponbare
tgggatagttgaggggtactgacgttcgagcctcacctctgacctctccaaacacagttcttcgatccccatacggccatacggtttgcctattcggtctagtcctgaggtggatacagtccgtttatggtcatgccgccgtcgaccgagatcgtctggccggtgatgtaggaagcgccgggcatgcacaggaacgcgaccagcgatgacacctcttctggttctcccacgcgcttcagcgctgttcgacgcacgacgctgtcagcgaagtccttccttgccaattcatcttccacaagtgaagtcttcatgtaccatggggcaacagaattgggtcttatattgtcttttcgccactcacatgccaggttcttggccagct

SEQ ID NO: 398763 - DNA, 504 bp, Oryza sativa nipponbare
tttttatccatgcgaccatgcgtgcaaatcagttggagcacaaatttacatgttacacccacaccctacacccatgcataataatacatcgtatatacgtacgtacatacatacccctctcgatcacacgcaccatcgatcgtacaaagttgcgtacatacatacgtacacacatatacgcatacgcacgtacatacatacataattaaaaactcgtaattaattaaatacgtagttgatggcatctctaatggaacttgaggctggtgaggatgttgttgtggacgggatcagcgaggtgatcaagcaggttctgcacggggccaaccccggtgaagagcgcctggacggagaagccgaggaaggcgagcatggcgagcctgccattcttgatctccttgagcctgagctccttcatttccgcctcgctcttggtcccgaagccgagcgggttgaagagcgggccgccggggtaggccggctcgccggagccggcgaggtact

SEQ ID NO: 398764 - DNA, 466 bp, Oryza sativa nipponbare
taattcacaacaccatatggcattgatcaggttcagaacctgcacagaaatacacactaccggtacagatctcaccctctctccaatactcgtacatccatccacgcggtccacacgaatacgtacatctatacggtacacgtacgtacatctactgcaccgcgtacacacacgcacactctcctgcagagacgcgcatcgtcgtcaacctagctagcttagctgaaggcgatgcgtcgccatggcagcacggcggcggcggcgctcacttgccggggacgaagttggtggcgtaggcccaggcgttgttgttgacggggtcggcgaggtggtcggcgaggttctcgagggggcccttgccggtgacgatggcctggacgaaaaagccgaacatggagaacattggcgaggcggccgttcttgatctccttcaccttgagctccgcgaaggcctccgggtcgtcgg

SEQ ID NO: 398765 - DNA, 379 bp, Oryza sativa nipponbare
tttcaccaaacatatactgcaatggtataagaagagattatatcccaccatcgatcgattacaccatcatcaataactgaagagcagcctgacagatgattaaaattacatgtccatccacccaaaacacaagtaattaataggtcgattatgagagaagaagaagaagaagaagaagtctagatgtcgaagacgttcttgccggtgaacttgacctcgatggggctgacgttcttgccgatgctgcggaagttctggccgacgccctgcctgccggcgttgaccttctccgggtagacgccgtccttggggtggaggtactgcacctcgccattggggaagacgcggtagaactggtagttgatcttgtacttggagc

SEQ ID NO: 398766 - DNA, 354 bp, Oryza sativa nipponbare
  unsure (1)..(354): unsure at all n locations
aaacaagctaatggtaggattaattcacaacaccatatttcattgatcaggttcagaacctgcacagaaatacacactaccggtacagatctcaccctctctccaatactcgtacatccatccacgcggtccacacgaatacgtacatctatacggtacacgtacgtacatctactgcaccgngtacacacacgcacactctcctgcagagacgcgcatcgtcgtcaacctagctagcttagctgaaggcgatgcgtcgccatggcagcacggcggcggcggcgctcacttgccggggacgaagttggtggcgtaggcccaggcgttgttgttgacggggtcggcgaggtggtc

SEQ ID NO: 398767 - DNA, 271 bp, Oryza sativa nipponbare
  unsure (1)..(271): unsure at all n locations
ggggttggtgaagaaacttaaaagngtccctgatgtgtttaatcatccggtctgtcactcacaaatggactcaaaatacagacccagatcaagtgtggtgttcaaccaaaatgttaactggcgaatggaaggtggcgtggttttctagaaactgcagatttgtacagaccaatccccagacagaagaaatacaagatcaagactggtgggcagcaaacaaattttgctgggatttatttgccccgattcatcgtccaagttcttcatacct

SEQ ID NO: 398768 - DNA, 477 bp, Oryza sativa nipponbare
tttttgaagtgataatttgaatacttaatagtaatagactctttgatggagtattacaacatgcagcagtggcattaatacgccagtacattaattaagttacacatatgcaggctccattttggtttcttttaatttatcgtattacagaatttctgtagccttgctgatgatcacttggatatcatgtactagtaattaacaataggatgcatacaaaagatggcccaacgacaacagaagatgcgtgcatctgacattgtctggccttatttggttggtagtactccaattaattaacaagagatgatgcattcttgtgccttagtttcttcacatgcttggcttcacgttgagcctattcgcaatcttcaccctcaacgactcatcacactgggagaggtaggtgaccaaagatggtgcggagctcaggggagaccttggggtgcgcgagctcgccggcgaagcggcggatga

SEQ ID NO: 398769 - DNA, 519 bp, Oryza sativa nipponbare
ttgaaatccttcacaatgggttgagagtaattcgccatcagaaaagaaaatttctacaaatatattataatttagttacaatacttttttttttagaaacacccccgtatatgaaacttgcagtcaagccaagaacttctcgaccttgttcacttactccacgctcccgatgtacagcggcactctctgatggatctccgtaggcatgatgtcaagtatcctctggtggccatcggagcccttgccgccggcctgctcgacgatgaagctcatcggcgcgcactcgtacagcagccgcagcttgccgttcttgctcttctggtccctggggtagcccgagatgccgccgtagagcagcgtgcgggggaagtcgccgacgaggctgccgatgtaacgcgcggaggatgggtttcccggacggcccgggctccttgaggctggccatgtagctcttgagcttgtcgtcccagagcgcgtagttgccctcgttgaaggcatagatcttgcctgccttgggga

SEQ ID NO: 398770 - DNA, 360 bp, Oryza sativa nipponbare
gggataggagaaagcaaccgtatttctttctacattgaaatatagaagatgtacattgaaatgtgtcaagaagagatgtaggagcaccctcatggagagggatttttagaagttccattgcatggtttcacaagttatgcaatgaccatcctactttcttctagctgtaatatttccaaaactagttacaagaaatgcgaggatgcccattgtcattgatatggtatggtgatgaagagattcacgaaatatgaatgtggagctcattaaacttttgccgcttcagtaggtgcaccggccctctcagcaataatctgctcatagagatctctaatcttcagtcctacgatagtttggaag

SEQ ID NO: 398771 - DNA, 477 bp, Oryza sativa nipponbare
ttttaatttcaatggaatgtctagcaaaaggatcattgattttatacttatcacgagaagttcactgaaattacattcttaggagaagcagcgtatacacacggataaaacacggagaaaatctttacgagagatggttggtgtttgggaggcaagaacggccggcggcggggcggccattacgcggatgggagcaccttcttgacgatctcgtcgctgagggaggcgatctgggcgtcgagcgccttgacggcctcctccttctgcgcctcgaggttggcgagcgcctccacgagctcggcctcgacgcggcggcgcccctcgtacagcttcgcctccagctcctgggtggtctccttcttcatcttgatgagcgccgcggcgatcttggtgcgtgccggctttaagaacgggggggcctgctccttcagctgccgcacctactcggacgcgtcggacgcgtgggcggacgcgtgg

SEQ ID NO: 398772 - DNA, 449 bp, Oryza sativa nipponbare
taaatatatataggcggagcttacatatatttcattcacatatgcctcacccaacaacatatagtcgtagcagataccactcttacatcaagtcagagagagatcaggtgaaacaaaaacaaaagcagagcacggccggtaaaatcaaaagacgatgaacaaactgggaacacacgaaacaaggtgggagacatcatcgaatcagagatgaacaattaaacaaggctatatatgacgatgacggcttagttgccaccagactcctcgcagcccgggggcttgtaggcgatgaagctgatgagctgcacctgcctgacgttgtcgaagccgatgatacggacgaatgcatcagggtacgccttcttggcctcctcgagctccttgagcaccttggtggcgtcagtgcacccgaacatgggcagcttccacatggtccagcggacgcgtgg

SEQ ID NO: 398773 - DNA, 519 bp, Oryza sativa nipponbare
  unsure (1)..(519): unsure at all n locations
tatatcaaacgctctagaaaagattcatgtgatgaaatacatgatgaaccacgtatgttctcaaggtaaaattaattaatgcagtatagttttaactttgtccatcgatctcaacctgtaactgtgacgacacactggctacagtgccctcgaggtactagcagtatagcagtagctgtagtacgtagcagcagcagcagcaggttcactgtcttgattggattggatcggattagtagacgtagttcttgacgaacatgccctccttggcctcggcggcctcgccgtcgctggtgtacttgccgagctgcgccagcgagttggccttggcgcggaggagcagcgcgtcctgcgccgccttcacgttctccggctgcccgccccacgtnttgaggcacgtggtcttgcagggcccttgcgtacgagaacgacacgtgccacgggttgggcccctggttcatcgcgttcaggttctgcgtngccttcaccttcgactgcccacccgacaagaacatgatg

SEQ ID NO: 398774 - DNA, 517 bp, Oryza sativa nipponbare
tactaggcaaaccacacgaatacacgattgattaatttcactgagaatagcacgggtacatcacatcacacaaattcatacgttgatacacgcatagtcgccgaagcgaccagctgcttaattaatcgataacacacgggtttaattcagcaataatcagcacacacacaaaccacactcatatgggtggtttttattgtggactaattaaggtaggtgactcgccggcggcgagtgttcggttgcttcgtgacttcacttgccgcacttgcagtcggtgcaggagcagctggtgccgcacttgcagccgccgttctcctcgccggcggcgacctcctcgaagtggctcttctcggcttcaactatgacgacgccatagctggtacctttctttacgcactggcttcttgttagcacaggtccagttgccgcacttgtccgacatggtcgaagatttaattagctaagtgagtgatgagttaatcccttgtgttgctcggacgcgtgggcggacgcg

SEQ ID NO: 398775 - DNA, 495 bp, Oryza sativa nipponbare
tttgaacttgcaattgacgtgccaaaattctagtattacacgggaccaaatcaacgagataggtttgatcaaatcgtccccagtataaaacaagcttgatcttctcaagctagtgtggtggtgtaaaattacaatcatgatcaagagagtagtacagtaattaatttaattacggttgctgcatgcagctgagctgcgtagtgatgaatctgtatatgtctaggtgaccttgacgccgttgtatctgaggatctcgccgatgagctcccccctgccggagccgacgtagcggccgacgatgtcgccgtccctgatgaagaggaaggtgggcacctcgacgacgtccatgtcgcggaggaactccatgcagctgtcgttctcgtcgccgttcatgcgggcgaaggaccgtgggtgtcggcatggtgcgcgacagcttcacgacggtggggtacaccttcacgcagggcccgcatcgcttgagccccacgtcgagca

SEQ ID NO: 398776 - DNA, 329 bp, Oryza sativa nipponbare
tctccttgcacacggttggagtttaattccaatggatagcaaccagcagttcaaacaccatatccaaagcgaactcaattcatggtaacattaccgacgaagaacacctaacactggatggatggatagaaggcttctcaactctagagaacctctggacacgataacgactcgactcgatgataagatgattctgacacggatagataaggataactggccaccacagggcccacctatcaggtcctccagtttcagccggagtcgctgctggagccgccgtcaccgctgccatcgtagccgtcctcgccgtccttattgtcgtcgtt

SEQ ID NO: 398777 - DNA, 368 bp, Oryza sativa nipponbare
tgggaaacgaatagaatcggtattgcaaaaacatcatcttcttcttcatcttcttagtgtacacaacaccaactcgatcatcatctcgtcgcactaaacccatcttccccaacccaaagacaacgaactcgctggccacaaatccatccaaccacaattaaccactgctaagctacggtcccccacttcacttgccggggacgaagttggtggcgtacgcccaggcgttgttgttgacggggtcggcgaggtggtcggcgaggttctcgagggggcccttgccggtgacgatggcctggacgaagaagccgaacatggagaacatggcgaggcggccgttcttgatctccttcaccttgagctccgcg

SEQ ID NO: 398778 - DNA, 287 bp, Oryza sativa nipponbare
ttactaggcgaaccccacgaatgcgcgcttggttaaattctctgagaatagcccgggtgcatcaccttacacaaaattatacgtggatacacgccatgtcgcccaagcgaccagcttgttaattaaatgagaacacacgggttgaattcagcaataatcagcacacacacaaaccacactcatatgggtggtttatattgaggactaattaaggtaggtgactcgccgacagaaagtgttagggtgcttccagacttcacttgccgcacttgcagtcggtgcaggag

SEQ ID NO: 398779 - DNA, 369 bp, Oryza sativa nipponbare
  unsure (1)..(369): unsure at all n locations
gacagaaacaaaaggaagctggaataacacttgttccacgcccaatttacatgatcattacatcgtccatcacacaggcactcatgcatcgattacacataggagtattgattcgtgtgactagcttaatgaatntgattagccgatgatctggtccaggacgccgatgttcttgaggccgaggacgacgccgacgcccatgatgtggccgacggcgccgcaggccagcgtgtctgcgagcgtgaacccggcggggtcgccggtctgcaggccggagtcgcgcgcctccagcttcagccccgccgtcgacttcctgttcgccgacggcgccagcccgaacctccccgcgaacagcatcagcgtcgtcgt

SEQ ID NO: 398780 - DNA, 503 bp, Oryza sativa nipponbare
  unsure (1)..(503): unsure at all n locations
ttgtcgaaatgcaggtaacgtcatcgggggatatgatcatcagttcacgagaacagaggaagaaacaaaagctaaaaattaaaaccatcaacagcccgatcgagtttgcattactagatacacacattgcagccttccttccctctctccatgtatcgatatatcaacccggccacgcacaaaacatttgttcattccctactcgagctgcgcgtaccacaccccttggatcttgacatccttgggcaccttggcgccgaggtctgtgtccgacggctgcacgctctcgaagacgccaatcacctcgccggtctctggcttgctcttggtgacgctcaacgtgatgttgcccgtcgacgacgaggcgttcttgacgttctccttagcgagcttctncctcgcttcttttgcctccggcggggagcgccacagcgttgtcgtagccggtagagccaccgcggccctttgggtcgaggaaggacgaaccacggtagcttggcacg

SEQ ID NO: 398781 - DNA, 383 bp, Oryza sativa nipponbare
gggactgaagaaacttaaaagtgtccctgatgtgtttcatcatccgttctgtcactcacaaatggactcaaaatacagacccagatcaagtgtggtgttcaaccaaaatgttaactggcgaatggaaggtggcgtggttttctagaaactgcagatttgtacagaccaatccccagacagaagaaatacaagatcaagactggtgggcagcaaacaaattttgctgggatttatttgccccgattcatcgtccaagttcttcataccttcagggccaacttcttagcagcaagaacctccgcttcgagggttggctcccaaagaattgtggtttcagccaatagcgctgtcacgacgtacgggtccatgtttgatgccgggcg

SEQ ID NO: 398782 - DNA, 513 bp, Oryza sativa nipponbare
  unsure (1)..(513): unsure at all n locations
agaagaaagcatccataggggcattggaccatgcatagagagcatacagttttgcaattcagctcagaatggcatatgtaccaagcttgggggggagtagcaagcaatgcacagcaaaatgggaagatatgaacaatcatggccaacgaggggctaacaacagtttagcacagtacaaaaagtaaacacacataacaggaatatgcaatgcaacggaaccggagtatactgacaaaccaatcattaaccagagaactacttattaaccagctactaatagtcttctccatcgtcgttctcgtcgtctgcaccctcggcgccgacttcctcatagtccttctcaagggcagccaagtcctcacgggcttctgagaattcaccttcttncattccctcaccaacgtaccaatgcacaaacgcacgcttagcatacatcaagtccaacttgtggtcgatgcgcgagaaaacctcagcaacagcagtgttgttgctgatcatgcacactgcacgctg

SEQ ID NO: 398783 - DNA, 512 bp, Oryza sativa nipponbare
  unsure (1)..(512): unsure at all n locations
cacagaaaatcaatgcttgcgtgcaggggaaatcgatggatcgacctctctccttaacttgttcttaattctcatgtacaatcaaagaaacacacacgcacacacacatgcgtgcactgcatctctctgagcaacgaactcgattgatttgattttgattcgctagggattaaagagaagctgagatagagatttcgacgatcatgcgacgctgaaggagctggctgcgctctcgacgaacttcctggcgcccttgaaccacctcttgtcgccggcctgcgccttgcagatgtacagcttgccgtcgttgacggtggccgtgatcagctggtgcttgccgccctcgtcgccgtccgccgtcctcgtcagcaccgttacgctgtagtactggtttccttccaccaacgggggcggagctttccaggatgttcgccgtcgccaccgngtccgactcaaacccaccctcggaatctgtcttgccggagtaggcctgcttgccaagcaagaagtcg

SEQ ID NO: 398784 - DNA, 497 bp, Oryza sativa nipponbare
attccaaaagatagcgaacgatgttatttacgatcgcaccgctggtattgcagcaaacttaacattataagtgagcctgctatgcgtgattatcattaacacagggtgctccttgtagggctcttacaacaccaaggaattcaccatttcacctaggtggcctaaatgactatatgcctgaatcacctttaaacctatccaaattccaaagatacaacaatagcaggaaatgctaagtcgactagtttccgtaaatgacaccatttgggctcacaggagagccattgtgttgaagatcctcttcctcaacttctgacaagaaaccgttctcaaagaatgctgaatgaagggcctgtatacactgtttcggctcgctatcatggaccaccaattgaatgttaaccttggatgccccttgtgagatcatctggacgttaacgccatttctccgtagaacattgaaagccttctcaagaatcaatgacgatctctgtaca

SEQ ID NO: 398785 - DNA, 361 bp, Oryza sativa nipponbare
  unsure (1)..(361): unsure at all n locations
ataattaattcacagcagcggattttattgatcaggttcagaacctgcacagaaatacacactaccggtacagatctcaccctctctccaatactcgtacatacatccacgcggtccacacgaatacgtacatctatactgtacacgtacgtacatgtactgcaccgngtacacacacgcacactcttctgcagagacgcgcatcgtcgtcaacctagctagcttagctgaaggcgatgcgtctccatggcagcacggcggcggcggcgctcacttgccggggacgaagttggtggcgtaggcccaggcgttgttgttgacagcgtctgcgaggtggtccgcgaggttctcgagggggccc

SEQ ID NO: 398786 - DNA, 234 bp, Oryza sativa nipponbare
ttacgggatcccttccatggttgtgatggtcgacaaattaataaaatttgctttaaatccaaatttggggggattttagccggagcttggttttaacatttcctaacccaacgataatggaggacctttaacaataaaaccgcccgaaaagggagggaagagatatttacttatgggttaaaagcagaggcctttgaaatggtccttaaccaaactgtaaaataaaaattttta

SEQ ID NO: 398787 - DNA, 369 bp, Oryza sativa nipponbare
gggtggggggaaacgaataaaatcattattgcaaaaacatcatcttcttcttcatcttcttagggtacacaacaccaactcgatcatcatctcgtcgcactaaacccatctttcccaacccaaagacaacgaactcgctggccacaaatccatccaaccacaattaaccactgctaagctacggtcccccacttcacttgccggggacgaagttggtggcgtacgcccaggcgttgttgttgacggggtcggcgaggtggtcggcgaggttctcgagggggcccttgccggtgacgatggcctggacgaagaagccgaacatggagaacatggcgaggcggccgttcttgatctccttcaccttgagct

SEQ ID NO: 398788 - DNA, 506 bp, Oryza sativa nipponbare
ttttgatggcaggtgatgtgtgatttggaccggataccgaaacaaaaatgtacaggagtttccaagaagaaagcaatctatcatattcacaaatttgagtgaattgagtcagtgtctagcatgtctaacactgtttcattataaatttataatatttacgagctggaacaacctatattcatgtgccccccttgtccatctctgaaggtattgctgaagttttgcatattggacaccagttcttctgtctaagccattcatgaatgcaggacacatggtattgatgctcacactggatcctaccaacttcttcgccctcaatgtattcctcctgacatatgctgcacttggcgtcatctaatacagctctgttcgcttcaagatctgaatttggtaacttatacaccatttcgtttgagacactttacaagctgctcataagatagggcagtgctgacagaaccgattcgctcctctagtgctaatagttcctcataagacatgtt

SEQ ID NO: 398789 - DNA, 365 bp, Oryza sativa nipponbare
taatctaacatacgcaaactgatattatcacaatgttagccgatgacaatggaaagagtaatctaggtacaagcggatcattgacggtggagacaagacattggctgcaccacaacacccaccagtggcgccaacaaggagcgctatccgttataggacgagagaaaaagtaaaacatcacgatgtgaagtgaaactgaataattctagtagacgatgatgatgatggataggctccttaggacgcccgccgcccttagcgtcttgctgctcccatcttgtccactggaaggctcactcgtcatcgtcttcatcctcttcgctgccctcgtcgtcatcctcatcattgacctcggacttggactt

SEQ ID NO: 398790 - DNA, 486 bp, Oryza sativa nipponbare
tttgcaaaccccaactttgttcagtttctgaattctggatggatcatatcagattcatcacagcatcgtacaatctgtgcaagcattggtacatcgagcgatggagagagagagtagtctacaatggcggctgggccattcacgagcccggcgtgaacttggtggcgtagacccaggcgttgttggcgacggggtcggcgaggtggtcgagcaggttctccaaggggcccttgccggtgacgatggcctggacgaagaagccgaacatggagaacatggcgaggcggccattcttgatctccttgaccttgagctcggcgaaggtgacggggtcgtcggcgaggccgagcgggtcgaagtactggccgccggggtagaggtcgtttgcgtccccacccccggggaggccgttgatgcggtagccctcgacgaggcccatgaagacgacctggaattccagcacggcgaggatgctctgggcgtgca

SEQ ID NO: 398791 - DNA, 370 bp, Oryza sativa nipponbare
ctttcctatttttcttttgagttccctatatggatagagcgcatgcgcaagatgaatcataacttcttttcctgtactcagcagtgtagcaatgctagtcaataaagctaatttcacctttgaacgggaatggggaagcaatggagtagagaattacaggagaaggtggcagctgaggagagaatcaggagctgtcacaaagctatatacaagttgggaagctgaacgagaagagagcatatgcttccctcctacaggaagcattatgacttgttggtgctgttttacaaatctgggtgattatcggaagatcgtcatgcggtagcagctgcagcttcttctgcgacttgggatccctgttgcagagtgc

SEQ ID NO: 398792 - DNA, 518 bp, Oryza sativa nipponbare
gattaaaaacaacgatacagcacgtccataataaagaataataaaatattcaaggaatttacatgaaatacaggatttgatgctcaagtatttgacaccatactgtaggacagtgacaccaacgagaaaccatagattacaaggtagtcactttttaacttttggaccataaaactggagataaacaaactgaattcatatcagcacgcatcaagtgatagacatacacaaccctactttgctgttctggagtgcttgataagccaatcaatgacaacatctatgtttacagagtccttgcaagagatcatgtagcagcaaacttcccggtcctttatcaattccaggcctagttgatcaaccaacgcttgctttgaaacagcttctgacttgtcaatttttgttgccaaggactagtaaaggaatcccagctaaagattgttttgtcagcaggtcatgcaattcacttttagctatcggaatgctatcccggtcagcagcatccaccacatatagga

SEQ ID NO: 398793 - DNA, 372 bp, Oryza sativa nipponbare
ttaaattgaacaacccttggatgggggctgcggcttaaattaaaatctcgaaccaaaaaagccaagatggtgaccgacagaaatttaattagcttgaaaactcctcgatcggtcacacacacacacaccattaaagtacatacatacatgcactgctgcaactgcaactgcagggtcggtgcgtggctactacaagtgtacacatggtacgttggttggcaccatctcgatcgtgtcgttgtgcttacttgccggggacgaagttggtggcgtatgcccaggcgttgttggcgacggggtcggcgacgtggtctaaagaggtcttgatggggcccttgccggtgacgatggcctggacgaagaagccctaca

SEQ ID NO: 398794 - DNA, 381 bp, Oryza sativa nipponbare
tttcatgaagtaacttatatatatgttgaactccgttaattaaaaattaaaggagtatataaaccggttccgtaaatatcttaaggcgagatatacagatgccaaataggtgtacagtactcgaaattacaaagattataccagtataattaatcgttgggattaagagcatgaacgacccagttacgaggggtgcacggagtacgtgtgttgcttgcgcgcgtgtggatcgacgagattcttttgcaaaaattacctaattaattaatcggcgtgctctctggcgtcgtcgatattgtttattgtttggctagagttcgccggcggcggcggcggcgaggtcctcacaacctggggaaggggcgggcgaggcggtcggcg

SEQ ID NO: 398795 - DNA, 510 bp, Oryza sativa nipponbare
  unsure (1)..(510): unsure at all n locations
aatnnggggggcggggaacaaacattggcactattttttatagcacctaaaattggagcgttaatacatggtacacaatacaaccggttttttggtctaaaaatcccagcttagctagttctaatcctcagaaactgcagtaacagcagtatgcccctagtctgctaaacgaacactcctttttgtctcgaactagatcttttcatgaactgatctaacatggacaaaccaacccagaatatgcaacaatggcactatctgaactgcaaaaaaggcttgatctgcatcatctgctgtattggactattggtacgatgacagctttgcgggcgaccttttgtaccttctgttgaaaaatgataagcgaagaattgttcattaggacttaactttaatctctttccgggtcctgcaaacctcctcgccgtaccaaatatgagagcctttgttaacagtccatggtcaaacgtgcatgccagggcaactgcgccacctacaaggatgactttg

SEQ ID NO: 398796 - DNA, 483 bp, Oryza sativa nipponbare
tttaaaaaggtaaactcttgataataatattattaagacattatagctgatgtcttttgatcacactgcgatcaaattatgcatcataggcagtacaactccgcgtcaggaaaaagtagaggagatatatttcttgttattacttaatacagcattcacatatatcgaaccatccggtacgtacgtagtagtactccacgcgttcacatcgatgatcggggacgatatcctcaggtagtacttatgcaaaagcgttggcgtaaactgacgaactgaacggacggacggtcggatttagggctcccataagtccaagttgccggagacgaagtcgtagtggccgccgacgagcttgagggtgccgttggcgatcccctccttgacgaacgggtaggtctttgaaggtcttcagggattggtttacggcctccttctccaagatggcgcattggtcatcgaaaggcagcgaggcgtgctcggtct

SEQ ID NO: 398797 - DNA, 374 bp, Oryza sativa nipponbare
aggagagaacgggggcgggccacattaactgaattaattggatgcaactatgcaaggagactttttacatgggcgacattgcattgcatttccttggttctggaatctgtatacattacaaccacccctcctcctagatgcccttcagatcttttgactattgcaacgtgcaataattgctgctgcagatcatggacaaactaaccgacaccacgtgattttcccggccgtgtcaacattctgccagctcctgccagcaggctgagctctgctacggaggagcaactcaccagaattaagattagtaaaggcttcaagggtatttggtacaataattaccggacgcgtgggcggacgcgtgggtcgacccggga

SEQ ID NO: 398798 - DNA, 263 bp, Oryza sativa nipponbare
ccacgcgtccgcacgaagcaaccgaacactcgccgccggcgagtcacctaccttaattagtccacaataaaaaccacccatatgagtgtggtttgtgtgtgtgctgattattgctgaattaaacccgtgtgttatcgattaattaagcagctggtcgcttcggcgactatgcgtgtatcaacgtatgaatttgtgtgatgtgatgtacccgtgctattctcagtgaaattaatcaatcgtgtattcgtgtggtttgcctagta

SEQ ID NO: 398799 - DNA, 318 bp, Oryza sativa nipponbare
ccacgcgtccggccatgttctccatgttcggcttcttcgtccaggccatcgtcaccggcaagggccccctcgagaacctcgccgaccacctcgccgaccccgtcaacaacaacgcctgggcgtacgccaccaacttcgtccccggcaagtgaagtgggggaccgtagcttagcagtggttaattgtggttggatggatttgtggccagcgagttcgttgtctttgggttggggaagatgggtttagtgcgacgagatgatgatcgagttggtgttgtgtacactaagaagatgaagaagaagatgatgtttttgcaat

SEQ ID NO: 398800 - DNA, 355 bp, Oryza sativa nipponbare
ccacgcgtccgcactaaagcaccggatcccatcagaactccgaagttaagcgtgcatgggctcggatcgaacgattggaggtcggaggagcagtagcaaaatgtatcttgttgtgttcgtggccgcttttgggttgggtggtgtgcgtgaaccaaatgggggaattaatcaaggagttatttttttttatttttcttcccagtgtatgtaccatatgtaatatatataattaaggctgcaggatgagcaaggatatttcatttggaaaaaaaaaaataacaactaaaaagatgaagataaattttataaacaaaattataaaattatataaaaaaatcggatgatattataatat

SEQ ID NO: 398801 - DNA, 412 bp, Oryza sativa nipponbare
ccacgcgtccgcccacgcgtccggtgggcggcggagcccggcggccaggccacgtacctcggcaacccggtgccatggggcacgctgccgacgatcctggtcatcgagttcgtcgccatcgccttcgccgagcaccagcgcaccatggagaaggaccccgagaagaagaagtaccccggcggcgccttcgaccccctcggcttctccaaggaccccgtcaagttcgaggagtacaagctcaaggagatcaagaacgggcgattggccatgctggcttttgtgggtttctgcgtccaacagtcggcgtacccgggcaccggcccactggagaacctggccagccacctctcggacccgtggcacaacaacatcggcgacatcatcattccgagaaccatctacccttgagctt

SEQ ID NO: 398802 - DNA, 452 bp, Oryza sativa nipponbare
ccacgcgtccgcccacgcgtccgcaaccagccagccagccatgcagcccgactccgcctcccaccgcatcgcccgcgtcgccgcccacctcagcccgtcgccgcgcccccagatggaggagggggtgaggccggcgccatgcagggccaagggcggcgcgccggggttcaaggtggccgtgctgggcgcggcgggagggatcgggcagccgctgtcgctgctcatgaagttgaacccgctcgtctctgtgctccacctctatgatgtcgtcaacacgcccggtgtcaccgccgatgtcagccacatggacaccaccgccgtggtccgtggtttccttgggcccaaccagcttgaggcagcacttacaggaatggatcttgtcattatccctgctggtctcccaaagaaaccaggaatgacaagggatgatttgttcaacaaaaacgctggga

SEQ ID NO: 398803 - DNA, 457 bp, Oryza sativa nipponbare
ccacgcgtccggctttatctgggggtcacactctgggaagggcacatcctgaaaggtctggatttgaaggcgcatggactcaggagcctctgaagtttgacaattcgtactttcttgagctactgaagggggaatctgaggggcttctgaagctcccaactgacaaggcattgttggaagatccttcatttagacgctatgtggatctttatgccagggatgaagacaccttcttcaaggactacgctgaatcgcacaagaagctttctgaacttggcttcactccacggagcagcggccctgcatctacgaaatctgatctttcaactggtgctgtactcgcacagagtgctgtcggggtagctgttgctgcagctgtagttatcgtgagctacctatacgaggcttctaagaagagcaagtaagattgctatgttcttcatcagcatggcctcat

SEQ ID NO: 398804 - DNA, 455 bp, Oryza sativa nipponbare
ccacgcgtccgcggtgatggcccgcgcggcgccgtcgacctcctccgcgctcttcggcgaggcgcggatcaccatgcgcaagaccgccgcgaagcccaagccggcggcgtcgtcggggagcccgtggtacggcgccgaccgcgtcctctacctcggcccgctctccggcgagccgccgagctacctcaccggcgagttcccgggcgactacgggtgggacaccgcggggctctccgccgacccggagacgttcgccaagaaccgggagctggaggtgatccactcccggtgggcgatgctgggcgcgctcggctgcgtcttcccggagctcctcgcccggaacggcgttaagttcggcgaggccgtgtggttcaaggcgggctcgcagatcttcagcgagggcgggctcgactaccttggcaacccgagcctggttcacgcgcaaagcattctcg

SEQ ID NO: 398805 - DNA, 388 bp, Oryza sativa nipponbare
ccacgcgtccgtgagatcgagctgaaaaaaaaagagaggccacgaagagagctcagctgctgcctgtagcttacttggagataaagaggaggaggaggaggagggcaccgacatggccgcagccacggcgtacaccggggggctactgggggccacctgcgcgcgccggcgccaccgtccacgctcggaatagcttttctctcgcccgggcagagcgatggagacgcttctcataacctgtacgccatgaacaagctggaggtgctcaagccatggacgctcaccttcttctttcggccgtgccctgcaacaaatcaccatcaagaaatggggcgccctgaaggagaactgtctcctccgtcaagcttgcctttcttggcggtgcaag

SEQ ID NO: 398806 - DNA, 463 bp, Oryza sativa nipponbare
  unsure (1)..(463): unsure at all n locations
ccacgcgtccgcccacgcgtccgcacaccgcgagctcgcgtaggacacgaacgagatgaggccagcgtcgtcccccgtgccggccgtcctcacggccccggctaccgctgccactgccgccatcgccgtaaagccaacgccgcctcaacgcgcgcttcaagccagcaggcgcgagttggtggtggcggcggcggcggtggcgctgtggccgtgcgggggagcggcgcgggcggcgtcggacgacgagtacgtgagcgagacgaaggacgtgatcgggaaggtgcggtcgacgatcaacatggacagggcggaccccggggtggcggacgcggtggcggagctccgcgagctgtccaactcgtgggtggccaagtaccgcanggagaagtcgctgctgggccgcccgtccttcagggagatgtactccgcgctcaacgccgtgtcgggccactacatcagcttc

SEQ ID NO: 398807 - DNA, 456 bp, Oryza sativa nipponbare
ccacgcgtccggtttctttaggtttctcgcagcactgaacagaattcagcattctttgctgtgtacaacatggagacgacagatattgtttcactctatcagaattcttcggaggagctctattcattgtttgaatatttttatgaccattttcacacaaatccacaaaattcatcgcatggaaattttatctcgtcacattccaataatgttcatgctctcgatcaacttcggacaattaaaaataaagcaaacagcacctcacaggtaatattgatagcatcaggggtatgatttttattttttgactcactacagttcttggctctgttagtctgtttatattgtttccacaagatgtgagattgtttaaaagttattgtgctaatgcctacatcttttgcaatgttctgattagaaaccggacgagtttcaattattaagtcaatactggtc

SEQ ID NO: 398808 - DNA, 367 bp, Oryza sativa nipponbare
  unsure (1)..(367): unsure at all n locations
ccacgcgtccgcccacgcgtncgcggacgcgtgggtcgagactagacaggacaggcggacgcgagcgtcgtcctcttcgtttcgcttctcctcctcctcctccgcctccgctctcgcgagatctcctgatcgactcgctccgccatggctggagaagctgatggaaaagccccactgggatcaagatacccccctgctgctctcaacgagcgcatcctttcttccatgtctcaaaaacatgttgctgctcatccatggcacgatctggagataggtccaggagctccagcagttttcaactgtgtggttgaaattcctagaggcagcaaggttaagtatgagttggataaagcaactggtctaatta

SEQ ID NO: 398809 - DNA, 408 bp, Oryza sativa nipponbare
ccacgcgtccggtcttcttcctccaggaaggcacccttcatggtcagggcagaggccactccccctgccaagcaaggtgctgacaggcagctgtggttcgcatccaagcagtccctgagctacctggatggcacgcttccgggagacttcgggttcgacccgctggggctatcggacccggaggggaccggtgggttcatcgagccacggtggctggcctacggcgaggtgttcaacggccggacggcgatgatgggcgtcgtcggcatggtcgccccggagctcctcggcaagctgggcctcgtccccgccgagacggcgatcccgtggttccagaccggcgtgatcccccccgcgggcacctacacctactgggccgacccttacactctcttcgtcttcgagctc

SEQ ID NO: 398810 - DNA, 370 bp, Oryza sativa nipponbare
ccacgcgtccgggaagatggaaggctgactgacagcaagggaagaacagtggacttcaagaacacacttctcataatgacttcgaacgtcggaagcagcgtcatcgagaagggtggtcggaagataggtttcgatctcgattacgatgagaaggacagcagctacagcaggatcaagagccttgtcgtcgaggagatgaagcagtacttccgccccgagttcctcaaccgtctcgacgagatgatcgtcttcaggcaactcaccaagctggaggtcaaggagatcgccgagatcatgctcaaggaggtctttgacaggctcaaggccaaagacattgacctccaggtcaccgagaagttcaaggagcgta

SEQ ID NO: 398811 - DNA, 464 bp, Oryza sativa nipponbare
ccacgcgtccgcccacgcgtccgcccacgcgtccggcgtgctctacctcggcccgctctccggcgagccgccgagctacctgaccggcgagttccccggcgactacgggtgggacaccgcggggctctccgccgacccggagacgttcgccaagaaccgggagctggaggtgatccactccaggtgggcgatgctcggcgcgctgggctgcgtgttcccggagctcctcgcccgcaacggcgtcaagttcggcgaggcggtgtggttcaaggcggggtcgcagatcttcagcgagggcgggctcgactacctcggcaacccgagcctgatccacgcgcagagcatcctcgccatctgggcggtccaggtggtgctcatgggcgccgtcgaggggtaccgcatcgccggcgggccgctcggcgaggtcgtcgacccgctctaccccggcggcagcttcgacccgc

SEQ ID NO: 398812 - DNA, 374 bp, Oryza sativa nipponbare
ccacgcgtccgcaagaagtactcgagcaaagaaggagagagcttggtgagctgcagagatggccccctccgtgatggcgtcgtcggccaccaccgtcgctcccttccaggggctcaagtccaccgccggcatgcccgtctgccgccgctccggcaactccagcttcggcaacgtcagcaatggccgcaggatcaggtgcatgcaggtgtggcccattgagggcatcaagaagttcgagaccctctcctacctgccaccgctcaccgtggaggacctcctgaagcaaatcgagtacctgctccgttccaagggggtgccctgcctcgagttcagcaaggtcggattcgtctaccgtgagaaccacagatcccccg

SEQ ID NO: 398813 - DNA, 409 bp, Oryza sativa nipponbare
ccacgcgtccggaaaatgtgggccgccgtctacaagtctctcaacgaccacaaggtcctcctcgagggcaccctcctcaagcccaacatggtcacccctggctccgacagcccaaaggttggcgcggaggtgataggggagtacacggtggcggcgctgcggcgcacggtgccaccggcggtgcccgggatagtgttcctctccggcgggcagagcgaggaggaggcgtcgcagaacctgaacgccatgaacaagctggaggtgctcaagccatggacgctcaccttctccttcggccgtgccctgcagcagagcaccatcaagaagtggggcggcaagaaggagaacgtcgccgccgctcaggctgccttcctcgcccggtgcaaggccaactccgaggccacgctcg

SEQ ID NO: 398814 - DNA, 453 bp, Oryza sativa nipponbare
  unsure (1)..(453): unsure at all n locations
ccacgcgtccgagctaatcccctcatcaaaaccctagccttgtcgcctcgtcggcggatggcgccgccggcgccggcgacggcgcggcgcccgatggcggccgtccgctgctccgcggcgaagaggagctacaacgtcacgctcctccccggtgacggcatcggcccggaggtggtcgccgtcgccaaggacgtcctctccctcgccggcgctctcgaaggcgtcgagttccgcttccaggagaagctgatgggcggcgcggcggtggatgcgtacggcgtgccgctcccggaggagacgctcgcggcggcgcangcgtcggacgccgtcctcctcggcgccataggagggtataagtgggataacaatgagaagcacctcaagccagagactgggttgctccagatacgcgctgggcttggcgtctttgctaatctgaggccagctgcagtg

SEQ ID NO: 398815 - DNA, 445 bp, Oryza sativa nipponbare
ccacgcgtccgcccacgcgtccgcccacgcgtccggaggaatcgcgcggaggaaaaaaaaagaaaagggcttcctcgtcgtctaagttaaaaggaagccatggagcacaaggagactggatgccagcagccagaaggcccgatcctttgcatcaataactgcggcttctttggcagtgcggctaccatgaacatgtgctcaaagtgccacaaggagatgataatgaagcaggagcaggccaagctggcagcctcctctatcgacagcattgtcaatggtggtgattccgggaaggaaccaattattgctggtcacgctgaagtagctgttgctcaagtcgaggtgaagacgcttgttgcgcagcctgctgagattgctggtcctagtgagggggtcacggtgaaccccaaggggagggaaggaccaaatcggtgctccacttgtc

SEQ ID NO: 398816 - DNA, 443 bp, Oryza sativa nipponbare
ccacgcgtccggttattcatgcagaactacgtctgctgggagggtccatgggcgatgctgtccaagcacctaagatgcctgtcgctgaacaacatgatcaccgacttatactgaaccaagacgagggcgccaatgctgccaacagttcgacgtgcaggatactcactcgacaggagttcagtgttatgtcacccgactagataaagataggagtgctaaatgggccaacaactactcttgatgtacgactgaactatttcatcgatgagagaactatctgtgaaaccaacatttttgagctgccaaagcctttcggtttcattttcacatggtttgctgctttgcctctaatattgttcatagcacagtcgataactaatgccatagtgaacgactggttgatcctcaaggggccatgtccgaattgcggcgcttaaaacctt

SEQ ID NO: 398817 - DNA, 462 bp, Oryza sativa nipponbare
ccacgcgtccgcccacgcgtccgcccacgcgtccgcccacgcgtccgaagcaacacaagggattaactcatcactcacttagctaattaaatcttcgaccatgtcggacaagtgcggcaactgcgactgtgctgacaagagccagtgcgtgaagaaaggtaccagctatggcgtcgtcatagttgaagccgagaagagccacttcgaggaggtcgccgccggcgaggagaacggcggctgcaagtgcggcaccagctgctcctgcaccgactgcaagtgcggcaagtgaagtcacgaagcaaccgaacactcgccgccggcgagtcacctaccttaattagtccacaataaaaaccacccatatgagtgtggtttgtgtgtgtgctgattattgctgaattaaacccgtgtgttatcgattaattaagcaactggtcgcttcggcgactatgcgtgtatcaa

SEQ ID NO: 398818 - DNA, 414 bp, Oryza sativa nipponbare
ccacgcgtccggattgtcgagcctgagatcctcctcgacggtgagcatggcatcgacaggaccttcgaggtggcgcagaaggtgtgggcggagaccttcttctacatggccgagaacaatgtgatgttcgagggcatcctcctcaagccaagcatggtgacacccggtgccgagtgcaaggacagggccacccctgagcaagtatctgactacaccctcaagctcctccacagaaggatcccccctgccgtccccggcatcatgttcttgtcgggtgggcagtcggaggtggaggcgacgcagaacctgaacgcgatgaaccaggggcccaacccgtggcacgtgtcgttctcgtacgcgagggcgctgcagaacacgtgcctcaagacgtggggcgggcagccggaaaacgtg

SEQ ID NO: 398819 - DNA, 432 bp, Oryza sativa nipponbare
ccacgcgtccgcggacgcgtgggttgatattgaacgtgtcaacattgtcataaactatgacatgcccgattctgctgattcgtatctacacagggttggaagggctgggcgttttggaaccaaaggacttgcaataacatttgtttcctctgcctctgactctgatgttcttaatcaagtgcaagaaagattcgaggttgacataaaggagcttcctgagcagattgatacttcgacatatatgccttcttaaagatccgggtggattgcttaaagcttacattcgaacggaaacgagagtatctccttgagatacggcatattaagaatctatcggataactaaaaacttagtgtgagaaatgctgccctatctatacttaagacagcagtttagatctgctgctaagtgctgaatgccccgtaataatac

SEQ ID NO: 398820 - DNA, 462 bp, Oryza sativa nipponbare
  unsure (1)..(462): unsure at all n locations
ccacgcgtccgcntacgcttgcgttgatatttaacctgtcaccattgtcatatactatgacatgcccgattgtgctgagtcgtatctacacagggttggaagggctgggcgttttagaaccaaaggacttgcaataacattttgttcctttgcctctgactctgatgttcttaatcaagtgcaagaaagattagaggttgacataaaggagcttgctgagcaaattgattacttaacatatatgccttcttaaagatccgggtggattgtttaaagcttacatttgaacggaaacgaaagtatttctctgagatacggcatattaagaatctatcggataactaaaaacttactgtgagaaatgctcgcctatttattacttaacacctatttagatctgctgataactgcttaatgcgctgtaataatacttgtaatgattatttggtcaatttggctttt

SEQ ID NO: 398821 - DNA, 440 bp, Oryza sativa nipponbare
ccacgcgtccgcccacgcgtccgcccacgcgtccggcctgcccctctctttccctcgccattaagttttctcgtccggcggcgtcacccctgcgaattaactaactagctaggccggccatggagacggtggccgcggccagctacacccgcggggcggcgacgcgctcgccagcgtgctgcgccgccatgtccttctcgcagtcctacaggcccaaggccgctagaccgccgagcacgttctacggcgagtcgctgcgggttaacacggcgaggtcgctgccgtctgggaggcagtccaaggcggcgagccgggcggcgctcagcacccggtgcgagatcggggacagcctggaggagttcctgaccaaggcgacgccggataagaacctcatcaggctgctcatctgcatgggggaggcgatgaggacgatctcgttc

SEQ ID NO: 398822 - DNA, 423 bp, Oryza sativa nipponbare
ccacgcgtccggaagtactcgagcaaagaaggagagagcttggtgagctgcagagatggccccctccgtgatggcgtcgtcggccaccaccgtcgctcccttccaggggctcaagtccaccgccggcatgcccgtcgcccgccgctccggcaactccagcttcggcaacgtcagcaatggcggcaggatcaggtgcatgcaggtgtggccgattgagggcatcaagaagttcgagaccctctcctacctgccaccgctcaccggggaggacctcctgaagcagatcgagtacctgctccgttccaagtgggtgccctgcctcgagttcagcaaggtcggattcgtctaccgtgagaaccacagatcccccggatactacgatggcaggtactggaccatgtggaagctggccatgttcgggtg

SEQ ID NO: 398823 - DNA, 407 bp, Oryza sativa nipponbare
ccacgcgtccgatgaacgatagctactgccgctcagcattggactacctggagctgcagcctgatttatcagcattggtccgtggagcacacactttccggtgtccgaacctcgggctcaccagctgggtgcgcttgccaattcatgatgcagattttggatggggaagaccagtgttcatgggtcctggtggcatcgcctatgaagggctggcgtttgtcctcccaagcgcgaacaaggatggtagcctatccatagccatctcattgcaggctgagcacatggagaagttcaggaagctgatcttcgaggtgtaagcagactacttatgttatgtcagggagaagttgtagagctagagttctcaagtaaaataccttcaagtgagtcatgggggctatgctctt

SEQ ID NO: 398824 - DNA, 376 bp, Oryza sativa nipponbare
ccacgcgtccgatcagagatcaggtagaacagtgagagtgaggtgcagaaaaatttgagctgaagctgaggatggcaacatccatgatcacctcgccgctggtggcgccggcccgggccaagggccttccgtccatctcccgccggggatcctccttcgccatcgtctgcagcggtgggaagaagatcaagaccgacaagccctacgggattggaggtggcatgtcagtcgatattgatgcatctggcaggaagagcacggggaagggtgtgtaccaattcgttgacaagtacggcgcaaacgtcgacggctacagcccaatctactcgccggaggaatggtctcccaccggtgacacctacgttggtggaaccac

SEQ ID NO: 398825 - DNA, 199 bp, Oryza sativa nipponbare
ccacgcgtccgcccacgcgtccgcccacgcgtccgcccacgcgtccggaaattctcagcttatagtcaggtgaggtctgagctgaggttgagagatggcacaggcaatggcgtccatgaccgggctgtcgcagggcgtgcagctgccggccgggcccaggcgcgccggcggcaggttcaggctcggcgtcgttaggggc

SEQ ID NO: 398826 - DNA, 408 bp, Oryza sativa nipponbare
ccacgcgtccgcccacgcgtccgcgctcaccgtggaggacctcctgaagcagatcgagtacctgctccgttccaagtgggtgccctgcctcgagttcagcaaggtcggattcgtctaccgtgagaaccacagatcccccggatactacgatggcaggtactggaccatgtggaagctgcccatgttcgggtgcactgacgccacccaggtgctcaaggagctcgaggaggccaagaaggcgtaccctgatgcattcgtccgtatcatcggcttcgacaacgtcaggcaggtgcagctcatcagcttcatcgcctacaagcccccgggctgcgaggagtctggtggcaactaagccgtcatcgtcatatatagccttggttaattgttcatctctgattcgatgatgtc

SEQ ID NO: 398827 - DNA, 417 bp, Oryza sativa nipponbare
ccacgcgtccgccacgcgtccgatttgctacagaaatttactacgtccatggctaactacattaaataccaagctgacaacggagcacaagctgtccaaatttttgactcatgggctacagaactcagcccagttgattttgaggagtttagcttgccttatctgaagcagattgtggatagtgtcaaagaaacacatcctgaattgcctctgatactatatgcaagtggatctggtggactgctggagaggcttccactgacaggtgttgatgttgttagcttggactggacggttgatatggctgaggggaggaaaagattgggatctaacaatacggttcaagggaatgtttgaccctgcgttctttttgggtcaaaagagttcataagcaagcggatttttgacactgtgcag

SEQ ID NO: 398828 - DNA, 389 bp, Oryza sativa nipponbare
  unsure (1)..(389): unsure at all n locations
ccacgcgtccgcggacgcgtgggcggacgcgtgggcggacgcgtgggcggcctcgccggcgccaccctcgcccgccgggcggccttctccaccggcttcacgacgggcgcccgggtgtcggcgaggaacccgctgctgacgaggaacctggagaggaacggcaggatcacctgcatgacgtttccgcaggactggcttaggagggacctgaacgtgatcgggttcgggctgatcgggtggatcgcgccgtcgagcgtcccggcgatcaacggcaacagcctcacggggctcttcttctccagcatcggccaggagctctcccacttnccctcgccgccggcgctcgactcgccgntctggctgtggttggggacgtggcaccttgggct

SEQ ID NO: 398829 - DNA, 469 bp, Oryza sativa nipponbare
  unsure (1)..(469): unsure at all n locations
ccacgcgtccgcccacgcgtccgcccacgcgtccgcccacgcgtccgggctgctccgcctccgcctccgcatgtacgcctgattgatccccacccctctctccactgactgtgctatcgcgtttccggcggtggttgatcgaggcggtagcccgtgcggcgcgcgagattccgcccgtccacggatttccggtcgccatcgccggggttcgtcttcttcggccagcccctcgccgcgcgaacctgcgccgcccgtcctcggccaggatctggtcggggatcgcttgtggtaggtgttagggggcacttgggtttggaggacagcatcgttgatgtgctttgactntgagttccttgctaatttagttatgctgactgttcccataatccctaaaatccccacagttgcgttgcgtgggaggttatgtaaagcgcattcctgtgatgaaaaatagaccctgggagacata

SEQ ID NO: 398830 - DNA, 412 bp, Oryza sativa nipponbare
ccacgcgtccgccagcagcagcagcagtagctgagcttgaagcagcagagcgaggtagacatggccgccgccaccatggccctctcgtccccggcgctggccggcaaggccgccgcgaaggtgttcggcgaggggcgcatcaccatgcgcaagtcggcggcgaagcccaagcccgccgcgtcggggagcccgtggtacggcgccgaccgcgtgctctacctcggcccgctctccggcgagccgccgagctacctgaccggcgagttccccggcgactacgggtgggacaccgcggggctctccgccgacccggagacgttcgccaagaaccgggagctggaggtgatccactccaggtgggcgatgctcggcgcgctgggctgcgtgttcccggagctcctcgcccgcaacg

SEQ ID NO: 398831 - DNA, 456 bp, Oryza sativa nipponbare
ccacgcgtccggaagtactcgagcaaagaaggagagagcttggtgagctgcagagatggccccctccgtgatggcgtcgtcggccaccaccgtcgctcccttccaggggctcaagtccaccgccggcatgcccgtcgcccgccgctccggcaactccagcttcggcaacgtcagcaatggcggcaggatcaggtgcatgcaggtgtggccgattgagggcatcaagaagttcgagaccctctcctacctgccaccgctcaccgtggaggacctcctgaagcagatcgagtacctgctccgttccaagtgggtgccctgcctcgagttcagcaaggtcggattcgtctaccgtgagaaccacagatcccccggatactacgatggcaggtactggaccatgtggaagctgcccatgttcgggtgcactgacgccacccaggtgctcaaggagctcga

SEQ ID NO: 398832 - DNA, 394 bp, Oryza sativa nipponbare
ccacgcgtccgcggacgcgtgggcggacgcgtgggctcatcgccatctctctcagctctcacagctcactgcatcaatggccgcggccaccatggcgctctcctccccggtgatggcccgcgcggcgccgtcgacctcctccgcgctcttcggcgaggcgcggatcaccatgcgcaagaccgccgcgaagcccaagccggcggcgtcgtcggggagcccgtggtacggcgccgaccgcgtcctctacctcggcccgctctccggcgagccgccgagctacctcaccggcgagttcccgggcgactacgggtgggacaccgcggggctctccgccgacccggagacgttcgccaagaaccgggagctggagtgatccactcccggtgggcgatgc

SEQ ID NO: 398833 - DNA, 426 bp, Oryza sativa nipponbare
ccacgcgtccgccacgcgtccgactgctcgcaataagagtgcatcagaaaaaatgactcgagaaatgataatgaaattttctactagggtgtcctatcagatggatgtagtgaaggccctcaatagtgtagatggtccacagtggaaaacttccctttttgggaatccaactgatgctgaaactctgaggcggaggtgcatggttgttgaaacgttggctgagaagcattttgatttagcttttcggatgcttcatgagtttgatctccctgctgttgatatatatgctggtgtggcagcatcccttgcagaaagaaaaaaaggtggccaattgactgagtttttgaagaacataagaggaaccatagatgatgatgaatgggatcaggttctgggggctgctataaatgtttacgctaataagca

SEQ ID NO: 398834 - DNA, 403 bp, Oryza sativa nipponbare
ccacgcgtccgcccacgcgtccgctctcctcgtctcgtctcttctctctccatttttctcgaagcgagagtgcgttgcgttgcgagcgggaagcgaaaactcgaaaccatggccacggccggcgacgagcagcagcagcaggcggcggcggcgcaaacggcggaggtgacggaggcggcggcgaaagaggtggtgtccgtggagatgccggcgccggaggggtggacgaagaagtttactccccagagaggggggagatttgagattgtttttgtttcaccaacttgggaagagatttagaacaagagacagctgagccagtatctgaaggcacaccctggaggccctgcatcctcagagtttgattggggaactggtgatactccaaggcgctctgctcgca

SEQ ID NO: 398835 - DNA, 403 bp, Oryza sativa nipponbare
ccacgcgtccgcggacgcgtgggcggcgcccgacaggccaatctggttccccggcagcaccccgccgccgtggctcgacggcagcctccccggcgacttcggcttcgaccccctgggtctcggatcggacccggagagcttgcggtggaacgtgcaagcggagctggtgcactgccggtgggcgatgctgggcgcggcgggcatcttcatcccggagttcctgaccaagatcggcatcctcaacacgccgtcgtggtacaccgccggcgagcagcaatacttcaccgacaccaccaccctcttcatcatcgagctcatcctcatcggctgggccgagggccgccggtgggctgacatcatcaagcccgggtggggtaacaccgaccccatctttcccaacaac

SEQ ID NO: 398836 - DNA, 439 bp, Oryza sativa nipponbare
ccacgcgtccgccggccacccccgattccgccggccgcttccccgccgacgtcatcctagctcctccggcttcgccagatgcccttggcgatctcgaggtgctcctcggccgccgccgagcactcgccgtggcgacctcggtggcttcaggttcgtcatcccctccgctctcgtcctcaccagatgagggcaacaggtcgccctcgtcgcgttcgtcgtcgctgtctcccatcactgtggatcgtgggaagaaggagtatccggtggatccaactctgccggacatcaagagcagcgtgtatgcttcggatgagttccgcatgtttgcgttcaaggtccggccctgctcccgtgcctactcacacgactggactgagtggcccgttgtgcaccccggcgagaacgcccgccgccggatccccgcaagcacccatacact

SEQ ID NO: 398837 - DNA, 465 bp, Oryza sativa nipponbare
ccacgcgtccgcccacgcgtccgcccacgcgtccggaagaagtgcaggtacggtgcaggtgcagatccaattgcgagctcacctgctctgccctgcccactaccaagtagtagcctcctcctcctcccctttctccccaacatcccatcccaaatcaaaggctactagactagtgttgggggagatccaagagatggcgcggagcccctgcgacctccgcatcctcctcgtcgccgccgctgcagccttcatctacatccaagtccgccttttttctactcagtcccactacgccgaccgcctcgcacaagcagaaaaatccgaaaaccaatgcaccagtcaactccgctccttgatcgatcaagtcagctctcagcaggagaagattgtcgcgttggaagagatgaagatacgccaagacgaaaaacgtgtacaccttaaagatttaatccaagatctcgaaaa

SEQ ID NO: 398838 - DNA, 328 bp, Oryza sativa nipponbare
ccacgcgtccgcggacgcgtgggcggacgcgtgggcggacgcgtgggtgctgagctagttagcgcactttgttggaaacctgatggaagatacttggtgtccgcctcttgtaatagcccatcattcacaatttgggacgtttctcaagggttgggaatgcctataagacgtggattaagtagtatatcattagtgcagtggtcacctagtggagattaccttttaactgctaagcttgatggaacttttcacttatgggaaacaaatacatggacgtcagaaccatggtcttcatctaatggatatgtatctggagcaaaattgggat

SEQ ID NO: 398839 - DNA, 378 bp, Oryza sativa nipponbare
ccacgcgtccggttggcttctcctccccctctttaccttttcctcctcggttcggttccgtggttcgtctagggtttagtgggttgagatggcggcgccggatgtcgagtaccgctgcttcgtcggcggcctcgcctgggccaccgacgaccgctccctcgaggccgccttctccacctacggcgagatcctcgactccaagatcatcaacgacagggagacggggaggtcacgtgggtttggcttcgtcaccttttcctacgagcagtcgatgcgcgacgccatcgagggcatgaacggcatggagcttgacggccgcaacatcaccctcaatgaggcccaatcccgacggtccggcggcagaagcagcggcttcgg

SEQ ID NO: 398840 - DNA, 457 bp, Oryza sativa nipponbare
ccacgcgtccggattgctccacattacgtgcttggtgggaagaagatggaggaagaagaagccgtttctaccagactgtaattggtagtgatgacgagccgccatctcgctgcaccccagaagtagcgaactttattgttaagcagcattttgatgctccatcaatgtgggcaatcttcccactacaggacctgcttgcacttaaagacaagtacaccacaagaccagcaaaagaggaaacaatcaatgacccaactaacccgaagcattattggagattccggctacatgtgacattggattcgctgttggacgataaggacatccaagcaaccatcaaggaacttgtcacaagtagtgggaggtcatttcctggtaaggtggatggcgccgaagaaagcggagagaagctagctaaaagccagttgaatggtaaaccatagaaaattatcccaag

SEQ ID NO: 398841 - DNA, 383 bp, Oryza sativa nipponbare
ccacgcgtccgcccacgcgtccgcccacgcgtccgcccacgcgtccgcttcctcctccccaaaccctagccgccgccgccggcgtactcgagagaaacatcagcatccatggcgggcaagggcgagggtccggccatcggcatcgaccttggcacgacctactcgtgcgtgggcgtttggcagcacgaccgcgtggatggatgtacgagtattggagagagggtgagatctgtaccggtagtgtgtatttctgtgcaggttctgaacctgatcaatgaaatatggggttgtgaattaatttttaaaaaaaaaaaaaaaagaaaaaaaaaaaaaaaaaataataaaaaaaataataaaattaataaaaaaaaataaaaataaat

SEQ ID NO: 398842 - DNA, 436 bp, Oryza sativa nipponbare
ccacgcgtccgacctcgcctcctccatcatcaagaggaagctcaggaagatcaaggagaaggagaccgacgtccgccacctcaaggggaccaagccccccgtctccgactggccgccatcattgctcgacaacaacgacgacgacgcccaggcccagctcaaggatctggaggaggccgtcggcgccgaggacgaggacacggtgctcaccaaggtggtgcgcaccaaggtgttcgagatgccgccgctgtcggtggaggaggcgatggagcagctagtgaatgtggaccacaacttctacgccttcagagacgagaagaccggggagatgaacgtcctgtacaagaggaaggaaggaggcttcggtctcatcgtccccaagggagacggtcatctccacaaggaagaccatcccaactctgaccaccaccacccc

SEQ ID NO: 398843 - DNA, 403 bp, Oryza sativa nipponbare
  unsure (1)..(403): unsure at all n locations
ccacgcgtncgcccacgcgtncgcacattctcgaagaaggagaagaaggagaggagcagccatggcgtcgtcggtggcagcggcggcgagcacgttcctggggacgaggctggcggacccggcgccgcagagcgggaggatcgtggcgaggttcgggttcggcggcgggaagaaggcggcggcgaagaaggcggcgaggccgtcggcgccgacgacggacaggccgctgtggttccctcgcgcggtggcgccggactacctggacgggtcgctcgtcggcgactacggcttcgacccgttcggcctcgggaagccggcggagtacctgcagttcgagctggactcgctggaccagaacctggccaagaacaacgccggggagatcatcggcacccggttcgag

SEQ ID NO: 398844 - DNA, 454 bp, Oryza sativa nipponbare
ccacgcgtccggttgccagttggcggtgttaaggataaggtacttgcagcacatagatatggcatcaagagagtaatattgccagaaagaaacatgaaggacttggctgaggttccagcacccattctctctggcttggagattctgcttgtgaagcgcatcgaggaagtacttgaccatgcttttgaaggtggatgccctctgagaccacactccaagctatagcatcaaccaatctgaagatggcgtttgatctggtatactttcctgctggttatgtacctattttggagattcatccataaaacaaggttcagatttccatgaaagagcaactattccacgaggtagaatctcacgccaaacgcatgcttgcagcgctgctgccaatccatctcggttgagcaacattcggaatctgtatacgagttatacaaaacagatgtgagttctg

SEQ ID NO: 398845 - DNA, 467 bp, Oryza sativa nipponbare
ccacgcgtccgcagggttggtggaacgaggtgcgaaccaagggccacccggacaaggaggaagggtggccagagctgaactgccacgggagcctcgtcgaggttctgaccaccatcatctgggtcgcgtcggggcaccatgcggcggtgaactttggccagtacccctacgccggctacttccccaatcgccccaccatcgcccggcggaacatgccgacggaggggcaggcgtgcagtcacgacggcatgcagccaacgttcgttgaggatcccgtcagggtgctactagacacgttcccatcgcagtaccagaccaccctcgtcctgccggtgctcaacctgctatcgtcacactcgcccggcgaggagtacatgggcacgcatgcggagtcagcgtggatggcggacaaggaggtcagggcggcgttcgggaggttcaacgagaggatgatgagcatcgcggag

SEQ ID NO: 398846 - DNA, 422 bp, Oryza sativa nipponbare
ccacgcgtccgaccactgctagcttgggaagaggaggaggagcttgagcttggagagagacaacaatggcggctcaggctcttctctctgggaggcagctgctggggaggccattgcaatcttcagtctccaggtcttcttcctccaggaaggcacccttcatggtcagggcagaggccactccccctgccaagcaaggtgctgacaggcagctgtggttcgcatccaagcagtccctgagctacctggatggcacgcttccgggagacttcgggttcgacccgctggggctatcggacccggaggggaccggtgggttcatcgagccacggtggctggcctacggcgagtgttcaacggccggacggcgatgatgggcgtcgtcggcatggtcgccccggagctcctcggcaagctgggcc

SEQ ID NO: 398847 - DNA, 441 bp, Oryza sativa nipponbare
ccacgcgtccgatgcactggactatttacaccatgaatgcggaagaacaactatccattgtgatttgaaacccagcaatatactgttagctgatgacatgaatgctcttttgggagattatggcattgcaagattttatatcgactcttggtcgacatcaacaggttcgaatagtacagtcggcgttaacggtaccatacggtatattcctccagagtacgcgggaggtggtcatccatgtacttctggcgatgtatatagtttgcggatagtgatcctggagcttataacaggaaaaagaccgactgatcctatgttcaaagacggactacacattatcagctatgtcgagagtaactgtgcacaccagatatttcaagtgattgatgctcgactcgcaaaatactacatggacttcaatcaaacatatgtgacactgga

SEQ ID NO: 398848 - DNA, 480 bp, Oryza sativa nipponbare
ccacgcgtccggattgacaagccctggctttattggagcagatgtttgccaccttaaccttcacaagacattctgcattccacatggtgggggtggtcctggaatgggtcctattggtgttaagaagcacttagcaccatttttaccatctcatccagtgatcaccaccggtggcttccctctccctgagaaaaccgaccctcttggtaccatttctgctgccccatggggatcagcgttgattctaccaatttcctacacatacatagccatgatgggttctaagggtctcactgatgcttcaaagattgcaatcttgaatgcaaactacatgacaaagcgtctggagaaacactacccagttcttttccgtggagtcaatggaactgttgcccatgagttcattattgatttaagaggatttaagacgactgctggtatagagccagaggatgttgcaaagcgtttgatggactatgg

SEQ ID NO: 398849 - DNA, 399 bp, Oryza sativa nipponbare
  unsure (1)..(399): unsure at all n locations
ccacgcgtccgcggacgcgtgggaaaaaccaacccaaccgccgccgcatcgccctcgttagaacgatggccgcgtcggcgctgcaccagaccaccagcttnctcggcaccgtccctcgccgggatgagctcgtccgccgcgtcggcgactccggtggccgcatcaccatgcgccgcaccgtcaagagcgcgccccagagcatctggtatggacctgaccgtcccaagtacctgggcccgttctcggagcagacgccatcgtacctgaccggagagttcccgggagactacgggtgggacacggcggggctatcggccgacccggagacgttcgcgaggaacagggagctggaggtgatccactcgcggtgggcgatgctgggggcgctgggctgcgtct

SEQ ID NO: 398850 - DNA, 408 bp, Oryza sativa nipponbare
ccacgcgtccgcggacgcgtgggcatccatccatcagagatcaggtagaacagtgagagtgaggtgcagaaaaatttgagctgaagctgaggatggcaacatccatgatcacctcgccgctggtggcgccggcccgggccaagggccttccgtccatctcccgccggggatcctccttcgccatcgtctgcagcggtgggaagaagatcaagaccgacaagccctacgggattggaggtggcatgtcagtcgatattgatgcatctggcaggaagagcacggggaagggtgtgtaccaattcgttgacaagtacggcgcaaacgtcgacggctacagcccaatctactcgccggaggaatggtctcccaccggtgacacctacgttggtggaaccaccgggcttctga

SEQ ID NO: 398851 - DNA, 450 bp, Oryza sativa nipponbare
ccacgcgtccgcccacgcgtccgcacccacacattctcgaagaaggagaagaaggagaggagcagccatggcgtcgtcggtggcagcggcggcgagcacgttcctggggacgaggctggcggacccggcgccgcagagcgggaggatcgtggcgaggttcgggttcggcggcgggaagaaggcggcggcgaagaaggcggcgaggccgtcggcgccgacgacggacaggccgctgtggttcctccgcgcggtggcgccggactacctggacgggtcgctcgtcggcgactacggcttcgacccgttcggcctcgggaagccggcggagtacctgcagttcgagctggactcgctggaccagaacctggccaagaacaacgccggcgagatcatcggcacccggttcgagaccggcgaggtgaagtccaccccgttccagccctacaccga

SEQ ID NO: 398852 - DNA, 453 bp, Oryza sativa nipponbare
  unsure (1)..(453): unsure at all n locations
ccacgcgtccgcccacgcgtccgagaggatcaggaggcattctttaaagactacgctgaagctcatgctaaactgagcgaccttggtgcaaagttcgatccacctgagggattttcactggacgatgaaccagccgtcgaagagaaggatcctgaaccagcaccagcgccagcagcagcaccaccacctccaccagtcgaggagaagaaggaagctgaaccaactccagtaccagtaacggtaggagcagcagtggcatcatcgccagcggatgacaacaacggtgcagcaccgcaaccagagcccttcgtcgctgcgaaatactcctacggaaagaaggagctgtcggactcgatgaagcagaagatcagggcggagtacgagggattcggaggcagcccggacaagcctntgcagtccaactacttcctcaacatcatgctcttgatcgga

SEQ ID NO: 398853 - DNA, 442 bp, Oryza sativa nipponbare
  unsure (1)..(442): unsure at all n locations
ccacgcgtccggcgacgagctcgctctttcctcttccgccctatcgccggcggcgcggctccagcaaagctcggcggcgtgctccggcgaccaaggaggccacggaatactgagaggatcagtggaagtgagggccggacctccttagggcggagtcgaaatttcgtagcagttgagaatcttcgcaggtactggagggcggccatggaggagctggagttgcctctccccacggagaagctcgccgtggatccgggcagggagggaggaaagcgaggtgtggctgtgctcgtggccaccgggagcttcaatcctnccacctacatgcacctgcgcatgtttgaactggcaaaggatgaattgcagcagcgagggtattctgtcttgggtggttacatgtctccggtgaacgatgcttacaagaagaaaggccttttatctg

SEQ ID NO: 398854 - DNA, 394 bp, Oryza sativa nipponbare
ccacgcgtccgctcagctctcacagctcactgcatcaatggccgcggccaccatggcgctctcctccccggtgatggcccgcgcggcgccgtcgacctcctccgcgctcttcggcgaggcgcggatcaccatgcgcaagaccgccgcgaagcccaagccggcggcgtcgtcggggagcccgtggtacggcgccgaccgcgtcctctacctcggcccgctctccggcgagccgccgagctacctcaccggcgagttcccgggcgactacgggtgggacaccgcggggctctccgccgacccggagacgttcgccaagaaccgggagctggagggatccactcccggtgggcgatgctgggcgcgctcggctgcgtcttcccggagctcctcgccc

SEQ ID NO: 398855 - DNA, 452 bp, Oryza sativa nipponbare
ccacgcgtccgcccacgcgttcgaagaagtactcgagcaaagaaagagagagcttggtgagctgcaaagatggcccccttcgggatggcgtcgtcggccaccaccgtcgctcccttccaggggctcaagtccaccggcggcatgcccgtcgcccggcgctccggcaactccagcttcggcaacgtcagcaatggcggcaggatcaggtgcatgcaggtgtggccgattgggggcatcaagaaagttcgagaccctcttctacctgccaccgctcaccgtggaggacctcctgaagcagatcgagtacctgctccgttccaagtgggtgccctgcctcgagttcagcaaggtcggattcgtctaccgtgagaaccacagatcccccggatactacgatggcaggtactggaccatgtggaagctgcccatgttcgggtgcactgacgccaccc

SEQ ID NO: 398856 - DNA, 348 bp, Oryza sativa nipponbare
  unsure (1)..(348): unsure at all n locations
ccacgcgtccgcccacgcgtccgcccacgcgtncgctcgaagacaaaaatctctccgagataccaaatttccggttactgctgaagcaacttgtaaccatggaggtgattcagtggacaagcttgtgggaattctttaaagatgaatatgcgaatgagaagaattttctcggaggagctttgggtgacaaagctgcagaggatctgaaattgaggatcattgaacataatatcttggttgtttcgaagtactattcaaggattaccctgaagaggctcgcagatcttctttgcttgagcttgcaggaggcagagaaacacctttcggacatggtaaactcaaagtcgc

SEQ ID NO: 398857 - DNA, 425 bp, Oryza sativa nipponbare
ccacgcgtccgcccacgcgtccgcactcccaaaccctaaccccggaggagagggaggagcagccatggccgtgggcaagaacaagaggatctccaagggcaggaagggcagcaagaagaagaccgtcgatcccttttccaagaaggattggtacgacatcaaggcgccgaccgtgttctccgtccgcaacatcggcaagaccctcgtcttcaggacccaggggaccaagattgcatctgagggtctcaagcatcgtgtctttgaagtctccttggcggatcttcagaatgacgaggatcaggcttacaggaagggtagacttcgtgctgaggatgttcaggggaggaatgtcctcacgaatttctggggcatgagttttaccacggacaaacttaagtccttggtcaagaaatggcaaacattga

SEQ ID NO: 398858 - DNA, 287 bp, Oryza sativa nipponbare
atatccactcagtgaatcatggatcaataacctcatggaaaagttaaaatgtgatcaagatacgactctgctgctgtcaacgagcgcatccttactttcatgtataaaaaacatgttgctgatgatgcatggcacgatctgtagataggtccacgagctccatcagttttcaactgtgtggttgaaatttctagaggcaacaaagttaaatatgagttagataatgcaactggtctaattaaagttgatcgtattctttactcatctgttgtttacccacacaacta

SEQ ID NO: 398859 - DNA, 442 bp, Oryza sativa nipponbare
  unsure (1)..(442): unsure at all n locations
ccacgcgtccgcaaatcccccaatccgatctgcctttcctcttcctcctcgtcaaaccctagccaaatccacgatcggggctagctcgtcggcggcggcgatggggaacccggagaagctgatgacccagatcttcgacctcaagttcacctccaagtcgctgcagcggcaggcgcgcaagtgcgagaaggaggagaaggagcagaagctcaaggtgaagaaggcgatcgagaaggggaacatggacggcgcgcggatctacgccgagaacgccatccgcaagcgcaccgagcacatgaactacctncgncttgccttccgcctcgacgccgtcgtcgcgcgcctcgacacccaggcgaagatgcaggtcatcggcaagtccatggccaacatcgtcaagtcgctcgactccgcgctcgccacggggaacctgcaaaagatg

SEQ ID NO: 398860 - DNA, 483 bp, Oryza sativa nipponbare
  unsure (1)..(483): unsure at all n locations
ccacgcgtccgcacaagagagagagcgccagactctccccaggtgaggattcaaccatgaagggggccaaatccaaaggcgccgccaagcccgacgccaagttggctgggaagaagtagggcgcggaaaaaccccgcggcaaaggcaggaaggggaaggccggcaaggaccccaacaagcccaaaagggctccctccgctttcttcgtttttatggaggagttccgtaaggagttcaaggagaagaaccccaagaataaatctgtcgctgctgtaggaaaagcagccggtgataggtggaaatccctgaccgaagcggacaaggctccctatgtagccaaggccaacaagctcaaggccgagtacaacaaggccattgctgcctacaacaagggcgagagcactgccaagaaagcacccgccaaggaggaagaggaggacgacnaggaggaatctgacaagtccaagtccgaggtcaatgatg

SEQ ID NO: 398861 - DNA, 451 bp, Oryza sativa nipponbare
  unsure (1)..(451): unsure at all n locations
ccacgcgttcgcccacgcgtncgcccacgcgtncgcccacgcgtncgcggacgcgtgggcgagactagacagggcaggcggaccccagcgtcgtcctcttcgtttcggtttttcttcttcttcttcggcttcggttttgcgagatcttctgatcgactcgctccgccatggctggagaagctgatggaaaagccccactgggatcaagatacccccctggtgctctcaacgagcgcattctttcttccatgtctcaaaaacatgttgctggtcatccatggcacgatctggagataggtccaagagctccagcagttttcaactgtgtggttgaaattcctagaggcagcaaggttaagtatgagttggataaagcaactggtctaattaaaggttgtcgtgttctttactcatctgttgttacccacacaactatggtttcattccacgc

SEQ ID NO: 398862 - DNA, 429 bp, Oryza sativa nipponbare
ccacgcgtccgaatctccacagtaggtgttcccagcactataaaaaagttagcatctcacaagcttcagtcaacacttgcagtcagcctgcacgccccaaatcagaaactacgggaaacaattgttccaagtgcaaagtcatatcccttggaggcactaatggatgactgcaagaattacttcctcgaaactggacgaagggtatccttcgagtacactctgctagctgggattaatgacgcaaaggagcatgctgaagaacttgcagagctactgcatacatgtggcggtggttatcatgtgaacctaattccttataatccgattcaaggttctgaatacaagaggccctacagaaaagtggttcaagcgtttgttgatgcgctagaagctcggaaagataaccgtagcgttcgacaaacccgtggg

SEQ ID NO: 398863 - DNA, 389 bp, Oryza sativa nipponbare
ccacgcgtccgcggacgcgtgggtggatatctacacccccgtctacgagcacatgaagatcgacatccgcatgaaccttaaggcaagaagggtggagctgaaaacaagacaagacacacctgacgtgagcaaccttcagaagtgtgcagacttcgtacatgcttttatgcttggttttgacatcgccgatgctgttgcgctgctccgtctcgatgacctgtatgtggattcctttgagatcaaggacgtgaagacactccgaggagagcatctgtcacgtgctattggccgcttgtcaagaaaaggaggcaagaccaaatatgccatcgagaattctacgaggactcgcatagttatcggttgtacgaagatccatatacttggatcct

SEQ ID NO: 398864 - DNA, 396 bp, Oryza sativa nipponbare
ccacgcgtccgtggggatcaaccccatcatgatgagcgccggagagctggagagcggcaacgccggagagccggcgaagctgatcaggcagcggtaccgtgaggcggcagacatcatcaagaaggggaagatgtgctgcctcttcatcaacgatctggacgcgggtgcaggtcgcatgggaggcaccacccagtacacggtgaacaaccagatggtgaacgccaccctgatgaacatcgccgacaacccaaccaacgtgcagctccccgggatgtacaacaaggaggacaacccccgtgtccccatcatcgtcaccggcaacgacttcttcacgctgtacgcgccgctcattcgtgacgggcgtatggagaagttctactgggctcccacccgcga

SEQ ID NO: 398865 - DNA, 274 bp, Oryza sativa nipponbare
tactaggcaaacgagacgaatacacgattgattaatttcactgagaatagcacgggtacatcacatcacacaaattcatacgttgatacacgcatagtcgccgaagcgaccagctgcttaattaatcgataacacacgggtttaattcagcaataatgagcacacacacaaaccacactcatatgggtggtttttattgtggactaattaaggtaggtgactcgccggcggcgagtgttcggttgcttcgtgcggacgcgtgggtcgacccggg

SEQ ID NO: 398866 - DNA, 318 bp, Oryza sativa nipponbare
attgcaaaaacatgatctgcttcttcatcttcttagtgtacacaacaccaactcgatcatcatctcgtcgcactaaacccatcttccccaacccaaagacaacgaactcgctggccacaaatccatccaaccacaattaaccactgctaagctacggtcccccacttcacttgccggggacgaagttggtggcgtacgcccaggcgttgttgttgacggggtcggcgaggtggtcggcgaggttctcgagggggcccttgccggtgacgatggcctggacgaagaagccgaacatggagaacatggccggacgcgtgg

SEQ ID NO: 398867 - DNA, 246 bp, Oryza sativa nipponbare
tgtataaataaagatagccggagcttccatatatttcattcacatatgccttacccaacaacatatagtcgcagcggataccactcttacagtaagtcagagagagatcacgtgaaacatacacataggcagagcacgggcggcataatcaaaagacgatgaacacactgtgaacacacgcgacaaggtgggagacatcatcgaatcagagatgaacaatgaaacacggctatatatgacgatgac

SEQ ID NO: 398868 - DNA, 457 bp, Oryza sativa nipponbare
tttaactaagaccagtttgatttcgtgtttgatacaaaaattaagatggacggattcacaagagagcaccctctacttaagctttacattacaaggccaaccagcagctgcctgccggccgaccactgcgtgcgcacgcgcgcgcaataatcaaccaatcacacacagtacgcacgcacataaaaaccacccatagccttcacgtacgcccggacgcacgcaccggttcgtgccaagctcaagggtagatggttctcgggatgatgatgtcgccgatgttgttgtgccacgggtccgagaggtggctggccaggttctccagtgggccggtgcccgggtacgccgactgttggacgcagaaacccacaaaagccagcatggccaatcgcccgttcttgatctccttgagcttgtactcctcgaacttgaccgggtccttggagaagccgagggggtc

SEQ ID NO: 398869 - DNA, 402 bp, Oryza sativa nipponbare
aaatagggaagctatgtcatctccatataattccccatgaaatattgatagggtatatgtagacatgaaggaagtgttcgtatggctggatcatcactagaattctgttatttgaccctgatacttactatgaggccatgctgatgaagaacatagcaatcttacttgctcttcttagaagcctcgtataggtagctcacgataactacagctgcagcaacagctaccccgacagcactctgtgcgagtacagcaccagttgaaagatcagatttcgtagatgcagggccgctgctccgtggagtgaagccaagttcagaaagcttcttgtgcgattcagcgtagtccttgaagaaggtgtcttcatccctggcataaagatccacatagcgtttaaatgaa

SEQ ID NO: 398870 - DNA, 432 bp, Oryza sativa nipponbare
tttgggaaacgaataaaatcattattgcaaaaacatcatcttcttcttcatcttcttagtgtacacaacaccaactcgatcatcatctcgtcgcactaaacccatcttccccaacccaaagacaacgaactcgctggccacaaatccatccaaccacaattaaccactgctaagctacggtcccccacttcacttgccggggacgaagttggtggcgtacgcccaggcgttgttgttgacggggtcggcgaggtggtcggcgaggttctcgagggggcccttgccggtgacgatggcctggacgaagaagccgaacatggagaacatggcgaggcggccgttcttgatctccttcaccttgagctccgcgaacgcctcggggtcatcggcgaggccgagcgggtcgaaggcgccgcccgggtagagcgggtc

SEQ ID NO: 398871 - DNA, 393 bp, Oryza sativa nipponbare
taaagcgaagaaagggttttgaatttcgaagaaacaactgatagtaggtttgatacagtttttgcactacgctgttactgcacatgggagcagaacatattctcgtagagatatacaaacatcacacagaggaagcagcagcaagcactctagagagtcaccccccaaaacttgcccggacaaatgcagctgcttaattactccgttccagcgatcttcttcttcaaggtctcgatgtcggtcgccaactctttcctgctctccttgaagaggaggtagcggtagacgaaccagccggtgtagccgaggccgacgagctccaggatcttggggagcagcggcacggagttgatggcgccgacgacgaccgtggtgagccagagggcgacgacg

SEQ ID NO: 398872 - DNA, 385 bp, Oryza sativa nipponbare
taatttcaaagcctccaccgattcgagtccactcgacaagagcaaagccgacgcccggccccatcgcgacgcgacggtagtatagtagttacaaaaagtgaatgtgccgcgtacgcacgcgcgtgcgtgcgtctcacacgagaaagatcggtggccgtaagcactcggctcaatcaatcatcactcacctcaccggccgcggagcagggccttctcggcggtgtccatctcctcgaggatgcgggcgcggcgcttgttggggatgggggccgtggggccgaagctgatgtagtggcccgacacggcgttgagcgcggagtacatctccctgaaggacgggcggcccagcagcgacttctccctgcggtacttggccacccacgag

SEQ ID NO: 398873 - DNA, 344 bp, Oryza sativa nipponbare
gggggttgggttttttttttggcctataataagatctttgccgataaaacatcctactacaagcggccaaaatttttactgagctgtgcaccgctcacaactgttacaaatacaattgagggaacggcaatatcgttctatctcctgaaatgtaaattgacaacagtgggctgcatatatgtctgctgaatagaaagggcgagggggaaaaatgggtgaaacaagaaggaagatattctttttgccctgctgtcagaagcaccagaatctgaacctggttttatcttgaatttgacaacatttggctatttcactgatataaattctattggatgctctgtaca

SEQ ID NO: 398874 - DNA, 373 bp, Oryza sativa nipponbare
atgtaaatggttggtttctattaggtaaccgttcagcaaactgtcggtttgggcagcagagagttcagcaaaggggtcaggtgcttgggacccgagtatctgacatggcatacatggaaagaaaaggtgctgcttcttgtcttaacatgaatagtagaaggtatatatccccgaagtactggttttagaccatgtatgttaacatatgtcgcactattgatgagaaactgttcagggaatcatgtagcctctgcagttgatcagctggagatcacttcctcaagctctcaatgatgtacgcgccgtaaaggtccattgagtacttgattgcgttgatggcatcttctgctgggagaaacttattgacagcaac

SEQ ID NO: 398875 - DNA, 378 bp, Oryza sativa nipponbare
agcaaatcgatccatgcgaccatgcgtgcaaatcagttggagcacaaatttacatgttacacccacaccctacacccatgcataataatacatcgtatatacgtacgtacatacatacccctctcgatcacacgcaccatcgatcgtacaaagttgcgtacatacatacgtacacacatatacgcatacgcacgtacatacatacataattaaaaactcgtaattaattaaatacgtagttgatggcatctctaatggaacttgaggctggtgaggatgttgttgtggacgggatcagcgaggtgatcaagcaggttctgcacggggccaaccccggtgaagagcgcctggacggagaagccgaggaaggcgagcatg

SEQ ID NO: 398876 - DNA, 362 bp, Oryza sativa nipponbare
gaatgaaaagcactgcatctcttaacactctgcagtatatatgaactactacacagtgacagccggagttgaaagctcaggcaacccactttggccattcagtacaatcaccttcccctcggaatccacatcgacaatggcagaatcaccctccttcacctccccagctagcatcttctccgcgaggctgtcctccaggagcctcatgatggccctccttagcggcctcgcaccatagctcgggttgaagccttcgtcaacgatacgctccttgaacttctcggtgacctggaggtcaatgtccttggccttgagcctgtcaaagacctccttgagcatgatctcggcgatctccttgacct

SEQ ID NO: 398877 - DNA, 299 bp, Oryza sativa nipponbare
  unsure (1)..(299): unsure at all n locations
ataattaattcacaacaccatatttcattgatcaggttcagaacctgcacagaaatacacactaccggtacagatctcaccctctctccaatactcgtacatccatccacgcggtccacacgaatacgtacatctatacggtacacgtacgtacatctactgcaccgngtacacacacgcacactcttctgcagagacgcgcatcgtcgtcaacctagctagcttagctgaaggcgatgcgtcgccatggcagcacggcggcggcggcgctcacttgccggggacgaagttggtggcgt

SEQ ID NO: 398878 - DNA, 460 bp, Oryza sativa nipponbare
atatagccggagcgtccatgtattacattcacatatgcctcacccaacaacatatagtcggagcagataccactcttacatcaagtcagagagagatcaggtgaaacaaaaacaaaagcagagcacggccggtaaaatcaaaagacgatgaacaaactgggaacacacgaaacaaggtgggagacatcatcggatcagagatgaacaattaaacaaggctatatatgacgatgacggcttatgtgccaccagactcctcgcagcccgggggcttgtaggcgatgaagctgatgagctgcacctgcctgacgttgtcgaagccgatgatacggacgaatgcatcagggtacgccttcttggccttctcgagctccttgagcacctgggtggcgtcagtgcacccgaacatgggcaggcttcacatggtccagtacctgccatcgtaagatccgggggatct

SEQ ID NO: 398879 - DNA, 473 bp, Oryza sativa nipponbare
gctgattactatgactgggtgcaatgtaacacttcggatacaatagtacattacagagctagctaaatgcgaagccacaataccgtcagcgcaagacgatcataaataaagcttacacaacatagccaacatgcaaaacattcggactgaccagagatgagggttcttgaagctgccgtggtgtgccatgcatcacaaatgccgaacaactagattgtagcagccaacatgaaaggaaaaggcatggataatgcagcaaagatggatgatgaagaccgcagattgtgacgcttcgttcaccaaccatatgaaacccctaaattttgtcaagtttctccgccttcaccaccggattagccttggcaatagcatccctagcagcggtccgatagtcaaactggcagtcatgcttatgggaatagcggtgcattgcgcagtacaagttgccacatcggcagttgaatccggtaaga

SEQ ID NO: 398880 - DNA, 306 bp, Oryza sativa nipponbare
tttaggcaaaccacacgaggacacgagtgattaatttcactgagaatagcacgggtacatcacatcacacaaattcatacgttgatacacgcatagtcgccgaagcgaccagctgcttaattaatcgataacacacgggtttaattcagcaataatcagcacacacacaaaccacactcatatgggtggtttttattgtggactaattaaggtaggtgactcgccggcggcgagtgttcggttgcttcgtgacttcacttgccgcacttgcagtcggtgcaggagcagctggtgccgcacttgcag

SEQ ID NO: 398881 - DNA, 334 bp, Oryza sativa nipponbare
ctattctggggtaggggtttttttttttttttttttttttttaaaacccaaaattttgcagaaaccaaatgggttcacaggccacacatacaggtggtatacaaattcttttacacacaaggtttttggagaggcaaaacacggggtttgtttatcaaaccctttaaaaaagattcatgtgttgaaatacctgatgaaccccgtttgctctcaagggaaaattaattaatgccgttttggtttaactttggccatcgatctaaacctgaaactgtgacaacacactggcttcagggccctggaggtactagcagtttagcagtagctgtagtac

SEQ ID NO: 398882 - DNA, 479 bp, Oryza sativa nipponbare
ttttacggtaagaaacgcgggtgaaatcctcaaaagtaccataaacaaagtactataaactaacccacgttagcatctgcggagtagcaaaattaacacaaacaaatcctaataaaattctcggaattacaatgaacgactgcaattcaaatacgtacatgcccaattgcccagatacatcatttcaagtattattacggggcattcagcacttagcagcagatctaaactgctgtctaagtatagatagggcagcatttctcacactaagtttttagttatccgatagattcttaatatgccgtatctcaaggagatactctcgtttccgttcgaatgtaagctttaagcaatccacccggatctttaagaaggcatatatgtcgaagtatcaatctgctcaggaagcctccttatgtcaacctcgaatctttcttgcacttgattaagaacatcagagtcagaggcagaggaaacaa

SEQ ID NO: 398883 - DNA, 313 bp, Oryza sativa nipponbare
tgtgttgcttagtggcaaagcagaaatgcgaatttacctttatatgcaactgtttacaccaaaaggggaaaaaaacgggtaccttgcaaaaaggagtataactttgcagtttcaagtcccacttcaactacaacccaatctgcattacaggatgggagtctaaaacgactgcagtttcagcgtttttgaggcctgcagagacactgggctcgcgttgcagcaaaagattaggcggcggcgcccacggtggcgccggcggtgagcctcgacgagccgtagagagtctcctcgaaccggatgatctcgttcttgg

SEQ ID NO: 398884 - DNA, 279 bp, Oryza sativa nipponbare
aaatatatatagggggagcgtgcatatatttcattcacatatgcctcacccaacaacatataatcgtagcatataccactcttacatcaagtcacagaaagatcaagttgaacaaaaacaaaatcacaccacggcctgtaaaatcaaaaaacgatgaacaaactgggaacacaccaaacaaggggggagacatcatccaatcagagatgaacaatctaacaaggctatatattacgattactgcttaatttccaccagactacttgcaacccgggggct

SEQ ID NO: 398885 - DNA, 385 bp, Oryza sativa nipponbare
ccaaattcaagggtgaagggtagtatatcatcatcatgcaagtacagtgttacatagattaatcacaatgcagtttgattaagcagtgggcatcatcacatcgcattcagaggaaggctatcttagattacagatgaatatgcagacacccagcttggtgttacatacatagactggatttgggtgaaatttagccggcgagggcgctggtgttgtagacgaggagggcgccgccgccgaggagcccggcgagggtcacggcccagatcagaagcccggtggttccaccaacgtaggtgtcaccggtgggagaccattcctccggcgagtagattgggctgtagccgtcgacgtttgcgccgtacttgtcaacgaattggtacac

SEQ ID NO: 398886 - DNA, 352 bp, Oryza sativa nipponbare
ttacagacactatataagagtatgacgccccctgcacgcgtacttaagcttgtatactctacagcgcgccgccttttttttttttttttaaatgcttgctggggcaagatcaacatggagggtacattgcccgttccatatgaacaaacataaaaacacccaaaccccatattgccattttgccgatcctagcctaacttgacgaggacatcgccaatagcacattttttcaacgcctaatacttttccgcctcttctacactctttatcttggctgcatggtcaaacccgtcaatagtggcaaagagcttgcctgataggtccttgaagccctttttttggtacttgggct

SEQ ID NO: 398887 - DNA, 402 bp, Oryza sativa nipponbare
tcaaatacaatatttatttgttacggatacaaattgataatctcggggttacagatttgattagaatatatacttgctataaacaagtaggaactttcttacacctcaagtgataaccttacaagactaacaataaaataaaaatttgatcgcaaaacacagaaatcgcaaaagatgtgctcttcaggtattctacgctagacatggcttcctgcatctatcctcaagcagcagaatctacaacttctgccggtggggactagggagaaaggaatgcatcgaatagcctaggtatttcagtatctgatcccttttgcaacctcaaagaaatgggcaacattttcctcaggagtgcctaccttaatgccatgaccaaagttcaatacatgcccactattacca

SEQ ID NO: 398888 - DNA, 366 bp, Oryza sativa nipponbare
  unsure (1)..(366): unsure at all n locations
tttttataattaattcacggcaccatatttcattgatcaggttcagaacctgcacagaaatacacactaccggtacagatctcaccctctctccaatactcgtacatccatccacgcggtccacacgaatacgtacatctatacggtacacgtacgtacatctactgcaccgngtacacacacgcacactcttctgcagagacgcgcatcgtcgtcaacctagctagcttagctgaaggcgatgcgtcgccatggcagcacggcggcggcggcgctcacttgccggggacgaagttggtggcgtaagcccaggcgttgttgttgacggggtcggcgaggtggtcggcgaggttctcgagggggccc

SEQ ID NO: 398889 - DNA, 465 bp, Oryza sativa nipponbare
  unsure (1)..(465): unsure at all n locations
aaatatatataggcggaggggccatatatttcattcacatatgcctcacccaacaacatatagtcgtagcagataccactcttacatcaagtcagagagagatcaggtgaaacaaaaacaaaagcagagcacggccggtaaaatcaaaagacgatgaacaaactgggaacacacgaaacaaggtgggagacatcatcgaatcagagatgaacaattaaacaaggctatatatgacgatgacggcttagttgccaccagactcctcgcagcccgggggcttgtaggcgatgaagctgatgagctgcacctgcctgacgttgtcgaagccgatgatacggacgaatgcatcagggtacgccttcttggcctnctcgagctccttgagcaccctggtggcgtcagtgcacccgaacatgggcagcttccacatggtccagtacctgccatcgtagtatcccggggatc

SEQ ID NO: 398890 - DNA, 363 bp, Oryza sativa nipponbare
attgcaaaaacatgcatcgggttcttcatcttcttagtgtacacaacaccaactcgatcatcatctcgtcgcactaaacccatcttccccaacccaaagacaacgaactcgctggccacaaatccatccaaccacaattaaccactgctaagctacggtcccccacttcacttgccggggacgaagttggtggcgtacgcccaggcgttgttgttgacggggtcggcgaggtggtcggcgaggttctcgagggggcccttgccggtgacgatggcctggacgaagaagccgaacatggagaacatggcgaggcggccgttcttgatctccttcaccttgagctccgcgaacgcctcgtggtca

SEQ ID NO: 398891 - DNA, 476 bp, Oryza sativa nipponbare
tatcaattagtatctcattggccttgattctagcatatgtccagttcaaaaactacattacaggcagttttcaatggcaaacaaaacacagaacacgatgtgatgtttaagctttcggtgcaatggaagtcgtctatgtatgaatctcacgtgatgaatcacatatacagcaaaatgtcaggcaggtcagctctgctcagtggtcaggtgaggtgctgccgcttgtatctgaaacaatgagaaactatcttcacacctcaacaacactataccctaagctgactgagggaatccggaccaacgaggtatattcgtcttcgactactcttgtaccggaagactactactcctttataagctgttcttggaatgccatccttccattctttaaataatcccaaatgacgagctattcgttcaaagtcttcctgatcgttatacttgatccttacatccgcatccatattgtgggcttt

SEQ ID NO: 398892 - DNA, 315 bp, Oryza sativa nipponbare
ttgcgaacaaaactttcgagctctgggttttctccttggtttctattccatttcattccgatagatagcaacacgcagttcaaacaccataaccaaagcgaactcaattcatggtaacatcacggacgaagaacacctaacactggatggatggatagagggcttctcgactcgagagagccactggacacgataaccactcgactcgatgataagatgattctgacacggatagctaaggataactggccacgatgggccccaccaatcaagttcttcagtttccgacggagttttcggcggaacctacggcac

SEQ ID NO: 398893 - DNA, 281 bp, Oryza sativa nipponbare
aaataccaagaggggtcgggcgatgtacaagtggatgcattaattcatcatcttgggtgttcttatattacaaatcaccaccatgcaagtcgccattaaccaccaacccagctttcctaatttaagtagtaatcaacaaaaggatgacctttcctttctccataccctcccagctcgctcgtaatcacaaaactaaacagtgcgcgcgaacgcacaccaacgcatcgatcccgtttgaattgcgcgcgaaagagcttaaattaataggatgaggagaaggt

SEQ ID NO: 398894 - DNA, 469 bp, Oryza sativa nipponbare
  unsure (1)..(469): unsure at all n locations
gaaataatgcanggcgttatgtatatacggtgtcctgtacttactacagtgcagtagttacaagaaaacagtggcaaacagatgccaggtcattttatttcataatcgcacgatgagcactccaaacagatgcaggctcgctgtgttagccattccttgacgaggccggatttttaatccattttatttcatacataatgtcacgatgagcacgccaaacagatgcaagctcattggcacaactcaaattgagatgctgttggggatacccatctccatcacggacgtcatgtccttagggtcaccgtaggacggcttgagcagcacgtacggcaccacgccggggccctgccggttctttcgctccggatccttgttccggcagtcgatcatctncgcgatgctcatcatcctctcgttgaacctcccgaacgccgccctgacctccctgtccgccatccacgctgac

SEQ ID NO: 398895 - DNA, 383 bp, Oryza sativa nipponbare
ttggagcacaaatttacatggtacacccacaccctacacccatgcataataatacatcgtatatacgtacgtacatacatacccctctcgatcacacgcaccatcgatcgtacaaagttgcgtacatacatacgtacacacatatacgcatacgcacgtacatacatacataattaaaaactcgtaattaattaaatacgtagttgatggcatctctaatggaacttgaggctggtgaggatgttgttgtggacgggatcagcgaggtgatcaagcaggttctgcacggggccaaccccggtgaagagcgcctggacggagaagccgaggaaggcgagcatggcgagcctgccattcttgatctccttgagcttgagctcctt

SEQ ID NO: 398896 - DNA, 373 bp, Oryza sativa nipponbare
aatcataacttcttttcctggactcagcagtgtagcaatgctagtcaataaagctaatttcacctttgaacgggaatggggaagcaatggagtagagaattacaggagaaggtggcagctgaggagagaatcaggagctgtcacaaagctatatacaagttgggaagctgaacgagaagagagcatatgcttccctcctacaggaagcattatgacttgttggtgctgttttacaaatctgggtgattatcggaagatcgtcatgcggtagcagctgcagcttcttctgcgacttgggatccctgttgcagagtgcagatgaggttgcgatccccgtacacattgtccacgcgacatgttgttggccagaact

SEQ ID NO: 398897 - DNA, 374 bp, Oryza sativa nipponbare
gatgacagacagaaattaagtaagctagaaatctcctcgatcgatcacacacacacacacaattaaggtacatacatacatgcactgctgcaactgcaactgcagggtcggtgcgtggctactacaagtgtacacatggtacgttggttggcaccatctcgatcgtgtcgttgtgctcacttgccggggacgaagttggtggcgtatgcccaggcgttgttggcgacggggtcggcgacgtggtcgaagaggttctcgatggggcccttgccggtgacgatggcctggacgaagaagccgaacatggagaacatggcgaggcggccgttcttgagctccttcaccttgagctcggcgaaggtgtcagggtcgtc

SEQ ID NO: 398898 - DNA, 339 bp, Oryza sativa nipponbare
gggttgggtttttatggaatctatgtatttagtatcaacaattaatctccaaattcaagtatcaagtgtggtatatcatcatcatgcaagtacagtgttacatagattaatcacaatgcagtttgattaagcagtgggcatcatcacatcgcattcagaggaaggctatcttagattacagatgaatatgccgacacccagcttggtgttacatacatagactggatttgggtgaaatttaaccggcgagggcgcttgtgttgtagaccaggagggcgccgccgcccaggagcccggcgagggtcacggcccaaatcaaaagcccggtggttccaccaa

SEQ ID NO: 398899 - DNA, 338 bp, Oryza sativa nipponbare
ttttgatgtacaagtggatgcattaattcatcatcttgggtgttcttatattacaaatcaccaccatgcaagtcgccattaaccaccaacccagctttcctaatttaagtagtaatcaacaaaaggatgacctctcctctctccataccctcccagctcgctcgtcatcacaaaactaaacagcgcgcgcgaacgcacaccaacgcatcgatcccgtttgaattgcgcgcgaaagagcttaaattaagaggatgaggagaaggtgtcgaagatggtggtgtggagcgggtcgctgaggtgggtggcccagttgttgaggggccccttgccggtggcgg

SEQ ID NO: 398900 - DNA, 365 bp, Oryza sativa nipponbare
  unsure (1)..(365): unsure at all n locations
anncccgacaaagatttctctagaggaattactcaagaagttcagaaagtactggaatccattcacatgcccatccttttacctcaatttatttacggaataacgactcaaaacatggaaagagaaacacgcaaatcttagcacaggcagaacaactcaaaacactcgtcagaggaggtcatcagaccatcgctctcagctcccgagcagagacgtcaagaaggccagccctccgatcaagagcatgatgttgaggaagtagttggactgcagaggcttgtccgggctgcctccgaatccctcgtactccgccctgatcttctgcttcatcgagtccgacagctccttctttccgtaggagtatt

SEQ ID NO: 398901 - DNA, 358 bp, Oryza sativa nipponbare
tcttgatcaagggtatgctggaatatatactaaacttaaaaatggttttatcaatctcccctgcaacgcatacgtccttatccttcattaaaccattctaacctaacccaactgcaacgaactctatgcacacatattctttcaaccacaagtcaccactgctaagctacggtcccccactttacttgccggggacgaagtaggtggcgtacgcccactctttgttgttgacggggtcggcaaggtggtcggcgaggttctcgagggggcccttgccggtgacgatggcctggacgaagaagccgaacatggagaacatggcgaggcggccgttcttgatctccttcaccttgagctc

SEQ ID NO: 398902 - DNA, 443 bp, Oryza sativa nipponbare
accagaacctggcaaccggtgtccggtagtatatacggtattacacatgaacattacacagcattgcgatttccaattgccggaagtcgataataatccgtgccggacagtgaaaagtcagatgaggtggggaagaaaagcaaagaaagaaacaagaaactgtgttgggcgctcgaaacttcgaaattctcattacaaaggatcgagaggaagaaggaagaagtctggggaaaatttttggagcgaggtggagttacaaaggcagcagcagcagcagcttctacgttctcacttccactggttggcgacgatgtcggcgaggtcgacgaccctatgcgagtatccccactcgttgtcgtaccaggcgatgaccttcaccatgtcgtcgcccatgaccatgcttagcgacgcgtcgatggtgcacgacacgtctgagcacctga

SEQ ID NO: 398903 - DNA, 246 bp, Oryza sativa nipponbare
tttgggaaacgaataaagtgattatggcaaaaacatcatcttcttcttcatcttctaagggtacacaacaccaactcgatcatcatctggtcgcactaaacccatcttccccaacccaaagacaacgaactcgctggccacaaatccatccaaccacaattaaccactgctaagctacggtcccccactttacttgccggggacgaagttggtggcgtacgcccaggcgttgttgttgacggggtc

SEQ ID NO: 398904 - DNA, 381 bp, Oryza sativa nipponbare
atatttaaaaacttttggcatcaggcagtgagagaaatacattaattaatatcctataggaagaacgtaactataaacaaaggcatttacacgtataatcacaaagcgtctttcttcagatcgagccaaagaagcagccttcgaggccggccaagaaatctagccttccatgcaggctcctcactctcatagacaaatccacatttgttgtacagcttctgtgctgcctcattgttgatggcaacatggacatacagatcagttataccccattcacgagccagtttcttagacttgtcaaccagggcataacccaatccatttctttgaagctccttagcaacacaaacattgctcagataagcccttgtatggctggac

SEQ ID NO: 398905 - DNA, 465 bp, Oryza sativa nipponbare
ttaaatatatatagccggagcttccatatatttcattcacatatgcctcacccaacaacatatagtcgtagcagataccactcttacatcaagtcagagagagatcaggtgaaacaaaaacaaaagcagagcacggccggtaaaatcaaaagacgatgaacaaactgggaacacacgaaacaaggtgggagacatcatcgaatcagagatgaacaattaaacaaggctatatatgacgatgacggcttagttgccaccagactcctcgcagcccgggggcttgtaggcgatgaagctgatgagctgcacctgcctgacgttgtcgaagccgatgatacggacgaatgcatcagggtacgccttcttggcctcctcgagctccttgagcacctgggtggcgtcagtgcacccgaacatgggcagcttcacatggccagtacctgccatcgtagtatccggggatct

SEQ ID NO: 398906 - DNA, 337 bp, Oryza sativa nipponbare
aactaagaccaggtggagtgcgcgtttgatacaaaaattaagatggacggattcacaagagagcaccctctacttaagctttacattacaaggccaaccagcagctgcctgccggacgaccactgcgtgcgcacgcgcgcgcaataatcaaccaatcacacacagtacgcacgcacataaaaaccacccatagcctacacgtacgcccggacgcacgcaccggttcgtgccaagctcaagggtagatggttctcgggatgatgatgtcaccgatgttgttgtgccacgggtccgagaggtggctggccagattcttcagtgggccggtgcccgggta

SEQ ID NO: 398907 - DNA, 378 bp, Oryza sativa nipponbare
tttttagaaacaatttaatctaacatacgcaaactgatattatcacaatgttagccgatgacaatggaaagagtaatctaggtacaagcggatcattgacggtggagacaagacattggctgcaccacaacacccaccagtggcgccaacaaggagcgctatccgttataggacgagagaaaaagtaaaacatcacgatgtgaagtgaaactgaataattctagtagacgatgatgatgatggataggctccttaggacgcccgccgcccttagcgtcttgctgctcccatcttgtccactggaaggctcactcgtcatcgacttcatcctcttcgctgccctcgtcgtcatcctcatcattgacctcggacttggac

SEQ ID NO: 398908 - DNA, 393 bp, Oryza sativa nipponbare
atgtaaatggttgatttctattaggtaaccgttcagcaaactgtcggtttgggcagcagagagttcagcaaaggggtcaggtgcttgggacccgagtatctgacatggcatacatggaaagaaaaggtgctgcttcttgtcttaacatgaatagtagaaggtatatatccccgaagtactggttttagaccatgtatgttaacatatgtcgtactattgatgagaaactgttcagtgaatcatgtagcctctgcagttgatcagctggagatcacttcctcaagctctcaatgatgtaggcgccgtagaggtccattgagtacttgattgcgttgatggcatcttctgctgggagaaactcattgacagcaacttctttggtctcattcttct

SEQ ID NO: 398909 - DNA, 457 bp, Oryza sativa nipponbare
  unsure (1)..(457): unsure at all n locations
ccggaaacaggggggcaacagacagaactaaacacaatgcatatgtattgttacaaaactctcagcattttaagtttgttcattcgaacgatacaattaagagcccaggcacacaaatcagccaatacaacatattacgaggccaaaactgcaacggtacgatgcaccatctaatacctttctgctaacctagcagaaacagcccttagcttagaatagactttgcctgcaggagaacctaagataagactacagagtgaatcccgagcaaccttgatgttaacaaaggatccaagtatatggatcttcgtatcagcgataactatgcgagtcctcgtagaattctcgatggcatatttggtcttgcctccttttcctgacaagcggncaatagcacgtgacagatgctctnnctcgagtgtcttcacgtccttgatctcaaaggaatccacataca

SEQ ID NO: 398910 - DNA, 142 bp, Oryza sativa nipponbare
  unsure (1)..(142): unsure at all n locations
tgagaaaactacttgacaggacactntattcactatagctgtatgcatcgtttacggctaggactacntgggtctctaatcccatttgctcccctagctttcgtctttcagtgtcagtgtcgggccaccagagtgcttttcg

SEQ ID NO: 398911 - DNA, 332 bp, Oryza sativa nipponbare
agcccatatctttatattatattattattaacaaaaacttgtcatgcccagctatggcttgggcgcgatctgatacacagaacaaagagaaaacataaaaaggagaaataattaatagcaagcgtcaagccggcctgcttaaaaggtgtaaaggcagctgccgtcgtcgctcctcgccgttgggtcgaagttcttggcaacagggtcggtgcaaccttccggcacaggcaggttacctgcttgctgtgctccttgccctcctcctcctatgcaggccgcctacgatgcatcgatgggatgcgaatagctagagatcttttattcagctggat

SEQ ID NO: 398912 - DNA, 345 bp, Oryza sativa nipponbare
ttcccggtcgacccacgcgtccgcggacgcgtgggttcctctccccttcccctctggtcgttcgtcgcattctcgtctccttcctgggattagattcccaggtaggaaaaccagttcccggtcaatttgggcgcttcgctaggattggagggagagatccaaggccatccctcctggtggcgtctacccagccaaggaccactgcagccaatgtgggctttgtgacaacctactacattgcgcatgtcaagaatgcctgcgcattcctaggagatggcatgtcccgtgtcgaggatttggagccattgttccatgggaggggcaggaagcaagacatggatgaga

SEQ ID NO: 398913 - DNA, 429 bp, Oryza sativa nipponbare
ccacgcgtccgcaccccaccagcagcagcagcagtagctgagcttgaagcagcagagcgaggtagacatggccgccgccaccatggccctctcgtccccggcgctggccggcaaggccgccgcgaaggtgttcggcgaggggcgcatcaccatgcgcaagtcggcggcgaagcccaagcccgccgcgtcggggagcccgtggtacggcgccgaccgcgtgctctacctcggcccgctctccggcgagccgccgagctacctgaccggcgagttccccggcgactacggatgggacaccggggggctctccgccgacccggagacgttcgccaagaaccgggagctggaggtgatccactccaggtgggcgatgctcggcgcgctgggctgcgtgttcccggagctcctcagccgcaacggcgtcaagtt

SEQ ID NO: 398914 - DNA, 396 bp, Oryza sativa nipponbare
ccacgcgtccgcggggaggtagagacactgaatatcaattcatttcgcgacaccgtgggagagaaaaacgatgtgcaggctaattgagatcgcgcgttaaattttttacacgaatttggttggtttcttcaaaggagccacatacgagctacatctgagactccaaaagattgtactgagggctttcctgctgcaagatttagatggttgctgtcctttgcagttgatcgggaattttgtgctgttataaagaagcttctggacaccttgtttcagggtggtgttgatcctgatgtccaatcaacagttgaatttgtcctgaaacaagatttagtatttgtggctgtcaacaaacggtcgaagcctttaattgactttctgttgacatacacaaca

SEQ ID NO: 398915 - DNA, 377 bp, Oryza sativa nipponbare
ccacgcgtccggctgcgaaatactgctgtggaagttgctgctgattgtgactgctttcctgtctaatggttattccatcaccgatggggcaagaagcctggtaaggtcaatggacagaaaattgagctcataacagctggtgtcacgactacagcatacgcgccacaactgcagaagctgactggaatgcaatctagcatagtagtcattgctaacccaaaacatgtcgcagagcacgatgctgcgaacgatattgacacagatccagacgctgctgctaatttggatacaaagtagcgtggcagcacttctagggcttgccgggggaaagcaaaggggaaatcccataggtgccctttccagaacgacatggaaaa

SEQ ID NO: 398916 - DNA, 213 bp, Oryza sativa nipponbare
ccacgcgtccgccccactggacatcattgctgccagtacatgactggtggctagtcagtcgtacttgggaggggtgtcactaatggcgcggcttgaatcacccctatccttgcctatatttcacatgatgatgatacactcgccccaaaggttaacaaggtgatagataacattcacttagtgaactgttccatccgggcagatgctgtttag

SEQ ID NO: 398917 - DNA, 481 bp, Oryza sativa nipponbare
ccacgcgtccggaagaaagaagaagaagaagatgcagaccgctgctagcagtgtcgttggattgtcggccgtgttgcccgctgctgtgaaggggcgcagcctgcagattcaggctcctcgccgtgttgcgttgcgcgttcgtgcggcggcggcggcggtggcagtggaggctgcggaggtggactacagctctaacatctcggtgtttccgatggaggcgtgcgacctcatcggcggcgaggcgtgcaacgtgcagatgtacccagaggccaagctctcatcatcggctgctgttgctgtttctcgtgcggcggcggaggaagtcgacagggactacctatcctacgacgagcccaccacggtgttccccgaggaggcgtgcgacgatctgggcggagagttctgcaaggccacctgatcccattcccatccatggagaattggagtcttctatcatccttcctcctctgctccactacct

SEQ ID NO: 398918 - DNA, 459 bp, Oryza sativa nipponbare
ccacgcgtccgcccacgcgtccgctgatacacgcaaacgccttcttgagatgggttacaaaaatcctgttcttctgcttcatccattgggaggattcacaaaagcagatgatgtgcctcttagttggagaatgaagcagcatgaaaaggttcttgaggaaggtgtcctcaacccagaatcaactgtcgttgcaatcttcccctctccaatgcattatgcagggccaactgaagtgcaatggcatgctaaggctcgtataaatgctggtgcaaacttctacatagttggaagagatcctgctggtatgggccacccaactgaaaagagggacctgtatgatgctgatcatgggaaaaaggtgttgagcatggctcctgggcttgagaagctcaatatccttcctttcaaggtggctgcatatgacacaaagcaaaagaaaatggactttttcgatccatc

SEQ ID NO: 398919 - DNA, 480 bp, Oryza sativa nipponbare
ccacgcgtccgcgacgctgttcgtcatcgagttcatcctgttccactacgtggagatccggcggtggcaggacatcaagaaccctggctgcgtcaaccaggaccccatcttcaagagctacagcctcccgccgcacgagtgcggctaccccggcagcgtcttcaaccccctcaacttcgagcccaccctcgaggccaaggagaaggagctcgccaacgggaggctggcgatgctggcgttcttggggttcctggtgcagcacaacgtgacgcagaaggggcccttcgacaacctgctgcagcacctgtctgacccgtggcacaacaccatcatccagacgctgtcaggctgagcgtgtgatcgatttcatcagggccagggcatctcaaggagcttgatgagttcaggctggtgaaaccgatgattgggcgatggaagatgttctcttcttgtttcttctttttttttttgtggagtatg

SEQ ID NO: 398920 - DNA, 393 bp, Oryza sativa nipponbare
ccacgcgtccggaaaataatggcgttggagacgtgcttcagagcctgggcgactctgcacgccccacagccaccgtcctccggcggcagtagggacagactcctcctctccggcgccggcagcagccagtccaagccaaggttgtccgtcgcctcgccgtcaccgctccgacctgcctcccgcttcgcctgccagtgcagcaacgtcgtcgacgaagtggtggtggcggacgagaagaactgggacagcatggtgctggggagcgaggcgccggtgctggtggagttctgggcaccgtggtgcggaccgtgcaggatgatcgcgccggtgatcgacgagctggccaaggagtacgtcggcaagatcaagtgctgcaaggtgaacacggacgac

SEQ ID NO: 398921 - DNA, 471 bp, Oryza sativa nipponbare
ccacgcgtccgcaccccctctctcctctcctctccaaccacgccgcgattcccccatttttacctcactacctccgcccccgaaaatcccaacaattttttgatccttcgccgccggcaagcgccgcggagggttccccccagggagtggagaggagaggagcgggcgggttggtgttgggaagggagggatggggttggaggaggacacgccggtgacgaagacggtgaaggccgcggcgacggggctggccgcggggaccatctggggcacggtcgtcgcgacatggcacgacgtgccccgggtcgagcgccacgtcgcgctcccggggctcatccggacgctcaagatgtgcggcagctacggggccacgttcgccgccgtcgggggcctctacatcggcgtcgagcagctcgtgctgagccagcgcaagaagaacgactacgtcaacggggcccgcggcgccttcgt

SEQ ID NO: 398922 - DNA, 412 bp, Oryza sativa nipponbare
ctggcgcacacaaggagagagcttggcgagctgcacagatggtcccctacgggatggcgttacggatcaccagcgaagctccctgtcaggggctgacggccaacgccggcatgcccgaggtgcggcggtacgacaacttcagcttaggcaacgtcagcgatgagcagaggatcaggtgcgtgcagctgttggcgattgagggcattaagaaggccgagaccattgcatacctgccaccgctcaccgaggaggacctgctgaagcacatcgagtacctgctatgtaagaagtggtggccctgctcttggtatagcaaggccagatcctgctaccgtgggaaccacagatcccccggatgctacgatggcaggtactggtccatgaggaagctgcccatgttcggacgcactga

SEQ ID NO: 398923 - DNA, 436 bp, Oryza sativa nipponbare
  unsure (1)..(436): unsure at all n locations
ccacgcgtccgcggcgactacgggtgggacaccgcggggctctccgccgacccggagacgttcgccaagaaccgggagctggaggtgatccactccaggtgggcgatgctcggcgcgctgggctgcgtgttcccggagctcctcgcccgcaacggcgtcaagttcggcgaggcggtgtggttcaaggcggggtcgcagatcttcagcgagggcgggctcgactacctcggcaacccgagcctgatccacgcgcagagcatcctcgccatctgggcggtccaggtggtgctcatgggcgccgtcgaggggtaccgcatcgccggcgggccgctcggcgaggcgtcgacccgctctaccccggcggcagcttcgacccgctcgngcctgccgacgactccgaggcccttgcggagctcaaggtgaagggatcaagaac

SEQ ID NO: 398924 - DNA, 439 bp, Oryza sativa nipponbare
ccacgcgtccgctctccttccttcctccttggcgctcatccaccaccacctcctccaagagccaccaaacggcagcaggatggccgctgtgatgaaagctctcgccgtcgcctcgccgatctcggcacgagcacagccccgacgatgccccgcaggttcgtcaggcggccctagccaaagcctgcattcatcgttcggcggcgtctccctgcagtgccggcgcacgaagccggcgtccctccaccggagtcggccgtcgatgcaggtggtgatgatggcggcgaggccggcgatccagttcatccagggcaccgacgagcagacgatccccgacgtgcggctgaccaagtcccgggacggcaccaacggcgtggccatcttcaccttcgaccagcccgtcgtgttcgactcgtcggcagagctcggcgacatcaccggc

SEQ ID NO: 398925 - DNA, 474 bp, Oryza sativa nipponbare
ccacgcgtccgaaaaccaacccaaccgccgccgcatcgccctcgttagaacgatggccgcgtcggcgctgcaccagaccaccagcttcctcggcaccgcccctcgccgggatgagctcgtccgccgcgtcggcgactccggtggccgcatcaccatgcgccgcaccgtcaagagcgcgccccagagcatctggtatggacctgaccgtcccaagtacctgggcccgttctcggagcagacgccatcgtacctgaccggagagttcccgggagactacgggtgggacacggcggggctatcggccgacccggagacgttcgcgaggaacagggagctggaggtgatccactcgcggtgggcgatgctgggggcgctgggctgcgtcttcccggagatcctgtccaagaaacgggggaagttcggggaggcgggtgggttcaaggccggcgcgcagatcttctccgagggggggct

SEQ ID NO: 398926 - DNA, 150 bp, Oryza sativa nipponbare
  unsure (1)..(150): unsure at all n locations
ccacgcgtccggtgaagcctgatgactgggatgaggatgcccccatggaaattgaggacgaagaggccacaaagccagaggggtggctggatgatgagccagaggaaattgatgatccggaggctaacaagcctgaagactgngatgatg

SEQ ID NO: 398927 - DNA, 338 bp, Oryza sativa nipponbare
ccacgcgtccgcccacgcgtccgggaacatggcccaagtgaagaggagtgtactcgtcagtttaaggagatgttaaaggaaagaggtgtattgccattttcaaagtgggaaaaggaactcccaaaaatagtgtttgatccacgttttaaggctattccaagtcactcgaggggacgggctacatttgagcagtatgttccgacacctgcttaccaggagcggaaagagaaaagagcttctcaaagagcttcaatggaggcctattaaccggtactagaagaagcattcgaggacatcaacttccattaggattacaagggattcaaaagaaaatgggg

SEQ ID NO: 398928 - DNA, 418 bp, Oryza sativa nipponbare
ccacgcgtccgacttgatgagccaacaaatcatcttgatctccatgctgtgttatggttagaaacatatctcctgaaatggccaaagacattcattgttgtatcacatgctagggagtttcttaatacggtcgtcaccgacattcttcatctgcatggacaaaagctacatgcttacaaaggtgattatgacacattcgagaggacaagggaggagcaccttaagaaccagcagaaagcttttgaaacaaatgagaaggccagatcccacatgcaggcattcattgacaagttccgttacaatgcaaagagagcatcacttgttcaatcaagaatcaaggcattggagcgaatggagcatgttgatgcggtcgtcagtgatccagactataaattcgaatttccaacaccagatgacc

SEQ ID NO: 398929 - DNA, 466 bp, Oryza sativa nipponbare
  unsure (1)..(466): unsure at all n locations
ccacgcgtccgcggacgcgtggggaaagcataagcaacacaagggattaactcatcactcacttagctaattaaatcttcgaccatgtcggacaagtgcggcaactgcgactgtgctgacaagagccagtgcgtgaagaaaggtaccagctatggcgtcgtcatagttgaagccgagaagagccacttcgaggaggtcgccgccggcgaggagaacggcggctgcaagtgcggcaccagctgctcctgcaccgactgcaagtgcggcaagtgaagtcacgaagcaaccgaacactcgccgccggcgagtcacctaccttaattagtccacaataaaaaccacccatatgagtgtggtttgtgtgtgtgctgattattgctgaattaaacccgtgtgttatcgattaattaagcagctggtcgcttcggcgactatgcgtgtatncaacgtatgaattgtgtgatgt

SEQ ID NO: 398930 - DNA, 374 bp, Oryza sativa nipponbare
ccacgcgtccgcccacgcgtccgcgaagtaatcccttaattggtcaaaatgtctcgggaggagaatgtctacatggccaagctggccgagcaggctgaaaggtatgaggagatggttgagtacatggagaaggttgcaaagactgtagatgtggaagagctcactgttgaggagcgcaacctcttgtctgttgcttacaagaatgtgattggtgcccgccgtgcctcctggcgtattgtctcatccattgaacagaaggaggagggtcgtggcaatgaggaacatgttactctgatcaaggagtaccgtggcaagattgaagctgagctgagcaagatttgcgatggtatcctgaagttgcttgactcacacct

SEQ ID NO: 398931 - DNA, 432 bp, Oryza sativa nipponbare
ccacgcgtccgcccacgcgtccgaaaaaaaatcctattcaaatcgaaacccctctctttgatctcgtcgccgaggaattaggaggagagagagcaatggccgccgaggagggagtcgtgatcgcctgccacaacaaggacgagttcgacgcccagatgaccaaggccaaggaggccggcaaagtggtcataattgacttcactgcttcctggtgtggcccttgccgcttcatcgccccagtgttcgctgaatacgccaaaaagttccctggtgctgtcttcctgaaggttgatgttgatgagctgaaggaagttgctgaaaagtacaatgtcgaggcaatgccgaccttcctattcatcaaggatggtgctgaggctgacaaggtcgttggcgccaggaaagatgacctccagaacaccatcgtgaagcacg

SEQ ID NO: 398932 - DNA, 479 bp, Oryza sativa nipponbare
ccacgcgtccggcagctcagccgccgccgatggcgtccacgatcatggccccaacctcccgcgtcctcgccgccaagacccccttcctcggccatccccgcccctccaatgcccccgtccgcgacatcgccgccgccgccaccggccgcatcaccatgagcaaggagctgtggtacgggccggatagggtgaagtacctggggccattctcggcgcagacgccgtcgtacctgaggggcgagttcccgggcgactacgggtgggacacggcggggctctccgcggacccggaggcgttcgcgaggaacagggcgctggaggtgatccacggccggtgggcgatgctcggcgcgctgggctgcatcacgccggaggtgctcgagaagtgggtgcgcgtcgacttcaaggaagcccggtggttcaaggccggcgcccagatcttctccgacggcggcctcgactacctcggcaaccccaac

SEQ ID NO: 398933 - DNA, 470 bp, Oryza sativa nipponbare
ccacgcgtccgcccacgcgtccgcccacgcgtccgaattacacagttttatgcttttgttgaagagaggcagaaagtccactgtcttaatactcttttttccaagctgcaaattaatcaatcgataatattctgtaactcggtaaatcgtgttgaactattggcaaagaagatcacagagcttggttattcttgcttctatatccatgctaaaatgttgcaagaccatcggaacagggttttccatgattttcgcaatggtgcatgcaggaacttggtttgtacagatctttttacaaggggaatagatatccaagctgttaatgttgttatcaattttgatttccccaagagcgcagaaacatatctccatagggttggtagatctggcagattcggccaccttggttttggctggaatttgatcacctatgaggaccgttttaacttgtatcgcattgaacaagagct

SEQ ID NO: 398934 - DNA, 360 bp, Oryza sativa nipponbare
  unsure (1)..(360): unsure at all n locations
ccacgcgtccgcccacgcgtccgcaaacgcccacatcacacgcagaaatccgcatcaacagccagccatggcgtccacgctgaccaacgtcggcctgtctaccccggcggcggcggcgtcgtccctcgttaggccggtcgccggagctggacgcgtggtgtttccccgtgttggccgcggcgggttcgcggcggtgagggcgagcgggccggcgacgccgccggacatctcggacaagatgtcggagagcatcgacaaggcgaaggaggcgtgcgcggaggacacggcgagcggcgagtgcgcggcggcgtgggacgaggtggaggagctgagcgcggcggcnagccacgcgcgcgacaa

SEQ ID NO: 398935 - DNA, 472 bp, Oryza sativa nipponbare
ccacgcgtccgcccacgcgtccgctgcatcaatggccgcggccaccatggcgctctcctccccggtgatggcccgcgcggcgccgtcgacctcctccgcgctcttcggcgaggcgcggatcaccatgcgcaagaccgccgcgaagcccaagccggcggcgtcgtcggggagcccgtggtacggcgccgaccgcgtcctctacctcggcccgctctccggcgagccgccgagctacctcaccggcgagttcccgggcgactacgggtgggacaccgcggggctctccgccgacccggagacgttcgccaagaaccgggagctggaggtgatccactcccggtgggcgatgctgggcgcgctcggctgcgtcttcccggagctcctcgcccggaacggcgtcaagttcggcgaggcccggtggttcaaggcgggctcgcagatcttcagcgagggcgggctcgactacctcggc

SEQ ID NO: 398936 - DNA, 450 bp, Oryza sativa nipponbare
ccacgcgtccgcgacgtcgagtccctcatctccgaccaccgcggcgagggcggcaagctggtggtgctcgacgtggggctcaagcgatgcgggccctgcgtgaaggtgtaccccaccgtcgtgaagctgtcgcgcaccatggccgacaccaccgtcttcgcccgcatgaacggcgacgagaacgacagctgcatggagttcctccgcgacatggacgtcgtcgaggtgcccaccttcctcttcatcagggacggcgacatcgtcggccgctacgtcggctccggcaggggggagctcatcggcgagatcctcagatacaacggcgtcaaggtcacctagacatatacagattcatcactacgcagctcagctgcatgcagcaaccgtaattaaattaattactgtactactctcttgatcatgattgtaattttacaccaccacactagc

SEQ ID NO: 398937 - DNA, 401 bp, Oryza sativa nipponbare
gtacgtcgaattcccggtcgacccacgcgtccgctgaatacgatgacattgaaattgtgatccacccacaatctatcatacactctatgattgaaacccaggattcatctgtgttggctcaactgggatggccagaggtggcgccgccccggtccaaggccatgtcttgcatagacagaatctattgctcagtggtcacctggccccgactagatctttgcaagctgggttcactgacattcaaagctcctgacaatgtgaaatacccgtcgatggatctcgcctatgcagctggaagagctgggggcaccatgacaggagttctgagtgctgctaatgagaaggctgtggagttgttcatcgatgaaaagatcgggtacctggacatcttcaaggtggtg

SEQ ID NO: 398938 - DNA, 476 bp, Oryza sativa nipponbare
ccacgcgtccgcccacgcgtccgcccacgcgtccggttcgcgctggcggcggagggggaggccggggtgaggaacgtgctgcggatgatgcgggaggagttcgagctcaccatggcgctcagcggatgcacctcgctcgccgacatcacccgcgcccacatctacaccgacgccgaccgcctggcccgccccttccccaggttgtgaggacctcgccgccgccgtcgccggcgaactctagccaaacaataaacaatatcgacgacgccagagagcacgccgattaattaattaggtaatttttgcaaaagaatctcgtcgatccacacgcgcgcaagcaacacacgtactccgtgcacccctcgtaactgggtcgttcatgctcttaatcccaacgattaattatactggtataatctttgcaatttcgagtactgtacacctatttggcatctgtatatctcgccttaagatat

SEQ ID NO: 398939 - DNA, 454 bp, Oryza sativa nipponbare
ccacgcgtccgcccggtgatggcccgcgcggcgccgtcgacctcctccgcgctcttcggcgaggcgcggatcaccatgcgcaagaccgccgcgaagcccaagccggcggcgtcgtcggggagcccgtggtacggcgccgaccgcgtcctctacctcggcccgctctccggcgagccgccgagctacctcaccggcgagttcccgggcgactacgggtgggacaccgcggggctctccgccgacccggagacgttcgccaagaaccgggagctggaggtgatccactcccggtgggcgatgctgggcgcgctcggctgcgtcttcccggagctcctcgcccggaacggcgtcaagttcggcgaggccgtgtggttcaaggcggtctcgcagatcttcagcgagggcgggctcgtctctttgtgaactcgagcctggtccactctcatagcatcct

SEQ ID NO: 398940 - DNA, 474 bp, Oryza sativa nipponbare
  unsure (1)..(474): unsure at all n locations
ccacgcgtccggcaacgtcagcaatggcggcaggatcaggtgcatgcaggtgtggccgattgagggcatcaagaagttcgagaccctctcctacctgccaccgctcaccgtggaggacctcctgaagcagatcgagtacctgctccgttccaagtgggtgccctgcctcgagttcagcaaggtcggattcgtctaccgtgagaaccacagatcccccggatactacgatggcaggtactggaccatgtggaagctgcccatgttcgggtgcactgacgccacccaggtgctcaaggagctcgaggaggccaagaaggcgtaccctgatgcattcgtccgtatcatcggcttcgacaacgtcaggcaggtgcagctcatcagcttcatcgcctacaagcccccgggctgcgaggagtctggtggcaactaagccgtcatcgtcatatatagcctngtttaattgttcatctctga

SEQ ID NO: 398941 - DNA, 471 bp, Oryza sativa nipponbare
ccacgcgtccgtactgctataaggagcgcgccgtgcaccgcctctcacaatgtcgaccgccgccgccgccgccgctgcccagagctggtgcttcgccactgtcaccccgcgctcccgcgccacagtcgtcgccagcctcgcctccccatcaccgtcctcctcctcctcctcctccaacagcagcaacctcccggcccccttccgcccccgcctcatccgcaacacccccgtcttcgccgcccccgtcgcccccgccgcgatggacgccgccgtcgaccgcctcaaggatgggttcgccaagttcaagaccgagttctatgacaagaagccggagctcttcgagccgctcaaggccggccaggcacccaagtacatggtgttctcgtgcgccgactctcgcgtgtgcccgtcggtgaccatgggcctggagcccggcgaggccttcaccgtccgcaacatcgccaacatggt

SEQ ID NO: 398942 - DNA, 471 bp, Oryza sativa nipponbare
  unsure (1)..(471): unsure at all n locations
ccacgcgtccgcccacgcgtccgcccacgcgtccggagcaagaagaagaggaggcagatgagaaatagggattctgccatgaaatcgagggagaggaagaagatgtatgttaaggacctagagactaagagcaagtatctagaggccgagtgtcgtcgcctcagctacgcgcttcagtgctgcgcagctgagaacatggcgctgcgccagagcttgttgaaggataggcctgtcggtgccgccacagccatgcaggagtctgccgtactcacggaaaccctgccgctggtttccctgctttggctcgtgagcatcgtgtgcctactcccggtgcccggtctacccaaccgaaacccggtggctcgaagcagcgccggaagagatctcgcgacggtaaccggaaagaagacaagcagtgaacaacagctagaagaaacattactactccatgggaggcgtngcaagggctcg

SEQ ID NO: 398943 - DNA, 482 bp, Oryza sativa nipponbare
ccacgcgtccgcccacgcgtccggaaagcataagcaacacaagggattaactcatcactcacttagctaattaaatcttcgaccatgtcggacaagtgcggcaactgcgactgtgctgacaagagccagtgcgtgaagaaaggtaccagctatggcgtcgtcatagttgaagccgagaagagccacttcgaggaggtcgccgccggcgaggagaacggcggctgcaagtgcggcaccagctgctcctgcaccgactgcaagtgcggcaagtgaagtcacgaagcaaccgaacactcgccgccggcgagtcacctaccttaattagtccacaataaaaaccacccatatgagtgtggtttgtgtgtgtgctgattattgctgaattaaacccgtgtgttatcgattaattaagcagctggtcgcttcggcgactatgcgtgtatcaacgtatgaatttgtgtgatgtgatgtacccgtgctat

SEQ ID NO: 398944 - DNA, 431 bp, Oryza sativa nipponbare
ccacgcgtccgcaccccaccagcagcagcagcagtagctgagcttgaagcagcagagcgaggtagacatggccgccgccaccatggccctctcgtccccggcgctggccggcaaggccgccgcgaaggtgttcggcgaggggcgcatcaccatgcgcaagtcggcggcgaagcccaagcccgccgcgtcggggagcccgtggtacggcgccgaccgcgtgctctacctcggcccgctctccggcgagccgccgagctacctgaccggcgagttccccggcgactacgggtgggacaccgcggggctctccgccgacccggagacgttcgccaagaaccgggagcctggagggatccactccaggtgggcgatgctcggcgcgctgggcttgctgttcccggagctcctcgcccgcaaacgggtcaagttcg

SEQ ID NO: 398945 - DNA, 443 bp, Oryza sativa nipponbare
ccacgcgtccgcatccatccatcagagatcaggtagaacagtgagagtgaggtgcagaaaaatttgagctgaagctgaggatggcaacatccatgatcacctcgccgctggtggcgccggcccgggccaagggccttccgtccatctcccgccggggatcctccttcgccatcgtctgcagcggtgggaagaagatcaagaccgacaagccctacgggattggaggtggcatgtcagtcgatattgatgcatctggcaggaagagcacggggaagggtgtgtaccaattcgttgacaagtacggcgcaaacgtcgacggctacagcccaatctactcgccggaggaatggtctcccaccggtgacacctacgttggtggaaccaccgggcttctgatctgggccgtgaccctcgccgggctcctcggcggcggcgcccttctt

SEQ ID NO: 398946 - DNA, 465 bp, Oryza sativa nipponbare
ccacgcgtccgcccacgcgtccggatttatgtcgtgccaatccaacataagcactgctactggacatactctactactactagccagtaagctagctaactaactacgtggctatggcccccaccgtgatggcctcctcggccacctccgtggctccattccaagggctcaagtccaccgccgggctccccgtcagccgccgctccaccaactcgggcttcggcaacgtcagcaatggcggaaggatcaagtgcatgcaggtgtggccaattgagggcatcaagaagttcgagaccctatcgtacctgccaccactcaccgtggaggatcttttgaagcagatcgagtacctgcttcgatccaagtgggtgccttgcctcgagttcagcaaggttggattcgtctaccgtgagaaccacaggtctcccgggtactacgatggcaggtattggaccatgtggaagc

SEQ ID NO: 398947 - DNA, 406 bp, Oryza sativa nipponbare
ccacgcgtccgcccacgcgtccgcccacgcgtccgcccacgcgtccggccggattgatggttatccgtgcttaccatagggcaagaggagactaccaccgggacgtctgtatcattcctgtgtcagcccatggtacaaatcctgcaagtgctgctatgtgtggaatgaagatcgttgctgttggaactgattccaaaggtaacattaacatcgaggagttgaggaaagctgctgaagcaaacaaggacaacttggctgctcttatggttacctatccttcgacccatggagtctatgaagaaggcattgatgagatatgcaggataattcatgagaacggtgggcaggtatacatggatggggctaacatgaatgctcaagtcggattgacaagccctggctttat

SEQ ID NO: 398948 - DNA, 407 bp, Oryza sativa nipponbare
  unsure (1)..(407): unsure at all n locations
ccacgcgtccgacctgctgcagcacctgtctgacccgtggcacaacaccatcatccagacgctgtcaggctgagcgtgtgatcgatttcatcagggccagggcatctcaaggagcttgatgagttcaggctggtgaaaccgatgattgggcgatggaagatgttctcttcttgtttcttctttttttttttgtggagtatgcatgtataagatgttaatgaattggggggaggagagagagagagatngatgtgatgagattcagacttactgtgtgtgttgtggtaattgtttcctgcatgcatggatctggatgcatgggtgaaggggtgagttgagtggtgaatttctgatgtacagtactacagggggataaactatctcatggtagcagcagtgttctagct

SEQ ID NO: 398949 - DNA, 477 bp, Oryza sativa nipponbare
ccacgcgtccgtccaaaagcatctgtggccatctcctcctagtcctaggctcgcgtcaatggcggcgtccaccatggcactctcctcccctgccgccctcgccggcaaggcggtcgccaatgccaaggtgttcggcgagggccgcgtcacgatgcgcaagtcggcggccaagcccaagcccgccgcggcgtcggggagcccgtggtacggcgccgaccgcgtgctctacctcggcccgctctccggcgagccgccgtcctacctcaccggcgagttccccggcgactacggctgggacaccgccgggctgtcggccgacccggagacgttcgccaagaaccgggagctggaggtgatccactgccggtgggccatgctgggcgcgctcggctgcgtcttcccggagctcctcgcccgcaacggcgtgaagttcggcgaggccgtgtggttcaaggcggtgtcccagatcttcagcga

SEQ ID NO: 398950 - DNA, 477 bp, Oryza sativa nipponbare
ccacgcgtccgcccacgcgtccgcgggaaggtggagatccgcggcgacccggcgtacgtgcgggcggcgtgcgagggcagcctccggcggctcggcgtcgattgcgtagacctttactaccagcaccgtgtcgacaagaaggtgcccatcgaggtcacgattggtgaactcaagaaactagttgaagaaggaaagataaaatatattggtctatcggaagcatctgcatcaacaatcagaagggctcatgctagaacttggaattggaatagtagcttacagcccacttggtagagggttcttttctggtggagctaaactagtggagtctatctgttcaggatgttcgcaagcatcttcctagatttcaaccagcgaatctcgagaagaatgctgaaatatttgagcgtgttaacgcaatggcagccagaaaaggatgcacaccgtcacaactcgcattggcctgggtccatcatc

SEQ ID NO: 398951 - DNA, 467 bp, Oryza sativa nipponbare
ccacgcgtccgtgcaggcggagctggtgaacgggcggtgggcgatgctgggggtggccgggatgctgctgcctgaggtgctgacgaagatcgggttgatcgacgcgccgcagtggtacgacgccggcaaggccacctacttcgcgtcgtcgtcgacgctgttcgtcatcgagttcatcctgttccactacgtggagatccggcggtggcaggacatcaagaaccctggctgcgtcaaccaggaccccatcttcaagagctacagcctcccgccgcacgagtgcggctaccccggcagcgtcttcaaccccctcaacttcgagcccaccctcgaggccgaggagaaggagctcgccaacgggaggctggcgatgctggcgttcttggggttcctggtgcagcacaacgtgacgcagaaggggcccttcgacaacctgctgcagcacctgtctgacccgtggcacaaca

SEQ ID NO: 398952 - DNA, 203 bp, Oryza sativa nipponbare
ccacgcgtccgcccgagcctgatccacgcgcagagcatcctcgccatctgggcggtccaggtggtgctcatgggcgccgtcgaggggtaccgcatcgccggcgggccgctcggcgaggtcatccacccggtctacctcgggcttagctgacaaggaggccccctttcacacgacccggaagccattctgagaagccaacgtac

SEQ ID NO: 398953 - DNA, 466 bp, Oryza sativa nipponbare
ccacgcgtccggaaacacacatagctggacatctcaacggactcacagtacaacaggcaatggacgaagcaaagctgttcatagtggactaccatgacgcatacctgccattcttggaccggatcaatgcgatagatggacggaaagcatatgcgacccgaacaatcttcttcctgacagaagctggcacactgaaaccgatcgctatcgagcttagtcttcctccagccaagccaggggagcctcggccaagcaaggtcctgacgcctccctatgatgctacctcgaattggctctggatgcttgccaaggcccatgtcagctccaacgatgctggtgtccatcagctggtcaatcactggcttaggacgcatgcaacaatggagccgttcatcctggcggcgcaccggcatatgagcgcaatgcaccccatcttcaagctcctgcacccgcacatgcggtacac

SEQ ID NO: 398954 - DNA, 465 bp, Oryza sativa nipponbare
ccacgcgtccgcacgcctcgctgcctttcgatgaccaatgcgccatcttggagaaggaggccgtgaaccaatccctggagaacctcaagacctacccgttcgtcaaggaggggatcgccaacggcaccctcaagctcgtcggcggccactacgacttcgtctccggcaacttggacttatgggagccctaaatccgaccgtccgtccgttcagttcgtcagtttacgccaacgcttttgcataagtactacctgaggatatcgtccccgatcatcgatgtgaacccgtggagtactactacgtacgtaccggatggttcgatatatgtgaatgctgtattaagtaataacaagaaatatatctcctctactttttcctgacgcggagttgtactgcctatgatgcataatttgatcgcagtgtgatcaaaagacatcagctataatgtcttaataaatatattat

SEQ ID NO: 398955 - DNA, 415 bp, Oryza sativa nipponbare
cccacgcgtccggagcatctagctagggagagaaaggaagagacgagaggagagagatggccactgcttatgctcccatggcgagccagctgatgaagagcagcttggtgtgctccaagccgagggggctgtctggtgcttcgctgacaaggaggccccgcttcacagtcaaggccatccagtctgagaagccaacgtaccaggtggtgcagcccatcaatggcgaccccttcatcggcagcctggagacgccggtgacctccagcccgctggtcgcctggtacctctccaacctcccggcgtaccgcaccgccgtcagcccgctgctccgcggcatcgaggtcggcctcgcccacggctacctcctcgtcgggcccttcgcgctcaccggcccgctccgcaacacgccggtgca

SEQ ID NO: 398956 - DNA, 471 bp, Oryza sativa nipponbare
ccacgcgtccgaagaaagcataagcaacacaagggattaactcatcactcacttagctaattaaatcttcgaccatgtcggacaagtgcggcaactgcgactgtgctgacaagagccagtgcgtgaagaaaggtaccagctatggcgtcgtcatagttgaagccgagaagagccacttcgaggaggtcgccgccggcgaggagaacggcggctgcaagtgcggcaccagctgctcctgcaccgactgcaagtgcggcaagtgaagtcacgaagcaaccgaacactcgccgccggcgagtcacctaccttaattagtccacaataaaaaccacccatatgagtgtggtttgtgtgtgtgctgattattgctgaattaaacccgtgtgttatcgattaattaagcagctggtcgcttcggcgactatgcgtgtatcaacgtatgaatttgtgtgatgtgatgtacccgtgcta

SEQ ID NO: 398957 - DNA, 475 bp, Oryza sativa nipponbare
  unsure (1)..(475): unsure at all n locations
ccacgcgtccgtgcagttcagctcgagtggtcattatggtctagagacgtggaagaagatataattccaaattagtttatccattgaaaaaaatcacatgccccattttaactatttttcttatttccatttcagagaacttggaattggaatagtagcttacagcccacttggtagagggttcttttctggtggagctaaactagtggagtctatctgttcaggatgttcgcaagcatcttcctagatttcaaccagcgaatctcgagaagaatgctgaaatatttgagcgtgttaacgcaatggcagccagaaaaggatgcacaccgtcacaactcgcattggcctgggtccatcatcagggaagcgacgtatgccccatacctgggacaacaaaaatcgagaatttcaatcaaaatgtagcagctctatctgtgaagctcacccctggggaaatgactgaactngagtccta

SEQ ID NO: 398958 - DNA, 479 bp, Oryza sativa nipponbare
ccacgcgtccgcactcctctcctcctcgtctaccttacctagcagcagcagctagctagcttaattagctatagcagccatggcggcgacggcactgagcagccaggtccggttgccgatgtccctgcgggtggcgacggcgccggcgccggcgcgcgtgtcggtgctgccggcgagcaacaagctgggagacaggctgcggatgcaggcgacgtacaacgtgaagctgatcacaccggacggcgaggtggagctgcaggtgccggacgacgtgtacatcctggaccaggcggaggaggaagggatcgacctgccttactcctgccgcgcgggctcctgctcctcctgcgccggcaaggtggtctccggcgagatcgaccagtccgaccagagcttcctcgacgacgaccaggttgccgccggctgggtcctcacctgccacgcctaccccaagttcgacgtcgtcatcgagacccaca

SEQ ID NO: 398959 - DNA, 223 bp, Oryza sativa nipponbare
ccacgcgtccggttcgtggaggaaagggcgccggacatcgtcgctgtcgttgcggctcgacgtggacggcggcgacggtgtgcttggtgccaatggcggtgatgcagcagcggtcgcaggcagtgacgcggttgcggcagcgatggtgtcgacgacgaggcgtggcgcggcggtggacttcccgtcactggctacgcccccctcgagatcggtttaggggttt

SEQ ID NO: 398960 - DNA, 463 bp, Oryza sativa nipponbare
  unsure (1)..(463): unsure at all n locations
ccacgcgtccgcggacgcgtgggacctttggcagcttagcttaccctatcttacacggcagaggcaggggtttgtttgattggttgatcgatcgattgacgagatgagcagcagctcgtacgggacgtcgtgggcggaccagtgggactacggcagcgacccgccgccgccgtcgtcgtcgtcggggaagaggagcggcggcggaggaggaggaggagggaagaagggtatggagaagacgaaggcggcggcggcgagcgggctgaggaaggtgaaggaggggacggcgcatgggttccagtggatcaaggacaagtaccagcagaagaagtccggtggcaagaagcacggcgaccagcagagctcggagatcgccggctactgatcgttgataccacatcatatcgttgatgatgatttgaggtgttcttgcgtgtagataggtcgatcggnggtcattctt

SEQ ID NO: 398961 - DNA, 369 bp, Oryza sativa nipponbare
cgcgtacgcatgaaagcgtcaccaacacaggggattaactcatcactcacttagctaattaaatcttcgaccatgtcggacaagtgcggcaactgcgactgtgctgacaagagccagtgcgtgaagaaaggtaccagctatggcgtcgtcatagttgaagccgagaagagccacttcgaggaggtcgccgccggcgaggagaacggcggctgcaagtgcggcaccagctgctcctgcaccgactgcaagtgcggcaagtgaagtcacgaagcaaccgaacactcgccgccggcgagtcacctaccttaattagtccacaataaaaaccacccatatgagtgtggtttgtgtgtgtgctgattattgctg

SEQ ID NO: 398962 - DNA, 480 bp, Oryza sativa nipponbare
ccacgcgtccggaaaaaaaatcctattcaaatcgaaacccctctctttgatctcgtcgccgaggaattaggaggagagagagcaatggccgccgaggagggagtcgtgatcgcctgccacaacaaggacgagttcgacgcccagatgaccaaggccaaggaggccggcaaagtggtcataattgacttcactgcttcctggtgtggcccttgccgcttcatcgccccagtgttcgctgaatacgccaaaaagttccctggtgctgtcttcctgaaggttgatgttgatgagctgaaggaagttgctgaaaagtacaatgtcgaggcaatgccgaccttcctattcatcaaggatggtgctgaggctgacaaggtcgttggcgccaggaaggatgacctccagaacaccatcgtgaagcacgtcggtgccactgctgcatctgcttctgcctaagaattctcgcaggcgcaagttatcaaa

SEQ ID NO: 398963 - DNA, 462 bp, Oryza sativa nipponbare
ccacgcgtccgcccacgcgtccgcccacgcgtccgcccacgcgtccgccaccagcagcagcagcagtagctgagcttgaagcagcagagcgaggtagacatggccgccgccaccatggccctctcgtccccggcgctggccggcaaggccgccgcgaaggtgttcggcgaggggcgcatcaccatgcgcaagtcggcggcgaagcccaagcccgccgcgtcggggagcccgtggtacggcgccgaccgcgtgctctacctcggcccgctctccggcgagccgccgagctacctgaccggcgagttccccggcgactacgggtgggacaccgcggggctctccgccgacccggagacgttcgccaagaaccgggagctggaggtgatccactccaggtgggcgatgctcggcgcgctgggctgcgtgttcccggagctcctcgcccgcaacggcgtcaagttc

SEQ ID NO: 398964 - DNA, 404 bp, Oryza sativa nipponbare
ccacgcgtccgcccacgcgaacagacggaggcacaccactgcaactgaagtgtatacataactcctcgcaagctagctagggctacctcggagatggctcaagaggccacctacggggctccgtttcacgggctcaagtccactgcgggccatgcgctgaaccgttgttacagcagcttgcgctatggcaacgtgagcaatggcagctggataaatgcatgcaggtgtggtcacatagagggcacttaagaagttggagactactagtcagacttgccggcagtgacaggctaagaccatgcgaagcataccgagttcctgctccgatctaagagcatgccacgcttggagtggagcaaggtcggacacatctaacgagagaaggacagaacacccatgcacta

SEQ ID NO: 398965 - DNA, 486 bp, Oryza sativa nipponbare
gttgagaagtagtagcaaaacgatagaatatggcggcgaccttctccgccgccgccgccgccggcggaagccccacctacctgcaccgcccacgaacgctagccccacccgcctcaacccctgctcgcctgagccccagcagcagcagcaggaggccggcgaccccctcgctgctctccctccggcgcacccatgccgcgccgccgccgctccgtgccgccgccgctgaccccaaggttgttaatggggaagatttcccccctatgaaggacctacttcgtctatacaagaaagcttttctagatggaaatgatgaggctcttggtggaattgagagtgctatcattgccattgagaaagaaaggagtaactcagctgctcagtatgaaagtattgcaaccgaaattacttcagggaaggacaagttcctccgtataaatgctgatctggagaatttccggaagcagactgaaaaggagcgtgcta

SEQ ID NO: 398966 - DNA, 458 bp, Oryza sativa nipponbare
ccacgcgtccgcccacgcgtccggagccatacgccggcggcggcggcggcgtacggagaggcttcaggcgacgccggcgtgacggcgctgcagaagcacgcggcgttcttcgacaaggacggcgacggcatcgtctccctctccgagacatacgacgggttacgagcactcggactcgggtctggcctctccagcttgagcgccgccttcatcaatggcgtcctttccccaaagaccagacctgacaatggaacagcaccacgcttatctatctacatagagaacatctacaaggggattcatggaagcgattcaagcgcctatgattctgaaggaaggttcgttgctgaaaagtttgaggagatattcgccaagcacgccaagaccgtgcctgatgctctgacatcggacgagatagacgagctgcttcaagcgaaccgcaagcccggtgactacac

SEQ ID NO: 398967 - DNA, 485 bp, Oryza sativa nipponbare
attcccgttcgacccacgcgtccgccaaaaactgtcaatgacctgaagctcattaatgccggacggatattggagaataaccggacacttgctgagtcccgtgttccagtaggagaggttccaggaggtgtaattacaatgcatgtggtagtacgccctccacaacccgacaaaaacaagaagcagcttgcgaattcccccaagcagaacagatgtgggtgtaccatactgtgatacgccgcctgcctgatgatgatgtacaatgtctcgctctaggattttgtatctgctttcctgtgttcgcagctcttgtgaattcattttgacatccaattttagagccattcaaatcctagaaatatacatactttaacacccgtcaaatatgcttgggagctggaactgaaggtttctggaggatgcgtcatggtgatcttaatgttgtaacgagtgtgcagaagacagggattggatgctttctgttg

SEQ ID NO: 398968 - DNA, 475 bp, Oryza sativa nipponbare
ccacgcgtccgcaagaaagcataagcaacacaagggattaactcatcactcacttagctaattaaatcttcgaccatgtcggacaagtgcggcaactgcgactgtgctgacaagagccagtgcgtgaagaaaggtaccagctatggcgtcgtcatagttgaagccgagaagagccacttcgaggaggtcgccgccggcgaggagaacggcggctgcaagtgcggcaccagctgctcctgcaccgactgcaagtgcggcaagtgaagtcacgaagcaaccgaacactcgccgccggcgagtcacctaccttaattagtccacaataaaaaccacccatatgagtgtggtttgtgtgtgtgctgattattgctgaattaaacccgtgtgttatcgattaattaagcagctggtcgcttcggcgactatgcgtgtatcaacgtatgaaattgtgtgatgtgatgtacccgtgctattc

SEQ ID NO: 398969 - DNA, 398 bp, Oryza sativa nipponbare
  unsure (1)..(398): unsure at all n locations
ctcgnccttttttttttttttttttattattatacgggtggggtttttttttatttttttttttttttttttttttaaggttctgcaactaggatcattcatttgggacatatatcccgcaggggactacacacacttttgaaacttttatcaaattacatgaacttttcacatgggaaattttcaatcccaaaagaccaacccaatgcttccggcatgtccctattaataattactcccatccccaaggccaacacaataggaccggaatcctatgatgttttcccatgctaatgtttccaaagcgatggcttgctttgagcactttaatttttttaaaaaaaccgccccggaggcaccacccggcccgttaaagcccggagcccatttcccgcaaa

SEQ ID NO: 398970 - DNA, 398 bp, Oryza sativa nipponbare
tttattatttttggggaaatgtattcaattattattagggaagcatcttattgcctgcttttacaccccaatagcttatacattccaacaaaaaatcgtaaattcaacaccggcaacaacaaaaccccaaaactcactttgttttgacactgacgccatctgttccagcgatgatcaccgaaaccgccatgtccaggaacagcccatgctcaacgacgccttccaaagctgagatctccttccctgctgtcaacgcattcttgatcggcgtcttgaagtataaatcaacgatgtagtttgagttgaccgtaacatttggtttgccgccttcatccaatctcagcttaagctcgcatccttcatcgataaacagatgctgcaatcttaattggttgtac

SEQ ID NO: 398971 - DNA, 385 bp, Oryza sativa nipponbare
ttttataattaattggcagcgaccatatttcattgatcaggttcagaacctgcacagaaatacacactaccggtacagatctcaccctctctccaatactcggacatacatccacgcggtccacacgaatacgtacatctatacggtacacgtacgtacatctactgcaccgcgtacacacacgcacactctactgcagagacgcgcatcgtcgtcaacctagctagcttagctgaaggcgatgcgtcgccatggcagcacggcggcggcggcgctcacttgccggggacgaagttggtggcgtatgcccaggcgttgttgttgacggggtcggcgaggtggtctgcgaggttctcgagggggcccttgccggtgacgatggcct

SEQ ID NO: 398972 - DNA, 350 bp, Oryza sativa nipponbare
gtaccattacatgatgattgacatataaatctgtagctacatggaattaaggtagtggagcagaggaggaaggatgatagaagactccaattctccatggatgggaatgggatcaggtggccttgcagaactctccgcccagatcgtcgcacgcctcctcggggaacaccgtggtgggctcgtcgtaggataggtagtccctgtcgacttcctccgccgccgcacgagaaacagcaacagcagccgatgatgagagcttggcctctgggtacatctgcacgttgcacgcctcgccgccgatgaggtcgcacgcctccatcggaaacaccgagatgttagagctgtagtcc

SEQ ID NO: 398973 - DNA, 501 bp, Oryza sativa nipponbare
aatagcaaacacaccaagcgctatataaataccaccacattgtatatgtacatatctagcagagcacacaaaggctcatccttattaacaccaacaacatgatgagcttccaatgtagcattaccagatgatagggcacatacaaatcacaccagaatgcgcttccaatcaaacccaaatgtttaggccttgcgaccagtagtatacacatataccattggttctctctctgaaagaaccattttacagttgcaagatgcaatgttcttgcttatttgaggtagtttcagctttctaggccgcaaccgcctcgcgcagtttgctgctgtccgctgatggcgtcaagctgtcgtagtattcaacaaggaccttccagccacccgggcacatgaattcgtcagggggggctttgccagttcttggcaagagtacgcatctttgtgccagagatgaacaggaaatcatctttccttgatggatcgaaaaagtccattttctttt

SEQ ID NO: 398974 - DNA, 396 bp, Oryza sativa nipponbare
aatcaataatagttacaggggggattccatggagtagtaggattacaacaattaaggacgatgaagagaaaggggtggctggcgatacacatagagaggcaaagcagggggtagcttagttacaacttacaaacgaagctctgatcgatcaagtctgatttgattgatgcagctgaagaagaagaggaagaagacgacgatgatgatgcaatcagctgctgacgtacttgtcgatgatggtggcgagggtggtcttggggacggcgccgatgacgctctccttcttctcgccgttcttgaacatgaggacggtggggatgctccggatgccgtagttggtggcgatgtttggtgagtcgtccgtgttcaccttgcagcacttgatcttgccgacgt

SEQ ID NO: 398975 - DNA, 375 bp, Oryza sativa nipponbare
gcacacaccaaacaagtcatgatgtatcgagcttatgatgatcagaattcataggtatttacactgaaagagcacacagtacatgctcaaggcagtgtgagggggaaaaaaggagaaaaaaaaaggcgatcacttcttgacgaactggaggccgttggcctgggagtacctctccatgaatcgcatgaacctgtcccactcccgcggcgtgcgcatgacgtacttggcctcgatgagcgccggcttgccgttgacgaacttggcgctgacgtccaccgactggagcacgccctcgtcgtcgatcatgtagaagccggtgatgtcgccgagctctgccgacgagtcgaacaccgacggctggtcgaaggtgaagat

SEQ ID NO: 398976 - DNA, 278 bp, Oryza sativa nipponbare
  unsure (1)..(278): unsure at all n locations
tttataattaattcacaacaggatggttgatttatcagggggagaacctncacanaaatacacactacccgtacagatctcaccctctctccaatactcgtacatccatccacgcggtccacacgaatacatacatctatacggtacacgtacttacatctactggaccgcgtacacacacacacactctcctggagagactcgcatcgtcgtcaacctagctagcttagctgaaggctatgcgtctccatggcagcacggcagctgcggcgctcact

SEQ ID NO: 398977 - DNA, 383 bp, Oryza sativa nipponbare
  unsure (1)..(383): unsure at all n locations
tagcaattaaccntaattgggccagccataattaagagcgagaccatnanatacctacaacactcgtgctaccatcagatatgttatccccctggagtactggacatcataaattcaccactcaactcaccccctcacccatgcatgcagatccatgcatgcaggaaacaattaccacaacacacacagcaaggctgaatctcatcacatacatctctctatctctcctccccccaattcattaacatattatacatgcatactccacaaaaaaaaaaaggagaaacaaggagaggacatcttccatcgcccaatcatcgggttcaccagcctgaactcatcaagctcctttagatgccctggccctggttaaatcgatcaca

SEQ ID NO: 398978 - DNA, 393 bp, Oryza sativa nipponbare
ttactaagcaaaccgggcggggacacgattgattaatttcactaagaatagcacgggtacatcacataacacaaattcatacgttgatacacgcatagacgccgaagcgaccagctgcttaattaatcaataacacacgggtttaattcagcaataattagcacacacacaaaccacactcatatgggtgggttttattgtggactaattaaggtaggtgactccccggcggcgagtgttcagttgcttaataacttcacttgccgcacttgcagtcggtgcacgagcacctggtgcctgacttgcagccgccgttctccttaccggcggcgaccttctcgaagtggctcttcttgggttcaactattacgaccccataacttttaccttttt

SEQ ID NO: 398979 - DNA, 348 bp, Oryza sativa nipponbare
  unsure (1)..(348): unsure at all n locations
taaatattgctcaagagaggggctgtctggagacaacacacactatagtcatatccacacgaaaacaatcaccccataccgaccactatctccacatgcaaagctatgcgaagaactaattcgaccgctaccaccctagtaaaaaccatataagagagaggaaggggggacaggacgaaaaacattctagtagaccaggatatgaatccatgcatcatggtgacagcagcatgaggcatctaaatcgatggtctccaataacatgcgggggcatcaatcgatcgatcttgccattttactggccctagcaggcgtatcccttggaggcttntttcacctcatcaccac

SEQ ID NO: 398980 - DNA, 503 bp, Oryza sativa nipponbare
atctacaagcttggcggcggcatcatattataataattgctttaatagtcagcaaactcgtacagaatagccagatccaaatttccacaaactatatatcatcatcaggaattttaaaaagagaactcggaatcgatttcgcatgatattcgaggacacccaagccaaactgacgataacgatgactaacgctaatacctactacaacaccaggtgctggcccttatttgataacttgcgcctgcgagaattcttaggcagaagcagatgcagcagtggcaccgacgtgcttcacgatggtgttctggaggtcatccttcctggcgccaacgaccttgtcagcctcagcaccatccttgatgaataggaaggtcggcattgcctcgacattggacttttcagcaaccttctttagttaatcaacatcaaccttcaggaagacagcaccagggaactttttggcgtattcagcgaacactggggcgatgaagcggcaagggcca

SEQ ID NO: 398981 - DNA, 508 bp, Oryza sativa nipponbare
ttgatgaagttagcttactactggtgactatcaaagtacaatctgcaccaagccatgaagctcaacaagtacgagaagtatgaacaatgccatgtgcgtggcagaagaattctacatttcgctacaaggcagagtagagagagagagaaagagagagaggagacttgtgctcatgctgctgcaaagctgaagtgatgaaaccgtggcaactactgtagaaggttaacagctataggtggctggcacttgaaaacaatattccaaaccagcccaggaattacaagagacaagcgcaacctaattaattacagagatggtatcaggacagggaagccttcaaggcaagggctcctccgaatctcccaaccgtgacaagtgcaggtaagcatctgtgccttaatgaccgaaaaggcagactggtcagatcaacatatagtggattataaatctagaatttgtgataattgcaaaacaaagaaatacacacaaaataatcagttaaacatgg

SEQ ID NO: 398982 - DNA, 400 bp, Oryza sativa nipponbare
ttttttttttttgatgcaggaaggtgccacagcaaattagcaataatcaaacactaggtctcgtatggatcattacaaagtacacaaatgtacaaattaaaacatcaaaagagttaactaagcttaaagcagcagctgacacataagttgcaaaccccaacttttttcagtttctgaattctggatggatcatatcagattcatcacagcatcgtacaatctgtgcaagcattggtacatcgagcgatggagagagagagtagtctacaatggcggctgggccattcacgagcccggcgtgaacttggtggcgtagacccaggcgttgttggcgacggggtcggcgaggtggtcgagcaggttctccaaggggcccttgccggtgaccattgcccttgac

SEQ ID NO: 398983 - DNA, 363 bp, Oryza sativa nipponbare
ggctggaaaatgggatgatttatttcccacttatatcatcatatacaaatactaacacatgcgaaaattatcaagcagaaaagttccatacaaattcatccagacaaacaagtgtaaaaaaccttttttttcccatttcccccttgaactatccgtaaataccaccattccaccaaactcccctctgtcttctacgacaaataatcttttcaacccagtaacttataattaattacagagagattagcaaacatataatggtaagaatcagttgtcgtaggtgcggcactcgtcggtctccgggttgtccttgcagtaggcctcgagcgggtcggaggtctccttgagcttgtcgcgcgcgtg

SEQ ID NO: 398984 - DNA, 500 bp, Oryza sativa nipponbare
tgggaaacgaataaaatcgggattgcaaaaacatcatcttcttcttcatcttcttagtgtacacaacaccaactcgatcatcatctcgtcgcactaaacccatcttccccaacccaaagacaacgaactcgctggccacaaatccatccaaccacaattaaccactgctaagctacggtcccccacttcacttgccggggacgaagttggtggcgtacgcccaggcgttgttgttgacggggtcggcgaggtggtcggcgaggttctcgagggggcccttgccggtgacgatggcctggacgaagaagccgaacatggagaacatggcgaggcggccgttcttgatctccttcaccttgagctccgcgaacgcctcggggtcatcggcgaggcccagccggtccaaaggcgccgccgggtagagcgggtcgacgacctctccgagcggcccgtcggcgatgcggtacccctcgacggcgcccatgagcaccacctgcacc

SEQ ID NO: 398985 - DNA, 369 bp, Oryza sativa nipponbare
  unsure (1)..(369): unsure at all n locations
ccctctacatctaccgccctctcccttttttttttttttttgccaaacacaaaaagtctgcttggtttaaacagggggtccttccccatctcctcacanaacacaacaccaactctatcattatctctccaactaaacccatctggcccgcccaaagacaacgcactctctggccacaaattcacgcaaccaccattaacccctgctaagctacggtgccccactccactttccggggacgaagaaggtggcgtacccccaagcgttttctgatacctggcccaccactgaagtcagcgagggtctccagggggcccttgccctatacgcttgcctggacgaagtagcccaacattcacaacatggcaa

SEQ ID NO: 398986 - DNA, 380 bp, Oryza sativa nipponbare
catgaagtaacttagtgtatgtgttgaactccgttaattaaaaattaaaggagtatataaaccggttccgtaaatatcttaaggcgagatatacagatgccaaataggtgtacagtactcgaaattacaaagattataccagtataattaatcgttgggattaagagcatgaacgacccagttacgaggggtgcacggagtacgtgtgttgcttgcgcgcgtgtggatcgacgagattcttttgcaaaaattacctaattaattaatcggcgtgctctctggcgtcgtcgatattgtttattgtttggctagagttcgccggcggcggcggcggcgaggtcctcacaacctggggaaggggcgggcgaggcggtcggcgt

SEQ ID NO: 398987 - DNA, 383 bp, Oryza sativa nipponbare
tgggaaacgaataagatcgtgattgcaaaaacatcatcttcttcttcatcttcttagtgtacacaacaccaactcgatcatcatctcgtcgcactaaacccatcttccccaacccaaagacaacgaactcgctggccacaaatccatccaaccacaattaaccactgctaagctacggtcccccacttcacttgccggggacgaagttggtggcgtacgcccaggcgttgttgttgacggggtcggcgaggtggtcggcgaggttctcgagggggcccttgccggtgacgatggcctggacgaagaagccgaacatggagaacatggcgaggcggccgttcttgatctccttcaccttgagctccgcgaacgcctcggggtca

SEQ ID NO: 398988 - DNA, 506 bp, Oryza sativa nipponbare
  unsure (1)..(506): unsure at all n locations
ttttgaatacacaacgcacggacgagcgatttattcatgtgaaggcatgatttacatccttaaaattctctcgcatctagatatagctagagagtggccagctgctgactatgcatggagctggcacggcagtagtgtacaatgctactgtaattttgtattgctacaagtactagacaggtacagggctgaggccagtggatggctgtaggctggcagcatactccctcgcccacagatcataatgtatgatctcctccagtgatggccttgttactagctcattccgatgagcgtcgcatgtcagctccaccaccttgaagatgtccaggtacccgatcttttcatcgatgaacaactccacagccttctcattagcagcactcagaactcctgtcatggtgcccccagcttttncaagttgataggcgagatccatcgacgggtatttcacattgtcaggagctttgaatgtcagtgaacccagcttgcaaagatctagtcgg

SEQ ID NO: 398989 - DNA, 384 bp, Oryza sativa nipponbare
ctcatctctaccacggggaaaggttgtaaaaagggaaactcttcataataatattattaagacattatagctgatgtcttttgatcacactgcgatcaaattatgcatcataggcagtacaactcctcgtcaggaaaaagtagaggagatatatttcttgttattacttaatacaacattcacatatatcgaaccatccggtacgtacgtagtagtactccacgcgttcacatcgatgatcggggaccatatcctcaggtagtacttatacaaaaaccttggcgtaaactgacgaactgaacggaccgacggtcggatttagggctcccataagtccaagttgccggagaccaagtcgtattggccgcccaccagcttgaaggt

SEQ ID NO: 398990 - DNA, 507 bp, Oryza sativa nipponbare
cacagaaattcaggtatctggtgtgatttgtttttacatccctgatacagatagtatggaaaaggtgctgttcaagatgtaaacaaaactaacatgctgaggctaatccatctactataaatgtgttttgtttatgttaagagaggttttgagtaaccgatatagaaatagacaaatagctgggaacctataattcaactgtaagttctgcacattaacgtagagcagaactagaacctaacccagcaacgggtgcactgcgccatgcagtcccctcggcagtccacattgtaccccaaaacttttggattccttaaaagaagactccggagtgtttttccatttattccccagtcactgtccagcttgcctacattcagtttcacctcgctgtcaagatcacatccaagtacttttgggaatttcttcagcaatttgcgaaggtcatcatcggagagcccaagagttctaatgtagttcagtactccactaaccacctcagcattt

SEQ ID NO: 398991 - DNA, 345 bp, Oryza sativa nipponbare
  unsure (1)..(345): unsure at all n locations
tttttaatttnanntatttgatatgttttttattacattatttttacanttannnnnaaaaccaccccaataccccattgattaatttcactgaaaatagcacgggttcttctaataaaacaaattttttctttttttcacccatttttgccaaaacgaccaactttttaattaatttataacacactgttttaatttatcaatatttagcacacacacaaaccacactcatttgggtggtttttattggggactaattaaaataagttactctccccccgcaaatgttccgttttttcttaactttacttgccaaaattacaaggggggcaaaaacaatttttt

SEQ ID NO: 398992 - DNA, 473 bp, Oryza sativa nipponbare
  unsure (1)..(473): unsure at all n locations
tttccaaattcaagggtcgggggtagtatatcatcatcatgcaagtacagtgttacatagattaatcacaatgcagtttgattaagcagtgggcatcatcacatcgcattcagaggaaggctatcttagattacagatgaatatgcagacacccagcttggtgttacatacatagactggatttgggtgaaatttagccggcgagggcgctggtgttgtagacgaggagggcgccgccgccgaggagcccggcgagggtcacggcccagatcataagcccggtggttccaccaacgtaggtgtcaccggtgggagaccattcctccggcgagtagattgggctgtagccgtcgacgtttgcgccgtacttgtcaacgaattggtacacacccttncccgtgctctttctggcagatgcataaatatggactgacatgccacctccaatcccgtagggcttgtcggtcttgatc

SEQ ID NO: 398993 - DNA, 386 bp, Oryza sativa nipponbare
taaccaaactgtaaaataaggggatatagcatattatatattgatatatcatcaacatagcccaaaacaaagctgcatactattattataggcagcaatccaccagcgcgatgcttgatcttagcttagttgccaccagactcctcgcaacctgggggcttgtaggcgatgaagctaatcaactgcacctgcctgacgttgtcgaagccgatgatacggacaaaggcatcggggtaggccttcttggcctcctcgagctccttgagcacctgggtggcatcggtgcagccgaacatgggcagcttccacatggtccaatacctgccatcgtagtacccgggagacctgtggttctcacggtagacgaatccaaccttgctgaactc

SEQ ID NO: 398994 - DNA, 482 bp, Oryza sativa nipponbare
gtagcagataccactctgacatcaagtcagagagagatcaggtgaaacaaaaacaaaagcagagcacggccggtaaaatcaaaagacgatgaacaaactgggaacacacgaaacaaggtgggagacatcatcgaatcagagatgaacaattaaacaaggctatatatgacgatgacggcttagttgccaccagactcctcgcagcccgggggcttgtaggcgatgaagctgatgagctgcacctgcctgacgttgtcgaagccgatgatacggacgaatgcatcagggtacgccttcttggcctcctcgagctccttgagcacctgggtggcgtcagtgcacccgaacatgggcagcttccacatggtccagtacctgccatcggaagtatccgggggatctgtggttctaacggtagacgaatccgaccttgctgaactcgaggcagggcacccacttggaacggagcaggtactcgatct

SEQ ID NO: 398995 - DNA, 348 bp, Oryza sativa nipponbare
gggttgggtttttattaaaattttttttttttaaacacaatcaggtccattggacttttttcatcaaccaaccagataacattgttttacacaatttgaacgaaccaaccaaatttttgggtccccagaaagagaagaacgtcccgcgttttaccgaactctttttaaaagcaatggacctaaccgccattttttccctgaaatccacacttacttgccgggaacaaaattggtggcgtaggcccatgccttttttttgacggggccaccaaggttgttacccaggttttccagcgtcctcttgcccgttacgatttccttaacaaaaaacccgaacatggaaaacat

SEQ ID NO: 398996 - DNA, 362 bp, Oryza sativa nipponbare
agctagaacactgctgctggcatgagatagtttatccccctgtagtactgtacatcagaaattcaccactcaactcaccccctcacccatgcatccagatccatgcatgcaggaaacaattaccacaacacacacagtaagtctgaatctcatcacatccatctctctctctctcctccccccaattcattaacatcttatacatgcatactccacaaaaaaaaaaagaagaaacaagaagagaacatcttccatcgcccaatcatcggtttcaccagcctgaactcatcaagctccttgagatgccctggccctgatgaaatcgatcacacgctcagcctgacagcgtctggatgatggtg

SEQ ID NO: 398997 - DNA, 341 bp, Oryza sativa nipponbare
catctacacccctctctttttttttttagctagaacactaatactaccatggtagagattatacccatgcagtactgttcatcacaatttaacaacttaacttacacttttacctatacatccagatccatgcatgcacgtaacaattaccacaactctcacacttagtattaatctcatcacattcatatctatctctctccttcccccaattcattaacatcttatacatacatactccacctaaaaaaaaaagaagaactcagatgagactcattccaaatccccaaccttaaactttcaaaatccacaaaccaacaagctgatttagatctcccata

SEQ ID NO: 398998 - DNA, 509 bp, Oryza sativa nipponbare
ataattaattcacaacaccatatgggattgatcaggttcagaacctgcacagaaatacacactaccggtacagatctcaccctctctccaatactcgtacatccatccacgcggtccacacgaatacgtacatctatacggtacacgtacgtacatctactgcaccgcgtacacacacgcacactctcctgcagagacgcgcatcgtcgtcaacctagctagcttagctgaaggcgatgcgtcgccatggcagcacggcggcggcggcgctcacttgccggggacgaagttggtggcgtaggcccaggcgttgttgttgacggggtcggcgaggtggtcggcgaggttctcgagggggcccttgccggtgacgatggcctggaccaagaaacccaaccatggagaccatggtagggcggccgttcttgatctccttcaccttgagctccgcgaaggcctccgggtcgtcggcgaggcccagcgggtcgaagctgccgccggtgtagagc

SEQ ID NO: 398999 - DNA, 478 bp, Oryza sativa nipponbare
taatactcctatttcatatgcagggtactaaaattattgatccagaacacaaagaggaatgaatggatcggcaatgtcgccagatcagatggagatgctgttgggcacgccgcggcaggtgacccccggcggcgagctgggcgccagcagttcgtacggcagcaccccggcgccgcaccggttcttccggccgtggtcggcgttccgcctctcgatggtctcctcggcgcgtcgcacatcggccgcgaacatgccgtgcgccgccacggccgcctcgtccgccgtccacggcacgccgccctcgtcccgcccctcgccgaggtactcctcgtcgggcgagtgcgtcgacagcgtgtccaccaccgccatgaacttggtcgcctccagcacccccggcatcgcgttcaaggaagaaccggtgcgggtcggctaggaacgcggcgtactccgccgcgtcgcgctccaggttcggcagcag

SEQ ID NO: 399000 - DNA, 301 bp, Oryza sativa nipponbare
acagaaaatcaatccttgcatgcaggggaaatcgatggatcgacctctctccttaacttgttcttaattctcatgtacaatcaaagaaacacacacgcacacacacatgcgtgcactgcatttttttgagcaacgaactcgattgatttgattttgattcgctagggattaaagagaagctgagatagagatttcgaccatcatgccacccttaaggagctggctgcgctctctacaaacttcctggcgcccttgaaccaccttttgtcgccggcctgcgccttgcaaatgtacagcttgc

SEQ ID NO: 399001 - DNA, 497 bp, Oryza sativa nipponbare
gcaatgctagtcaataaaggtgaatttcacctttgaacgggaatggggaagcaatgaagtacagaattacaggagaaggtggcagctgaggagagaatcaggagctgtcacaactcacaaagctatatacaagttcagaagctgaacgagaagagagcatgcttccctcctacaggaagcattatgacttcttggtgctgttttacaaatctgggtgattattggaagatcatgcggtagcagctgcagcttcttctgcgacttgggatccctgttgcagagtgcagatgaggttgcgatccccatacacattgtccacgcgacatgttgttggccagaacttggcgccccgaagccacgctgcagggaacgcagcgtactccctggagtacggcttaatccatgaggcggtcaataaaagttggggcgggtgaggagcactcttgaggacattgttgttcacatctgctttgccactttcgatttctgcaatttct

SEQ ID NO: 399002 - DNA, 485 bp, Oryza sativa nipponbare
ttaaaaaggtaaactcttggtaataatattattaagacattatagctgatgtcttttgatcacactgcgatcaaattatgcatcataggcagtacaactccgcgtcaggaaaaagtagaggagatatatttcttgttattacttaatacagcattcacatatatcgaaccatccggtacgtacgtagtagtactccacgcgttcacatcgatgatcggggacgatatcctcaggtagtacttatgcaaaagcgttggcgtaaactgacgaactgaacggacggacggtcggatttagggctcccataagtccaagttgccggagacgaagtcgtagtggccgccgacgagcttgagggtgccgttggcgatcccctccttgacgaacgggtaggtcttgagggtcttcaaggaatgggttaacggcctccttttccaagatggcgcattggtcatcgaaaggcaccgaggcgtgcggacgcgtgg

SEQ ID NO: 399003 - DNA, 375 bp, Oryza sativa nipponbare
gggtgggggtttagacacaaacaagcataagcgatggtttaacaagagcgagcaacgcgtctgatacaatgaacacttatacaaaatctggtgtgtgctctgccatttgagctaaatttgaaccgggattttgtatttgaacatatgaaaacgtttactctgctttccaagacgacaatggaggggtctcagaatccttccaagtgccggccgtctgagcatagcggtcaccttgaacaacatctgtgctggcataggactcaagttcagtcatttccccaggggtgagcttcacagatagagctgctacattttgattgaaattctcgatttttgttgtcccaggtatggggcatacgtcgcttccctgatgat

SEQ ID NO: 399004 - DNA, 505 bp, Oryza sativa nipponbare
aggcaaaccacacgaatacgcgattgattaatttcactgagaatagcacgggtacatcacatcacacaaattcatacgttgatacacgcatagtcgccgaagcgaccagctgcttaattaatcgataacacacgggtttaattcagcaataatcagcacacacacaaaccacactcatatgggtgggttttattgtggactaattaaggtaggtgactcgccggcggcgagtgttcggttgcttcgtgacttcacttgccgcacttgcagtcggtgcaggagcagctggtgccgcacttgcagccgccgttctcctcgccggcggcgacctcctcgaagtggctcttctcggcttcaactatgacgacgccatagctggtacctttcttcacgcactggctcttgtcagcacagtcgcagttgccgcacttgtccgacatggtcgaagatttaattagctaagtgagtgatgagttaatcccttgtgttgcttatgctttcttcg

SEQ ID NO: 399005 - DNA, 496 bp, Oryza sativa nipponbare
aaaaatgtgacctcagaactttatttattattcgcacacgtactgcgcacaaactaataaaaccacactttacaacaccactagctaggttttagacacaaacaagcataagcgatggtttaacaagagcgagcaacgcgtctgatacaatgaacacttatacaaaatctggtgtgtgctctgccatttgagctaaatttgaaccgggattttgtatttgaacatatgaaaacgtttactctgctttccaagacgacaatggaggggtctcagaatccttccaagtgccggccgtctgagcatagcggtcaccttgaacaacatctgtgctggcataggactcaagttcagtcatttccccaggggtgagcttcacagatagagctgctacattttgattgaaattctcgatttttgttgtcccaggtatggggcatacgtcgcttccctgatgatggacccaggccaatgcgagttgtgacggtgtgcatccttt

SEQ ID NO: 399006 - DNA, 389 bp, Oryza sativa nipponbare
gttaaaactttttctttccattttaaattatctgcaaagtaagaaagtaacactcccaagttacaacagcacaccatccatatatccatgcaggcagcctgtttgtgcccttgtgcagatgcatttcatttatacaagtagaaggcactcaaatcagccaccacatgaacacacacatgttccatcatcgatcgatctacacatgcatcacccggtcatgcacttacaaacaaaagatctacttgaagaagtacgggaggtcgagcacgtagaggaggaagtaggcccagaggacgccggagatgccgccgaagaagaagccgccggtgaacttggcccagccgtcggcggtctgcagcttgtcggcctccttcttgcggccggtgagc

SEQ ID NO: 399007 - DNA, 440 bp, Oryza sativa nipponbare
tatgacaccaaaatgtgatgtggatatgattaagcaggtgcagcaaaacgtacattaattaaacaacaacaattaaccctcgggcacgcctgtgttttgttatctcgctcaacatatacgtacgtaatactttgcttgcatagcatagggacgacgacattatattcttaattgataaactcaagaacgcatggagatggatcgagagatttataaatatggagcttgcttgattgattagatgaggtcgtcctccttgtgggtctcgatgacgacgtcggacttggggtaggcgtggcaggtgaggacccagccggcggcaacctggtcgtcgtcgaggaagctctggtcggactggtcgatctcgccggagaccaccttgccggcgcaggaggagcaggagccccgcgcggcaggagtaagggcaggtcgatcccctt

SEQ ID NO: 399008 - DNA, 326 bp, Oryza sativa nipponbare
ttggaatttttttgaggcgggggtttttttttttttttaattcacaacaccatatttcattgatcaggttcagaacctgcacagaaatacacactaccggtacagatctcaccctctctccaatactcgtacatccattcacgcggtccacacgaatacgtacatctatacggtacacgtacgtacatctactggaccgggtacacacacgcacacttttctgcagagacgcgcatcgtcgtcaacctagctagcttagctgaaggcgatgcgtcgccatggcagcacggcggcggcggcgctcacttgccggggacgaaatttgt

SEQ ID NO: 399009 - DNA, 268 bp, Oryza sativa nipponbare
tacagccctctccctttttttttttcttttatgacacacttaggggggcgcggatattattaagcaagtgcaccaaaacgtacattaattaaacaacaacaattaaccctcgggcacgcctgcgttttgttatctcgctcaacatatacgtacgtaatactttgcttgcatagcatagggacgacgacattatattcttaattgataaactcaagaacgcactggagatggatcgagagatttataaatattgaacttgcttgattga

SEQ ID NO: 399010 - DNA, 488 bp, Oryza sativa nipponbare
  unsure (1)..(488): unsure at all n locations
gctggaaaatttgatgatttatttcccacttatatcatcatatacaaatactaacacatgcgaaaattatcaagcagaaaagttccatacaaattcatccagacaaacaagtgtaaaaaaccttttttttcccatttcccccttgaactatccgtaaataccaccattccaccaaactcccctctgtcttctacgacaaataatcttttcaacccagtaacttataattaattacagagagattagcaaacatataatggtaagaatcagttgtcgtaggtgcggcactcgtcggtctccgggttgtccttgcagtaggcctcgagcgggtcggaggtctccttgagcttgtcgcgcgcgtggctcgccgccgcgctcagctcctccaccttgtnccacgccggcgggcacttggccgttcgccgtgttctccgngcacgcctccttngccttgtcgatgctctccgacatcttgtccgagatgtccg

SEQ ID NO: 399011 - DNA, 502 bp, Oryza sativa nipponbare
actaggcaaaccacacgaatacacgattgattaatttcactgagaatagcacgggtacatcacatcacacaaattcatacgttgatacacgcatagtcgccgaagcgaccagctgcttaattaatcgataacacacgggtttaattcagcaataatcagcacacacacaaaccacactcatatgggtggtttttattgtggactaattaaggtaggtgactcgccggcggcgagtgttcggttgcttcgtgacttcacttgccgcacttgcagtcggtgcaggagcagctggtgccgcacttgcagccgccgttctcctcgccggcggcgacctcctcgaagtggctcttctcggcttcaactatgacgacgccatagctggtacctttctttacgcacttgctctggtcagcacagtcgcagtggccgaacttgtccgacatggtcgaagatttaattagctaagtgagtgatgagttaatcccttgtgttgcttatgctt

SEQ ID NO: 399012 - DNA, 482 bp, Oryza sativa nipponbare
ccacgcgtccgcccacgcgtccgcccacgcgtccggaggccgcgaaacattgaaattggtgcagaggtgatcctcaaacagaagcttaggggtcaagggatggctttccttgttggtggtggatcagtcatgcagaaaattcttgcccctcgtgaggtgattacagttgacgctgcttgtattgtggctatgacaaccaccatcaactttcagttgaaaacccctaaccaaccgagaagagtagtcttcagtgggggtaaccagcttacagcatctctcacaggaccaggcgtggtcttcatacagagcctaccctttcatcggctttcacaacgcattgcaagtagatcagtggccgctccgagcttgagggacaatcccaagttcttcatccagattgtcatgttcttcttcctcgcgtatgtcatgattgtatcatcgataattctgacagatgtttagatgctgcaacaagctactag

SEQ ID NO: 399013 - DNA, 474 bp, Oryza sativa nipponbare
  unsure (1)..(474): unsure at all n locations
ccacgcgtccgcgcatcagcagcagcaagcagctaatcgcgcacgtacgcacaccgcgacccggggcgagatggcgcagtcgatgctggtgtcgggagccaatggcacggtggccgccgcgagcaccagcaggctgcagcccgtgcggccgacgccgttctcgcggctcgtgctgtcgcagccgtcgtcgtcgctggggcgcgcggtgtccgtcaagacggtggcgctgttcggcaggtccaagaccaaggccgcgcccgcaagaaaggctgagccgaagccaaagttcaagaccgaggacggcatcttcggcacgtccggtgggatcggtttcaccaaggagaacgagctgttcgtcgggcgtgtcgccatgctcgggtttgccgcgtcgatcctgggtgaggccatcaccgggaagggaatcctggcgcagctgaacctggagacggngatcccgatctacgaggcggagcc

SEQ ID NO: 399014 - DNA, 468 bp, Oryza sativa nipponbare
ccacgcgtccgcccacgcgtccgcccacgcgtccgagcggcggcacgaactaccgctgcatctggggcaaggtcacccgcccccatggcaactccggcgtcgtccgcgccaagttcaagtccaacctgccccccgcttccatggggcgcaaggtcagagtcttcatgtacccgagcagcatctaaagactcttgaagtgtggaggatgttgcttatctctcttagattttacttctggctgaaaatgtcttgaaaggagccgtattcatgttgagtttgcaagttgaactgctgttccctgagaacccctggaagttctccgtagttttgatgtcgaatgtatgcaccacttctattatattatgtcatatggacttatgatggagtcagggttggaacttgtaagcttgatttgtcatgtttcacagcatctatcttcttcgtatcatttgctcgcatttctgagtc

SEQ ID NO: 399015 - DNA, 442 bp, Oryza sativa nipponbare
ccacgcgtccgggttcgcggcggtgagggcgagcgggccggcgacgccgccggacatctcggacaagatgtcggagagcatcgacaaggcgaaggaggcgtgcgcggaggacacggcgagcggcgagtgcgcggcggcgtgggacgaggtggaggagctgagcgcggcggcgagccacgcgcgcgacaagctcaaggagacctccgacccgctcgaggcctactgcaaggacaacccggagaccgacgagtgccgcacctacgacaactgattcttaccattatatgtttgctaatctctctgtaattaattataagttactgggttgaaaagattatttgtcgtagaagacagaggggagtttggtggaatggtggtatttacggatagttcaagggggaaatgggaaaaaaaagggtttttacacttgtttgtctggatg

SEQ ID NO: 399016 - DNA, 411 bp, Oryza sativa nipponbare
ccacgcgtacgcccacgcgtacgcacacgcgtccgatcacgcatccgggcggagtcggcgacagtggggacgggtgctaccatcggagactccgatttgattgtttgacccacaagaaggccgccctgatccgcggcttcagaggggaggcaactgctaggtacccaccttacacgattgagaagcagaagatcctgagaggactgaataaccgcagcttctttgcactgattattgccctcctgggcttgcccaaagagaggcgttagaaaactttcagtagtttcagtacagtacttgtgcatctgagtgagtgcaggccatgctgtcaatggaagccattctctgcatgtagtcttacacaggagacattatatttgtcggatttattgtgaaactattgaaagtctc

SEQ ID NO: 399017 - DNA, 460 bp, Oryza sativa nipponbare
ccacgcgtccgctccagctccggttaaataaacagatcgcacaagccacttttttttttctttttgttgtgcacagctcttgttctccattaatccagccgtgcgtgcagttgaggtccacctgctgctgctctctgtctgctcccatcgaacaaatcaagaaccaccctctccactctccaatccaatctcgaataggaagaaggatgcttggttttgcgccggcaccaggccggccgctcttcgtgctcttcggttcctccatcgtccagttcagcttcagcaatggcggatggggcgctgcccttgcagacatctacgctcgcaaggctgatatccttctcagagggtatattggttggaactcaaggcgcgcccttcaagtcattgacaaaatttttcccaaggattcgcccgtgcaaccttctttggtaatagtttactttggtggcaatgattc

SEQ ID NO: 399018 - DNA, 413 bp, Oryza sativa nipponbare
tccaagccgcggccaccctgatgcagccggccaagctcggcggccgggcctcctccgccgcgctgccatcgcgcccgtcttcgcacgtcgccagggcgttcggcgtcgacaccggtgccgccggcaggatcacgtgctccctgcagtccgacatccgggaggtcgccaacaagtgcgccgatgccgccaagctcgccggcttcgccctcgccacctcagctctgctcgtctcgggcgccagcgcggagggcgtgccgaggaggcttaccttcgacgagattcagagtaagacgtacattgaggtgaagggaaccggcacggcgaaccaagtgcccgcggtggagggcggcgtcgactccttcgccttcaaggccggcaagtacaacatggagaagttctgcctggagccgacg

SEQ ID NO: 399019 - DNA, 452 bp, Oryza sativa nipponbare
ccacgcgtccgcccacgcgtccgcccacgcgtccgcccacgcgtccgggcggagtcggcgacagcgggatcggctcctaccatggcaaattcagcttcgattgtttcacccacaagaaggccgtcctgatccgcggcttcggaggggaggcaactgctaggtacccaccttacacgattgagaagcagaagatcctgagaggactgataaacggcagcttctttgcactgattcttgccctcctgggcttccccaaagagaggcgttagaaaactttcagtagtttcagtacagtacttgtgcatttgagtgagtgcaggccatgctgtcaatggaagccatttcctgcatgttgttttacacaggtgtacattatatttgtcggattttcttgtgtaacttattgaaaattctactacacagggttacataaataaacatgatttgtcagt

SEQ ID NO: 399020 - DNA, 466 bp, Oryza sativa nipponbare
  unsure (1)..(466): unsure at all n locations
ccacgcgtccgacacagatgaccaatgattggtccgatcaggcaggactggcagcaccgggtggtgcggatgaaggcgcccaccggcgccgtcaagaatgatgagaaggccgtcaagagcggcagccttctggtgacgcaagccaaaccatgaagaagtctagacgtctggaacaacacaacggcnggcngtgcagtgagcacagtacataaacaccaagcggctggatgacgacaccgagagccttgcccatgagcgtgtctcaagtgacctgaagaaaaacctcatgcaagcaaggctggacaagaagatgacccaggcacagcttgcacagatgatcaatgagaagccccaggtgatccacgagtacgagtcaggtaaagctattccgaaccagcagatcatcgtgaagcttgaaagggctcttgcaacaaagctgcgcggcaagaaataatgttctactatt

SEQ ID NO: 399021 - DNA, 414 bp, Oryza sativa nipponbare
cacgacccacgcgtccgctccggctaactaaacatgagtccacatcaccactttcttttagctctttgttggggggggcggggtgttctacattaatccacacgttcgtgcagtagacgtccacctgctgctgctctctgtctgctcccatcgaacaattcaagaacctccctctgcactatccaatgcaatctccaataggaagaacgatgcacgaatctgcgcctatcaccacaccgatcgctcttcgcactatttggttccaagatagtccaattcaaccttagcactggcagagggggcgctgccattgcacacatctacgctcgcaaggctgatatccttctcagagcgtatattgattggaactcaaggcgcgcacttcaagtcattgacaaaatttttcccaaggat

SEQ ID NO: 399022 - DNA, 384 bp, Oryza sativa nipponbare
ccacgcgtacgcgtacgcgcggacccggaggcgttcgcgaggaacagggcgctggaggtgatccacggccggtgggcgatgctcggcgcgctgggctgcatcacgccggaagtgctcgagaagtgggtgcgcgtcgacttcaaggggcccgggtgggtcaagggccgcgcccagatttttctccgacggcgggcctcgactaccttggcaaccccaaccctggggcacgcccaaagcatccttggccggctgggatttcaagtccgccctaagggccttggtcggggctaccggattaaccggcttcccggcgtcggggaacggaaccaccttttccccggcgggcaatactttgaaccggttgggcttggcgaccaacccggt

SEQ ID NO: 399023 - DNA, 471 bp, Oryza sativa nipponbare
ccacgcgtccggaagcgtgaaggttttccggtgccagcttccccgtagtaatgccttctactcaagtgaaccaccaaagcacaatgattctgacaagccactatgtccaggagctcctgtctgccattggtgcggtacatggaaaggtgataaactctgtagtagctgcaagaaagcacgctactgctctgagaagcatcagacactgcactggcgctctggccataagagtgattgcctacagttaatcagttcttctgaagcttcaagctctatttttcctgctgtaggaaaagttcctgctagcaaatcttggccagaatatgagattgcaatcgactatgagggtgctttcaattctgacagttgtgatgagagtaactcaaagtccttggtgatgcaaagacctggtaaaccagatgatatgatgcagtcatggatggattcaattgaggctgatgctgacaacaa

SEQ ID NO: 399024 - DNA, 481 bp, Oryza sativa nipponbare
ccacgcgtccggaagtactcgagcaaagaaggagagagcttggtgagctgcagagatggccccctccgtgatggcgtcgtcggccaccaccgtcgctcccttccaggggctcaagtccaccgccggcatgcccgtcgcccgccgctccggcaactccagcttcggcaacgtcagcaatggcggcaggatcaggtgcatgcaggtgtggccgattgagggcatcaagaagttcgagaccctctcctacctgccaccgctcaccgtggaggacctcctgaagcagatcgagtacctgctccgttccaagtgggtgccctgcctcgagttcagcaaggtcggattcgtctaccgtgagaaccacagatcccccggatactacgatggcaggtactggaccatgtggaagctgcccatgttcgggtgcactgacgccacccaggtgctcaaggagcttgaggaggccaagaaggcgtaccctgat

SEQ ID NO: 399025 - DNA, 473 bp, Oryza sativa nipponbare
ccacgcgtccgcgcaccaatggcgctcgtctccgcctcctcctccaccaccgccgtcgcggcgctccccggcgccgccagggcctcctccttcctcggcggcgccggcaggagcggcaggctgctgctgaggcaggccgagtcgtcgtccgcgcgggcgtcgttcgccgtgcgcgccgcggcgcccgacaggccaatctggttccccggcagcaccccgccgccgtggctcgacggcagcctccccggcgacttcggcttcgaccccctgggtctcggatcggacccggagagcttgcggtggaacgtgcaggcggagctggtgcactgccggtgggcgatgctgggcgcggcgggcatcttcatcccggagttcctgaccaagatcggcatcctcaacacgccgtcgtggtacaccgtcggcgagcagcaatacttgaccgacaccaccaccctgttgatcatcgagctcat

SEQ ID NO: 399026 - DNA, 477 bp, Oryza sativa nipponbare
ccacgcgtccggattcttgcaaggaggaagagcagctagaggcgaggcaagaaaagaagtgaaatctctccgttagacaggaagaggaaaagcaagggggaattggggatggcgtcaaagaggatacagaaggagctcaaggatctgcagaaggatccccctacatcatgcagtgcaggtcctgttggtgaagacatgttccactggcaggcaacgataatgggtccatctgatagcccatatgctggtggagttttcctagttaccatccacttccctcctgattatcccttcaaaccacccaaggtggcgtttcgcaccaaggttttccatccaaacatcaacagcaacgggagcatttgccttgacatccttaaggaccaatggagcccagcactaaccatttccaaggtgttgctgtcaatctgttccctgctgactgatccgaaccctgatgatcctctggtccctgagatc

SEQ ID NO: 399027 - DNA, 441 bp, Oryza sativa nipponbare
ccacgcgtccgccgggagagagagcatctagctagggagagaaaggaagagacgagaggagagagatggccactgcttatgctcccatggcgagccagctgatgaagagcagcttggtgtgctccaagccgagggggctgtctggtgcttcgctgacaaggaggccccgcttcacagtcaaggccatccagtctgagaagccaacgtaccaggtggtgcagcccatcaatggcgaccccttcatcggcagcctggagacgccggtgacctccagcccgctggtcgcctggtacctctccaacctcccggcgtaccgcaccgccgtcagcccgctgctccgcggcaatcgaggtcggcctcgcccacggctaccttctcgtcgggcccttcgcgctcaccggcccgcttcggaacaacgccggtgcacgggcccagccggcg

SEQ ID NO: 399028 - DNA, 429 bp, Oryza sativa nipponbare
  unsure (1)..(429): unsure at all n locations
ccacgcgtccggccgccaccggccgcatcaccatgagcaaggagctgtggtacgggccggatagggtgaagtacctggggccattctcggcgcagacgccgtcgtacctgaggggcgagttcccgggcgactacgggtgggacacggcggggctctccgcggacccggaggcgttcgcgaggaacagggcgctggaggtgatccacggccggtgggcgatgctcggcgcgctgggctgcatcacgccggaggtgctcgagaagtgggtgcgcgtcgacttcaaggagcccgtgtggttcaaggccggcgcccagatcttctccgacggcggcctcgactacctcggcaaccccaacctggtgcacgcccaagagcatcctgncgtgctgggattccaggtcgtcctcatgggcctcgtcgagggctacc

SEQ ID NO: 399029 - DNA, 438 bp, Oryza sativa nipponbare
ccacgcgtccgcgcggacccggaggcgttcgcgaggaacagggcgctggaggtgatccacggccggtgggcgatgctcggcgcgctgggctgcatcacgccggaggtgctcgagaagtgggtgcgcgtcgacttcaaggagcccgtgtggttcaaggccggcgcccagatcttctccgacggcggcctcgactacctcggcaaccccaacctggtgcacgcccagagcatcctcgccgtgctgggattccaggtcgtcctcatgggcctcgtcgagggctaccgcatcaacggcctccccggcgtcggcgacggcaacgacctctaccccggcggccagtacttcgacccgctcggcctcgccgacgaccccgtcaccttcgccgagctcaaggtcaaggagatcaagaatggccgcctcgccatgttctccatgttc

SEQ ID NO: 399030 - DNA, 356 bp, Oryza sativa nipponbare
ccacgcgtccgctcgccgaccacctcgccgaccccgtcaacaacaacgcctgggcctacgccaccaacttcgtccccggcaagtgagcgccgccgccgccgtgctgccatggcgacgcatcgccttcagctaagctagctaggttgacgacgatgcgcgtctctgcaggagagtgtgcgtgtgtgtacgcggtgcagtagatgtacgtacgtgtaccgtatagatgtacgtattcgtgtggaccgcgtggatggatgtacgagtattggagagagggtgagatctgtaccggtagtgtgtatttctgtgcaggttctgaacctgatcaatgaaatatggtgttgtgaattaattat

SEQ ID NO: 399031 - DNA, 195 bp, Oryza sativa nipponbare
ccacgcgtccggctcttaacacatatgtaataatctcttccctccctctccggccggttttattgtaagagtactacaattatcgttgggtgaggatatgtgaaaacaaagctccggctatatacacacaagatatgtatctagagcatatctgataaattcgtcgacaataaaaaaaatggatggtatcacgtc

SEQ ID NO: 399032 - DNA, 453 bp, Oryza sativa nipponbare
ccacgcgtccgcggacgcgtgggcggacgcgtgggcggacgcttggtcttcaggaaggaccagctcgtggagagcgacccgctgctcaacaaggtctacggcgcgccacccttcgggttcactgcatacaggaagggccccggcaagaaaccccgggcgagggccccccaccaggaaaggggcgggcgctgctttaaacttggggccctttttgccaagaaagggtgaagaatccttttgaattctacgtacgtatatacttcaacgcagagcgtcagcttgcctacacgatcgatgtattaccctcctcctcatcaaacagtttgattcaaactccaagcttaatttggaggatgatttgcgtattcgtagcaacatgtgaggtgtgacttaaaaagtgttaattttttatgtgaaaatggggtttatatacttcatacaacacacatcatt

SEQ ID NO: 399033 - DNA, 367 bp, Oryza sativa nipponbare
ccacgcgtccggaagaagtcaagcgctcatgatgggctcgtgaaggggctccgtgaggcggccaaggccattgagaagcatgccgctcagctttgcgtgcttgctgaggactgtgaccagcctgattatgtcaagttggtcaaggcactctgcgctgagcacaatgttcacctcgttaccgtgcctagtgctaaaactcttggcgagtgggcagggctttgcaagattgattctgagggcaaggcgaggaaggtcgtaggctgctcctgcgtcgttgtcaaggacttcggtgaagagtcagagggcctcaacatagtccaggactatgtcaaagtccactagatatagcgttcccgatatccagaac

SEQ ID NO: 399034 - DNA, 464 bp, Oryza sativa nipponbare
ccacgcgtccgcccacgcgtccggttgagcattacagcagttggaaagcgggagaagcttcttaatgtcattaaaaatccagtcacccgctatctaccagttggagcaaagaagattggtctttcatatagtgctgagaagtcagtcaatttgtttgactatgttgccaaatccagtgacgatgtaccccttgtgtttgtggtaggtgctatggctcatggaaagattgacaacgaatactcagatgattacatacaaatttgcaattaccctctcagtgctgcctgctgtttgaatcgaatatgcagtgctctcgagcagaagtggaacatccagtgaaaggaaattttgaaaacgaacactgaaaaacattatgtgaaattgttgtgtactcgctagctaatgcaattttgcggtctcctcccatgctgagtgtgtactgtattctgattgtggagacttgg

SEQ ID NO: 399035 - DNA, 481 bp, Oryza sativa nipponbare
ccacgcgtccgcacttattgagaaggcgaaggcgaagggtgtttctctcttacttcctaccgatgttgtagtggctgacaagtttgccgcagatgctgaaagcaagactgttgctgcctccgctatccccgatggttggatgggtcttgatgttggcccagatgccatcaagacttccagcgaagcattggacacctgcaacactatcatttggaacggacctatgggagtctttgagtttgagaagtttgcagcaggcactgatgcaattgccaagaagttggctgatcttactaccacaaagggcgccacgaccatcatcggtggtggtgactccgttgctgcggtcgagaaggctgggctggccgacaagatgagccacatctccaccggcggtggtgctagcttggagttgctggaaggcaagaccctcccaggtgttcttgcccttgatgaagcgtaagctaattcggcttgtctc

SEQ ID NO: 399036 - DNA, 433 bp, Oryza sativa nipponbare
ccacgcgtccggcataagcaacacaagggattaactcatcactcacttagctaattaaatcttcgaccatgtcggacaagtgcggcaactgcgactgtgctgacaagagccagtgcgtgaagaaaggtaccagctatggcgtcgtcatagttgaagccgagaagagccacttcgaggaggtcgccgccggcgaggagaacggcggctgcaagtgcggcaccagctgctcctgcaccgactgcaagtgcggcaagtgaagtcacgaagcaaccgaacactcgccgccggcgagtcacctaccttaattagtccacaataaaaaccacccatatgagtgtggtttgtgtgtgtgctgattattgctgaattaaacccgtgtgttatcgattaattaagcagctggtcgcttcggcgactatgcgtgtatcaacgt

SEQ ID NO: 399037 - DNA, 463 bp, Oryza sativa nipponbare
ccacgcgtccgcggacgcgtgggggccctctcgtccccggcgctggccggcaaggccgccgcgaaggtgttcggcgaggggcgcatcaccatgcgcaagtcggcggcgaagcccaagcccgccgcgtcggggagcccgtggtacggcgccgaccgcgtgctctacctcggcccgctctccggcgagccgccgagctacctgaccggcgagttccccggcgactacgggtgggacaccgcggggctctccgccgacccggagacgttcgccaagaaccgggagctggaggtgatccactccaggtgggcgatgctcggcgcgctgggctgcgtgttcccggagctcctcgcccgcaacggcgtcaagttcggcgaggcggtgtggttcaaggcggggtcgcagatcttcagcgagggcgggctcgactacctcggcaacccgagcctgatccacgcgcagagca

SEQ ID NO: 399038 - DNA, 406 bp, Oryza sativa nipponbare
ccacgcgtccgaatcgagactagacaggacaggcggacgcgagcgtcgtcctcttcgtttcgcttctcctcctcctcctccgcctccgctctcgcgagatctcctgatcgactcgctccgccatggctggagaagctgatggaaaagccccactgggatcaagatacccccctgctgctctcaacgagcgcatcctttcttccatgtctcaaaaacatgttgctgctcatccatggcacgatctggagataggtccaggagctccagcagttttcaactgtgtggttgaaattcctagaggcagcaaggttaagtatgagttggataaggcaactggtctaattaaggttgatcgtgttctttactcatctgttggttacccacacaactatggtttcattccacg

SEQ ID NO: 399039 - DNA, 423 bp, Oryza sativa nipponbare
  unsure (1)..(423): unsure at all n locations
ccacgcgtccgagctaattaagcaaaagaagaagaagaagaaagaagaagaagaagatgcagaccgctgctagcagtgtcgttggattgtcggccgtgttgcccgctgctgtgaaggggcgcagcctgcagattcaggctcctcgccgtgttgcgttgcgcgttcgtgcggcggcggcggcggtggcagtggaggctgcggaggtggactacagctctaacatctcggtgtttccgatggaggcgtgcgacctcatcggcggcgaggcgtgcaacgtgcagatgtacccagaggccaagctctcatcatcggctgctgntgctgtttctcgtgcggcggcggaggaagtcgacagggactacctatcctacgacgagcccaccacggtgttccccgaggaggcgtgcgacgatcttggcggag

SEQ ID NO: 399040 - DNA, 477 bp, Oryza sativa nipponbare
ccacgcgtccgcggacgcgtgggcggacgcgtgggcggacgcgtgggcttcaagaaggaccagctcgtcgagaccgacccgctgctcaacaaggtcgacggcgcgccgccctccggctccactgtctcccggaaggcccccgccaagaagcccgcggcgagcgccgccgacgaggaaggcggcggcggcggcttcaacctcggcgccctcttcgccaagaaaggctgaagaatcctttcgaattctacgtacgtatatactccaacgcagagcgtcagcttgcctacacgatcgatgtattaccctcctcctcatcaaacagtttgattcaaactccaagcttaatttggaggatgatttgcgtatacgtagcaacatgtgaggtgtgactcaaaagggattaattttttatgtgaaaatgtggtttatatacttcatacaacacacattatttgttatttcttttcaactcaacat

SEQ ID NO: 399041 - DNA, 445 bp, Oryza sativa nipponbare
ccacgcgtccgctctactactactagccagctggctggttgactaactacctggctatagcccccaccgcgagggccgcctcacccacctccgggggtccattccaagggctcaagctcagcgcctgactccccggcagacgtcgttccaccaactctggctcaggcaacgtcagacatggccgaaggatcaagtgcatgcaggcgtggccaattgcgggcatcaagacaactaagaccctatctgaccatgcaccaatcaccggctaggatctgttgcagcagatcgagcacccgcttacatccaagctggagcctctgctcaggttcagcaaggttgtattcgtctaccaggagaaccacaggtctcccgcgttctactatggcaggtgttggaccatgtggaagctgcccatgttcggctgcaccgaagccacccacgtgct

SEQ ID NO: 399042 - DNA, 465 bp, Oryza sativa nipponbare
ccacgcgtccgcggacgcgtgggctcgagcaaagaaggagagagcttggtgagctgcagagatggccccctccgtgatggcgtcgtcggccaccaccgtcgctcccttccaggggctcaagtccaccgccggcatgcccgtcgcccgccgctccggcaactccagcttcggcaacgtcagcaatggcggcaggatcaggtgcatgcaggtgtggccgattgagggcatcaagaagttcgagaccctctcctacctgccaccgctcaccgtggaggacctcctgaagcagatcgagtacctgctccgttccaagtgggtgccctgcctcgagttcagcaaggtcggattcgtctaccgtgagaaccacagatcccccggatactacgatggcaggtactggaccatgtggaagctgcccatgttcgggtgcactgacgccacccaggtgctcaaggagctcgagga

SEQ ID NO: 399043 - DNA, 375 bp, Oryza sativa nipponbare
ccacgcgtccgaaaaggagcttgctcactacaacggcggtgaaccaacctttttacagggggcaaaagccggtgggacctgacaggaccattttgcgaaacacgtttgaactatggaatttcctgcaggaacacgatggtaaagtctaacgtgagacttgtaatctcaattgctagagagtttgaaggtcctggaatggaattttgtgattttattcgggagggtatacaggcccttgcgcggggctctaaagtgtgtgcttcaaaaggggtcgatgatttacataatactactggtggaggaaacaagcagtactcaaatacgttttagaacaaacccagattattcgcttgccggcacacatggtcgaagcaa

SEQ ID NO: 399044 - DNA, 478 bp, Oryza sativa nipponbare
ccacgcgtccgtgcagctgatgaaagttgtcgtagtttgcttgatgctcagaaaataatggatggaaatcttgctcatgttattaacatcaagctagcaaagctagggattcttggagcccttgaagtaattgatgctgcaagaaaagcccgcattgcgctgatgataggcggtatggttgagactaggatcgctatgggctttgctggtcatcttgcagctggtcttggttgtttcagttttgttgacctggacacacctcttttactgtctgaagatccagtgttcggtggctatgaagtttctggacctgtatacaagtttacaaatgctcgaggcccatgtggtttccttcacttagacaacaacggcttgaaataaggaatgccctagccctttgggagcttcacagacaacggtgacacgttcaatgaacaattaattgttcattatttaccttcaacaataatcaattgga

SEQ ID NO: 399045 - DNA, 445 bp, Oryza sativa nipponbare
ccacgcgtccgcccaaggtgcgctccaagatcctgtctgaggagttcggctgggacaaggatcttgcaaagaagatttggtgttttggacctgagacaactgtccccaacatggtggttgatatgtgtaagggagttcagtatctgaatgaaatcaaggattccgttgtggctggtttccagtgggcatcaaaggagggtgctctggctgaggagaacatgcgtggtatatgctttgaggtgtgcgatgttggtctccatgctgatgctattcacagaggtggtggccaggtcattcccacggccaggagggtcatctatgcttctcagatcacagcaaagtccaagcttattgagcccgtctacctggtggagatccaggcccctgagaatgcccttggagggatctatggtgttctgaaccagaagagaggacatgtgttcga

SEQ ID NO: 399046 - DNA, 445 bp, Oryza sativa nipponbare
  unsure (1)..(445): unsure at all n locations
ccacgcgtccgcctgcgctgcagccgaacgaccgagctaccgagctaatccagccatggcctccaccgcgctctccaccgcctccaaccctactcagctgtgcaggtctcgcgcctcgctgggcaagcccgtcaagggcctgggcttcggccgggagcgcgtgccgaggacggcgacgaccatcacatgccaggccgcgagcagcatcccggccgaccgcgtcccggacatgggcaagcgccagctgatgaacctcctcctgctcggcgccatctcgctccccaccgtcggcatgctcgtcccctacggcgccttcttcatccccgccgggtccgggaacgccggcggcgggcaggtcgccaaggacaagctcggcaacgacgtgctcgccgaggagtggctcaagacacacggncccaacgaccgcaccctcacccaagggctc

SEQ ID NO: 399047 - DNA, 447 bp, Oryza sativa nipponbare
ccacgcgtccgcccacgcgtccggccagaagcaaagatggcgatctccagcctacatgccaccacctccctgcactccccatgcaccaccaacacaagcttcaggcagaatcaggtcatcttcttcaccaccagaagcaacaggaggggtagcacaaggtacggaggagcaagaacctttcaggtttcatgctcagtcgacaagccagtggtgattggccttgcagcagactcaggatgcgggaagagcacctttatgcgccggctcaccagtgtgtttggtggtgctgcagagccacccaagggtggcaacccagactcaaacacactcatcagtgacacgacaacggtgatatgcctcgatgactaccattccttggacaggactggcaagaaggagaaaggtgtgactgccctggaccctagggcaaacgattttgatctcatg

SEQ ID NO: 399048 - DNA, 451 bp, Oryza sativa nipponbare
ccacgcgtccgcggcgccaagtcaagccccgaagctgtgaaggaggtgccgattgttctcaaggccctgtatgatggggacgtcctggatgaagaagtgataactcagtggtataatgaatctgttgctggtggcaaggagtcccaggtggtgaagaatgccaagccgttcgtggagtggctccagagcgcggattctgaatctgaggaagagtgatgcgccgaatctcctcccaatcatcgcctacttcgccttatcgtcttttcagtatttcgttcgtcatgagtatttccagttcgcgtcatgagtgcttcgagtttgtttgtgctgtgcgctttcttatctgtaatgttggtcaataaataaacccagagtcccagacagtcctcagagactatgtggtgtcacactccagctggagatctttttatttatcaaaccttaatgtgtt

SEQ ID NO: 399049 - DNA, 370 bp, Oryza sativa nipponbare
ccacgcgtccgcccacgcgtccgcgtccttcaccgttaaggcggagggcgtggccaagaacgcgccacccgagttccagaagaccaagctcatgacccgcctgacctacaccctcgacgagatcgagggcccgctcgaggtcagctccgacggaaccatcaagttcgaggagaaggacggaatcgactacgccgccgtcaccgtgcagctgccgggaggcgagcgcgtgccgttcctcttcaccatcaagaatctggtcgccaccggcaagccggagagcttcggcgggcccttcctcgtgcccagctaaccgggttcgtccttcctcgacccaaaaggggcgggtggctctaccggctacgacaacgct

SEQ ID NO: 399050 - DNA, 444 bp, Oryza sativa nipponbare
  unsure (1)..(444): unsure at all n locations
ccacgcgtccgctgggatcttgagtcaaagcacattgtgcaggaccttaagcccgagatccctgtctccaagaaccagatgctctactgcacaagcttgaactggagcgcagatggaagcaccctctatgctggttacacagatggaaccatcaggatctacaagatctcaggtttcagctacgccggctagagatggggagtgttgttttagttatcgcgttctggtaaacgactgtggtatcaccctagtgttctttttggctgtttgaaaggcattaatctgcctgagtacttctgcttaatttacccatctatgtagtagctccagtactgagctcatggatactgtggaatagggatctgttttgcaccatgttttgttttgacttccttttcaatatattgtctgatgaaccatgcgatcaaaananaaaaannnnaa

SEQ ID NO: 399051 - DNA, 477 bp, Oryza sativa nipponbare
  unsure (1)..(477): unsure at all n locations
ccacgcgtccgcccacgcgtccgctgtttcacatccattttttttggccgggagagagagcatctagctagggagagaaaggaagagacgagaggagagagatggccactgcttatgctcccatggcgagccagctgatgaagagcagcttggtgtgctccaagccgagggggctgtctggtgcttcgctgacaaggaggccccgcttcacagtcaaggccatccagtctgagaagccaacgtaccaggtggtgcagcccatcaatggcgaccccttcatcggcagcctggagacgccggtgacctccagcccgctggtcgcctggtacctctccaacctcccggcgtaccgcaccgccgtcagcccgctgctccgcggcattcaggtcggcctcgcccacagctactctctcgtcgggcccttcgcgctcaccggnccgctgcggaacacgccggtgcacgggccagccggcgccc

SEQ ID NO: 399052 - DNA, 432 bp, Oryza sativa nipponbare
ccacgcgtccgccacgcgtccgccaccaccacccgccgctcgccgctcgcccaccatggccatggcgacggcgctccgcaagctctcctccgacgccctccgccgccagccgctctcccgcatcaccccgctctactacatggcgtccctgccggcgacggaggagagatccggagtcacctggccgaagcagctgaacgcgccgctggaggaggtggatcccgagatcgccgacatcatcgagcacgagaaggcccgccaatggaagggtctggagctcatcccgtcggagaacttcacctcggtgtcagtgatgcaggcggtgggatccgtcatgaccaacaagtacagcgaggggtaccccggcgcgagatactacggtggaaacgaatacattgatatggccgagtcattgtgccagaaacgtgcttt

SEQ ID NO: 399053 - DNA, 459 bp, Oryza sativa nipponbare
  unsure (1)..(459): unsure at all n locations
ccacgcgtccggaaagcataagcaacacaagggattaactcatcactcacttagctaattaaatcttcgaccatgtcggacaagtgcggcaactgcgactgtgctgacaagagccagtgcgtgaagaaaggtaccagctatggcgtcgtcatagttgaagccgagaagagccacttcgaggaggtcgccgccggcgaggagaacggcggctgcaagtgcggcaccagctgctcctgcaccgactgcaagtgcggcaagtgaagtcacgaagcaaccgaacactcgccgccggcgagtcacctaccttaattagtccacaataaaaaccacccatatgagtgtggtttgtgtgtgtgctgattattgctgaattaaacccgtgtgttatcgattaattaagcagctggtcgcttcggcgactatgcgtgtatcaacgtatgaanttgggtgatgtgatgt

SEQ ID NO: 399054 - DNA, 452 bp, Oryza sativa nipponbare
  unsure (1)..(452): unsure at all n locations
ccacgcgtccgcccacgcgtccgcccacgcgtccgcggacgcgtgggcaattatattgagctgccattgcttctcacctctgctttgcatccatccatccatcagagatcaggtagaacagtgagagtgaggtgcagaaaaatttgagctgaagctgaggatggcaacatccatgatcacctcgccgctggtggcgccggcccgggccaagggccttccgtccatctcccgccggggatcctccttcgccatcgtctgcagcggtgggaagaagatcaagaccgacaagccctacgggattggaggtggcatgtcagtcgatattgatgcatctggcaggaagagcacggggaagggtgtgtaccaattcgttgacaagtacggcgcanacgtcgacggctacagcccaatctactcgccggaggaatggtctcccaccggtgacacctacg

SEQ ID NO: 399055 - DNA, 463 bp, Oryza sativa nipponbare
ccacgcgtccgaagaaagcataagcaacacaagggattaactcatcactcacttagctaattaaatcttcgaccatgtcggacaagtgcggcaactgcgactgtgctgacaagagccagtgcgtgaagaaaggtaccagctatggcgtcgtcatagttgaagccgagaagagccacttcgaggaggtcgccgccggcgaggagaacggcggctgcaagtgcggcaccagctgctcctgcaccgactgcaagtgcggcaagtgaagtcacgaagcaaccgaacactcgccgccggcgagtcacctaccttaattagtccacaataaaaaccacccatatgagtgtggtttgtgtgtgtgctgattattgctgaattaaacccgtgtgttatcgattaattaagcagctggtcgcttcggcgactatgcgtgtatcaacacattgatttggggtgatgtgatgta

SEQ ID NO: 399056 - DNA, 465 bp, Oryza sativa nipponbare
ccacgcgtccggcctccttagcagatctctatgtcaatgatgcattcggaacagcccacagagcacatgcatcaactgagggagttaccaagtttttaaagccttctgtcgcaggattccttttgcagaaggagcttgactaccttgttggagctgtttcaagccctaaacgcccatttgctgccatcgtgggtggttcaaaggtgtcatccaagattggggttatcgaatcccttttggagaaatgtgatatccttcttctaggtggtggtatgatcttcacattttacaaggcacaaggactctctgttggttcttccttggttgaggaagacaaacttgagcttgcaacatctctccttgcaaaggcaaaagaaaaaggtgtctcccttctgttgccatctgacgttatcattgctgataagtttgctcctgatgctaacaggccaagttgttccagcatct

SEQ ID NO: 399057 - DNA, 473 bp, Oryza sativa nipponbare
ccacgcgtccgcccacgcgtccgcccacgcgtccggccttgttaagcttgcagagacaattagtattgtgcatgacttgaggactaatatattattccatacaaggacatttgtgtaataacaccagataacttttatttgtagcttaactagttcttataggaatttattatacttcacttaagttgctctcttctaataaattttagatgcatgagatcactttttatagtagtcaccactagatgagcttttaaacaggagtctaactgtcctgcttttgttgcagctgatgaggttcttattataaaaagtttgacgcacaaagaaatcaatgcggtgataaaggaacttccaaacccagtttatctttttcaaggcatagtcttgagaagaggtgctaaagggactggtatgaagtcaatagaattggcccttccatgtgtgatattatcgacatgtatggattcaca

SEQ ID NO: 399058 - DNA, 456 bp, Oryza sativa nipponbare
ccacgcgtccgcccacgcgtccgcaggtagaacagtgagagtgaggtgcagaaaaatttgagctgaagctgaggatggcaacatccatgatcacctcgccgctggtggcgccggcccgggccaagggccttccgtccatctcccgccggggatcctccttcgccatcgtctgcagcggtgggaagaagatcaagaccgacaagccctacgggattggaggtggcatgtcagtcgatattgatgcatctggcaggaagagcacggggaagggtgtgtaccaattcgttgacaagtacggcgcaaacgtcgacggctacagcccaatctactcgccggaggaatggtctcccaccggtgacacctacgttggtggaaccaccgggcttctgatctgggccgtgaccctcgccgggctcctcggcggcggcgcccttctcgtctacaacaccagcgccc

SEQ ID NO: 399059 - DNA, 453 bp, Oryza sativa nipponbare
ccacgcgtccggccagacttccgaccacagcgggacgaagagagtgtcaacaacttaactaacggttgaccgtgctgctaagcacgtacagaattgcggtgcccgacgcacatcgtcaagcagggtaccagctatggcgtcgtcatagttgaagccgagaagagccacttcgaggaggtcgccgccggcgaggagaacggcggctgcaagtgcggcaccagctgctcctgcaccgactgcaagtgcggcaagtgaagtcacgaagcaaccgaacactcgccgccggcgagtcacctaccttaattagtccacaataaaaaccacccatatgagtgtggtttgtgtgtgtgctgattattgctgaattaaacccgtgtgttatcgattaattaagcagctggtcgcttcggcgactatgcgtgtatcaacgtatgaatttgtgtgatgtgatgt

SEQ ID NO: 399060 - DNA, 448 bp, Oryza sativa nipponbare
ccacgcgtccgcggacgcgtgggcgtctgcaagggtatcttccgcaccgacaacgtccccgacgaggacatcgtcaagatcgtcgacagcttcccaggccaatccatcgatttcttcggcgctcttcgtgcccgtgtttacgacgacgaggtgcgcaagtgggtgtcggacacgggtgtggagaacattggcaagaggctggtgaactcgagggagggcccaccggagttcgagcagcccaagatgacgatcgaaaagctcatggagtacggatacatgcttgtgaaggagcaggagaacgtcaagcgtgtgcagctggctgagcagtacttgagcgaggctgctcttggtgacgctaactccgacgccatgaagactggttccttctacggttctgcgccatccagctgaataaaagatctctagctattcgcatcccatcgatgca

SEQ ID NO: 399061 - DNA, 410 bp, Oryza sativa nipponbare
ccacgcgtccgcccacgcgtccgggctggtggtggtggagttcgcggcgagccacagcgtgaacagcagccgcatctacccgtgcatggtggagctgagccgcacctgcggcgacgtcgacttcctcctcgtcatgggcgacgagtcggacgccacccgggagctgtgccgccgggaggggatcaccgccgtgccccacttcaccttctacaagggcgccgagaaggtccacgaggaggaggggatcggccccgaccagctcgccggcgacgtcctctactacggcgaccaccactccgccgtcgtccagctccactcccgcgccgacgtcgagtccctcatctccgaccaccgcggcgagggcggcaagctggtggtgctcgacgtggggctcaagcgatgcgggccct

SEQ ID NO: 399062 - DNA, 370 bp, Oryza sativa nipponbare
ccacgcgtccgggtgcagcacaacgtgacgcagaaggggcccttcgacaacctgctgcagcacctgtctgacccgtggcacaacaccatcatccagacgctgtcaggctgagcgtgtgatcgatttcatcagggccagggcatctcaaggagcttgatgagttcaggctggtgaaaccgatgattgggcgatggaagatgttctcttcttgtttcttcttttttttttttggggagtatgcatgtataagatgttaatgaattggggggaggagagagagagagaatgatgtgatgagattcagacttactgtgtgtgttgtggtaattgtttcctgcatgcatggatctggatgcatgggtgagggggt

SEQ ID NO: 399063 - DNA, 412 bp, Oryza sativa nipponbare
ccacgcgtccgccacgcgtccgcccacgcgtccggcggctcgccatgctcgccgtcatgggagcttggttccaggcagagtacaccggcaccggccccatcgacaacctcttcgcccatctcgccgaccccggccacgccaccatcttccaggccttcacccccaaatgaggagttcttcaggtgttggagtgttagcaatggctgccaatggaggaagatgaaaagactgttcgtcgacgcgacttacctctcttttttgggatcggagtaggctgtgaatggtggtggtgtattgggatgtaattgtggatggagcactgcatgccttgttgattgtgtacctgtactatgatgtaaccgatgtaaaaaacaagttgatactcttttagaagtgaagttctcttcatcaa

SEQ ID NO: 399064 - DNA, 444 bp, Oryza sativa nipponbare
ccacgcgtccgcccacgcgtccgcccacgcgtccgaacttccccgtcttcttcatccgcgacggcatcaagttccccgacgtcatccacgccttcaagcccaacccgcgctcccatgtccaggagtactggagggtcttcgacttcttgtcccaccaccccgagagcctccacaccttcttcttcctcttcgacgacgtcggcatccccaccgattaccgccacatggacggcttcggcgtcaacacctacaccttcgtcacccgcgacgccaaggccaggtacgtcaagttccactggaagcccacctgcggcgtcagctgcttgatggacgacgaggccacgctcgtcggcggcaagaaccacagccacgccacccaggacctctacgactccatcgccgccgggcaacttcccgagtggaagctgttcgtccaggtgatcg

SEQ ID NO: 399065 - DNA, 396 bp, Oryza sativa nipponbare
ccacgcgtccggtcaagcaatacttcgtcaacactgacgacaccgtcacgcaaaagatcgttgttcataagaccagtgctaggggcacccatttccggcgagccgggccgcggcagcgggtgtacttccagtccgatgaggtcaacgcggccattgtcacctgcggtggcctctgccctggacttaacactgttatccgcgagcttgtgtgcggcttgtatgatatgtatggcgtcaccagcgtcgttggcatagagggtggatacaagggtttctattctagaaacaccgtcgcactgacaccgaaatcggtgaatgacatccacaagagaggtgggactgttcttggaacctccagaggaggccatgacaccggcaaaatagttgacagtatta

SEQ ID NO: 399066 - DNA, 463 bp, Oryza sativa nipponbare
ccacgcgtccgtgtgaagtggctgcagagcatcacgtcgctgccgatcctcgtcaagggcgtcatcaccgcggaggatgcgaggctggccgtgcactccggcgcggcggggatcatcgtgtcgaaccacggcgcgcggcagctggactacgtcccggcgaccatcagcgccctggaggaggtggtcacggcggcggcggggcgcatcccggtgtacctcgacggcggcgtccgccgcggcaccgacgtcttcaaggcgctcgccctcggcgccgccggcgtcttcatcgggaggccggtgtgttcgcgctggcggcggagggggaggccggggtgaggaacgtgctgcggatgatgcgggaggagttcgagctcaccatggcgctcagcggatgcacctcgctcgccgacatcacccgcgcccacatctacaccgacgccgaccggcttggccggccctttcc

SEQ ID NO: 399067 - DNA, 371 bp, Oryza sativa nipponbare
ccacgcgtccgcccacgcgtccggttcgaggaggaggaggaggaggagaagctagcggcggcggcggcaatggcgacgagcgggctgaggagctgcagcgcggtgggcgtgccgagcctgctggcgccgtcgtcgaacaggatccgcctgtttgtctgcgcctacaccaccatctacgggcgcgtcaccatgtccgccgagtggatgccgggctagccacgctccgcccacctcgacggctcctgtcccgttgacttcgtgttcgacccggtgggccttgccaccgttccggagaacttcgagctgtttatggtttctgaagtgtaccacttccttttttccatgctttttgtgcctggtgtgttgttgcc

SEQ ID NO: 399068 - DNA, 477 bp, Oryza sativa nipponbare
ccacgcgtccggcggtgggaagaagatcaagaccgacaagccctacgggattggaggtggcatgtcagtcgatattgatgcatctggcaggaagagcacggggaagggtgtgtaccaattcgttgacaagtacggcgcaaacgtcgacggctacagcccaatctactcgccggaggaatggtctcccaccggtgacacctacgttggtggaaccaccgggcttctgatctgggccgtgaccctcgccgggctcctcggcggcggcgccctcctcgtctacaacaccagcgccctcgccggctaaatttcacccaaatccagtctatgtatgtaacaccaagctgggtgtctgcatattcatctgtaatctaagatagccttcctctgaatgcgatgtgatgatgcccactgcttaatcaaactgcattgtgattaatctatgtaacactgtacttgcatgatgatgatatactacac

SEQ ID NO: 399069 - DNA, 414 bp, Oryza sativa nipponbare
ccacgcgtccgcccacgcgtccgcccacgcgtccgctcctcttcacaagcaagcgcgagaggagacacctccatcgatccatggccgccaccgcgaccgccgttgcggcgtctctgtccgtggccggggggctcgggaggccgctggctcgcgtctcgtcgccggcggcgccgatgaaagccgcctccccggcggcggcacggcgggccgtcgtcgtccgggcgtcgtcgtcgggggagccggtgaggagggagaaggcctcagctgctgccgcggcggcggggatagccgcggtggcggccgtggcggcggcgctggcggtgcccgaggtggcgggagcggcgccggcgctgtcgccgtcgctcaagaacttcctgctcagcatcgcgtccggcggcgtcgtgctcgtcgcca

SEQ ID NO: 399070 - DNA, 305 bp, Oryza sativa nipponbare
ccacgcgtccgctcaggtgtacggtgtaagagatggctggctcacatgcatgggttcacaattgtgctccgctacatgcgggccgcacgtgcatggccttcggacctactcctgttctagggccatggtgacgctaccattcgcgaggacgagcaagaagcggagccagggcattcggtgcgactacatcggctcagccaccaacgttatcattgtgacgaccacgactctgatgctgctcgcggggaggttacggctggcgccctcggcgaacacggaggcgacagcggggctgtatctggagg

SEQ ID NO: 399071 - DNA, 468 bp, Oryza sativa nipponbare
ccacgcgtccggctaattaagcaaaagaagaagaagagcaaagactaagaataagatgcaaaccgatgctagcagggacgcaggattgtaggacgcactgccctctgctgctaacggacgcaaactgcacattcaagctcctccacgagttgcgtcgcgctttcgtgccccaaccccaccaggcgcagtgcatgctgcagactttgactccaggtgtaacatgtggcggcttccaatcgaggcgatctacctcataagcttggcaggcctgcaaatgtgcagatctacccagaggccaacttctgatcatcgcttgctgctactgcatctcgggcaagtgcggaggaagttacagggactacctatcctacgacgagcccaccacggtgttccccgaggaggcgtagcgacgatctgtgcggagagctatgcaaggccacctgatcccattgccatccatggagaaat

SEQ ID NO: 399072 - DNA, 474 bp, Oryza sativa nipponbare
ccacgcgtccgtgcaaggagaaggagaaggtaggctccagccatggcttcccagctctccgccgccacatccgtgccgcagttccatggcctccggacctactcctctcctaggtccatggtgacgctgccatcgttgaggatgagcaagaagaggtcccagggcatccggtgcgactacatcggctcagccaccaacgttatcatggtgacgacgacgacgctgatgctgttcgcggggaggttcgggctggcgccgtcggcgaacaggaagtcgacggcggggctgaagctggaggcgcgcgactccggcctgcagaccggcgaccccgccgggttcacgctcgccgacacgctggccttgcggcgcgtcggccacattaatggcggtcgggcgcgtcctcggcctcaagaacaatcgcgtcctggaccagatcatcggctaatcaaattcattaagctagtcacacgaatc

SEQ ID NO: 399073 - DNA, 472 bp, Oryza sativa nipponbare
ccacgcgtccgcccacgcgtccgcccacgcgtccggccacctcttgttggaaaagggcaacatgcaaatattatgcagacttctggatttaagctgatgctgtttgaaattccttctggtttcgcgatgtttgaagtttcacaggaactgattgcacgccctaaggacatatgggcacgatttgcttatcaggatgacattacaaatgttattgttaccctgggttctattcagatccataacaaatctgttgctagggatattattgttggtcctggtgacgaactgaaagaatttatcctaagcttttgcactcacaactacttaattgttcaagatgtagagcttaaagatgttatcgagaagaaacttaatatctattggtactggaatcccactgttgtcggtgaattgacatggggactgaactatgtcctacataagttgtacctcaagagcaagtttaactcat

SEQ ID NO: 399074 - DNA, 466 bp, Oryza sativa nipponbare
ccacgcgtccgggaaaatgttgttgcaataactagtggagcaaatatgaactttgatcggctcagattagtaactgagctggctgatgttggtcgaaaacgagaagcagttcttgccacatttttgccagaggagcagggaagcttcaaaaagtttgcagagctggttggccggatgaatattactgaattcaaatacagatacgattgcaatgcaaaagatgcccttgtcctttacagtgttggcatctacactgacgatgaacttaaagcaatggtggaacgtatggaatcttcaaaattgagaacttgtgatcttactgacaatgatttggcaaaggatcatctaagatactttattggtggcaggtcagaagtaacagatgaacttgtttaccggttcattttcccagaaaggcctggtgcacttatgaaatttttggatgcattcagcccccgctggaata

SEQ ID NO: 399075 - DNA, 458 bp, Oryza sativa nipponbare
ccacgcgtccgcccacgcgtccgcccacgcgtccgcccacgcgtccgcacacaccccaccagcagcagcagcagtagctgagcttgaagcagcagagcgaggtagacatggccgccgccaccatggccctctcgtccccggcgctggccggcaaggccgccgcgaaggtgttcggcgaggggcgcatcaccatgcgcaagtcggcggcgaagcccaagcccgccgcgtcggggagcccgtggtacggcgccgaccgcgtgctctacctcggcccgctctccggcgagccgccgagctacctgaccggcgagttccccggcgactacgggtgggacaccgcggggctctccgccgacccggagacgttcgccaagaaccgggagcctggagggatccactccaggtggcgatgctcggcgcgcttggcctggtgttcccggagctcctcggccgcaacg

SEQ ID NO: 399076 - DNA, 311 bp, Oryza sativa nipponbare
ccacgcgtccgcccacgcgtccgcggtggctggcctacggcgaggtgttcaacggccggacggcgatgatgggcgtcgtcggcatggtcgccccggagctcctcggcaagctgggcctcgtccccgccgagacggcgatcccgtggttccagaccggcgtgatcccccccgcgggcacctacacctactgggccgacccttacactctcttcgtcttcgagctcgccctcgtcgggtttgccgagcaccgccgctttcaggactggtacacgccgggctccatggggaagcagtactttctcgggctcgag

SEQ ID NO: 399077 - DNA, 457 bp, Oryza sativa nipponbare
  unsure (1)..(457): unsure at all n locations
ccacgcgtccggagaagggaaaattcgatgaacttgtggaagataaaggagttaagatactaattgatccgaaagctcttatgcacgtgattggaaccaaaatggatttcattgatgatccacttaggtctgagtttgtgtttatgaaccctaattccaagggagaatgtggttgcggcgaatcatttatgacatcagcaaaattttgaattctcagcactaggtggccagtccatgcagcccaccggcttgaatcctttcgatgactggtcgcaaccgcaggagaaccggagtgggttgacgactacctgatggagggatcaggatgcggagccacgagatattggagaacgaagagatgcaacagatggtgcggttttgagcatgggtggcgcgtcaaccaaccttgacgaagacggctttgcatttnctaactacatgccatcaactcccccca

SEQ ID NO: 399078 - DNA, 468 bp, Oryza sativa nipponbare
ccacgcgtccgcccacgcgtccgccacgcgtccgcaagattatgcaaggtcttcttgatcagtatacggtggccgggaattctaaggcccttgatttggtggtcgggatggccaattacttcagtgaccgtgtgaagaatgtcatacagaaatacagtattgagaggcattgggcttcactcaatgaggagagtggtgggatgaatgatgtgctctatcagctctacacgataacgaatgatcagaagcatctgactctggcccatctttttgataagccatgttttcttgggttgcttgcagttcaggccgacagtatttcaggcttccattccaatacacacattccagttgttattggtgcacagatgagatatgaagttactggtgatcttctttacaagcaaattgcaacgtttttcatggataccatcaattcttctcatagctatgctactgggggcacat

SEQ ID NO: 399079 - DNA, 225 bp, Oryza sativa nipponbare
ccacgcgtccgcccacgcgtccgggaaaagaaagcaaaagcgattcccgtagtagcggcgagcgaaatgggagcagcctaaaccgtgaaaacggggttgtgggagagcaatacaagcgttgtgctgctaggcgaagcggttgagtgccgcaccctagatggctaaagtccagtagccgaaagcattactagcttacgctctgacccgagtagcatggggcacgtg

SEQ ID NO: 399080 - DNA, 466 bp, Oryza sativa nipponbare
ccacgcgtccgcggaggtgaacaaggataccttctggccaattgtcaagtcggcagggcccaaggtcgtcgtcctcgacatgtacacccaatggtgcggcccttgcaaggtgatggcaccgaaattccaggagatgtccgagaaggaccaggacgttgtgttcctcaaactcgactgcaatcaagacaacaagtctcttgcaaaggagctgggcataaaggttgtgccaacattcaagattctcaaggacgggaaggtcgtcaaggaggtcacaggtgccaaactagatgaattaatccaagcgatcgagacggtgaagtcaagctgaggaatgccctgaaaatttgcatcagttagcttgttgtcactagtgtacgttatgggtgaaccaccagttattgaagtgggtattcgacatggagacaaacagttaatctagttcttctgcctatgatgatttatcaag

SEQ ID NO: 399081 - DNA, 356 bp, Oryza sativa nipponbare
  unsure (1)..(356): unsure at all n locations
ccacgcgtccgcccacgcgtccgcccacgcgtncgcaagaacggggtgaagttcggggaggcggtgtggttcaaggccggcgcgcagatcttctccgagggggggctcgactacctggggaaccccaacctggtgcacgcgcagagcatcctcgccatctgggcggtccaggtggtgctcatgggattcgtcgagggctaccgcgtcggcggcggcccgctcggcgagggcctcgacaaggtgtacccaggcggcgccttcgacccgctcggcctcgccgacgaccctgacaccttcggcgagctcaaggtgaaggagctcaagaaccggccgcctcgccatgttctccatgttcg

SEQ ID NO: 399082 - DNA, 420 bp, Oryza sativa nipponbare
ccacgcgtccgagctgttctccgccatggtggtgcgcaagccggcgcacctgttcctcgacgagctcggcgtcgcgtacgacgagcaggaggactacgtcgtcatcaagcacgccgcgctcttcacctccaccgtcatgagccgcctcctggcgcgccccaacgtgaagctgttcaacgccgtcgccgtcgaggacctcatcgtcaaggagggccgcgtcggcggcgtggtcaccaactgggcgctggtgtcgatgaaccacgacacgcagtcgtgcatggaccccaacgtgatggagtccagggtggtggtgagctcctgcggccacgacgggccgttcggcgccacgggcgtcaagcggctgcaggacatcggcatgatcgacgccgtgcccggcatgcgcgccctcgacatgaacac

SEQ ID NO: 399083 - DNA, 401 bp, Oryza sativa nipponbare
ccacgcgtccgcagtgatcctctacaatcatcgactttcagcaaattaagatggctgctgccttctcctccaccgttggagctccggcgtccactccgaccaacttcctggggaagaagctgaagaagcaggtgacatcggcggtgaactaccatggcaagagctccaacatcaacaggttcaaggtgatggccaaggagctggacgagggcaagcagaccgaccaggacaggtggaagggtctcgcctacgacatctccgatgaccagcaggacatcaccagggggaagggtttcgtcgactcccttttccaggctcccacgggtgatggcacccacgaggccgtcctcagctcctacgagtacctcagccagggtctcagaacgtacgacttcgacaac

SEQ ID NO: 399084 - DNA, 366 bp, Oryza sativa nipponbare
ccacgcgtccgcaataaggattttggttgatcactccatagttgagggcttcgctcaaggagggaggacatgcattacctcgcgtgtgtatcccaccaaagccatctacgagtcggccaaaatctttcttttcaacaatgccacaaatgttagagtcactgccaaatcgctaaagatttgggagctgaactctgcttacatccgtccatatgtagactagatcatttttaatgtaatgggaatgaatgatttgtctacatttgttagttatgtttttataggctaatttatcttttttgcttccttctttatgtcaaactacaactatgacatattactagcaactgaaataaaacataatcaatc

SEQ ID NO: 399085 - DNA, 450 bp, Oryza sativa nipponbare
ccacgcgtccgcccacgcgtccgggagagagagcatctagctagggagagaaaggaagagacgagaggagagagatggccactgcttatgctcccatggcgagccagctgatgaagagcagcttggtgtgctccaagccgagggggctgtctggtgcttcgctgacaaggaggccccgcttcacagtcaaggccatccagtctgagaagccaacgtaccaggtggtgcagcccatcaatggcgaccccttcatcggcagcctggagacgccggtgacctccagcccgctggtcgcctggtacctctccaacctcccggcgtaccgcaccgccgtcagcccgctgctccgcggcaatgaggtcggcctcgcccacggctacctcctcgtcgggcccttcgcgctcaccggcccgctccgcaacacgccggtgcaacggccagccggcgccc

SEQ ID NO: 399086 - DNA, 434 bp, Oryza sativa nipponbare
ccacgcgtccggctcaccactgctagcttgggaagaggaggaggagcttgagcttggagagagacaacaatggcggctcaggctcttctctctgggaggcagctgctggggaggccattgcaatcttcagtctccaggtcttcttcctccaggaaggcacccttcatggtcagggcagaggccactccccctgccaagcaaggtgctgacaggcagctgtggttcgcatccaagcagtccctgagctacctggatggcacgcttccgggagacttcgggttcgacccgctggggctatcggacccggaggggaccggtgggttcatcgagccacggtggctggcctacggcgaggtgttcaacggccggacggcgatgatgggcgtcgtcggcatggtcgccccggagctcctcggcaagctgggcctcgtccc

SEQ ID NO: 399087 - DNA, 342 bp, Oryza sativa nipponbare
ccacgttaattttttccatgggctttaattaacaactaattaaacagggtccgtttttacacctacacgtacacagtacatatacacttgaaagaaagtttaaatgttgcccaagcacaacaatggcggcaaaacctgggaagatcgatcgatcctggaaattttacttttcggcggcgtcgttaacaaacttgccggtcccgggtttgatggcggcaataaaaaaaaagacaactttaaaaaggacgagcggttcaatctttttgatggggaccccgttctcaattttaacctgcccaagggcccccttgccggtgatgatctccccaatgatggaaaagg

SEQ ID NO: 399088 - DNA, 416 bp, Oryza sativa nipponbare
gactcagaaatgctagcgaagggtacgaagaagatagatgctgtgaaacatgacaaatcaagcttacaagttccaaccctgactccatcataagtccatatgacataatataatagaagtggtgcatacattcgacatcaaaactacggagaacttccaggggttctcagggaacagcagttcaacttgcaaactcaacatgaatacggctccttttaagacattttcagccagaagtaaaatctaagagagataagcaacatcctccacacttcaagagtctttagatgctgctcgggtacatgaagactctgaccttgcgccccatggaagcggtgggcagggtggacttgaacttggcgcggactactcctgagttgccatgggggcgggtgacctttccccatatgcagcgg

SEQ ID NO: 399089 - DNA, 472 bp, Oryza sativa nipponbare
  unsure (1)..(472): unsure at all n locations
ttttagcgaaatgagtcacatagtatatagcgagataatcatgtgcattgtctcacttatgatatatagcaagcagggagcaaagcagntaatatcatcctaaatctgattttttttcagctcgatcgagctgaagcctaatccatgacccctcgtcatcagctagcattagacccctacatatatagtaagaccgaaggggatcttaattatgaatcatgcatgtaatgttgcacgttggagcatgcatgtatatgctccatcatgagatactgagattgagacgaatggaaggtcagtcccattggatagtcctgtggaaggtccagtcggaggggttgacggtggattggccgctggaggagacgagatcatagggtgagtcctccccaaactctgtcggcatcgccttccagtgcaggcatggatcccactctgcctccttgaggatcctcaagatctcttccacaac

SEQ ID NO: 399090 - DNA, 495 bp, Oryza sativa nipponbare
ttttagcgaaatgagtcacatagtatagagcgagataatcatgtgcattgtctcacttatgatatatagcaggcagggagcaaagcagttaatatcatcctaaatctgattttttttcagctcgatcgagctgaagcctaatccatgacccctcgtcatcagctagcattagacccctacatatatagtaagaccgaaggggatcttaattatgaatcatgcatgtaatgttgcacgttggagcatgcatgtatatgctccatcatgagatactgagattgagactaatggaaggtcagtcccattggatagtcctgaggaaggtccagtcggaggggttgacagtggattgtccgctggaggagacaagatcataaggtgagtccttcctaaactctgtctgcatccactttcagtgcatgcatggatcccactcttctctctttaagatccttaggatctttttcacaacaatttggatcccttcttaataca

SEQ ID NO: 399091 - DNA, 483 bp, Oryza sativa nipponbare
atatgtatcgaacaatgtcctctccggttgtcgaaatgcaaataacatcatcgggggatatgatcatcagttcacgagaacagaggaagaaacaaaagctaaaaattaaaaccatcaacagcccgatcgagtttgcattactagatacacacattgcagccttccttccctctctccatgtatcgatatatcaacccggccacgcacaaaacatttgttcattccctactcgagctgcgcgtaccacaccccttggatcttgacatccttgggcaccttggcgccgaggtctgtgtccgacggctgcacgctctcgaagacgccaatcacctcgccggtctctggcttgctcttggtgacgctcaacgtgatgttgcccgtcgacgactaggcgttcttgacgttcttcttagcgagctcctcctcgtctcctctgccttcggcggagagcgccacagcgttgtcgtagccggtagagccacc

SEQ ID NO: 399092 - DNA, 470 bp, Oryza sativa nipponbare
ttgataagtgaataaacgtcatgcattaaccacgcaggttatcaaggcagtttacaggggcagcacaactgttgcgcactacggactatgacgcacacagagcggcagcatcacaaggattgcgacaccataatagttattaaggattcactcatgcaccaacagaaacatcctgcatggtatcaaaagacccagcatatgttacgcaaacatcagggcttgggttgattcaacactatgctgaacggcctaatagtagaacatgatctcttgcctggcagctttgttccaagagccctttcaagcttaccggtgatctgctgggtcggaatagctttacctgactcggactcctggatcacctggggcttctcattgatcatctgcgcaagctgtgcctgggtcatcttcttgtccagccttgcttgcatgaggtttttcttgaggtgacttgagacacgctcatgggc

SEQ ID NO: 399093 - DNA, 473 bp, Oryza sativa nipponbare
atatatagccggagctgccatgtatttcattcacatatgcctcacccaacaacatatagtcgtagcagataccactcttacatcaagtcagagagagatcaggtgaaacaaaaacaaaagcagagcacggccggtaaaatcaaaagacgatgaacaaactgggaacacacgaaacaaggtgggagacatcatcgaatcagagatgaacaattaaacaaggctatatatgacgatgacggcttagttgccaccagactcctcgcagcccgggggcttgtaggcgatgaagctgatgagctgcacctgcctgacgttgtcgaagccgatgatacggacgaatgcatcagggtacgccttcttggcctcctcgagctccttgagcacctgggtggcgtcagtgcacccgaacatgggcagcttccacatggtccagtacctgccatcgtagtatccgggggatctgtgggtctcac

SEQ ID NO: 399094 - DNA, 333 bp, Oryza sativa nipponbare
ttatccagccaaaaagggaagtgtatttataaaagagtgtctacttcttcatcacatcatacacatcatatcccaggttcacaatcaacaaagcatgcattgctccatcaacaattacatcccaatacaccaccaccattcacaacctactcacctcctaaaaaacacaggaaatttggtggaaacaaacaaactattcaacttcctccatttggacatccttgataacactccaacacctcaacaactcaccattctgtttttaatccctggcactttatggcctttaccggattagctaaatcaaccaaatggtttttgatcaaaccattc

SEQ ID NO: 399095 - DNA, 493 bp, Oryza sativa nipponbare
ttttcgagctatgaacttggttatttgcatcttggagggccaagattcaaggaaccactgcatttggaagcactgacttgttggcaagttgcaaacattatctgaccgaaaaaaaccaccagtttgatactattcgaaatcactgcaatgagtgagtgacacaatggagcaacaccaagagtgcactgcaaagccggttttgatccttacaccacacaaggcgagagggagacacacccgttgataatgttgttacaacatcgacatgtccatcgatatctgaggtgctacatggcgtacctctgagtccaggtccttgctgtgttctcgtacttgtgcctatctgtcttgtacatgtgggcgatctcagggaccagaggatcatcagggttcggatcagtcagcagggaacagattgacagcaacaccttggaaatggttagtgctgggctccattggtccttaaggatgtcaaggcaaatgctcccgttgc

SEQ ID NO: 399096 - DNA, 460 bp, Oryza sativa nipponbare
gatgaacactcccagggtacggcagcacaccatccatatatccatgcaggcagcctgtttgtgcccttgtgcagatgcatttcatttatacaagtagaaggcactcaaatcagccaccacatgaacacacacatgttccatcatcgatcgatctacacatgcatcacccggtcatgcacttacaaacaaaagatctacttgaagaagtacgggaggtcgagcacgtagaggaggaagtaggcccagaggacgccggagatgccgccgaagaagaagccgccggtgaacttggcccagccgtcggcggtctgcagcttgtcggcctccttcttgcggccggtgagcgtcagcgtcggcgccgtggacggctcgccctcgccgaaggaggcgacgccgtacatggtgaggcagacgctgaggatggcgacaaggcctgcggcgccaagggcgccggcctggc

SEQ ID NO: 399097 - DNA, 452 bp, Oryza sativa nipponbare
tttttatatttttccctttcggggggggaaagcagcagctgacacataacttgcaaaccccaacttttttcagtttctgaattctggatggatcatatcagattcatcacagcatcgtacaatctgtgcaagcattggtacatcgagcgatggagagagagagtagtctacaatggcgggtgggccattcacgagcccggcgtgaacttggtggcgtaaacccaggcgttgttggcgacggggtcggcgaggtggtctagcaggttctccaaggggcccttgccggtgactatggcctggaccaagaagcccaacatggagaacatggcgaggcggccattcttgatctccttgaccttgagctcggcgaaggtgactgggtccccggcgaggcccagcgggtccaaatactggccgccggggtagaggtccgtgccttccccgacacccgg

SEQ ID NO: 399098 - DNA, 474 bp, Oryza sativa nipponbare
  unsure (1)..(474): unsure at all n locations
gcaaaccccaacttttttcagggtctgaattctggatggatcatatcanattcatcacagcatcgtacaatctgtgcaagcattggtacatcgagcgatggagagagagagtagtctacaatggcggctgggccattcacgagcccggcgtgaacttggtggcgtagacccaggcgttgttggcgacggggtcggcgaggtggtcgagcaggttctccaaggggcccttgccggtgacgatggcctggacgaagaagccgaacatggagaacatggcgaggcggccattcttgatctccttgaccttgagctcggcgaaggtgaccgggtcgtcggcgaagccgagcgggtcgaagtactggccgccggggtagaggtcgttgccgtcgccgacgccggggaggccgttgatgcggtagccctcgacgaggcccatgaggacgacctggaatcccagcacggcgaggatgctct

SEQ ID NO: 399099 - DNA, 356 bp, Oryza sativa nipponbare
ataattaattcacaacaccatggttcattgatcaggttcagaacctgcacagaaatacacactaccggtacagatctcaccctctctccaatactcgtacatccatccacgcggtccacacgaatacgtacatctatacggtacacgtacgtacatctactgcaccgggtacacacacgcacactctcctgcagagacgcgcatcgtcgtcaacctagctagcttagctgaaggcgatgcgtcgccatggcagcacggcggcggcggcgctcacttgccggggacgaagttggtggcgtaggcccaggcgttgttgttgacggggtcggcgaggtggtcggcgagcggacgcgtgg

SEQ ID NO: 399100 - DNA, 470 bp, Oryza sativa nipponbare
tgggatgtgataaccggggatggaaatatcgatccatgagagtatgtatgtcagttcgaaccacttcactcgcggcagcgaggaagtcgaaaagcttattcacgactcatctagcaaaacttgacgataagcctatctcaagttcttcatacaagcattgacattgcaaagttacaccgagaggtctgaaacaaaagtgcagactgctgatggagacaagccgaattagcttacgcttcatcaagggcaagaacacctgggagggtcttgccttccagcaactccaagctagcaccaccgccggtggagatgtggctcatcttgtcggccagcccagccttctcgaccgcagcaacggagtcaccaccaccgatgatggtcgtggcgccctttgtggtagtaagatcagccaacttcttggcaattgcatcagtgcctgctgcaaacttctcaaactcaaagactcccat

SEQ ID NO: 399101 - DNA, 436 bp, Oryza sativa nipponbare
tttacgttgatacacgcataggggggggggcgaccagctgcttaattaatcgataacacacgggtttaattcagcaataatcagcacacacacaaaccacactcatatgggtggtttttattgtggactaattaaggtaggtgactcgccggcggcgagtgttcggttgcttcgtgacttcacttgccgcacttgcagtcggtgcaggagcagctggtgccgcacttgcagccgccgttctcctcgccggcggcgacctcctcgaagtggctcttctcggcttcaactatgacgacgccatagctggtacctttcttcacgcactggctcttgtcagcacagtcgcagttgccgcacttgtccgacatggtcgaagatttaattagctaagtgagtgatgagttaatcccttgtgttgcttatgccggacgcgtgg

SEQ ID NO: 399102 - DNA, 489 bp, Oryza sativa nipponbare
  unsure (1)..(489): unsure at all n locations
taaacaagctaattttataattaattgggaacaccatatttcattgatcaggttcagaacctgcacagaaatacacactaccggtacagatctcaccctctctccaatactcgtacatccatccacgcggtccacacgaatacgtacatctatacggtacacgtacgtacatctactgcaccgngtacacacacgcacactctcctgcagagacgcgcatcgtcgtcaacctagctagcttagctgaaggcgatgcgtcgccatggcagcacggcggcggcggcgctcacttgccggggacgaagttggtggcgtaggcccaggcgttgttgttgacggggtcggcgaggtggtctgcgaggttctcgagggggcccttgccggtgacgatggcctggacgaagaagccgaacatggagaacatggcgaggcggccgttcttgatctccttcaccttgagctccgcgaaggcctccgggtcgtcggcga

SEQ ID NO: 399103 - DNA, 474 bp, Oryza sativa nipponbare
  unsure (1)..(474): unsure at all n locations
gtcaaaaaggattccaatgagggtttatgtaaatggttgatttctattangtaaccgttcagcaaactgtcggtttgggcagcagagagttcagcaaaggggtcaggtgcttgggacccgagtatctgacatggcatacatggaaagaaaaggtgctgcttcttgtcttaacatgaatagtagaaggtatatatccccgaagtactggttttagaccatgtatgttaacatatgtcgtactattgatgagaaactgttcagtgaatcatgtagcctctgcagttgatcagctggagatcacttcctcaagctctcaatgatgtaggcgccgtagaggtccattgagtacttgattgcgttgatggcatcttctgctgggagaaactcattgacagcaacttctttggtctcattcttcttggaggcttcaaagaagcggcggatctcttgaaggcggtgaggggggatttcctt

SEQ ID NO: 399104 - DNA, 429 bp, Oryza sativa nipponbare
attatatgtatgtaaatattaggttattgtaaatcattttgaggagctagactagcgtgccttattaacaaggagatatgtaccattacatgatgattaacatataaatctgtagctacatggaattaaggtagtggagcagaggaggaaggatgatagaagactccaattctccatggatgggaatgggatcaggtggccttgcagaactctccgcccagatcgtcgcacgcctcctcggggaacaccgtggtgggctcgtcgtaggataggtagtccctgtcgacttcctccgccgccgcacgagaaacagcaacagcagccgatgatgagagcttggcctctgggtacatctgcacgttgcacgcctcgccgccgatgaggtcgcacgcctccatcggaaacaccgagatgttagagctgtagtcc

SEQ ID NO: 399105 - DNA, 483 bp, Oryza sativa nipponbare
tggagggaagagattatgacgtgggtgttaagagcagaggccattgagatggtacataaccaaactgtaaaataaaaatatatagcatattatatattgatatatcatcaacatagcccaaaacaaagctgcatactattattataggcagcaatccaccagcacgatgcttgatcttagcttagttgccaccagactcctcacaacctgggggcttgtaggcgatgaagctaatcaactgcacctgcctgacgttgtcgaagcctatgatacagacaaaggcatcggggtaggccttcttggcctcctcgagctccttgagcacctgggtggcatcggagcaatcgaacatgggcagatttcacatggtccaatacctgccatcgtagtacccgggagacctgtggttctcacggtagacgaatccaaccttgctgaactcgaggcaaggcacccacttggatcgaagcaggtactcgatct

SEQ ID NO: 399106 - DNA, 405 bp, Oryza sativa nipponbare
  unsure (1)..(405): unsure at all n locations
ttttctcttgaaacagcgatggtgcgttctttgcttccggcaatanctataccagtatgttgttacaaaacaaatgtttggatctcctttctttacacgtgtgttacatactcatacgtaaggattaacagttactcgtacaggttaataacccttccaaaaagaagatggcaatgtggtggtaagtggtaactaggcagcacacgcatgcatggctagctaccagctctccacaggctgcagataatgctgcagcgactgaaccttcttcctgcccctgagcttccggaacgcgaccagctcgatctgccggatcctctccctgctcacccccatcagccgaccgatgtcctgcagcgtccgcagcctgccgtcgtccatcccgaacctgtacctgatcacctg

SEQ ID NO: 399107 - DNA, 479 bp, Oryza sativa nipponbare
gctctgaaacaattctctatatgtgctgtcttatgccctgaattcttcagtctttcagtttcagagtgtagtgcagatgcagaaatgcccatattcaggaagacatctaaggtatgatctgctataaaagagtatccatctcacagattcataaccctcaaaaagggttacttatgcagtgaaaagggttttatgctctttcatacagtgtgacagtgtgtgtacatataatttggaaaaacaaagtgaagatggatttacagcagcgtttctcagatacagcggacttatagctacaagctgatcacacaagtgaactttgctgctgatgatgatatggatcatgttgttatagcttacgcccaccacgggttgtcgccggtcctgaagtcggtctccacccacggcacgaagagaaccttgccgtcgtcgacgtcggcgtgcaccaatgccagcgacaggggagcaggtccacggac

SEQ ID NO: 399108 - DNA, 492 bp, Oryza sativa nipponbare
ttatagtagaaagcaaccgtatgtgtgtctacattgaaatatagaagatgtacattgaaatgtgtcaagaagagatgtacgagcaccctcatggagagggatttttagaaggtccattgcatggtttcacaagttatgcaatgaccatcctactttcttctagctggaatatttccaaaactagttacaagaaatgcgaggatgcccattggcattgatatggtatggtgatgaagagattcacgaaatatgaatgtggagctcattaaacttttgccgcttcagtaggtgcaccggccctctcagcaataatctgctcatagagatctctaatcttcagtcctacgatagtttggaagagacctgttccattggtgctgccggggaagtctgcatgctttagcatttgctgtgtgacctctgcataaaatttggttgagaggttgcttaaatggctctcaacatagataagctcatctagtctgtcaaatt

SEQ ID NO: 399109 - DNA, 453 bp, Oryza sativa nipponbare
ttaacacattaaggtttgatagataaggagatctccagctggagtgtgacaccacatagtctctgaggactgtctgggactctgggtttatttattgaccaacattacagataagaaagcgcacagcacaaacaaactcgaagcactcatgacgcgaactggaaatactcatgacgaacgaaatactgaaaagacgataaggcgaagtaggcgatgattgggaggagattcggcgcatcactcttcctcagattcagaatccgcgctctggagccactccacgaacggcttggcattcttcaccacctgggactccttgccaccagcaacagattcattataccactgagttatcacttcttcatccaggacgtccccatcatacagggccttgagaacaatcggcacctccttcacagcttcggggcttgacttggcgccgcggacgcgtgg

SEQ ID NO: 399110 - DNA, 420 bp, Oryza sativa nipponbare
aaaaccatcaacagcccgatcggggggggattactagatacacacattgcagccttccttccctctctccatgtatcgatatatcaacccggccacgcacaaaacatttgttcattccctactcgagctgcgcgtaccacaccccttggatcttgacatccttgggcaccttggcgccgaggtctgtgtccgacggctgcacgctctcgaagacgccaatcacctcgccggtctctggcttgctcttggtgacgctcaacgtgatgttgcccgtcgacgacgaggcgttcttgacgttctccttagcgagctcctcctcgtctcctctgcctccggcggggagcgccacagcgttgtcgtagccggtagagccaccgcggccctttgggtcgaggaaggacgaaccacggtagctgggca

SEQ ID NO: 399111 - DNA, 406 bp, Oryza sativa nipponbare
ggggatcgcatggttcatcacacaatatattgaaaaggaagtcaaaacaaaacatggtgcaaaacagatccctattccacagtatccatgagctcagtactggagctactacatagatgggtaaattaagcagaagtactcaggcagattaatgcctttcaaacagccaaaaagaacactagggtgataccacagtcgtttaccagaacgcgataactaaaacaacactccccatctttagccggcgtagctgaaacctgagatcttgtaaatcctgatggttccatctgggtaaccagcataaagggtgcttccatctgcgctccagttcaagcttgtgcagtagagcatctggttcttggagacagggatctcgggcttaaggtcctgcacaatgtgctttgac

SEQ ID NO: 399112 - DNA, 326 bp, Oryza sativa nipponbare
gtgcatgcaggcagcctgtttgtgcccttgtgcaaatgcatttcatttatacaagtagaaggcactcaaatcagccaccacatgaacacacacatgttccatcatcgatcgatctacacatgcatcacccggtcatgcacttacaaacaaaagatctacttgaagaagtacgggaggtcgagcacgtaaaggaggaagtatgcccaaaggactcccgagatgcctcctaaaaaaaagccgccggtgaacttggcccaaccgtcggcggtctgcagcttgtcggcctccttcttgcggccggtgagcgtcagcgtctgcgccttgga

SEQ ID NO: 399113 - DNA, 388 bp, Oryza sativa nipponbare
ttttccgcaatcatgcgagttggtcacagaatacaccaaagtatgtgtaactgcttgtccaagaagatagtgaaggttaatatagcattagcataacatcttacaggaggggtctacgataagaactattgacaaagtttccacacgctgtaaaatgccaggggtcccttttacataagatggcactccatggatatatgtttacaccgacttgttcttgcaagaattccaacagtcacctcaggaattcagcttgatgccttttcttttacccttgctgttccattcaaaggttcttagttcttggacttcatggtttctttctcaaacccaattgtggggaactgttttgcatattcctccacatcatggccaagttttgcaatct

SEQ ID NO: 399114 - DNA, 230 bp, Oryza sativa nipponbare
tttatgtaatctatggagttagtatcaacaattaatctccaaattcaagtatcaagtgtagtatatcatcatcatgcaagtacagtgttacatagattaatcacaatgcaggttgattaagcagtgggcatcatcacatcgcattcagaggaaggctatcttagattacagatgaatatgcagacacccagcttggtgttacatacatagactggatttgggtgaaattt

SEQ ID NO: 399115 - DNA, 459 bp, Oryza sativa nipponbare
  unsure (1)..(459): unsure at all n locations
actaggcaaaccacacggatagacgattgattaatttcactgagaatancacgggtacatcacatcacacaaattcatacgttgatacacgcatagtcgccgaagcgaccagctgcttaattaatcgataacacacgggtttaattcagcaataatcagcacacacacaaaccacactcatatgggtggtttttattgtggactaattaaggtaggtgactcgccggcggcgagtgttcggttgcttcgtgacttcacttgccgcacttgcagtccgtgcaggagcagctggtgccgcacttgcagccgccgttctcctcgccggcggcgaccttctcgaagtggctcttctcggcttcaactatgacgacgccatagctggtacctttcttcacgcactggctcttgtcagcacagtcgcaattgccgcacttgtccgacatgggcgaagatttaatt

SEQ ID NO: 399116 - DNA, 467 bp, Oryza sativa nipponbare
gggggaaacaacgtaagggatggataattatgtttcctgaggtaaggtatatccaacaaacacaaaatgctgggaagttattcaaacgatttccagcatctctataaaacattggtctcttacatttcgagtggttgaagaggtgcgagaaaggagtagaatatagcaagtttagaatggtacatgaagaagatgcaacaaaatgaaacttagcctcatacggccacagtgacagcttcatcaagtgcaatgactccaggaagttcctttccttccaacagctccaagctagcaccacctcccgttgaaatgtggctcataacatctgcaactcccaccttctcaacagcggcaacagaatcacctcctccaataatggttgtaacacccttgccgctaaggtctgccaacttctttgcaatagcctcagttcctactgcaaacttgtcaaattcgaagacacccat

SEQ ID NO: 399117 - DNA, 383 bp, Oryza sativa nipponbare
  unsure (1)..(383): unsure at all n locations
tcaagtatcaagtgtantatatgatcgtcatgcaagtacagtgttacataaattaatcacaatgcagtttgattaaccagtgggcatcatcacatcgcattcagaggaaggctatcttagattacagatgaatatgcagacacccagcttggtgttacatacatagactggatttgggtgaaatttagccggcgagggcgctggtgttgtagacaaggagggcgccaccgccgaggagcccggctagggtcacggcccatatcagaagcccggtggttccaccaacgtaggtgtcaccggtgggagaccattcctcccgcgagtagattgggctgtagctctcaacatttgcaccgtacttgtaaaccaattggtacacaccc

SEQ ID NO: 399118 - DNA, 355 bp, Oryza sativa nipponbare
gggtggagactcatgtataggatagcccatatctttatattatattattattaacaaaaacttgtcatgcccagctatggcttgggcgcgatctgatacacagaacaaagagaaaacataaaaaggggaaataattaatagcaagcgtcaagccggcctgcttaaaaggtgtaaaggcaggtgccgtcgtctctcctcgccgttgggtcgaagttcttggcaacagggtcggtgcaaccttccggcacaggcaggttacctgcttgctgtgctccttgccctcctcctcctatgcaggccggctacgatgcatctatgggatgcgaatagctagagatcttttattcagctggat

SEQ ID NO: 399119 - DNA, 392 bp, Oryza sativa nipponbare
atccacgcgtacctaaacttaaatcctctaaagctgcccccctttttttttttttttatctaaaacactactactaccatgttggtggtttattctcatacaagaactccacatcacaaattcaccacttaactcaccccattaaccattcatacaaatccattcacacacgaaacaattaccacaacacacacaataactcttaatcttatcacatccatccatttctctctcctccccccaatttattaacatcttatacattcatactacacaaaaaaacaacacactaatcaacaaaacaacatcttacatttcccaatcatttgattcaccacccttaactcattaacctcctttctataccccttccctcattaaatccatcacac

SEQ ID NO: 399120 - DNA, 411 bp, Oryza sativa nipponbare
tgatgaagagaacttcggttcgaaaagagtatcaacttgttttttacatcggttacatcatagtacaggtacacaatcaacaaggcatgcagtgctccatccacaattacatcccaatacaccaccaccattcacagcctactccgatcccaaaaaagagaggtaagtcgcgtcgacgaacagtcttttcatcttcctccattggcagccattgctaacactccaacacctgaagaactcctcatttgggggtgaaggcctggaagatggtggcgtggccggggtcggcgagatgggcgaagaggttgtcgatggggccggtgccggtgtactctgcctggaaccaagctcccatgactgcgagcatggcgagccccctgacgcgtgggcggactcgtggcggactcgtgg

SEQ ID NO: 399121 - DNA, 460 bp, Oryza sativa nipponbare
taaatacttaatagtaatagacgctttgatggagtattacaacatgcagcagtggcattaatacgccagtacattaattaagttacacatatgcaggctccattttggtttcttttaatttatcgtattacagaatttctgtagccttgctgatgatcacttggatatcatgtactagtaattaacaataggatgcatacaaaagatggcccaacgacaacagaagatgcgtgcatctgacattgtctggccttatttggttggtagtactccaattaattaacaagagatgatgcattcttgtgccttagtttcttcacatgcttggcttcacgttgagcctattcgcaatcttcacccccaacgactcatcacactgggagaggtagttgacccagatggcgcggagctcaggggagaccttggggtgcgcgagctcgccggcgaagcggcggatgaa

SEQ ID NO: 399122 - DNA, 493 bp, Oryza sativa nipponbare
cgaggatgaaaccagccttgctatatgacacggtaattctattacagtagcttccccacaatgtcatttcagaaaaaaaggacaaaaagaaagctacaattacatgcttatatatatatatatatatatatatatatatatatatatatatattctcgttggttctcacactggcgctgctgtcccgttgcacttggaggagtccttcaccggcgagctctcgccttcgaggagctgcgtgttgtgcaggtggtgctcgtcgtcgtcgtgcttgaggtgctcgacgtcctcgtggctcaggaagcatggctggttcgtcgagcacagcaccctcgcccacatcctgtccgtgatcaccaccttgttctgcttctccgtgattctgtagaacgggatatacgcgtgcctgccgttgaccggcgcgacggtgaagccggtgtaccccgccatggcgccgtggagggcgctgtgagctagcagggtgcagtagacg

SEQ ID NO: 399123 - DNA, 458 bp, Oryza sativa nipponbare
aaaaattaaaggagtatataaaccggggccgtaaatatcttaaggcgagatatacagatgccaaataggtgtacagtactcgaaattacaaagattataccagtataattaatcgttgggattaagagcatgaacgacccagttacgaggggtgcacggagtacgtgtgttgcttgcgcgcgtgtggatcgacgagattcttttgcaaaaattacctaattaattaatcggcgtgctctctggcgtcgtcgatattgtttattgtttggctagagttcgccggcggcggcggcggcgaggtcctcacaacctggggaaggggcgggcgaggcggtcggcgtcggtgtagatgtgggcgcgggtgatgtcggcgagcgaggtgcatccgctgagcgccatggtgagctcgaactcctcccgcatcatccgcagcacgttcctcaccccggccttcccct

SEQ ID NO: 399124 - DNA, 461 bp, Oryza sativa nipponbare
  unsure (1)..(461): unsure at all n locations
tagtttaactaanaccaggtgggtttcgtgtttgatacaaaaattaagatggacggattcacaagagagcaccctctacttaagctttacattacaaggccaaccagcagctgcctgccggccgaccactgcgtgcgcacgcgcgcgcaataatcaaccaatcacacacagtacgcacgcacataaaaaccacccatagccttcacgtacgcccggacgcacgcaccggttcgtgccaagctcaagggtagatggttctcgggatgatgatgtcgccgatgttgttgtgccacgggtccgagaggtggctggccaggttctccagtgggccggtgcccgggtacgccgactgttggacgcagaaacccacaaaagccagcatggccaatcgcccgttcttgatctccttgagcttgtactcctcgaacttgacggggtccttggagaagccgagggggtcg

SEQ ID NO: 399125 - DNA, 383 bp, Oryza sativa nipponbare
cggggtgggttgaatctatggatttagtatcaacaattaatctccaaattcaagtatcaagtgtagtatatcatcatcatgcaagtacagtgttacatagattaatcacaatgcagtttgattaagcagggggcatcatcacatcgcattcagaggaaggctatcttagattacagatgaatatgcagacacccagcttggtgttacatacatagactggatttgggtgaaatttatccggctagggctcttgttttgtacactaggagggcgccaccccctaggagcctcgctagggtcactgcccaaatcaaaagccccggggttccaccaacgtaggtgtcaccggtgggagaccattcctccggccagtagattgggct

SEQ ID NO: 399126 - DNA, 182 bp, Oryza sativa nipponbare
aacaaggaaatatttaggattgcatgataattaacatataaatctttacctacatcgaattaacgtagtggagcataggaggaaggatgatagaatactccaattctccatggatcggaatgggatcaggtggcctttcagaactctacacccagatcgtcgcacgcctactcaaagaacac

SEQ ID NO: 399127 - DNA, 478 bp, Oryza sativa nipponbare
aacgggaatgcaaacttattatcattattcggcagattcttggtgaagtacaacagagaatcagatcaataagtacaacacatacattacattacatactcaacacatcaacaaatggcacacccaaaattctggagtacataaatagatgaggcgacgcctttattccaaaagatgaagcaaatgaccctactacctgaatggatcgatcttggtaagcctcaccaacttatgggagcaaaggaactttaacagtcggtccggttttgattcgagtcagtggcattagatcttcggatcgcgcaagaggagccggtatatctcgttgttctgctccgacatgtactcgtacccaagattgtcagcacggctcttgaattcgtcaaacttctccggcggcacttgtatgccaaccaaaacattcgctccggtttcaccctgtgcacggtaatggaaaaggctgatattccagcggggg

SEQ ID NO: 399128 - DNA, 402 bp, Oryza sativa nipponbare
  unsure (1)..(402): unsure at all n locations
aattcacaacaccatatttggttgatcaggttcagaacctgcacagaaatacacactaccggtacagatctcaccctctctccaatactcgtacatccatccacgcggtccacacgaatacgtacatctatacggtacacgtacgtacatctactgcaccgngtacacacacgcacactctcctgcagagacgcgcatcgtcgtcaacctagctagcttagctgaaggcgatgcgtcgccatggcagcacggcggcggcggcgctcacttgccggggacgaagttggtggcgtaggcccaggcgttgttgttgacggggtcggcgaggtggtcggcgaggttctcgagggggcccttgccggtgacgatggcctggacgaagaagccgaacatggagaacat

SEQ ID NO: 399129 - DNA, 422 bp, Oryza sativa nipponbare
  unsure (1)..(422): unsure at all n locations
agctagcaaatcgatccatgcgaccatgcgtgcaaatcagttggagcacaaatttacatgttacacccacaccctacacccatgcataataatacatcgtatatacgtacgtacatacatacccctctcgatcacacgcaccatcgatcgtacaaagttgcgtacatacatacgtacacacatatacgcatacgcacgtacatacatacataattaaaaactcgtaattaattaaatacgtagttgatggcatctctaatggaacttgaggctggtgaggatgttgttgtggacgggatcagcgaggtgatcaagcaggttctgcacggngccaaccccggtgaagagcgcctggacggagaagccgaggaaggcgagcatggcgagcctgccattcttgatctccttgagcttgagctcct

SEQ ID NO: 399130 - DNA, 481 bp, Oryza sativa nipponbare
gtgtcgaatgcttgtgtgaattttgaaacaattaaatgtacacagttctggttaaggttcgtacaggattcaactaagcatcacactaaacaaacaatgatgaaacaactatacaaaaaaagagtagacgagaatccgtgtccataattaagaacccagggcctcaaggaagcgtcctccaaacaggagctgctaagcccatttttcagatccttaaaacagcagcagcagcaacaccaatggagctttgttagaccagcagttaggatgtttgctagtcctcgagctcaacaagctgagctcttctctcggcagctttcttcctgacaaagatgccccagcgcatagctgccttgatcttgagccacccgacgacggctttcccaggtgggcgggcacggtcatccccaaagttgaagttggggggagttgatggcatgtagttaggaaatgcgaagccgtcttccgtcaggttggttga

SEQ ID NO: 399131 - DNA, 390 bp, Oryza sativa nipponbare
ggggggggaacaaatcggccccagtataaaacaagcttgatcttctcaagctagtgtggtggtgtaaaattacaatcatgatcaagagagtggtacacgcattaatttaattacggttgctgcatgcagctgagctgcgtagtgatgaatctgtatatgtctaggtgaccttgacgccgttgtttctgaggatctcgccgatgagctcccccctgccggagcccacctagcggcctacgatgtacccgtccctgatgaagaggaaggtgggcacctcaacaacgtccatgttgcggtggaactccatgcagctgtcgttcttgcccccgttcatgcgggccaagaccgtggggcccgccatggtgcgctacagctttacgacggtggggt

SEQ ID NO: 399132 - DNA, 150 bp, Oryza sativa nipponbare
ataattaaggtgggggatttactgtatataaattattgataaaaggtgtgcttacaataaagtataagtttcaagagaaacgtgttttcaggttacagattattacatgatggtggtacacgaattgggcggagatagaaatcatatatg

SEQ ID NO: 399133 - DNA, 481 bp, Oryza sativa nipponbare
  unsure (1)..(481): unsure at all n locations
gggatgggcctcatcctttttattcattcctcccagagagacggatccatggaagttttcttgccctcatcaggcaagcagagcacacacacacggtggcagtggaagtgctatgaacaagacgctaatcaacatccagagctaaaacaaacaaggggatcaatgcaaatcccgaaaaaaaaacacaggggaaaggccacatcttcttctcgtccccaactcctccgtgtcaccaccacgtcttgcggatttttttttaccctgttctattcgctcaggcgtccacgatctcgccgtcgtccttcgacgccaggatcagcttcgggtgcgccgccgccgccgncgnctttttgatcgtgccgtcgatggcgttcggccggccgagcgccttcagcgccaggtgcgccgccttctggccggagatcatcatggctccgaacgtcgggcccattctcggggcgccgtcgatctcggcgacctc

SEQ ID NO: 399134 - DNA, 298 bp, Oryza sativa nipponbare
  unsure (1)..(298): unsure at all n locations
ggcaggcaaattacatagtattatacggattataaagaagaaaccaccaccattacactaatacacacaaagctcgatcaagcagcttaattaatttcttccacatgtacgacatgcatnctctnctcactccgtgatcaatttaagatgnattcttgcagctccagctcgacgacgatccatccgaattaaaatcatttgacctcctggatctcgtccagggcgtagttgttggtcgacacgccggcgtagttcaccttggcgaaccgaaccaccaccgggtagcgagtgttgggat

SEQ ID NO: 399135 - DNA, 384 bp, Oryza sativa nipponbare
atccatgcaggcagcctgtttgtgcccttgtgcagatgcatttcatttatacaagtagaaggcactcaaatcagccaccacatgaacacacacatgttccatcatcgatcgatctacacatgcatcacccggtcatgcacttacaaacaaaagatctacttgaagaagtacgggaggtcgagcacgtagaggaggaagtaggcccagaggacgccggagatgccgccgaagaagaagccgccggtgaacttggcccagccgtcggcggtctgcagcttgtcggcctccttcttgcggccggtgagcgtcagcgtcggcgccgtggacggctcgccctcgccgaaggaggcgacgccgtacatggtgaggcaaaccctgaggatg

SEQ ID NO: 399136 - DNA, 339 bp, Oryza sativa nipponbare
ggtgtggggttatccatgcaggcagcctgtttgtgcccttgtgcaaatgcatttcatttatacaagtagaaggcactcaaatcagccaccacatgaacacacacatgttccattatcgatcgatctacacatgcataacccgggaatgcacttacaaacaaaagatctacttgaagaaatacgggaggtcgagcacttaaaggaggaagtaggcccagaggaccccggaaatgccccctaagaaaaagccgccggtgaacttggcccagccgttgggggtctgcagcttgtcgggcttctttttgcggccggtaaggcgtatagtcggctccgtggact

SEQ ID NO: 399137 - DNA, 409 bp, Oryza sativa nipponbare
aagcaaatggatccatgcgaccatgcgtgcaaatcaattggagcacaaatttacatgttacacccacaccctacacccatgcataataatacatcggatatacgtacgtacatacatacccctctcgatcacacgcaccatcgatcgtacaaaggtgcgtacatacatacgtacacacatatacgcatacgcacgtacatacatacataattaaaaactcgtaattaattaaatacgtagttgatggcatctctaatggaacttgaggctggtgaggatgtttttgtggaccggatcagcgaggggatcaagcaggttctgcacggggccaacccccgtgaaaagcgccttgaccgagaagcctaggaaagccagcattgccagccttccattcttgatcttcttgagc

SEQ ID NO: 399138 - DNA, 446 bp, Oryza sativa nipponbare
ccacgcgtccgcccacgcgtccgtgctactggacatactctactactactagccagtaagctagctaactaactacgtggctatggcccccaccgtgatggcctcctcggccacctccgtggctccattccaagggctcaagtccaccgccgggctccccgtcagccgccgctccaccaactcgggcttcggcaacgtcagcaatggcggaaggatcaagtgcatgcaggtgtggccaattgagggcatcaagaagttcgagaccctatcgtacctgccaccactcaccggggaggatcttttgaagcagatcgagtacctgcttcgatccaagtgggtgccttgcctcgagttcagcaaggttggattcgtctaccgtgagaaccacaggtctcccgggtactacgatggcaggtattggaccatgtggaagctggccatgttcg

SEQ ID NO: 399139 - DNA, 460 bp, Oryza sativa nipponbare
ccacgcgtccgggacttccttctccgctcaaacttcctcaatgacccagctgccacatatgctgtagcagacaacattgcaaaatctgccgatgaggcagtggatgcaaagcttagatctttcatgctcgagcattggtcagaggcagctttttctgagggattcgcgtctgcgcaagagcacttcgttaacttcatgaggataatggaaaagggtgagtcgccgatctgcctgagggacctcccacttgagctggtgattgccatggcctacctaccactgtacagggaatgcgtggagtcaggtgggcggctattgccgcagaagctgagagggcagcttgttgaggcggctggtagactcgagggccggcaactcgacagggctagccaaggcacagagctcctggccatcttggagcaccacctcccgtgtttcatgatccagacttgaaaggtca

SEQ ID NO: 399140 - DNA, 464 bp, Oryza sativa nipponbare
ccacgcgtccggagcgaaccgggaggagaaagtccaaaccctcgcgaaggcagagtcggggatagggatatcgccgaggtgggagaaggcgacgtcgccgacatgaagctgttcgtgaagaccctgaagggcaccaacttcgagatcgaggcgagccccgaggcgtcggtggctgaggtgaagagaatcattgagagtactcaggggcagaatgtgtacccggcggatcagcagatgctcatacaccaagggaaaattctcaaggatgatacaactttggaaggcaacaaagttgctgagaacagcttccttgttataatgctgtctaaggccaaagcatcatcaagtggagcttcaactgcttcaaaggcacctgtgagccagtctcaaccagcaactccagttgcctcagttgcaagaacaccacctccacaagcacctgttgttacacctgaaccggcacc

SEQ ID NO: 399141 - DNA, 252 bp, Oryza sativa nipponbare
ccacgcgtccgcccacgcgtccgctccgatcgcaaatactctctctcgccgatagcagcagcagcagcaatggccgccctcgccgccgcatccaccgccttcgccgccaagccgcgcctggcgcgcgcgccgtcgtccccggccgcgcggttctccgtgtcgtgctccgcgactggctacaacggcggcgccggctagatggcgcagtctcttgctgtgacacggtcgacgcttttctttgttcattattct

SEQ ID NO: 399142 - DNA, 467 bp, Oryza sativa nipponbare
ccacgcgtccgctcgagcaaagaaggagagagcttggtgagctgcagagatggccccctccgtgatggcgtcgtcggccaccaccgtcgctcccttccaggggctcaagtccaccgccggcatgcccgtcgcccgccgctccggcaactccagcttcggcaacgtcagcaatggcggcaggatcaggtgcatgcaggtgtggccgattgagggcatcaagaagttcgagaccctctcctacctgccaccgctcaccgtggaggacctcctgaagcagatcgagtacctgctccgttccaagtgggtgccctgcctcgagttcagcaaggtcggattcgtctaccgtgagaaccacagatcccccggatactacgatggcaggtactggaccatgtggaagctgcccatgttcgggtgcactgacgccacccaggtgctcaaggagctcgaggaggccaagaaggcgt

SEQ ID NO: 399143 - DNA, 461 bp, Oryza sativa nipponbare
ccacgcgtccgatgaattccttcttcttgatgaaggaaaatggcagcatgtcaaggacaccacaaccattggagaggggaaaatgttctctcctggtaacctgagggctacatttgataatcctgaatatgacaagctcatcaactactatgtcaaggagaagtacacattgcgttacactggaggaatggttcctgatgtcaaccagatcatagttaaggagaagggcatcttcaccaacgtgacgtctccgacagccaaggccaagctgaggctcctgttcgaggtggcgccgttgggtttcttgatagagaaagccggcgggtacagcagcgacggcaaacagtcggtgctggacaaggtgatcaacaacctcgacgagcggactcaagtggcctacggttccaagaacgagatcatccggttcgaggagactctctacggctcgtcgaggctcaacg

SEQ ID NO: 399144 - DNA, 459 bp, Oryza sativa nipponbare
ccacgcgtccgcccacgcgtccgcgccgctgcccagagctggtgcttcgccactgtcaccccgcgctcccgcgccacagtcgtcgccagcctcgcctccccatcaccgtcctcctcctcctcctcctccaacagcagcaacctcccggcccccttccgcccccgcctcatccgcaacacccccgtcttcgccgcccccgtcgcccccgccgcgatggacgccgccgtcgaccgcctcaaggatgggttcgccaagttcaagaccgagttctatgacaagaagccggagctcttcgagccgctcaaggccggccaggcacccaagtacatggtgttctcgtgcgccgactctcgcgtgtgcccgtcggtgaccatgggcctggagcccggcgaggccttcaccgtccgcaacatcgccaacatggtcccagcttactgcaagatcaagcacgctggcgtc

SEQ ID NO: 399145 - DNA, 454 bp, Oryza sativa nipponbare
ccacgcgtccgcccacgcgtccgcccacgcgtccgcggacgcgtgggcgccggcagacgtcgtgcggcagacgcgggagctcctcatcttcctcgacctacactccggatcacgcggcggcgacgccaagcgcgaggagaagatggcagaattaagcaaaaatatcagggagttgaagtcaattctttatggcaatggtgaatctgaacctgtgactgaggcttgcgtgcaattgacccaagaattcttcagagagaacactttacggcttctaattatttgtcttccgaaattgaacttagagaccaggaaagatgcaactcaagttggtgcaaacttgcaaaggcagcaagtctcctcaaaaatagttgcatctgagtatctagaagcaaataaagatcttttggacaccttaatttctgggtatgagaatatggacattgctttgcattac

SEQ ID NO: 399146 - DNA, 458 bp, Oryza sativa nipponbare
ccacgcgtccgaagaagtactcgagcaaagaaggagagagcttggtgagctgcagagatggccccctccgtgatggcgtcgtcggccaccaccgtcgctcccttccaggggctcaagtccaccgccggcatgcccgtcgcccgccgctccggcaactccagcttcggcaacgtcagcaatggcggcaggatcaggtgcatgcaggtgtggccgattgagggcatcaagaagttcgagaccctctcctacctgccaccgctcaccgtggaggacctcctgaagcagatcgagtacctgctccgttccaagtgggtgccctgcctcgagttcagcaaggtcggattcgtctaccgtgagaaccacagatcccccggatactacgatggcaggtactggaccatgtggaagctgcccatgttcgggtgcactgacgccacccaggtgctcaaggagctcga

SEQ ID NO: 399147 - DNA, 462 bp, Oryza sativa nipponbare
ccacgcgtccgcccacgcgtccgcccacgcgtccgcccacgcgtccgcgttcatgggatccggcaaggcaagaccggttcatcaagagatggatcgacgcactctctgaccctcgcctcacccacgagatcaggagcatctggctctcctactggtctcaggctgacaggtctctgggtcagaaactggcgagccgtctcagcgcgaagccgagcatgtaaggagatcgatcagcgttgcaatctgcttcagtcacggaaggcctcagcctcactctatcggataataattgctactcatactctagcaataccgatcgatcgagtctattttggaaagaggacatatatgatttctatcaccgcacaattcgtgtaccaccatcatgtaataatctgtaacctgaagacacgtttctcctgatacttcatcattattgtaagcacaccttttatcaataat

SEQ ID NO: 399148 - DNA, 391 bp, Oryza sativa nipponbare
ccacgcgtccgcccacgcgtccgcccacgcgtccgcccacgcgtccgcccacgcgtccgcaggttgcgaggagtctggtggcaactaagctaagatcaagcatcgcgctggtggattgctgcctataataatagtatgcagctttgttttgggctatgttgatgatatatcaatatataatatgctatatatttttattttacagtttggttatgtaccatctcaatggcctctgctcttaacacatatgtaataatctcttccctccctctccggccggttttattgtaagagtactacaattatcgttgggtgaggatatgtgaaaacaaagctccggctatatacacacaagatatgtatctagagcatatctgataaattcgtcgac

SEQ ID NO: 399149 - DNA, 465 bp, Oryza sativa nipponbare
ccacgcgtccgcagccggcgacctccctccgcctccttcccgaccctttcgtagctttctcaatcccctccccccctcctcgcggcgcgcgcacggccggctgagaaggtttccgagggggccgacctccttctagccatgtacaacaattatggaaattctcctggaatgcagatgcctcctatagggcagatgcctcctgccgcagggcagatgccctcggcaaatcctcagcctggccaatttggcaatccattttatggtgcgagctcaggtctaattaaaactgggttaggagcatatggagagaagttccttggttccagttcggaattcatgcaaagcaatattaacagatacttctccaacccgcagtactatttccatgtgaatgatcagtatgtcaggaacaagctgaaagttatacttgttcccgtccttcacaaggggcattggactaggata

SEQ ID NO: 399150 - DNA, 408 bp, Oryza sativa nipponbare
ccacgcgtccgtgtgactacacccgcttcgcttcctcccctctctaagccggggaagctaagccatggcgtgcgtcaccgcccgcaccccggtcgcagccctccgctcgtcggcgtcgctcaagtctaccttcctagggcaatccttcacccgcctcgcccgcgcaccgactacgaggcgtaatgttcgggcggaggccaagggagagtggctccccggcctcccttctcccacctacctcaacggcagcttgccaggcgataacgggttcgacccgttgggtctggcggaggacccggagaacctgcggtggttcgtgcaggcggagctggtgaacgggcggtgggcgatgctgggggtggccgggatgctgctgcctgaggtgctgacgaagatcgggttgatcga

SEQ ID NO: 399151 - DNA, 470 bp, Oryza sativa nipponbare
ccacgcgtccgcggacgcgtgggcgcccacatcacacgcagaaatccgcatcaacagccagccatggcgtccacgctgaccaacgtcggcctgtctaccccggcggcggcggcgtcgtccctcgttaggccggtcgccggagctggacgcgtggtgtttccccgtgttggccgcggcgggttcgcggcggtgagggcgagcgggccggcgacgccgccggacatctcggacaagatgtcggagagcatcgacaaggcgaaggaggcgtgcgcggaggacacggcgagcggcgagtgcgcggcggcgtgggacgaggtggaggagctgagcgcggcggcgagccacgcgcgcgacaagctcaaggagacctccgacccgctcgaggcctactgcaaggacaacccggagaccgacgagtgccgcacctacgacaactgattcttaccattatatgtttgctaatctctctg

SEQ ID NO: 399152 - DNA, 461 bp, Oryza sativa nipponbare
ccacgcgtccggccgatgtaccagcggccattcatgaaggggaagctctacatccacttctccgtggaattccccgactctttgaaccctgaccagtgcaaggccctggagaccgtcctcccgccaaggccggtgtcgcagtacaccgacatggagctcgacgagtgcgaggagaccatgccgtacgacgtgaacatcgaggaggagatgaggaggcggcagcaacagcagcagcaggaggcatacgacgaggacgaggacatgcacggcggcggcgcccagcgcgtgcagtgcgcgcagcagtaagcagcaagcagcgccgtgcatacatatctgcacggctttgacggcggcgacaaattgtttctttccgctctaggggcgataatactatcaagttttccatgttaggcatatgatgatgtgatactacttttggtcttttatactgcgtattaatg

SEQ ID NO: 399153 - DNA, 435 bp, Oryza sativa nipponbare
ccacgcgtccggcagttgagctctttttccactacgcactagtagtagcactctggtattctcccatggcgactgcgaccgaggaggttgccgctgcggctgctgccgccggcgaggcgccgccgccgccgccgccagcggtggtagaggaggcgaaggaggctttggaggcaccgaagccggaggaggcgccgaaggctgaggagggggaggagaagaaggcggagggtgagaaggagaaggagaaggcgaagaaggagaggaaaccgagggcgaggaagccccgatcggcggggccacaccacccgccctacttcgagatgatcaaggaggcgatcatggcgctggacgggaacggcaaggcgggatcgagcccgtacgcgatcgccaagtacatgggggagcagcacatgggggttctcccggcgaactacc

SEQ ID NO: 399154 - DNA, 455 bp, Oryza sativa nipponbare
ccacgcgtccgcggacgcgtgggcacgagctcaaaagacacacattccaaaagcatctgtggccatctcctcctagtcctaggctcgcgtcaatggcggcgtccaccatggcactctcctcccctgccgccctcgccggcaaggcggtcgccaatgccaaggtgttcggcgagggccgcgtcacgatgcgcaagtcggcggccaagcccaagcccgccgcggcgtcggggagcccgtggtacggcgccgaccgcgtgctctacctcggcccgctctccggcgagccgccgtcctacctcaccggcgagttccccggcgactacggctgggacaccgccgggctgtcggccgacccggagacgttcgccaagaaccgggagctggaggtgatccactgccggtgggccatgctgggcgcgctcggctgcgtcttcccggagctcctcgcccgcaac

SEQ ID NO: 399155 - DNA, 394 bp, Oryza sativa nipponbare
ccacgcgtccggacattcttaattatttggccccgttgctagcacgaaattacccaaagagcatcaagaagcaagcttgtctaattgtttctaatatctccactggcagcaaggataatattcaggcagtaattgatgcagatgttataagccctctcattttcctattaaagacctccgagaaggatatcaaggaggaagctgcttgggctatatcaaatgctgcgtctggtggttcaaatgatcaaattcaatatttggtgagtcgaggatgtttggagccactctgcaatgttctcacttaccaagatgctgacctagtatatgcgtgcctggaaggtcttcaaaacatacttcaggcgggtgcagtggggaagcaggggcagggttccac

SEQ ID NO: 399156 - DNA, 392 bp, Oryza sativa nipponbare
ccacgcgtccgcccacgcgtccgcccacgcgtccgacgacgcttacctgtcgagactggagataccataaaaatactgatagtgacacatgcaatgactagggatgagaaaggaaatgtcaagacgctagatgacctgcacactatgacgggactgatagaacaaagcgagttacgctgtactaaaattcgctatcactgaactgaaacacagaaccggatgtacactacgtctcatgacaacacgggcagggatatgaggcatgctggcaagctgcatatctataagccactatggccatagataaaggtggatcgtagcatgaataacacatgatacgtacgaataagtacattgataattggatatacgatccaatatccatgagtaga

SEQ ID NO: 399157 - DNA, 465 bp, Oryza sativa nipponbare
ccacgcgtccggtgcggttctccaagaggagggcggggctgttcaagaaggcgttcgagctcgccctgctctgcgacgtggaggtggcgctcctcgtcttctcccccgtcggcaagctctacgagtactcctcctccagcattgaaggtacctatgatcgctatcagcaattcgctggagccaggagagacctgaacgaaggaagtacaagcatcaacagtgatgaaaatgcaagtatacactccaggcttagggacataacggcctggtctctccaaaacaatgctgacgagtcggatgctaatcagctagagaaactggagaaactgctgacaaatgctttgagggatacgaaatcaaagaagatgttggcaaaacaaaatggtgaagggagtaggagcagagcaaactccagtggctctagggggcaggaggaaggaagtgcatgagcaggaagcacaggtg

SEQ ID NO: 399158 - DNA, 385 bp, Oryza sativa nipponbare
ccacgcgtccgcgaaggctgaggagggggaggagaagaaggcggagggtgagaaggagaaggagaaggcgaagaaggagaggaaaccgagggcgaggaagccccgatcggcggggccacaccacccgccctacttcgagatgatcaaggaggcgatcatggcgctggacgggaacggcaaggcgggatcgagcccgtacgcgatcgccaagtacatgggggagcagcacatgggggttctcccggcgaactaccggaaggtgctcgccgtgcagctgcggaacttcgccgccaagggccggctcgtgaaggtgaaggcctcgttcaagctgtcggctgccgaggagaagaaggcgacggcggcgaaggcggccaggtccaaggcg

SEQ ID NO: 399159 - DNA, 436 bp, Oryza sativa nipponbare
ccacgcgtccggggagatcaagaacctggtggcgaccaagaatggcggcgagctcgagcttggatttggtgaagaccatggcggcgtccgggttcctcctccgctgccctgcggcgcccagcgctgtcccactctggggaaggagcgggaggggcggcggcggcggcctcgccttctccgcttcgtcctccaatggtgcagctgttccatcctccctaagtgactcagagaagaagggccctgtggtgatggaaattccactggacaagattaggaggccactgatgcggacgcgtgccaatgatccagccaaggtgcaagaactcatggacagtatccgtgtcattggcctccaagtacctattgacgtactggaggttgatggagtctactatggtttttctggatgtcaccgctatgaggctcaccagcgcct

SEQ ID NO: 399160 - DNA, 435 bp, Oryza sativa nipponbare
ccacgcgtccggtcattttacttgagctaatctcaggccatgaaccaatctcaaatgacaactttgggctccactgccgtaacattgttgaatgggctagatcgcacatggagagtggggatatccacggcatcattgatcagtcgttagacgcagggtacgacctgcagtcggtgtggaagattgcggaggtggcgacgatgtgcgtgaagcccaagggggtgctgaggccgtccatctcggaggtgctcaaggagattcaggacgccattgccatcgagctgcaacgggagctgccctccagcattcaccacctcatgtccaagacgtctccctccgaagccgtcaacacgacaggcagtctgcaagacctggagcagaatgcgtcgtttgatgagctgctcatgcgcccaggtctcaagtagaggtagcaca

SEQ ID NO: 399161 - DNA, 447 bp, Oryza sativa nipponbare
ccacgcgtccgcgcgccgcgcactccttgcactagcccatggcgacggctatgatggctgcgaccgccacctcgtgctcccctcgccgcgcgccggtcgtcgcgtcgtcgtccgtgcagccgcccaggcggcagcagcagcagcaaccgcggaggggattgaagcagctgccggggctcgtggcgacggcggccgtggccgtggccgcggcgccgctaccggcgctggcggagcagatggagaaggcggcgctgttcgacttcaacctgacgctcccgctgatcgcgaccgagttcctgctgctgatggtggcgctggacaagctctacttcacgccgctgggcaagttcatggacgagcgcgacgccaagatccgtgccgagctcggcggcgtcaaggacgcgtccgaggaggtgcggcagctggaggagcaggccggcggcgtgc

SEQ ID NO: 399162 - DNA, 460 bp, Oryza sativa nipponbare
ccacgcgtccgtgagctaaaaatttctatccacacaagccgatcgaacgcagcttaaggagtgcgagttggttgtcacagtagcctatggagtaaatacatatcctacagttagaggatttactgcaattggtactggaggagatgattttgtccaggccatggtggttgcagttgaatcagtactggaagaacaaattccaaaggctcagatttcccataaagtgtcgtcgaaggggaaatatgtttctgtaaaaattgggcccattcctgtggtttccagcgagcaggtccaagcagtgtataatgccatgaagaaggacgaaaggatgaaattcttcttgtaaacattaacagtacagtattattcttgtaactctagcatattgccacacgattggccatctttataagcaaaagccaagaaatttcaccatttcttggccaaacattaaaaagat

SEQ ID NO: 399163 - DNA, 421 bp, Oryza sativa nipponbare
ccacgcgtccgcccacgcgtccggatttgccatgcgtgcgtgcagtgacttcgggttcgacccgctgggcctcgccaccgtgccggagaacttcgagcggttcaaggagtcggaggtgtaccactgccggtgggccatgctcgctgtgcctggggtgttggtgccggaggcgctggggctgggcaactgggtgcaggcgcaggagtgggcggcggagcccggcggccaggccacgtacctcggcaacccggtgccatggggcacgctgccgacgatcctggtcatcgagttcgtcgccatcgccttcgccgagcaccagcgcaccatggagaaggaccccgagaagaagaagtaccccggcggcgccttcgaccccctcggctttttcaaggaccccgtcaaggtcgaggaggtcaagctt

SEQ ID NO: 399164 - DNA, 469 bp, Oryza sativa nipponbare
ccacgcgtccgcgccatctctctcagctctcacagctcactgcatcaatggccgcggccaccatggcgctctcctccccggtgatggcccgcgcggcgccgtcgacctcctccgcgctcttcggcgaggcgcggatcaccatgcgcaagaccgccgcgaagcccaagccggcggcgtcgtcggggagcccgtggtacggcgccgaccgcgtcctctacctcggcccgctctccggcgagccgccgagctacctcaccggcgagttcccgggcgactacgggtgggacaccgcggggctctccgccgacccggagacgttcgccaagaaccgggagctggaggtgatccactcccggtgggcgatgctgggcgcgctcggctgcgtcttcccggagctcctcgcccggaacggcgttaagttcggcgaggcccggtggttcaaggcgggctcgcagatcttcagcgaggg

SEQ ID NO: 399165 - DNA, 470 bp, Oryza sativa nipponbare
ccacgcgtccgcccacgcgtccgcgccgatgtcgccaagcagatccagcagatggtgcggttcatccgccaggaggccgaggagaaggccagcgagatctccgtctccgccgaggaggagttcaatattgagaagcttcaacttgttgaagctgagaaaaagaagatcaggcaagaatatgaacggaaagagaagcaagtcgaagttagaaagaaaattgagtactctatgcagctgaatgcttctcgcatcaaagtgcttcaagctcaggatgatttggttaattccatgaaagaggatgctacaaagcaactcctgcgtgtcagccacaaccaccatgaatacaagaaccttttgaaagaactcgtcgttcagggtttgcttcggttgaaagagccagcggtacttctccgttgccgcaaagaagaccatcatcatgtggaatctgtactgcattcagcaaagaatga

SEQ ID NO: 399166 - DNA, 468 bp, Oryza sativa nipponbare
ccacgcgtccggttcttctatgcctcaagtgcatgcatttaccctgaattcaagcagcttgaaactaacgttagcctgaaggaatctgatgcctggcctgctgagcctcaagatgcctatggtttggagaagcttgcaactgaggagctctgcaagcactacaccaaggactttggcattgagtgccgtgttggccgcttccacaacatatatggcccctttggaacatggaaaggtggccgtgagaaggcaccagctgcattctgcaggaaggctcagacttccactgacaggtttgagatgtggggtgatggcctccagacccggtccttcacattcatagatgagtgtgttgagggtgttctgaggttgacaaagtcggacttccgtgagccagtgaacattggaagcgatgaaatggtaagcatgaacgagatggctgaaatcattctcagcttcgaggatagg

SEQ ID NO: 399167 - DNA, 401 bp, Oryza sativa nipponbare
ccacgcgtccgcaagatccctcccgtcgtcgtcgctgtcggcccctcgggtctttctagcgcaggagacatggcggaagagactccagttgaggccccacctgccccggttcttggagagccgatggacctgatgactgctctgcagcttgtgatgaagaagtcaagcgctcatgatgggctcgtgaaggggctccgtgaggcggccaaggccattgagaagcatgccgctcagctttgcgtgcttgctgaggactgtgaccagcctgattatgtcaagttggtcaaggcactctgcgctgagcacaatgttcacctcgttaccgtgcctagtgctaaaactcttggcgagtgggcagggctttgcaagattgattctgagggcaaggcgaggaaggtcgt

SEQ ID NO: 399168 - DNA, 460 bp, Oryza sativa nipponbare
ccacgcgtccggaaagcataagcaacacaagggattaactcatcactcacttagctaattaaatcttcgaccatgtcggacaagtgcggcaactgcgactgtgctgacaagagccagtgcgtgaagaaaggtaccagctatggcgtcgtcatagttgaagccgagaagagccacttcgaggaggtcgccgccggcgaggagaacggcggctgcaagtgcggcaccagctgctcctgcaccgactgcaagtgcggcaagtgaagtcacgaagcaaccgaacactcgccgccggcgagtcacctaccttaattagtccacaataaaaaccacccatatgagtgtggtttgtgtgtgtgctgattattgctgaattaaacccgtgtgttatcgattaattaagcagctggtcgcttcggcgactatgcgtgtatcaacgtatgaatttgtgtgatgtgatgta

SEQ ID NO: 399169 - DNA, 405 bp, Oryza sativa nipponbare
tttcgaaaagaaaaaaatcctgaagtctgtaccaaagttcagtattacacctcacagaaaatggcccgtgtctgcagctgtgtttcttcttcgacagtcatgcgttcctctgtcgaaggggaacaacgtacgggcagccaatccgagcacagtatatatagtatagcagttctgcccggggacagtcaatgtgtgtgcttcgttacattataggagtatatatttctgcacctacgcgagcccgtacttggacagtggtcttagttttcgtacactttgcactcgtcggtctccgggttgtccttgcagaagtcctccagtgggtcgccgctgccctgcaccgccgcgccgggccacttgctcgccaccagatgcgccagatcgaccacgcgttggctgtagccc

SEQ ID NO: 399170 - DNA, 462 bp, Oryza sativa nipponbare
ccacgcgtccgcccacgcgtccgtgaccacaatgcttgcagctagctctgtagtgaacagcaaccttccttgctcatcaaggatatcctcctgctcagacttcacatctggctactcctggcgtcctatagaggctgcaaaactctgccggacacgagctgtgcgctcgctgcagataacctgtactgccacaaagcctgcaaagtcaccagctgaagaagaatggaagatcaagaggcaagtgctagtagaaaagcgggtccgtagtgttgatgtgaaggaagcactgcgtcttcagaaggaaaacaattttgcaattcttgatgtcaggccagtagcggactttaaagaggctcatccacctggtgccgttaatgtgcaaatatatagattgataaaggaatggacagcatgggatattgcaagacgggcagcatttgcattctttggcatattttctgg

SEQ ID NO: 399171 - DNA, 462 bp, Oryza sativa nipponbare
  unsure (1)..(462): unsure at all n locations
ccacgcgtccgccagcagcagcagcagtagctgagcttgaagcagcagagcgaggtagacatggccgccgccaccatggccctctcgtccccggcgctggccggcaaggccgccgcgaaggtgttcggcgaggggcgcatcaccatgcgcaagtcggcggcgaagcccaagcccgccgcgtcggggagcccgtggtacggcgccgaccgcgtgctctacctcggcccgctctccggcgagccgccgagctacctgaccggcgagttccccggcgactacgggtgggacaccgcggggctctccgccgacccggagacgttcgccaagaaccgggagctggaggtgatccactccaggtgggcgatgctcggcgcgctgggctgcgtgttcccggagctcctcgcccgcaacggcgtcaagttcggcgaggcggtgtggttcaaggcggngtcgcagatcttc

SEQ ID NO: 399172 - DNA, 448 bp, Oryza sativa nipponbare
ccacgcgtccgcacaattatattgagctgccattgcttctcacctctgctttgcatccatccatccatcagagatcaggtagaacagtgagagtgaggtgcagaaaaatttgagctgaagctgaggatggcaacatccatgatcacctcgccgctggtggcgccggcccgggccaagggccttccgtccatctcccgccggggatcctccttcgccatcgtctgcagcggtgggaagaagatcaagaccgacaagccctacgggattggaggtggcatgtcagtcgatattgatgcatctggcaggaagagcacggggaagggtgtgtaccaattcgttgacaagtacggcgcaaacgtcgacggctacagcccaatctactcgccggaggaatggtctcccaccggtgacacctacgttggtggaaccaccgggcttctgatctggg

SEQ ID NO: 399173 - DNA, 467 bp, Oryza sativa nipponbare
ccacgcgtccgcccacgcgtccgcccacgcgtccgggccgctggaatattagatccatcaaaggttgtgagatgttgcatagaacatgctgctgtggtcgccaagtcttttctcacatctgacgtggtgattgttgaggcgaaagaaggcaaaccagttcgcataaggcccccgatgcctcctaaaagtttgatacccccaatgcctgcttctgcttcaggaattcgagtgtaggatacatcccttccccagcactgatactcaacacaaaagaaagaaaatttgggacatgattcttttgcaaatatacccagatattaacaaagtgcagaaattcctgacgaataaatttacctcaaacattgctctataagttttctcgaggaagctgtcacaaaaacatggctttcttggtatgggcagcgtgttcatcgacgaaagcagcaataagaggggtgctgtagaat

SEQ ID NO: 399174 - DNA, 423 bp, Oryza sativa nipponbare
ccacgcgtccgcccacgcgtccgcttcttcctacttcgtcttcttgctggtgtgttcgaggaggaggaggaggaggagaagctagcggcggcggcggcaatggcgacgagcgggctgaggagctgcacggcggtgggcgtgccgagcctgctggcgccgtcgtcgaacaggagccgcctgccggtctgcgcctacgccaccacctccgggcgcgtcaccatgtccgccgagtggatgccgggccagccacgccccgcccacctagacggctcctctcccggtgacttcgggttcgacccggtgggcctcgccaccgtgccggagaacttcgagcggttcaaggagtcagaggtgtaccactgccggtgggccatgctcgctgtgcctggggtgttggagcctggggcccttgggctgggcaac

SEQ ID NO: 399175 - DNA, 461 bp, Oryza sativa nipponbare
ccacgcgtccgcggacgcgtgggcggacgcgtggggtggttttaattttcccttttgattctcatggtgattgttggcgtcggttggcctcgtccttgtgtctaggagcgctgtcgggcttctccacggagacgaatcactccctgttgggcttcttctcccagctgctacctaggatgcctccagatctgtgcaaagagaggtaacgtctgtctacatcgacatctccggcgaggtctttccaaggaaggcggcctcatgcttgatccttggcgacaaatcttcactaggtggctggagttttcaagttgcatcaaagatgtctcaacctcccactcgtggaggaccgaatctgtatgcctcttggcttcttatgtagctcaccgcgtttcttttgctttcttcaccaacaaaatacatctagttgttgtctttggagtagctatggtctttgtactaat

SEQ ID NO: 399176 - DNA, 437 bp, Oryza sativa nipponbare
ccacgcgtccgcccacgcgtccgcgaaggtgttcggcgaggggcgcatcaccatgcgcaagtcggcggcgaagcccaagcccgccgcgtcggggagcccgtggtacggcgccgaccgcgtgctctacctcggcccgctctccggcgagccgccgagctacctgaccggcgagttccccggcgactacgggtgggacaccgcggggctctccgccgacccggagacgttcgccaagaaccgggagctggaggtgatccactccaggtgggcgatgctcggcgcgctgggctgcgtgttcccggagctcctcgcccgcaacggcgtcaagttcggcgaggcggtgtggttcaaggcggggtcgcagatcttcagcgagggcgggctcgactacctcggcaacccgagcctgatccacgcgcagagcattctcgccatct

SEQ ID NO: 399177 - DNA, 459 bp, Oryza sativa nipponbare
ccacgcgtccgcccacgcgtccgcggacgcgtgggggcgtggcggcgccggagatgagcgactgcgcggcggcggcggccgggagggcgtacgcggcggaggggagagcggcgcggctgatgcgataccgggagaagcgcaagaaccggcggttcgagaagacgatccggtacgcgtcgcgcaaggcctacgccgagacgcgcccccgcgtcaagggccgcttcgccaagcgcgccgacgaccacgacgccgtcgcgccgtcggcgcagatcatgctcgacttcgccggctacggcgtcttgcctaccttctagtgttctagctcatcgatctgaacgttttttgagctggcaaattgatcaagctggcgttacataccgtcaacgtagtacttcaattcaccatgcatatgattagccacagtgtcttttttattacaattcatataactttgaaggt

SEQ ID NO: 399178 - DNA, 453 bp, Oryza sativa nipponbare
ccacgcgtccgaggggcccctcaacaactgggccacccacctcagcgacccgctccacaccaccatcttcgacaccttctcctcatcctcttaatttaagctctttcgcgcgcaattcaaacgggatcgatgcgttggtgtgcgttcgcgcgcgctgtttagttttgtgatgacgagcgagctgggagggtatggagagaggagaggtcatccttttgttgattactacttaaattaggaaagctgggttggtggttaatggcgacttgcatggtggtgatttgtaatataagaacacccaagatgatgaattaatgcatccacttgtacatcgatcgatcgatcttggtatttgactaagtgagtgtgactgtgaatgcacatatgcacactgcatagactttacctgacatgtattgatattaataaagttataacaggtgtctcgctatc

SEQ ID NO: 399179 - DNA, 450 bp, Oryza sativa nipponbare
ccacgcgtccgaaagatctgtgctgcatatctatcatgaacttatacagtatggtcttcgtatatgggtgttcagtggagatacagatgcagtgcttccagtaacatcaactagatacagcatcaatgccctcaaacttccaacggtaaccccttggaatgcttggtatgacgatgatggtgaggttggtggctggactcaagggtacaagggactcaacttcgtgactgtgaggggcgcaggtcatgaggttcctctgcataggcccaaacaggctctaattctcatcaaatcattcttggctgggagcccaatgcccagtgttcaagatttttacagtgatgtgtaacatattttggctacaattatatattaccaagatcacaaaaggtaactcagacggggttgctagtatcacatggaactcgtaccatatattggtaacaattc

SEQ ID NO: 399180 - DNA, 456 bp, Oryza sativa nipponbare
ccacgcgtccggcagcagcagcagtagctgagcttgaagcagcagagcgaggtagacatggccgccgccaccatggccctctcgtccccggcgctggccggcaaggccgccgcgaaggtgttcggcgaggggcgcatcaccatgcgcaagtcggcggcgaagcccaagcccgccgcgtcggggagcccgtggtacggcgccgaccgcgtgctctacctcggcccgctctccggcgagccgccgagctacctgaccggcgagttccccggcgactacgggtgggacaccgcggggctctccgccgacccggagacgttcgccaagaaccgggagctggaggtgatccactccaggtgggcgatgctcggcgcgctgggctgcgtgttcccggagctcctcgcccgcaacggcgtcaagttcggcgaggcggtgtggttcaaggcggtgtcgcagatc

SEQ ID NO: 399181 - DNA, 463 bp, Oryza sativa nipponbare
ccacgcgtccggctctatctatctactagttagtttagtcgtctcgagggtaaattgagctttgtgtgcggttttgaggggagtacatcggcatgaggatccagtgcgacgcgtgcgaggccgcggcggccacggtggtgtgctgcgcggacgaggcggcgctgtgcgcgcgctgcgacgtcgagatccacgccgccaacaagctcgccagcaagcaccagcgcctcccgctcgacgccgcgctccccgccgccctcccgcgctgcgacgtctgccaggagaaggcggcgttcatcttctgcgtggaggacagggcgctcttctgccgggactgcgacgagcccatccacgtcccggggacgctctccggcaaccaccagcgctacctcaccaccggcatccgcgtcgggttcagctccgtctgtagcgccaacgccgaccaccttccgccgacagcgcccaa

SEQ ID NO: 399182 - DNA, 461 bp, Oryza sativa nipponbare
ccacgcgtccggattccacggatattttctctccccctgctcccgtcgccatcgcaaaggagaaaaaaaaaaagaggaggaaggaaggaaggatgagcgccacggcggtgtcgtcgctgaacccggacgcgccgctcttcatcccggcggcgttccggcaggtggaggacttctcgccgcagtggtgggacctcgtcaagaccaccgcctggttccgcgaccactggttccacgagcaccagcagctcgacgagatggccgactccctcgccctccacgacgccgccgccgacgacgacgacctcgccggcctcctccccgacgacgccttcgacgacgacgacgacgacgacctcttcttcgaccagacccataacctcctcgtcgatcccccgcagccgcccgccgctctcaagactgatgcggtgctcaaggcgctgagcctggtgtctcccaagggc

SEQ ID NO: 399183 - DNA, 392 bp, Oryza sativa nipponbare
ccacgcgtccggtcggccctggcaagccttccaaggacaccggcgcggatgacgagccgaagaagaggtcgttcttcgccgatttcggtaagctctcggatggaaggtcgctgataccggccttcccgccggccgcggctgggtctctgttcgccggcgggagggggaggaaggacccgcagacagtgttcgtcgcgggcgccacggggcaggcgggagttcgcatcgcgcagacgctgctgcggcaggggttcgccgtgcgcgccggggtgccggacctcgcgtccgcccaggagctggcgcggctcgccttcgcgtaccggctcatttcccccaccgaggcgcgccgactcaacgcggtggagtccgatttcgaggaccccgaggcgatc

SEQ ID NO: 399184 - DNA, 472 bp, Oryza sativa nipponbare
ccacgcgtccggccgcagaatcggaagcaatccgccgcgagtcgcgaccatttcttgcgagtagtagtagaggggagagtgagtgaggggcgtgctgcaatggcgactgaggaggttgtccctgaggttccggtgaccgaggtggaggctgccgcggcggaggaggccgtcgaggagacgacggcggcggaggagaaggccgccaagccggcgaaggagaagaagaaggccggcaggccgccgaaggagaagaaggaggccaagccggcgaaggagaagaaggtgaaggaggccaaggccaagaagccccgcgtcgccgccgcccacccgccgtacgccgagatgatcatggaggcgatcgtggcgctgaaagagaggactggatcgagctcccaagccatcggcaagcacatccattccaaccatggcgccaacctgccggccaactttcggaagcttctcttcggcaacc

SEQ ID NO: 399185 - DNA, 474 bp, Oryza sativa nipponbare
ctccgctcgctcgctcgctcatcgtcgtcgtcttcctcggggcctctctcgtcgtggagcggaggcgtgccgcgtagcagggggaattcaactgaggtgagaaatgggggcaaaggactccaagccctcatacagctattcttcttcatatgatcatgggaattcatcatcgggatataactcgagataccctgcataccctgcaaatgcatcttccagtcagaacacaaggtatgctccttctatggagaactatgtgcagccagaaacgcatgccaggttgcagaggaagtactcgaggattggtgatgactaccgctctctgaatcaagtgactgaagctttggcacaagcaggtcttgaatcatcaaatcttattgtaggcattgattttacaaagagcaatgaatggacaggtaaactttccttcaatcgccgatgtctgcatgatattggaaacactccaaatccata

SEQ ID NO: 399186 - DNA, 457 bp, Oryza sativa nipponbare
ccacgcgtccgcccacgcgtccgaagaaagcataagcaacacaagggattaactcatcactcacttagctaattaaatcttcgaccatgtcggacaagtgcggcaactgcgactgtgctgacaagagccagtgcgtgaagaaaggtaccagctatggcgtcgtcatagttgaagccgagaagagccacttcgaggaggtcgccgccggcgaggagaacggcggctgcaagtgcggcaccagctgctcctgcaccgactgcaagtgcggcaagtgaagtcacgaagcaaccgaacactcgccgccggcgagtcacctaccttaattagtccacaataaaaaccacccatatgagtgtggtttgtgtgtgtgctgattattgctgaattaaacccgtgtgttatcgattaattaagcagctggtcgcttcggcgactatgcgtgtatcaatgtatgaat

SEQ ID NO: 399187 - DNA, 455 bp, Oryza sativa nipponbare
ccacgcgtccgatcgccatctctctcagctctcacagctcactgcatcaatggccgcggccaccatggcgctctcctccccggtgatggcccgcgcggcgccgtcgacctcctccgcgctcttcggcgaggcgcggatcaccatgcgcaagaccgccgcgaagcccaagccggcggcgtcgtcggggagcccgtggtacggcgccgaccgcgtcctctacctcggcccgctctccggcgagccgccgagctacctcaccggcgagttcccgggcgactacgggtgggacaccgcggggctctccgccgacccggagacgttcgccaagaaccgggagctggaggtgatccactcccggtgggcgatgctgggcgcgctcggctgcgtcttcccggagctcctcgcccggaacggcgtcaagttcggcgaggccgtgtggttcaaggcgggctcgc

SEQ ID NO: 399188 - DNA, 460 bp, Oryza sativa nipponbare
ccacgcgtccgcccacgcgtccgcccacgcgtccggcgtagaacacctcctgctcgaacgccgggtcgccgtcggcgaggaggcggtggacgagcaccagcatcttgagcgtgacgcccaggcagcgtgacagcgacgcgacgcaggcgcgggagtggagcgtgagcgcaatcacctcccggacgtggtgctcatcggcggggaagccatggacggtgtgggagaggtcacgcttgacctcttgacacatggatactctcgtttaattatctcgttattacaaacatggttaattacaacttccaaataaagatcaaagcagacatattatgttaaacttgtgcctgcaaaagctgttttattcagttaggatagtactttccttttatgcacgttatgtgttttagccttttaggctagctaatattattacttgtagtactagaacacatgcaggaaa

SEQ ID NO: 399189 - DNA, 463 bp, Oryza sativa nipponbare
ccacgcgtccgcagctcactgcatcaatggccgcggccaccatggcgctctcctccccggtgatggcccgcgcggcgccgtcgacctcctccgcgctcttcggcgaggcgcggatcaccatgcgcaagaccgccgcgaagcccaagccggcggcgtcgtcggggagcccgtggtacggcgccgaccgcgtcctctacctcggcccgctctccggcgagccgccgagctacctcaccggcgagttcccgggcgactacgggtgggacaccgcggggctctccgccgacccggagacgttcgccaagaaccgggagctggaggtgatccactcccggtgggcgatgctgggcgcgctcggctgcgtcttcccggagctcctcgcccggaacggcgtcaagttcggcgaggccgggtggttcaaggcgggctcgcagatcttcagcgagggcgggctcgactacct

SEQ ID NO: 399190 - DNA, 447 bp, Oryza sativa nipponbare; identical to SEQ ID NO: 388015

SEQ ID NO: 399191 - DNA, 439 bp, Oryza sativa nipponbare
ccacgcgtccgcccacgcgtccgcttgatctgatcgtcggacatggcgtcgcccatgctctccgccgccaccgtgccactccagggaggcggcttgtcggagttctccggcctgaggagctcgtcgtcgctgccgctgcggcggaatgccacctccgacgacttcatgaacgcggtctccttcaggacccacgcggttggcacgagcggcggggcgcggcgggcgccgacggaggcgaagctgaaggtggcgatcaacgggttcggccgcatcgggcgcaacttcctgcggtgctggcacgggcgcggcgacagctcgcccctcgacgtcatcgccatcaacgacaccggaggcgtgaagcaggcgtcgcaccttctcaagtacgactccacgctcggcatcttcgacgccgacgtcaagcccgtgggcgacaacgcca

SEQ ID NO: 399192 - DNA, 466 bp, Oryza sativa nipponbare; identical to SEQ ID NO: 388163

SEQ ID NO: 399193 - DNA, 452 bp, Oryza sativa nipponbare
ccacgcgtccgctcgagcaaagaaggagagagcttggtgagctgcagagatggccccctccgtgatggcgtcgtcggccaccaccgtcgctcccttccaggggctcaagtccaccgccggcatgcccgtcgcccgccgctccggcaactccagcttcggcaacgtcagcaatggcggcaggatcaggtgcatgcaggtgtggccgattgagggcatcaagaagttcgagaccctctcctacctgccaccgctcaccgtggaggacctcctgaagcagatcgagtacctgctccgttccaagtgggtgccctgcctcgagttcagcaaggtcggattcgtctaccgtgagaaccacagatcccccggatactacgatggcaggtactggaccatgtggaagctgcccatgttcgggtgcactgacgccacccaggtgctcaaggagctcgagg

SEQ ID NO: 399194 - DNA, 459 bp, Oryza sativa nipponbare
ccacgcgtccggttttacataattttgtgctttacgcctggtgcagataagagagacaccacataagcgacaccatagatttattgagttctatgatgttagggctgcagaatctgccctccgttcattaaacaagagtgacattgctggaaaacgggtaaagttggaacctagccgtcctggtggagctcgccgaagttttatacagcattttaatcacgaatttgagcaagacgaaacaaagcataattcatttcagattggttcaccttctgccaactctccaccaagtttgtggtcccaacttggcagcccaacagatgaaaataaattaaatgcactcaatgaaactgcatttaatgggggaatgagccctttgggcagtaaccatctttctgggttctcttcaggatatcctcccatgaaatcacccgttgggaagagctcctattggaataa

SEQ ID NO: 399195 - DNA, 427 bp, Oryza sativa nipponbare
ccacgcgtccgcggacgcgtgggcggacgcgtgggtcgagctgagagcaaagaagcgcatccttctcatggcggcctcctcgtcgtcggcggcggcggcggcgttgtcgccggcgatctctcttcacctgctccggccgctcccgtgcagagccgtactcctgtccaggcaacggaggccatttccatcgccaagagctggctgcctggcggcggtaagagctcagcggcggtggctccggtcgccggagatcggccggtggaggaggcgcgggggctacgcctgcctctccttcaactccggcaataagccgcctccgtcttccagtgagaattcagactaatggccaattcttcgccgttgggatgtgccgcgtgagtggcataccgtggtgctcaccatggtgggctgtggagttagctttgtc

SEQ ID NO: 399196 - DNA, 436 bp, Oryza sativa nipponbare
ccacgcgtccgagctctttcttcggtgatgaaggagccaggggaggcaccgctggattgggcgacacggcttcggattgctgtcggggcggcacgcggtcttgcttggctgcaccatgggttccaagttccgcaaattcaccagaatttgagctcaagtgcagtgcttctggatgaggactatgaagctcggttcacagatgttgggcttacaaggctggtccgaatggcaccaggcgagggtggagatacaagccccttcctgaatggggacttcggggagtatgggtatgtcgccccagagtgtgctagcaatccagttgctaccatgaagggtgatgtgtatgcatttggtgtgatactgctcgagctcgtgagtgggcaggaggctgccactgtaacgggtgatgcggcaagtgaaggattcaaggggacat

SEQ ID NO: 399197 - DNA, 393 bp, Oryza sativa nipponbare
ccacgcgtccggcaagataatgcgtgatgcaaatggtgttagcaaagggtctggatttgttgcattttcaactcgtgaggaagcatctcaagctttaactgaaatgaatggcaaaatgatatctggaaagccattgtatgtcgcatttgcacaacgtaaagaagacaggaaggcgatgttgcaggcacaattttctcaggtgcgccctgtaccgatgacaccttccatggctccacgtcttcccatgtaccctcctatggctcctcttgggcagcaactcttctacggacaagctccacctgctatcatgcccccacagcctggatttggttccagcaacagcttgttccaagcatgaagcctgggggtgcccatattccaaattactttgtt

SEQ ID NO: 399198 - DNA, 430 bp, Oryza sativa nipponbare
ccacgcgtacgcccacgcgttcgcccacgcgtgcgagctactgctataaggagcgcgccgtgcaccgactctgacaatgtcgaccgacgacgacgacgacgatgtccagagctggtgcttcgccactgtcaccccgcgctcccgcgccacagtcgtcgccagcctcgcctccccatcaccgtcctcctcctcctcctcctccaacagcagcaacctcccggcccccttccgcccccgcctcatccgcaacacccccgtcttcgccgaccccgtcgcccccgccgtgatggacgccgtcggcgaccgcctcaaggatgggttcgccaagttcaagaccgagttctatgacaagaaggcggagctcttttagccgctcaaggccggccaggcacccaagtacatggtggtctcgtgcgccgacttttgcgtg

SEQ ID NO: 399199 - DNA, 427 bp, Oryza sativa nipponbare
ccacgcgtccgcccacgcgtccgagagtggagaaggttttagaaaacgtgcacattgcagcaaacaagaacacagttcctggtgatgtttcagctatggtaccaggaggcatcaggatgggaaccccagcactgacctcaagaggatttgttgaggaggactttgctaaggttgctgatttcttcgatgcagcagtgaacttggctttgaaggttaaggctgcagcaggtggaacaaaactgaaggactttgttgccactttgcaatctgatagcaacattcaatccgagattgcaaaacttcgccatgatgtggaggaatatgcaaaacagttccccacaattgggtttgagaaagaaaccatgaagtacaagaactaagaaactttgaatggaacagcaagggtaaaagaaaaggcatcaagctg

SEQ ID NO: 399200 - DNA, 465 bp, Oryza sativa nipponbare
ccacgcgtccggttagggtcatctggacttgctttggctgaccttagcattggagattggtttggaaatttgctttattcagcgggtcagcaagccaacgaggctgttcaggatcagctctctgctcttagtctcactagcttggctgtaattttcggtgctggacttgtaactagttcgtctccttgtacactcagtgttctaccattgactctaggatatataggtgcttttggctcgggcaaagatcgatctgaggttgttggaaattcagctgctttttcattaggactggcaacaaccttagccatccttggcgttgctgcttcttttgctggaaaggcctatggacaggtaagacacggacttgcagtggctgcttcagggttagcagatatcatgggattgaaccttcttgaggtaattgagctacaacttccctcatttttcagcgattatgaccct

SEQ ID NO: 399201 - DNA, 369 bp, Oryza sativa nipponbare
ccacgcgtccggcttgagctcgttggaatcgggtatacagggtggtttacataccggaacctcatcttccagccagacagggaagctctggtgagcaaaatcaagagcacctacaatgaaatcaccgggagcagcagctaatttcataccattttcgagaagatttctgtaaatcagagagcagcaggactgcatctgtcggcagccatgccagtgaagaggaggttgctaacgttttgagactggtccctccattatttccatcttatcccctggctcaaagcagacaaaatactattattgctgatgagctgctcatgtacctattttaattcaacaataatgaaatatgttttcagtttccgctcc

SEQ ID NO: 399202 - DNA, 432 bp, Oryza sativa nipponbare
ccacgcgtccgagaaagcataagcaacacaagggattaactcatcactcacttagctaattaaatcttcgaccatgtcggacaagtgcggcaactgcgactgtgctgacaagagccagtgcgtgaagaaaggtaccagctatggcgtcgtcatagttgaagccgagaagagccacttcgaggaggtcgccgccggcgaggagaacggcggctgcaagtgcggcaccagctgctcctgcaccgactgcaagtgcggcaagtgaagtcacgaagcaaccgaacactcgccgccggcgagtcacctaccttaattagtccacaataaaaaccacccatatgagtgtggtttgtgtgtgtgctgattattgctgaattaaaccccggtgttatcgattaattaagcagctggtcgcttcggcgactatgcgtgtat

SEQ ID NO: 399203 - DNA, 460 bp, Oryza sativa nipponbare
ccacgcgtccgcaaccgccgccgcatcgccctcgttagaacgatggccgcgtcggcgctgcaccagaccaccagcttcctcggcaccgcccctcgccgggatgagctcgtccgccgcgtcggcgactccggtggccgcatcaccatgcgccgcaccgtcaagagcgcgccccagagcatctggtatggacctgaccgtcccaagtacctgggcccgttctcggagcagacgccatcgtacctgaccggagagttcccgggagactacgggtgggacacggcggggctatcggccgacccggagacgttcgcgaggaacagggagctggaggtgatccactcgcggtgggcgatgctgggggcgctgggctgcgtcttcccggagatcctgtccaagaacggggtgaagttcggggaggcggtgtggttcaaggccggcgcgcatatcttcttcgaggggg

SEQ ID NO: 399204 - DNA, 485 bp, Oryza sativa nipponbare
acgtgataccatccattttttttattgtcgacgaatttatcagatatgctctagatacatatcttgtgtgtatatagccggagctttgttttcacatatcctcacccaacgataattgtagtactcttacaataaaaccggccggagagggagggaagagattattacatatgtgttaagagcagaggccattgagatggtacataaccaaactgtaaaataaaaatatatagcatattatatattgatatatcatcaacatagcccaaaacaaagctgcatactattattataggcagcaatccaccagcgcgatgcttgatcttagcttagttgccaccagactcctcgcaacctgggggcttgtaggcgatgaagctaatcaactgcacctgcctgacgttgtcgaagccgatgatacggacaaaggcatcggggtaggcctttttgggcttctcgagcttcttgagcaccttggtggcatc

SEQ ID NO: 399205 - DNA, 363 bp, Oryza sativa nipponbare
gcacgaaggaattgttctcaggaatcttaagatggtaaatacacacaagagagaggtacggtatacaagacttagtttttcttaagtacaacagatcttccattcctccatgatcctatcagcttctacacccaaaccacacaaatcaccatgcacgagccctcttcctccactgccaaatcaactggggcttgagtagccaagcatccatgtggtgatcagtagccgatgtcagcgtcgtcgacgacgaggttgccggtgatgagctcacggtaggcggcgacgggccagatgaaccccctcgggaggagcttgacggcgagctcgacgtcgatgatgatctcccttatggccggcttcttc

SEQ ID NO: 399206 - DNA, 364 bp, Oryza sativa nipponbare
gtataaatatatatagccggagcttccgtgtatttcattcacatatgcctcacccaacaacatatagtcgtagcagataccactcttacatcaagtcagagagagatcaggtgaaacaaaaacaaaagcagagcacggccggtaaaatcaaaagacgatgaacaaactgggaacacacgaaacaaggtgggagacatcatcgaatcagagatgaacaattaaacaaggctatatatgacgatgacggcttagttgccaccagactcctcgcagcccgggggcttgtaggcgatgaagctgatgagctgcacctgcctgacgttgtcgaagccgatgatacggacgaatgcatcagggtacgcct

SEQ ID NO: 399207 - DNA, 350 bp, Oryza sativa nipponbare
ggggggggaaaacagaaatgcgaatttacctttatatgcaactgtttacaccaaaaggggaaaaaaacgggtaccttgcaaaaaggagtataactttgcagtttcaagtcccacttcaactacaacccaatctgcattacaggatgggagtctaaaacgactgcagtttcagcgtttttgaggcctgcagagacactgggctcgcgttgcaacaaaagattaggcggaggcgcccacggtggcgccggcgttgagcctctacgagccgtagagagtcttctcgaaccggatgatctcgttcttggaaccgtaggccacttgagtcccctcgtcgaggttgttgatcacct

SEQ ID NO: 399208 - DNA, 394 bp, Oryza sativa nipponbare
aaaaaggtaaactcttcataatgatattattaagacattatagctgatgtcttttgatcacactgcgatcaaattatgcatcataggcagtacaactccgcgtcaggaaaaagtagaggagatatatttcttgttattacttaatacagcattcacatatatcgaaccatccggtacgtacgtagtagtactccacgcgttcacatcgatgatcggggacgatatcctcaggtagtacttatgcaaaagcgttggcgtaaactgacgaactgaacggacggacggtcggatttagggctcccataagtccaagttgccggagacgaagtcgtagtggccgccgacgagcttgagggtgccgttggcgatcccctccttgacgaacgggtaggtc

SEQ ID NO: 399209 - DNA, 467 bp, Oryza sativa nipponbare
atggaaacatatcacatcttcatagcaccatcaatatgatttgcctgaatccaagtaacatatagcaatatgtagaagtatattattacacaagaaccttctaacaaatcacccagcaacaccatccagccaccggccaccgcgttaatatactcgcggtgaatccatccatgcgaaagcctctcggggtgggataaatacagtagtccacgagagaccactaggcagacgcattgaccaaaagcctccgcgaggtatacagaaggacactaaagtgcagatatctcctttatgacctgctctttgtctgcctcgaactgttcatcctctttgtcaatcttgaatccggcaaaaaatcggagaagcttgcttcggtttgtgactagtatgtttacaacctcagttggcttggttttatttgccgcaaataacttgaacacatgaaatgcttcaatttgaatattttt

SEQ ID NO: 399210 - DNA, 469 bp, Oryza sativa nipponbare
tttaaatatatatagccggagcttccagagatttcattcacatatgcctcacccaacaacatatagtcgtagcagataccactcttacatcaagtcagagagagatcaggtgaaacaaaaacaaaagcagagcacggccggtaaaatcaaaagacgatgaacaaactgggaacacacgaaacaaggtgggagacatcatcgaatcagagatgaacaattaaacaaggctatatatgacgatgacggcttagttgccaccagactcctcgcagtccgggggcttgtaggcgatgaagctgatgagctgcacctgcctgacgttgtcgaagccgatgatacggacgaatgcatcagggtacgccttcttggcctcctcgagctccttgagcacctgggtggccgtagtgcacccgaacatgggcagctttcacatggtccaggacctgccatcgtagtatccgggggatct

SEQ ID NO: 399211 - DNA, 393 bp, Oryza sativa nipponbare
  unsure (1)..(393): unsure at all n locations
aattaatttactgtatataaaggattgataaaaggtgtgcttacaataatgatgaagtatcaggagaaacgtgtcttcaggttacagattattacatgatggtggtacacgaattgtgcggtgatagaaatcatatatgtcctctttccaaaatagactcgatcgatcggtattgctagagtatgagtagcaattattatccgatagagtgaggctgaggccttccgtgactgaagcagattgcaacgctgatcgatctccttacatgctcggcttcgcgctgagacggctcgccagtttctgacccagagacctgtcagcctgagaccagtaggagagccagatgctcctgatctcgtgggtgaggcgagggtcanagagtgcgtcgatcca

SEQ ID NO: 399212 - DNA, 406 bp, Oryza sativa nipponbare
actgaatacacaaacgggccgagcgttgaacaaggggcaacaacaatatacactgttgatcggccaactattacagaacagaacgaaacaagcagttattacatactaaacaaactggacggaatgaaggaggaagcagcagaaggatgacctatactctgtccctaccctacaagctcgaccgtcattacaaaactaaacagcccgcgcgaacgcacaccaactcagtaaacccgaatgaattgcacgcgaacgagctcaaaggcataggatgaggccacaggattaagatgagccggagcaaacatataccacatggaacatacatacaccatgaagtggccattctacaaaatggtaaatacagatacattatcttaagttgctaatgaaccgccgcacaaaa

SEQ ID NO: 399213 - DNA, 391 bp, Oryza sativa nipponbare
gtcgacgaatttatcagatatgctctagatacatatcttgtgtgtatatagccggagctttgttttcacatatcctcacccaacgataattgtagtactcttacaataaaaccggccggagagggagggaagagattattacatatgtgttaagagcagaggccattgagatggtacataaccaaactgtaaaataaaaatatatagcatattatatattgatatatcatcaacatagcccaaaacaaagctgcatactattattataggcagcaatccaccagcgcgatgcttgatcttagcttagttgccaccagactcctcgcaacctgcggacgcgtgggcggacgcgtgggcggacgcgtgggcggacgcgtgggcggacgcgtgg

SEQ ID NO: 399214 - DNA, 406 bp, Oryza sativa nipponbare
aaacaaaatttttgtatatatattttagggagatcgaacataaatccagttatgaactcataaacttacatcggcacatatctaccaaaccctgtcgataaacatactctaatggacaaacgacacaagctgttgaaatctattgaaaaactattttacaatgaacctaaacaccacggtttaactattataccgacaaaccgcaaccagaaaaatgttttcatgcacctatgttgccaagccagaagaacagggggaattgcgaaattgccaggaagagcaggaaatagtgctgccgcgtcgagtgcctctcgctgctcctcatctccgtgaagagcaccctcttcattgtcctcaccaagaacacctccatacaaaggctcatccatgggattataaccaagta

SEQ ID NO: 399215 - DNA, 388 bp, Oryza sativa nipponbare
agctagaacactgctactaccaggagagggtttattcccctgtagtactgtacataaaaaatttaccactcaactcaccccctcacccatgcatccagatccatgcatgcacgaaacaattaccacaacacacacagtcagtttgaatctcatcacatccatctctctctctctcctccccccaattcattaacatcttatacatgcatactccacaaaaaaaaaaagaagaaacaagaagagaacatcttccattgcccaatcatcggtttcaccagcctgaactcatcaagctcctcgagatgccctggccctgatgaaatagatcacacgctcagcctgacagcgtctggatgatggtgttgtgccacgggtcagacaggtgctg

SEQ ID NO: 399216 - DNA, 466 bp, Oryza sativa nipponbare
aaatagatataggcggagcttccatatatttcattcacatatgcctcacccaacaacatatagtcgtagcagataccactcttacatcaagtcagagagagatcaggtgaaacaaaaacaaaagcagagcacggccggtaaaatcaaaagacgatgaacaaactgggaacacacgaaacaaggtgggagacatcatcgaatcagagatgaacaattaaacaaggctatatatgacgatgacggcttagttgccaccagactcctcgcagcccgggggcttgtaggcgatgaagctgatgagctgcacctgcctgacgttgtcgaagccgatgatacggacgaatgcatcagggtacgccttcttggcctcctcgagctccttgagcacctgggtggcgtcagtgcacccgaacatgggcagcttccacatggtccagtacctgccatcgtagtatccgggggatct

SEQ ID NO: 399217 - DNA, 402 bp, Oryza sativa nipponbare
aaggagaggcagtagagattttgtttcatggaccattaggtccggttgatgtacgtcattaatacgcagtataaaagaccaaaagtagtatcacatcatcatatgcctaacatggaaaacttgatagtattatcgcccctagagcggaaagaaacaatttgtcgccgccgtcaaagccgtgcagatatgtatgcacggcgctgcttgctgcttactggtgcgcgcactgcacgcgctgggcgccgccgccgtgcatgttctagtcctcagcgtatgcctcctgctgctgctgttgctgccgactcctcatctcctgctcgatgttcacgtcgtacggcatggtctcctcgcactcgttgagctccatgtcggtgtactgcgacaccggccttggcgggagga

SEQ ID NO: 399218 - DNA, 485 bp, Oryza sativa nipponbare
ttaggaaaaacaatatttatgagatttggtgaagagaaaaaaagagttaattttatacgaactatgttacaatggggaatgcgatttgtccagaaccaccgccatgactatgatgctaattaatacaaaatactagtaggaattatcgaccagttagcttgaccatccaagcaccacccaagtacaggccaagcagcggaccagccaagagcatctgagtcaacggatctgtcgacggtgtaagcacagcagcagcaactacagcgccaacaacaacatatcttcagatggaaagcatttggtcactagaaaccaaaccgacttgccccagcagtagctggataacagggacctgaaaagataatcctgtgctgaataaaagcacaagcacaaactcaaaatactgatcaatcgaccataacgattccactgccccatctgcgtagttcacgaagaaattcaatgctgcaggagcaagaaccgtg

SEQ ID NO: 399219 - DNA, 390 bp, Oryza sativa nipponbare
gatcataaggcaaagctgcgagcgccagatcatcttattactacagcttcttggcgatatgctacagtagcttcttcctcccttgcaaaaagaaacccaaaccttatctacaacgcaacacacacaccggacacagagcgctcgatcgatcgaagcagacgagacgacgatggcgaactactactaggtaagcgacaacacctaggctatacagggatacagcgcgcggcggcgacgggcggctagacggcggcgatgatcaggcgctggccttgttggccttcttggagatggcggagcggatggatttgggcggctgcatcggcttcgcgggggcggccttcctcgccctcttggcgcgggctgggcgggcggggggaaccgcctttt

SEQ ID NO: 399220 - DNA, 423 bp, Oryza sativa nipponbare
acacaatcaggtccatggtacttgtttcatcaaccaaccagataacattgttttacacaatctgaacgaacgaagcaaatattcgggtacgcggaaagaggagaacgtcgcgcgtctcaccgcagcctgcatgaaagcaatggacctcaccgccgttgctcgccggagatccacactcacttgccggggacgaagttggtggcgtaggcccatgcgttgttgttgacggggtcggcgaggtggtcggccaggttctccagtggccccttgccggtgacgatggcctggacgaagaacccgaacatggagaacatggcgaggcggccgttcttgatctccttcaccttgagctcggcgaacgcctcggggtcgtcggcgaggccgagcgggtcgaagctgccgccggggtagagcgggtcgacg

SEQ ID NO: 399221 - DNA, 460 bp, Oryza sativa nipponbare
ttttactaggcaaaccacacgagtacaggattgattaatttcactgagaatagcacgggtacatcacatcacacaaattcatacgttgatacacgcatagtcgccgaagcgaccagctgcttaattaatcgataacacacgggtttaattcagcaataatcagcacacacacaaaccacactcatatgggtggtttttattgtggactaattaaggtaggtgactcgccggcggcgagtgttcggttgcttcgtgacttcacttgccgcacttgcagtcggtgcaggagcagctggtgccgcacttgcagccgccgttctcctcgccggcggcgacctcctcgaagtggctcttctcggcttcaactatgacgacgccatagctggtacctttcttcacgcactggctcttgtcagcacagtcgcagttgccgcacttgtccgacatggtcgaagattta

SEQ ID NO: 399222 - DNA, 439 bp, Oryza sativa nipponbare
tcagtatcatggacagatgacggatcaggcaacacaaccagtcaaacacaggtagcacacatatcaaacattgctaaaacaccacagcataggtcttcattacaagaacctgaatacttccccatccttttattccatctcccccccttgatctaacaagcagagccagaggccatggcaactcttttctctacctgggatcaatcagtgggagaaactggcagcaaacagagcatgcaccattttctcttttttttattagctttttaatttgggaggtgcatgcactgccaaacttatgcacaggacacctgtgcttcctgctcatgcacttccttcctcctgccccctagagccactggagtttgctctgctcctactcccttcaccatttttgtttgccaacatcttctttgatttcgaatccctcaaagctttt

SEQ ID NO: 399223 - DNA, 364 bp, Oryza sativa nipponbare
ttagtattcttctcggggtcggggaatgaacttgatgattctttttttttttaacaagaatttaactcgatcagaattcaaaacagaaactaactgaaaaaaagaacaagaagaagaatatgaacagtttgttgatcataaggcaaagctgcgagcgccagatcatcttattactacagctttttggcgatatgctacagaagctttttcctcccttgcaaaaagaaacccaaaccttatttacaacgcaacacacacaccggacacaaagcgctcgatcgatcgaagcacacgagactacgatggcgaactactactaggtaagcgacaacacctaggctatacagggatacagcccgcgggg

SEQ ID NO: 399224 - DNA, 388 bp, Oryza sativa nipponbare
gattaaaatttccatgtactgggacagttaaaaaaggtactattcagtaatggaccagtctgttcgagtaacatttacaagtatggaggattacaattacaggagtatagcatatgaacacaaaggtacacagattatcactttctgactgaagtagtatgtccattccaatttcatcgcatatggtgccttagtgtttctttcgtcccgcgacggactttgcagcggatagtcgggagacctaggcgctggtgagcctcatagcggtgacatccagaaaaaccatagtagactccatcaacctgcagtacgtcaataggtacttggaggccaatgacacggatactgtccatgagttcttgcaccttggctggatcattggcacgcg

SEQ ID NO: 399225 - DNA, 446 bp, Oryza sativa nipponbare
gagtttaactaagacgagtttgatttcgtgtttgatacaaaaattaagatggacggattcacaagagagcaccctctacttaagctttacattacaaggccaaccagcagctgcctgccggccgaccactgcgtgcgcacgcgcgcgcaataatcaaccaatcacacacagtacgcacgcacataaaaaccacccatagccttcacgtacgcccggacgcacgcaccggttcgtgccaagctcaagggtagatggttctcgggatgatgatgtcgccgatgttgttgtgccacgggtccgagaggtggctggccaggttctccagtgggccggtgcccgggtacgccgactgttggacgcagaaacccacaaaagccagcatggccaatcgcccgttcttgatctccttgagcttgtactcctcgaacttgacggggtccttggag

SEQ ID NO: 399226 - DNA, 427 bp, Oryza sativa nipponbare
ttgggaaacgaataaaatcatgattgcagaaacatcatcttcttcttcatcttcttagtgtacacaacaccaactcgatcatcatctcgtcgcactaaacccatcttccccaacccaaagacaacgaactcgctggccacaaatccatccaaccacaattaaccactgctaagctacggtcccccacttcacttgccggggacgaagttggtggcgtacgcccaggcgttgttgttgacggggtcggcgaggtggtcggcgaggttctcgagggggcccttgccggtgacgatggcctggacgaagaagccgaacatggagaacatggcgaggcggccgttcttgatctccttcaccttgagctccgcgaacgcctcggggtcatcggcgaggccgagcgggtcgaaagcgccgccggggtagagcg

SEQ ID NO: 399227 - DNA, 393 bp, Oryza sativa nipponbare
actagaacgtttgggggtgcgttattattattattatacctctgagcaaacaagcgtgcgaatagttggtgctcggcgataataatgaacaaataggtagtgttttacatagcggatgaatactttaaacaatcaatttggcacaaacaggtgaaattccttgcagttgcaggttcgaacctgcagctaattacatggaagcagctataccgcacctgaaattacatgcacagattatgccgtcacctgaccaaaaagaagcttccggatctccggtaatttcttgcggaagacaacttccagcctggcatcaagtgtgttctcacacacaatctttccatcttgagaagccagcacaacacctccagagcaaaacctctcatgggaatcatg

SEQ ID NO: 399228 - DNA, 437 bp, Oryza sativa nipponbare
ttaaggggcaaacaggaggctgagctcatgatgatttcagataaataaacagctgatccagcacagtaaacataaagttcagaggtccaaattgctcatatccccttggctcacaccacaaaaattttcttatctcctagcaagccacagaaccaagcaaaatataaaggaaagtacacaatgtcaagcacaagttctggatatcgggaacgctatatctagtgggacttgacatagtcctggactatgttgaggccctctgactcttcaccgaagtccttgacaacgacccatgagcagcctacgaccttcctcgccttgccctcagaatcaatcttgcaaagccctgcccactcgccaagagttttagcactaggcacggtaacgaggtgaacattgtgctcagcgcagagtgccttgacccacttgacataatc

SEQ ID NO: 399229 - DNA, 427 bp, Oryza sativa nipponbare
tgaagttcgattgaggatgatggacctttttactaggcaaaccacacgaatacacgattgattaatttcactgagaatagcacgggtacatcacatcacacaaattcatacgttgatacacgcatagtcgccgaagcgaccagctgcttaattaatcgataacacacgggtttaattcagcaataatcagcacacacacaaaccacactcatatgggtggtttttattgtggactaattaaggtaggtgactcgccggcggctagtgttcggttgcttcgtgacttcacttgccgcacttgcagtccgtgcaggagcagctggtgccgcacttgcagccgacgttctcctcgccggcggagacctactagaagtggctcttctcggcttcaactatgacgacaccatagctggtacctttcttcacg

SEQ ID NO: 399230 - DNA, 423 bp, Oryza sativa nipponbare
aaggaaaaatctaacacattttcatataggcaggaggtccaagggggcatatccttttgggaaaggaagaaaaagggatcaaactagtgcactatttatccgagaagatgcctggttacaactaataacacctccatgttaatgaatcctgatgcactaattacaagtaatatgccctaatggcttattcttctccttaaacagccggtaggccttccttgaaccatgtgtagagtcctccatccagatggaacacattcttgtaaccattcaggaccaacaagtaagctgttatcagggacctcgattgcttcccatcaggaaagttctgggttggtttaaatgttcctcctgtcgaacatgccacaataatctttgcatctttaccaagtttctaatcaacactttgtatgaactcaggat

SEQ ID NO: 399231 - DNA, 424 bp, Oryza sativa nipponbare
aattcacaacaccatatttcattgatcaggttcagaacctgcacagaaatacacactaccggtacagatctcaccctctctccaatactcgtacatccatccacgcggtccacacgaatacgtacatctatacggtacacgtacgtacatctactgcaccgcgtacacacacgcacactctcctgcagagacgcgcatcgtcgtcaacctagctagcttagctgaaggcgatgcgtcgccatggcagcacggcggcggcggcgctcacttgccggggacgaagttggtggcgtaggcccaggcgttgttgttgacggggtcggcgaggtggtcggcgaggttctcgagggggcccttgccggtgacgatggcctggacgaagaagccgaacatggagaacatggcgaggcggccgttcttgatc

SEQ ID NO: 399232 - DNA, 389 bp, Oryza sativa nipponbare
caagtatcaagtgtagtatatgagtcatgatgcaagtacagggttacatagattaatcacaatgcagtttgattaagcagtgggcatcatcacatcgcattcagaggaaggctatcttagattacagatgaatatgcagacacccagcttggtgttacatacatagactggatttgggtgaaatttagccggcgagggcgctggtgttgtagacgaggagggcgccgccgccgaggagcccggcgagggtcacggcccagatcagaagcccggtggttccaccaacgtaggtgtcaccggtgggagaccattcctccggcgagtagattgggctgtagccgtcgacgtttgcgccgtactttgcaaccaattggtacacaccctttccc

SEQ ID NO: 399233 - DNA, 438 bp, Oryza sativa nipponbare
taactaagaccagtttgattgggtgtgggatacaaaaattaagatggacggattcacaagagagcaccctctacttaagctttacattacaaggccaaccagcagctgcctgccggccgaccactgcgtgcgcacgcgcgcgcaataatcaaccaatcacacacagtacgcacgcacataaaaaccacccatagccttcacgtacgcccggacgcacgcaccggttcgtgccaagctcaagggtagatggttctcgggatgatgatgtcgccgatgttgttgtgccacgggtccgagaggtggctggccaggttctccagtgggccggtgcccgggtacgccgactgttggacgcagaaacccacaaaagccagcatggccaatcgcccgttcttgatctccttgagcttgtactcctcgaacttgacggggtccttg

SEQ ID NO: 399234 - DNA, 402 bp, Oryza sativa nipponbare
taactcaaaccaaattcatttgcgtgcggacccaaacaagaacatgtacgcattcacaaaaaacacctacatactacatctataccttacaaagacaaccaacaaatgccttatgtccactcactaaatacgcaccctctcacaataatcaaccattcacactcaattcgctcgcacttaaactccacccatatccatcactgtactccatgacgcacacacccgtttttgccaagctcaaggctatatgcctctctgcatgattatgtcgacgatgttcctgtcccacggctcccaaaggaggctgtccaccttctccagtcggccagtccccgggtactcctactgttggacgcataaacccacaaaagccatcatgcccaatctccctttcttaatctc

SEQ ID NO: 399235 - DNA, 371 bp, Oryza sativa nipponbare
ataattaattcacaacaccatgtgtcattgatcaggttcagaacctgcacagaaatacacactaccggtacagatctcaccctctctccaatactcgtacatccatccacgcggtccacacgaatacgtacatctatacggtacacgtacgtacatctactgcaccgcgtacacacacgcacactctcctgcagagacgcgcatcgtcgtcaacctagctagcttagctgaaggcgatgcgtcgccatggcagcacggcggcggcggcgctcacttgccggggacgaagttggtggcgtaggcccaggcgttgttgttgacggggtcggcgaggtggtcggcgaggttctcgagggggcccttgccggtga

SEQ ID NO: 399236 - DNA, 360 bp, Oryza sativa nipponbare
ataattaattcacagcgccatgggtcattgatcaggttcataaccttcacataaatacacactaccggtacagatctcaccctctctccaatactcgtacatccatccacgcggtccacacgaatacgtacatctatacagtacacgtacctacatttactgcaccgcgtacacacacacacactctcctgcaaagacgcgcatcgtcgtcaacctaactagcttagctgaaggcgatgcgtcgccatggcaacacggtggcggcggcgctcacttgcccgggacgaaattcgtggcctaagcccaggcgttgttgttgacaagatccgcgaggtggtcagctaggtccttaagggggcc

SEQ ID NO: 399237 - DNA, 399 bp, Oryza sativa nipponbare
gatagcgagacacctggtatggctttattaatatcaatacatgtcaggtaaagtctatgcagtgtgcatatgtgcattcacagtcacactcacttagtcaaataccaagatcgatcgatcgatgtacaagtggatgcattaattcatcatcttgggtgttcttatattacaaatcaccaccatgcaagtcgccattaaccaccaacccagctttcctaatttaagtagtaatcaacaaaaggatgacctctcctctctccataccctcccagctcgctcgtcatcacaaaactaaacagcgcgcgcgaacgcacaccaacgcatcgatcccggttgaattgcgcgcgaaagagcttaaattaagaggatgaggagaaggtgtcgaagatggtggtgtgg

SEQ ID NO: 399238 - DNA, 452 bp, Oryza sativa nipponbare
tgtcgacaacaatgtgaacattgacccttgattaatagttttgttatacacaacaatgttatacacatcctgtacgacaacaatgtgaacgttcacccttgattaatacttttgtcttaggttcatatcaatatcaacagacagtgtcgattcgtggcacgaaaactatttcatgattttgttccctattttatttagggaagaattgttaccaatatatggtacgagttccatgtgatactagcaaccccgtctgagttaccttttgtgatcttggtaatatataattgtagccaaaatatgttacacatcactgtaaaaatcttgaacactgggcattgggctcccagccaagaatgatttgatgagaattagagcctgtttgggcctatgcagaggaacctcatgacctgcgcccctcacagtcacgaagttgagtcccttggaccctt

SEQ ID NO: 399239 - DNA, 412 bp, Oryza sativa nipponbare
  unsure (1)..(412): unsure at all n locations
aattaattcacaacaccatatggcattgatcaggttcagaacctgcacagaaatacacactaccggtacagatctcaccctctctccaatactcgtacatccatccacgcggtccacacgaatacgtacatctatacggtacacgtacgtacatctactgcaccgngtacacacacgcacactctcctgcagagacgcgcatcgtcgtcaacctagctagcttagctgaaggcgatgcgtcgccatggcagcacggcggcggcggcgctcacttgccggggacgaagttggtggcgtaggcccaggcgttgttgttgacggggtcggcgaggtggtcggcgaggttctcgagggggcccttgccggtgacgatggcctggacgaagaagccgaacatggagaacatggcgag

SEQ ID NO: 399240 - DNA, 420 bp, Oryza sativa nipponbare
attttatttatattgggacatggcaaacaccatgctgataagttttgggcccaaattgttttacaattccatacgcccacagtaagatgtacttagcacacttagtacaaccgaaatggcattgttctttgcatacatacaaaattacatcatttgcttagcattactgttacataacaacttttcatccaagatcaggaacgatgaaaaagtccttggcttaattgggtatctccacccgtggtttcttgctttggcgtgcaccgctcgctttgtagagcccaatgttgctcgctggctgcggcgaggcaaaaagctcaggcacctccgccgccgtgctgccttctttggccggcgactggacatggaacaggtctatgtcatcgagccactccagatccttgaacccaataggagagc

SEQ ID NO: 399241 - DNA, 210 bp, Oryza sativa nipponbare
aacttggggtctgtgggggtatttttacatccaatggattaattccaccgggaatagcccggcgtctttacattacacaaatttatactttgatacccccatagtgccccaagcgaccacctgtttaattaatcgataacacacgggtttaattaaagaataattaggaaacacaaaaaccaaatttttttgggggggttttattgggga

SEQ ID NO: 399242 - DNA, 363 bp, Oryza sativa nipponbare
tgggaaacgaataaaatcattggttgcaaaaacatcatcttcttcttcatcttcttagtgtacacaacaccaactcgatcatcatctcgtcgcactaaacccatcttccccaacccaaagacaacgaactcgctggccacaaatccatccaaccacaattaaccactgctaagctacggtcccccacttcacttgccggggacgaagttggtggcgtacgcccaggcgttgttgttgacggggtcggcgaggtggtcggcgaggttctcgagggggcccttgccggtgacgatggcctggacgaagaagccgaacatggagaacatggcgaggcggcccgtcttgatctccttcaccttgagc

SEQ ID NO: 399243 - DNA, 411 bp, Oryza sativa nipponbare
cagctaaaaataataattttaaaatggtggcccacatgtcagctactcctcccttcttccccctcccttctctctcatattcatcgtcctctcttcttcatgtgcgcagggggaaggaggcgaggcggggcgacgcatcccccacaccgacaccacccccagcgcgccgccaccgccggcatcttcgtcttcctcctcgccgccgctgctgccgccagcatcttcgtcttcctcctcgccgccgccgcggcaatcgcggcaagcaggccggcgacgactacgtggagatggccgaggggaggaacaacaaggtcgccgacggcggcagcgccgatgactcgacgaccagcggcaaggcggacaccaaggtgtagctctggcgtctcagtcaatccatgagcggtcgagtag

SEQ ID NO: 399244 - DNA, 441 bp, Oryza sativa nipponbare
gccatgcatctttgtccgccatggccatggagcaggagtgaataaaggaagctttctgctctctacttctccttcacagtacggccggaagctatctaaggactgcagctatgggcaatttgttctgctgtgttcaagttgatcagtctacagcggccattagagaacagttcgggaagtttgatgctgtgcttgagccaggatgtcactgcctgccttggtttgctgggaagcgtatagctggccatctcacactcaggttgcagcaactggatgtgcgctgtgaaaccaagacaaaggacaatgtgcttgtcaatgttgtggcatcgatccagtacagagctttggctggcaaggcaaatgatgctttctacaagctgagcaacacaagatctcagatccaagcttatgtcttcgatgagatcagggcaagtggtccca

SEQ ID NO: 399245 - DNA, 416 bp, Oryza sativa nipponbare
ggtcccaagcaacatgctgggattctataccagaacctggcaaccggtgtccggtagtatatacggtattacacatgaacattacacagcattgcgatttccaattgccggaagtcgataataatccgtgccggacagtgaaaagtcagatgaggtggggaagaaaagcaaagaaagaaacaagaaactgtgttgggcgctcgaaacttcgaaattctcattacaaaggatcgagaggaagaaggaagaagtctggggaaaatttttggagcgaggtggagttacaaaggcagcagcagcagcagcttctacgttctcacttccactggttggcgacgatgtcggcgaggtcgacgaccctctgcgagtatccccactcgttgtcgtaccaggcgatgaccttcaccatgtcgtcg

SEQ ID NO: 399246 - DNA, 433 bp, Oryza sativa nipponbare
ttaggattcacatccatctcggaccctgggtataaatatatatagccggagcttccatatatttcattcacatatgcctcacccaacaacatatagtcgtagcagataccactcttacatcaagtcagagagagatcaggtgaaacaaaaacaaaagcagagcacggccggtaaaatcaaaagacgatgaacaaactgggaacacacgaaacaaggtgggagacatcatcgaatcagagatgaacaattaaacaaggctatatatgacgatgacggcttagttgccaccagactcctcgcagcccgggggcttgtaggcgatgaagctgatgagctgcacctgcctgacgttgtcgaagccgatgatacggacgaatgcatcagggtacgccttcttggcctcctcgagctccttgagcacctgggtggcgtc

SEQ ID NO: 399247 - DNA, 423 bp, Oryza sativa nipponbare
taacagcaaaaattgtgatcaagcataagaggtatgtgacggatggtccggataatactcaaacttggaaacaagtacctggccttaatggcaaggataccaggccgagaagtataacgcctaacatccaacccgggaactcgaaccactcaagtcaaaccatacgagggaaaaagtgccatgttgccgataacctcatgcaagatcacacacaactgcaagctaaaaagatagctacgactgtaaattaggagataatggcgtcgcccagtgacagcgcagcaagttgactggtcggggtgttcgcattgtgctgctgggccacattgcggaggacatccatcgcctcagcaaccttggacttcagagcctctggagactcgagcagatgcaggacctccgtctgatccatctccagaagca

SEQ ID NO: 399248 - DNA, 394 bp, Oryza sativa nipponbare
aaaagggagtaaaaagggaaacgcttcataataatattattaagacattatagctgatgtcttttgatcacactgcgatcaaattatgcatcataggcagtacaactccgcgtcaggaaaaagtagaggagatatatttcttgttattacttaatacagcattcacatatatcgaaccatccggtacgtacgtagtagtactccacgcgttcacatcgatgatcggggacgatatcctcaggtaggtcttatgcaaaagcggtggcgtaaactgaccaactgaacggactgacggtcggatttagggctcccataaagccaagttgccggagacgaagtcgtagtggccgccgactagcttgagggtgccgttggcgatcccctccttgacgaa

SEQ ID NO: 399249 - DNA, 400 bp, Oryza sativa nipponbare
tttaaacacgaaaaattccgcagtcatgcgaattattcacagaatacaccaaagtatgtgtaactgcttgtccaagaagatagtgaaggttaatatagcattagcataacatcttacagtaggtgtctacgataagaactattgacaaagtttccacacgctgtaaaatgccaggggtcccttttacataagatggcactccatggatatatgtttacaccgacttgttcttgcaagaattccaacagtcacctcaggaattcagcttgatgccttttcttttacccttgctgttccattcaaagtttcttagttcttgtacttcatggtttctttctcaaacccaattgtggggaactgttttgcatattcctccacatcatggcgaagttttgcaatc

SEQ ID NO: 399250 - DNA, 369 bp, Oryza sativa nipponbare
ggagcggaaactgaaaacatatttcagggttgttgaattaaaataggtacatgagcagctcatcagcaataatagtattttggctgctttgagcctggggataagatggaaataatggagggaccagtctcaaaacgttagcaacctcctcttcactggcatggctgccgacagatgcagacctgctgctctctgatttacagaaatcttctcgaaaatggtatgaaattagctgctgctcccggtgatttcattgtaggtgctcttgattttgctcaccagaacttacctgtctggctggaagatgaggttccggtatgtaaaccaccctgtatacccgattccaacgagctcaagccggacgcgtgg

SEQ ID NO: 399251 - DNA, 355 bp, Oryza sativa nipponbare
gggagggggatagacctttttactaggcaaaccacacgaatacacgattgattaatttcactgagaatagcacgggtacatcacatcacacaaattcatacgttgatacacgcatagtcgccgaagcgaccagctgcttaattaatcgataacacacgggtttaattcagcaataatcagcacacacacaaaccacactcatatgggtggtttttattgtggactaattaaggtaggtgactcgccggcggcgagtgttcggatgcttcgtgacttcacttgccgcacttgcagtcggtgcaggagcagctggtgccgaacttgcagccgccgttcttctcgccggcggcgacct

SEQ ID NO: 399252 - DNA, 378 bp, Oryza sativa nipponbare
tagatcctataataacgatacatgattaattcgatcatcccttggatgcggcctgcggcttacattaaatctcgatccaaagaagcaaagatgatgacagacagaaattaattaagctagaaatctcctcgatcgatcacacacacacacacaattaaggtacatacatacatgcactgctgcaactgcaactgcagggtcggtgcgtggctactacaagtgtacacatggtacgttggttggcaccatctcgatcgtgtcgttgtgctcacttgccggggacgaagttggtggcgtatgcccaggcgttgttggcgacggggtcggcgacgtggtcgaagaggttctcgatggggcccttgccggtgacgatggcct

SEQ ID NO: 399253 - DNA, 419 bp, Oryza sativa nipponbare
ccacgcgtccggcctaatggtactctacgtgatcatctttcagctcgatcaaaagagcccctaaattttcccacgaggttacgaattgcgctggggtcgtcgcgaggcatcctctatttacacacagaagcagaccctccaatatttcaccgtgacatcaaagcaagcaatattttactggactcaaagtttgtcgcaaaagttgctgattttggtctctctcggcttgccccagagccagaatcagaggggattgctcctggtcatgtgtcaactgttataaagggtaccccgggttatcttgatccggagtatttccttactcataagctgacagacaaaagtgacgtgtacagccctggtgttgtttttctggaactgctgacagggatgcaacctatttctcatggaagaaatat

SEQ ID NO: 399254 - DNA, 460 bp, Oryza sativa nipponbare
ccacgcgtccgatccatcgatcgatctcgccatcgtcctcgagcgagcgggcggctgcggcgagctcgatccgatccccgccggcggagatggggagcttggcaggcggcggcggaggcggcaaggtggggctgccggcgttggacgtcgcgctcgcgttcccgcaggccacgacggcgtcccagttcccacccgccgtatcggattactaccagtttgatgatttgcttactgatgaagagaagacacttaggaagaaagtccgtggtattatggagagagaaattgcaccccattatgacagagtactgggagaaagcagaatttcccttccatgccattcccaaacttgcaactcttggcttggcaggagggaccaccaaaaaagtggcacgggtggatgccagctgctccacatttattttagtacattcctctttggcaatgagcacaattgcac

SEQ ID NO: 399255 - DNA, 425 bp, Oryza sativa nipponbare
ccacgcgtccgatactatctctcactgaagggatagcagtaggcaggacatttgcatccatcaacaactaccaggttgatggaaacaaggagatgatggccattggtgtcatgaacatggctggctcatgtgcctcctgctatgtcaccacaggatcgttctcgaggtcggcggtgaactacagcgcggggtgcaagacggcggtgtcgaacatcgtgatggcgtcggcggtgctggtgacgctgctgttcctgatgccgctgttccactacacccccaacgtgatcctctcggcgatcatcatcaccgccgtgatcggcctcatcgacgtccggggcgccgccaggctgtggaaggtcgacaagctcgacttcctcgcctggcatggccgccttcctcggcgtcctcctcgtctccgtccagat

SEQ ID NO: 399256 - DNA, 473 bp, Oryza sativa nipponbare
ccacgcgtccgcactggcaaacctgtgactgcagtacggcgtgaactgggctacttccagccaaattacatgggcatccaatggatgggtcaggtactccctgatattctgccggtgaagccagatgagggcccagatcatgtttctcgtgaaagaggtgccataatgatcggtgctgcacctttacccctgaactataatgtgccggtactatcgaaggatatcccaaccataagaaggatcacccgaagggtgactggtcgtggtggaggactcccgacagtgcaagcgcttgccctttcccatggtgatgactgcacagagattgcatgcttcctggatccagatcatgtcagtgccgatcaggttcagcagcaggtgggaacagatagcagcagagcaaggacttgaggttgaaaaggggtacttcactgacttctcaaaggatgcaatgcttgaaaaatacttcaaga

SEQ ID NO: 399257 - DNA, 438 bp, Oryza sativa nipponbare
ccacgcgtccgaaattgaagcatttgcggttgctggatttcaagaaagtgaaacaacaggagagaattgcagcagcacagaagtttcactcaaaggaggcagaggaagaggcaaagaaggtgccagccaaaacttttactcctggacaggtggtggatgctcaagataccacaatggaggagcagggtccaaaagtagttgctccaacacctgagcaaatcacagctatcaaggctgccattgtgaattctcagacacttgaggaggttgcaaggcttgaaaaggcactgagcactggccaaattcctgctgaatttgcaatccccaagccagatgcttatatgctgatgcttcagaggaaactgaaaagatggagacagatggtcagaaccaagaaaatggggcggatgagaagaagcaaaatgaagaaagcacccc

SEQ ID NO: 399258 - DNA, 475 bp, Oryza sativa nipponbare
ccacgcgtccgcagctgcaaggagaaggagaaggtaggctccagccatggcttcccagctctccgccgccacatccgtgccgcagttccatggcctccggacctactcctctcctaggtccatggtgacgctgccatcgttgaggatgagcaagaagaggtcccagggcatccggtgcgactacatcggctcagccaccaacgttatcatggtgacgacgacgacgctgatgctgttcgcggggaggttcgggctggcgccgtcggcgaacaggaagtcgacggcggggctgaagcttgaggcgcgcgactccggcctgcagaccggcgaccccgccgggttcacgctcgccgacacgctggcctgcggcgccgtcggccacatcatggggcgtcggcgtcgtcctcggcctcaagaacatcggcgtcctggaccagatcatcggctaatcaaattcattaagctagtcacacga

SEQ ID NO: 399259 - DNA, 459 bp, Oryza sativa nipponbare
ccacgcgtccgcttagccggctgattcttttgttgttgcaaacgaagctgctaccaaagtggggggcacgtctgaaccaaatggtacgcataggaccttacatacacatgagaatgcaaccgcaaaaagtggtttgagcggtagcaactggttaaaaagtgctcagaaatcaatcatgcgttcatctggatttgatcgagagaaaaataacactcccatacagaggaagcttggttcaaatggtccgatgcatatgagcaagcctgagagttacagtgagatgctatctggatttcagccacctaaagatgtacaaatcccacagggtttctgttctttacctgagcagattactgcaggccattctaacttctggcacacagtaaatgctcagtatcaagatcaacagagcaatcacaatatgttccccagctcatggtccttcatgcctccaaatac

SEQ ID NO: 399260 - DNA, 466 bp, Oryza sativa nipponbare
ccacgcgtccggataattgagaccaaccgcacaacagcaaggattttccccgctgttcttgacgtcgagaaccctgaattcaagaggaagttagacaggatggtggagatcaacaaaaagatcattgccataggcgagtctgacgatatccccctggtgaagaacctgaagaggattcctcacgttgccgctctggtgtctgagatcattgctgcgtacctcatgcccccaatcgagtctggctctgttgatttcgctgaattcgagccccagcttgtctactgattctgtaggaagaccatctccagcttttttttccttcaaaaaggaatgctgatattttctgcctgaggggcttcgaacggtgagatgatggggggttagcagaatctgcacctcgtgtgttcctttgtaaagtattgagacttcaacaatgtaccatttggcaaaggttttgttatgatct

SEQ ID NO: 399261 - DNA, 454 bp, Oryza sativa nipponbare
ccacgcgtccggtctgctgccgcttgccttggccaggattccagtgagagaataaaggctttcttgtttgcaagaaagagatggctacctctgcagaatctttatgtggcattggtatcaccaccatttagtcaatttgttgagtatgtagcgaactagaagttcgaccaagagccaaactatgcaaagtgcattgctctatgtgatggcattggtggtccatatgcagatggaagaccatgaaacaccgatggtgcccagaagcttgtatatcacggtgatcagaagagaggccgtcttacaggggcctgagatgaggcgcacctctaagaagacattcgaatgtgactgccaccgacccagtggattagtgtgtacaatgcccgtcgggcaatgaaacagtgattccactacaatgttatcatatgatagatagcaccacatattcaaaaag

SEQ ID NO: 399262 - DNA, 449 bp, Oryza sativa nipponbare
ccacgcgtccgcggacgcgtgggcagcaacagtcactgcaattatgcaaaccatacagagtaatcaaaatgggagcatggctgaccaaaacgggagcacgattgaccaggaactactcttcaaaatactaagtgatccttcacagcttcagaggttaatgaaagaatgtggcccagtcagacatgaacaatcagctagtagttctgttgttgccccattggtatcaatcccaccaccccaaataactgcaagctctcctgcccccttctctgatcatgtcggaacctttcatggcatgaatcctaccctgccgcctccaccaccaatgatgaatcggccaccttcaaccattccttcagttgctatgaatcatccaccaagttcaagcccagcaatgaactttggaagtgccctgccaagttcaagcccatcagtgaactttggaagtg

SEQ ID NO: 399263 - DNA, 460 bp, Oryza sativa nipponbare
ccacgcgtccgagcttacaagcttcttatcatgagagtttgcatccactttagtgcatttgctcttccaatatgctttattaattctttcagagctgtaatcagcaactgtcgtgcacctagcttcttgagctattgatcaaaatgatcatacagtttaggctgatgcagatagttgctgtttgttgagttattctgacaaagcaaatggtatcgtctcgcctctttgcatctgctgaccaccatggacttcgtctgttattgccgtattctttctctagtacccaattgctttctccggcctagggaggcacagaaggctgctgatgaagcgaaggctcgatttggccacattgacggggaccacctgacacttctgaatgtataccatgcatacaagcagaacaatgaagatccccagtggtgttatgagaacttcatcaatgccagagctctaaagt

SEQ ID NO: 399264 - DNA, 455 bp, Oryza sativa nipponbare
ccacgcgtccgatactctactactactagccagtaagctagctaactaactacgtggctatggcccccaccgtgatggcctcctcggccacctccgtggctccattccaagggctcaagtccaccgccgggctccccgtcagccgccgctccaccaactcgggcttcggcaacgtcagcaatggcggaaggatcaagtgcatgcaggtgtggccaattgagggcatcaagaagttcgagaccctatcgtacctgccaccactcaccgtggaggatcttttgaagcagatcgagtacctgcttcgatccaagtgggtgccttgcctcgagttcagcaaggttggattcgtctaccgtgagaaccacaggtctcccgggtactacgatggcaggtattggaccatgtggaagctgcccatgttcggctgcaccgatgccacccaggtgctcaaggag

SEQ ID NO: 399265 - DNA, 470 bp, Oryza sativa nipponbare
ccacgcgtccgattcgcgccgcccccggtcagcccgcgtcgccggtccccatcatcggcggcgcccgacgagtttaacccttgcgcggctctgctggagtgcgagtacaagaacgacgccgcagccgagaacacgctgctctactcggcggcgtcggtgggggacatggcgttcgtgcaggagttcatggacagggaccccttgctggtgtttggcgagggcgagtacggcgtgacggacatgttctacgccgccgcgaggggcgggaacgccgaggtgttcgggctgctgctggaccacgccatgtcgccgacgtgctcgacgaattgtcccaacggggaaggcgcagcagcggtggtggctggctcctggtgttctggctggaaatgatgggcaaaggagtccacgccgccgcgaggggcggcagcgtggagatgctgagggagctcatcgagcgtcgcttcgacgtg

SEQ ID NO: 399266 - DNA, 465 bp, Oryza sativa nipponbare
ccacgcgtccgcccacgcgtccggcctacaacaagggcgagagcactgccaagaaggcacccgccaaggaggaagaggaggacgacgaggaggaatctgacaagtccaagtccgaggtcaatgatgaggatgacgacgagggcagcgaagaggatgaagacgatgacgagtgagccttccagtggacaagatgggagcagcaagacgctaagggcggcgggcgtcctaaggagcctattcatcatcatcatcgtctactagaattattcagtttcacttcacatcgtgatgttttactttttctctcgtcctataacggatagcgctccttgttggcgccactggtggggtggtgggtgcagccaatgtcttgtctccaccgtcaatgatccgcttgtacctagattactctttccattgtcatcggctaacattgtgataatatcagtttgcgtatgttagatt

SEQ ID NO: 399267 - DNA, 421 bp, Oryza sativa nipponbare
ccacgcgtccggaacaactccgacgggacatgggccgtagtcgatgtctctctcgacagcctccgccccagccctgtccagaaatgccggcgcaggccgtctggctgcctcatccaagaaatgcccaatggctactccaaggtgacatgggtggagcatgtggaggtggacgacagctcggtgcacaacatctacaagccattggtgaactccggcctcgcattcggcgcgaaacggtgggtcggcacgctggaccggcaatgcgagcgcctcgccagcgccatggccagcaacatccccaatggcgaccttggagtgattacacgcgtggaggggaggaagagcatgttgaagctggcggagaggatggtggcgagcttctgcggcggcctgacggcgtcggtggcgcaccagtggacga

SEQ ID NO: 399268 - DNA, 413 bp, Oryza sativa nipponbare
ccacgcgtccgatttcgaagctgcggttgatcactgtggatgtcaccggtactctgcttgcctacaaagggcagcttggtgattactactgtatggcagctaaggctgctgggaagccatgtcctgactaccagcgaatgcatgagggcttcaagcttgcatacaccgagatggcaaggcaatacccatgctttggatttgcagcgaagatgccgaatatcgactggtggaggatgtgcgtcaaggattcttttgttaaggctggttatgagtatgacgaggagacatttgagaagattttcaaacggatttactcttcttttggctcgtctgctccgtactcggtattccctgatgcgcagcccttcatgaggtggcttcgcgggaaggggctcacggttggaattgtcagc

SEQ ID NO: 399269 - DNA, 449 bp, Oryza sativa nipponbare
ccacgcgtccgctccgtggccgcctgccttggcaaggattccagggagagaataaaggttttcttgtttgcaagaaaaagatggcaacctctccagaatctttatgtggcattggtccaccaccatttcgtcaatttgttgagtatgttgtgaacttgaagttcgacgaagagccaaactatgcaaagtgcattgctctttttgatggcattgttggtccaaatccagatggaagaccattaaacaccgatggtgcccagaagcttgtatatcaggttggtcagaaaagaggccgcctcacagcggctgaagatgaggagcaacctaagaaaaagattagaatgggaatgccagcgacccagtggattagtggtacaatgcccgtcggccaatgaaacagagataccacttcaatggagcagatgatagattagcgcccacatattcaa

SEQ ID NO: 399270 - DNA, 311 bp, Oryza sativa nipponbare
  unsure (1)..(311): unsure at all n locations
ccacgcgtccgactagatcaccacacgcgcacacagacacgacgcaccaatggcgctcgtctacgactgctgcttcaccaccagncgtgacgagcgctccccggcgccgccagggcctcctccttactcggacgatccggcaggagcggaaggctgctggtgaggcaggccgagtcgtgctcacggcggtcgtggagggcaatgcgcgctacggcgccggacaggccaatatgattgcctggcacaacctcagggacgtgcatcgactgaggtctatcgggtaactgccgcttgggtcccgaggagtctgg

SEQ ID NO: 399271 - DNA, 461 bp, Oryza sativa nipponbare
ccacgcgtccgaagaagtactcgagcaaagaaggagagagcttggtgagctgcagagatggccccctccgtgatggcgtcgtcggccaccaccgtcgctcccttccaggggctcaagtccaccgccggcatgcccgtcgcccgccgctccggcaactccagcttcggcaacgtcagcaatggcggcaggatcaggtgcatgcaggtgtggccgattgagggcatcaagaagttcgagaccctctcctacctgccaccgctcaccggggaggacctcctgaagcagatcgagtacctcctccgttccaagtgggtgccctgcctcgagttcagcaaggtcggattcgtctaccgtgagaaccacagatcccccggatactacgatggcaggtactggaccatgtggaagctgcccatgttcgggtgcactgacgccacccaggtgctcaaggagctcgagga

SEQ ID NO: 399272 - DNA, 475 bp, Oryza sativa nipponbare
ccacgcgtccgaacacgcagaagatcacggaggcgatgaagctggtggcggcggccaaggtgcggcgggcgcaggaggcggtggtgtcctcccgccccttctcggaggcgctggtggaggtgctctacaacatgaaccaggagatccagacggaggacatcgacctccccctcacccgcatccgccccgtcaagaaggtcgccctcgtcgtcctcaccggcgagcgcggcctctgcggcagcttcaacaacaacgtcctcaagaaggccgagacccgcatcgaggagctcaagcagctcggcctcgagtacaccgtcgtcagcgtcggcaagaagggcaacgcctacttcatccgccgccccttcatccccaccgagcggacgctggaggtgaacggcatccccaccgtgaaggactcccagtccatctgcgacctcgtctactcgcttgtcgtgtccgagggcggtggacaagg

SEQ ID NO: 399273 - DNA, 466 bp, Oryza sativa nipponbare
ccacgcgtccgcgcgctcccgcgccacagtcgtcgccagcctcgcctccccatcaccgtcctcctcctcctcctcctccaacagcagcaacctcccggcccccttccgcccccgcctcatccgcaacacccccgtcttcgccgcccccgtcgcccccgccgcgatggacgccgccgtcgaccgcctcaaggatgggttcgccaagttcaagaccgagttctatgacaagaagccggagctcttcgagccgctcaaggccggccaggcacccaagtacatggtgttctcgtgcgccgactctcgcgtgtgcccgtcggtgaccatgggcctggagcccggcgaggccttcaccgtccgcaacatcgccaacatggtcccagcttactgcaagatcaagcacgctggcgtcgggtcggccatcgagtacgccgtctgcgccctcaaggtcgaactcatcgtggtgatt

SEQ ID NO: 399274 - DNA, 466 bp, Oryza sativa nipponbare
ccacgcgtccgcccacgcgtccgcccacgcgtccgcccacgcgtccgcccacgcgtccggcacaagaaagcataagcaacacaagggattaactcatcactcacttagctaattaaatcttcgaccatgtcggacaagtgcggcaactgcgactgtgctgacaagagccagtgcgtgaagaaaggtaccagctatggcgtcgtcatagttgaagccgagaagagccacttcgaggaggtcgccgccggcgaggagaacggcggctgcaagtgcggcaccagctgctcctgcaccgactgcaagtgcggcaagtgaagtcacgaagcaaccgaacactcgccgccggcgagtcacctaccttaattagtccacaataaaaaccacccatatgagtgtggtttgtggtgtgctgattattgctgaattaaacccggtgttatcgattaattaagcagctggtcgcttc

SEQ ID NO: 399275 - DNA, 470 bp, Oryza sativa nipponbare
ccacgcgtccggcgggagggatcgggcagccgctgtcgctgctcatgaagttgaacccgctcgtctctgtgctccacctctatgatgtcgtcaacacgcccggtgtcaccgccgatgtcagccacatggacaccaccgccgtggtccgtggtttccttgggcccaaccagcttgaggcagcacttacaggaatggatcttgtcattatccctgctggtctcccaaggaaaccaggaatgacaagggatgatttgttcaacaaaaacgctgggattgttcgctcactttgtgaaggcgttgccaagtgctgtccaaatgcaattgtgaacttgatcagcaacccagtgaactcaaccgtccccattgcaggcagaggttttcaagaaagctggaacttatgatcccaaacgtcttctttgagttacaacactggatgtagcaagggcaaacacctttgtggctgaagtact

SEQ ID NO: 399276 - DNA, 467 bp, Oryza sativa nipponbare
ccacgcgtccgcccacgcgtgcgcccacgcgttcgcttgatcattgctttcgacgcgaaatcatgaacggcgatatcaaaatgtatgataatgggggcagctgtgtcaactgtctactacaacctcaagctgaagcacccaactttggatatgcctgttattgactatgatctagccctgcttatccagccgatgctcatgctagggatcagcatcggtgttcttttcaatgtcatattccctgattggctcatcacagttctattgatcatccttttcctaggcactgcaactaaagcttctctgaaaggtgttgagacgtgggaacaaagagacactactcaaaagggaggcagcaaagcggttggagcaaatagctgaagaaccggagtatagtccgctgcccacagggccgaatgccacagctgagtcaaaagccccatcagatgaagcagcatctctatggc

SEQ ID NO: 399277 - DNA, 435 bp, Oryza sativa nipponbare
ccacgcgtccgcggacgcgtgggtccccctccaattcaatttcctctctctccatctctctcctccaatcgctgcctcgctcacgcacgcgcgctctacctacctgagggcgaggctggtgccgatggcaatggaggctgcggcggagaggagcgccggagcaggggcggcggcgacggcggcgccggagagcggtggcggtggtgcaggggagaggcggtcgcggttcaggcggatctgcgtgtactgcggcagcgccaaggggaggaaggccagctaccaggacgccgccgtcgagctcggcaaggaactggtcgagaggggcatagacctggtctacggcggtggctccatcggcctcatgggcctcgtctcccacgctgttcacgacggtggtcgccatgtcattggggtcatcccgaaatccttgatgcc

SEQ ID NO: 399278 - DNA, 460 bp, Oryza sativa nipponbare
ccacgcgtccgatcttcccaaggattcagtgtcagaagttgaaatttcagagaacttatctgcagcaagatgtcggttttatgttaagaaagaactaaagagatctcgggagggagcaattgcacaccgtgtaaggggatcctgtcaacatcgatgggatgaaatcgacagtttgaatccacctagggaagagagggatccagagtccttttctacttttaaggagcgtctacactatctgcagaaaacagagcataccagagtatgctttggtaggtcaggaattcatagatggggactttttgctcgtaggggcattcaagaaggagaaatggtgctcgagtatagaggtgagcaggtcagacgaagtgttgctgatttaagggaagaacaatatcgtgtacaaggcaaagattgttatcttttcaaaatcagcgaggaagtagtcgttgatgccaca

SEQ ID NO: 399279 - DNA, 473 bp, Oryza sativa nipponbare
ccacgcgtccgcctgatccaaaggacaaaaagcctgagtcatgggatgatgatgatgatggtgtatggaagcctagaatgataccgaatccagaatacaagggacgttggaaacgcaagaaaattaagaaccctaactacaagggaaaatggaagatcccatggattgataatccagaatttgaggacgacccagacctatatgtgctgaaacctttgcagtatgtgggaattgaggtttggcaggtgaaagctggttcagtttttgacaacattttgatttgtgacgacccggagtatgcaagaagtgttgttgatgaagttagggctgcaaataaagaggctgaaaaggaggccttcgaggaggctgaaaagcggaggaaggctagagaagacgaggaggcttcgcgtgcacgagaggaaggagagaaacgaagaagagacagggatcggcaccgaggcagggaccgttac

SEQ ID NO: 399280 - DNA, 462 bp, Oryza sativa nipponbare
ccacgcgtccgggcgaccagcggcactggggcgagttcatcaccccgggcttgctcttcctctacatcgccggctggatcggctgggtcggcaggagctacctcatcgccatcagcggcgagaagaagccggccatgagggagatcatcatcgacgtcgagctcgccgtcaagctcctcccgagggggttcatctggcccgtcgccgcctaccgtgagctcatcaccggcaacctcgtcgtcgacgacgctgacatcgggctactgatcaccacatggatgcttggctactcaagccccagttgatttggcagtggaggaagagggctcgtgcatggtgatttgtgtggtttgggtgtagaagctgataggatcatggaggaatggaagatctgttgtacttaagaaaaactaagtcttgtataccgtacctctctcttgtgtgtatttaccatcttaagat

SEQ ID NO: 399281 - DNA, 463 bp, Oryza sativa nipponbare
ccacgcgtccgccagagcacaagaaagcataagcaacacaagggattaactcatcactcacttagctaattaaatcttcgaccatgtcggacaagtgcggcaactgcgactgtgctgacaagagccagtgcgtgaagaaaggtaccagctatggcgtcgtcatagttgaagccgagaagagccacttcgaggaggtcgccgccggcgaggagaacggcggctgcaagtgcggcaccagctgctcctgcaccgactgcaagtgcggcaagtgaagtcacgaagcaaccgaacactcgccgccggcgagtcacctaccttaattagtccacaataaaaaccacccatatgagtgtggtttgtgtgtgtgctgattattgctgaattaaacccgtgtgttatcgattaattaagcagctggtcgcttcggcgactatgcgtgtatcaacgtatgaaattgtgtgat

SEQ ID NO: 399282 - DNA, 476 bp, Oryza sativa nipponbare
ccacgcgtccgccacgcgtccgcccacgcgtccggatgcaccttgatgcccaacattggttacggctcagacaagaagaccaggcactacctccccaacaagttcaagaagtttgtggtgcacaatgtctctgagctggagttgctcatgatgcacaacaggacctactgtgccgagattgcccacaacgtctctacgaagaagcgcaaggagatcgttgagcgtgctgcgcagctcgacatcgtggtcaccaacaagcttgcaaggctccgtagccaggaggacgagtaggctgttttatcagtataatgttttggtctggtttgattgtaggaaactgtcgcgcctccaagtattctcctttcaatcgatgtggtactgtgaaagataactattatgtcaacctttttgctaccagcagctactctaatgtggccaaattactatcgcatcattagcctacatgtcctgcattt

SEQ ID NO: 399283 - DNA, 461 bp, Oryza sativa nipponbare
ccacgcgtccgcccacgcgtccgcccacgcgtccgcccacgcgtccggtactcgagcaaagaaggagagagcttggtgagctgcagagatggccccctccgtgatggcgtcgtcggccaccaccgtcgctcccttccaggggctcaagtccaccgccggcatgcccgtcgcccgccgctccggcaactccagcttcggcaacgtcagcaatggcggcaggatcaggtgcatgcaggtgtggccgattgagggcatcaagaagttcgagaccctctcctacctgccaccgctcaccgtggaggacctcctgaagcagatcgagtacctgctccgttccaagtgggtgccctgcctcgagttcagcaaggtcggattcgtctaccgtgagaaccacagatcccccggatactacgatggcaggtactggaccatgtggaagctgcccatggtcgggtgcactg

SEQ ID NO: 399284 - DNA, 448 bp, Oryza sativa nipponbare
ccacgcgtccgagaagtttgtggtgcacaatgtctctgagctggagttgctcatgatgcacaacaggacctactgtgccgagattgcccacaacgtctctacgaagaagcgcaaggagatcgttgagcgtgctgcgcagctcgacatcgtggtcaccaacaagcttgcaaggctccgtagccaggaggacgagtaggctgttttatcagtataatgttttggtctggtttgattgtaggaaactgtcgcgcctccaagtattctcctttcaatcgatgtggtactgtgaaagataactatttatgtcaacctttttgctaccagcagctactctaatgtggccaaattactatcgcatcattagcctacatgtcctgcattttgcgtttttgctctggatgaatgctgtattgtatctgttgaatttattgtgttgaggtatcgtcct

SEQ ID NO: 399285 - DNA, 465 bp, Oryza sativa nipponbare
ccacgcgtccgcggacgcgtgggtcaagttcgtcgcgccgtgcacgttctacggctcgccacttcagactccatctcaggatgatcagggcaaggagaagaagaagaagcaacccacagtgatgctggtgttcttgtgcatcccggtgtctccggggaggagcaggttggtctgggcattcccgcggaacgtcggcgtctggatggacaagatcataccacggtggtactaccacattgggcagaatgccatcttggattcagacatctacctgctccacattgaggagcgcaatttcgctacggttggtcttgataactggcagaaagcttgctatgtgcccacatcatctgacaacatgatcatcaccttcagaaactggttcagaaagtactgcaagcattaaaattggctgggcaaccccaataactaatcagctgccaccaactcctagcaaagatcagc

SEQ ID NO: 399286 - DNA, 421 bp, Oryza sativa nipponbare
ccacgcgtccggccccgggcgtccagaccccggtcatcgtccgcttctccaccgtcatccacgagcgcggcagcccggagaccctccgcgacccgcgtggcttcgccatcaagttctacacccgggagggcaactgggacctcgtcggcaacaacttccccgtcttcttcatccgcgacggcatgaagttcccggacatggtgcactcgctcaagcccaaccccaagtcgcacgtccaggagaactggcgcatcctcgacttcttctcccaccacccggagagcctccacatgttcaccttcctcttcgatgacatcggcatccccgccgactaccgccacatggacggctccgcgtcaacacctacacgctcgtcaaccgcgccgggaagtcgcactacgtcaagttccactggaagccc

SEQ ID NO: 399287 - DNA, 458 bp, Oryza sativa nipponbare
ccacgcgtccgcccacgcgtccggcgacgagcgggctgaggagctgcagcgcggtgggcgtgccgagcctgctggcgccgtcgtcgaacaggagccgcctgccggtctgcgcctacgccaccacctccgggcgcgtcaccatgtccgccgagtggatgccgggccagccacgccccgcccacctcgacggctcctctcccggtgacttcgggttcgacccgctgggcctcgccaccgtgccggagaacttcgagcggttcaaggagtcggaggtgtaccactgccggtgggccatgctcgctgtgcctggggtgttggtgccggaggcgctggggctgggcaactgggtgcaggcgcaggagtgggcggcggagcccggcggccaggccacgtacctcggcaacccggtgccatggggcacgctgccgacgatcctggtcatcgagttcgtcgccatc

SEQ ID NO: 399288 - DNA, 327 bp, Oryza sativa nipponbare
  unsure (1)..(327): unsure at all n locations
caagcgttcggctacctgcgctacgacctcaaaaccgtcatcaactccaagcccaaggacgagaagaagggcctcaaggacctcaccggcaagctcttcgccaccattgacgggcttgaccatgcagccaagatcaagagccccgaagaggcggagaagtactacacgttgaccaaatctgctcttggcgatgtcctcgccaagctaggctaggatcggcataatggccatatggggtttcgggggtttttatgtttgttcatatggaaccggcaatgtaccctccatgttgatattgtatcagcaagcacttacgtatgattcana

SEQ ID NO: 399289 - DNA, 470 bp, Oryza sativa nipponbare
ccacgcgtccgcccacgcgtccgatcctatatatgtatgatcaattaaaatgcctttttagcttaggtcctgggagggccgtgatccgatgctgggcgacatatatagggacattcgccagcagatgggcgtgccggtctgggacacctcgatgaatctaccagggtacatggcacgcctgcccaagccagccgcgacagagttgcttgagcaggacttgcatgtggttggcgagtgacggcgccagattctctatgtaggtggtggctgctctgcatatggtgacgaattgcgctggttggttgagctgactggtatcccacatacaaccactctgatgggtctcgacaatttccccagtgacgaccccgttgtccctgcgcatgcttgggatgcatggcacggtgtacgcaaattatgccgcggataaggctgacctgttgcttgcgattggtgtgcggattgatgat

SEQ ID NO: 399290 - DNA, 470 bp, Oryza sativa nipponbare
ccacgcgtccggagagcatctagctagggagagaaaggaagagacgagaggagagagatggccactgcttatgctcccatggcgagccagctgatgaagagcagcttggtgtgctccaagccgagggggctgtctggtgcttcgctgacaaggaggccccgcttcacagtcaaggccatccagtctgagaagccaacgtaccaggtggtgcagcccatcaatggcgaccccttcatcggcagcctggagacgccggtgacctcccagcccgctggtcgcctggtacctctccaacctcccggcgtaccgcaccgccgtcagcccgctgctccgcggcatcgaggtcggcctcgcccacggctacctcctcgtcgggcccttcgcgctcaccggcccgctccgcaacacgccggtgcacggccaggccggcgccctcggcgccgcaggcctcgtcgccatcctcagcgtct

SEQ ID NO: 399291 - DNA, 413 bp, Oryza sativa nipponbare
  unsure (1)..(413): unsure at all n locations
ccacgcgtccgcggacgcgtgggcggacgcgtgggcggacgcgtgggttcgcacgcagagaagagaaaaaaaaagggaaaaagaaaatgtaccaggcgatcccgtacaacgcgaaccgggcttggccggcggcgagccggccgcggacggcntntntgtttttgatgtacctcatgttcactaggagcctgtatagtaacggaatgattacctgtacgacgtaaacggaagactgaattatgaggtacctaggcgtgattcgcattggggctgagcgtacggatcattcattgcagcgttacttgtaataacgttgagcttactatgtgtgctgtttttataactgatgactgttttctggtacattcattattgtgtgtcttttatagttttaaaaaaaaaaatgaaggggg

SEQ ID NO: 399292 - DNA, 465 bp, Oryza sativa nipponbare
ccacgcgtccgaaagtttcgttgttcaacatgttaaatttcaagaccatgactactttcatagcacctccaccctctgcaactttcctcgcattccacccgcatgacaataacatcatagctattggaacggatgactcttcgattctactctacaatatccgtgttgacgaggttaaatgggtgctcaagggccatcagaaaaagataactggactggtattctcgctatcaatgaatgtgcttgtatcttcagctatgtgtttggagtatggaagattgggcgaagaagaaatccagatatatccaacctccatctaatcattctggagctttagttggtgatataatggtgcagtttcactatgaccaaaagcgccttttagtagttcatgagagccaattggcgatctacgatgaggagctagaatgcttgtgctcatggttcccaagtgatccactctct

SEQ ID NO: 399293 - DNA, 457 bp, Oryza sativa nipponbare
ccacgcgtccgccacgcgtccgcccacgcgtccgcggacgcgtggggtgccgggcaacccgctcgacgacatcaagctcgccgtcaacaccatcggcagcctcgtccgcgccaccgccctccgccgcgagatggagaaggtcaccttgtgagcctgagctgccatgaccacgaccgcgatcgaacactttgcttcattttcttgaggcattagaaactgcaatttgcggtggatcagtgtgcatgtatagtacagattcgcggctgatcaaacagatttgaacaagcgtaagtagagatggataagagagagaggctgtgtaccgatcgaccctgtccgattttcttgtacaacacaaggtgatgttcagacttgggggcagtttggttggattactgaagcacaccaatcttcggtgtgaactcaatgtactactatataagctccatgtttctgc

SEQ ID NO: 399294 - DNA, 457 bp, Oryza sativa nipponbare
ccacgcgtccggccaggaacaagctcatcaagcataatctccggctggtgctgtacacgatcaacaagtactacccggacatgtccaacgacgagaggttcgacgacatctgccaggcgggcgccaacggcttgatcacggcgatcgaccggttcgagcccaagcgcggcttccgcatctccacctacgccctcttctggatccgccactccatcgtccgcgccatcaccctctccaacttcacccgcttccccttcgccatggaatccgagaggcaggagatccacagggctcgggaggagctggcgttcgagctggggagggcgccgacggaggaggaggtgatgaagaagggtgggctgtctccggcgaggtaccgcgacgtggtgcggatgacgaggcccacctactccctccacgcgcgtaacagggtcacccaggaggagctcatcaacga

SEQ ID NO: 399295 - DNA, 443 bp, Oryza sativa nipponbare
ccacgcgtccgggggcgcgcggtgtccgtcaagacggtggcgctgttcggcaggtccaagaccaaggccgcgcccgcaagaaaggctgagccgaagccaaagttcaagaccgaggacggcatcttcggcacgtccggtgggatcggtttcaccaaggagaacgagctgttcgtcgggcgtgtcgccatgctcgggtttgccgcgtcgatcctgggtgaggccatcaccgggaagggaatcctggcgcagctgaacctggagacggggatcccgatctacgaggcggagcccctcctcctcttcttcatcctcttcaccctcctcggcgccatcggcgcgctcggcgaccgcggcagcttcgtcgacgaccagccggtgacgggcctcgacaaggccgtcatcgccccgggcaagggcttccgctccgcgctgggcctcagcga

SEQ ID NO: 399296 - DNA, 460 bp, Oryza sativa nipponbare
ccacgcgtccggcaagtcggcggcgaagcccaagcccgccgcgtcggggagcccgtggtacggcgccgaccgcgtgctctacctcggcccgctctccggcgagccgccgagctacctgaccggcgagttccccggcgactacgggtgggacaccgcggggctctccgccgacccggagacgttcgccaagaaccgggagctggagggggatccactccaggtgggcgatgctcggcgcgctgggctgcgtgttcccggagctcctcgcccgcaacggcgtcaagttcggcgaggcggtgtggttcaaggcggggtcgcagatcttcagcgagggcgggctcgactacctcggcaacccgagcctgatccacgcgcagagcatcctcgccatctgggcggtccaggtggtgctcatgggcgccgtcgaggggtaccgcatcgccggcgggccgctcggcga

SEQ ID NO: 399297 - DNA, 436 bp, Oryza sativa nipponbare
ccacgcgtccggtcttagcgaatccagcagcagaagcagcagcagcagctcagccgccgccgatggcgtccacgatcatggccccaacctcccgcgtcctcgccgccaagacccccttcctcggccatccccgcccctccaatgcccccgtccgcgacatcgccgccgccgccaccggccgcatcaccatgagcaaggagctgtggtacgggccggatagggtgaagtacctggggcccattctcggcgcagacgccgtcgtacctgaggggcgagttcccgggcgactacgggtgggacacggcggggctctccgcggacccggaggcgttcgcgaggaacagggcgctggaggtgatccacggccggtgggcgatgctcggcgcgctgggctgcatcacgccggaggtgctcgagaagtggtgcgcgtcgactt

SEQ ID NO: 399298 - DNA, 470 bp, Oryza sativa nipponbare
  unsure (1)..(470): unsure at all n locations
ccacgcgtccggacatggaccagaacactagggacatcatcatgagggagttccgatctggttcttcccgtgtgctcattaccacggaccttcttgcccgtggtattgatgtccagcaggtgtcccttgtcatcaactatgatctgccgacccaacctgagaactacctgcatcgcattggtcgtagtggtcgttttggtaggaaaggtgttgccattaactttgtgacccgtgacgatgagaggatgctgtttgacatccagaggttctacaatgtggtgattgaggagctgccggccaacgtcgctgaccttctgtgatcaagttcagaagagttatgttaaggggcctgataaggattgtttttgtctgaagtatcactgtcttatctggggggggggggagtgataaaggttggggtgctgtntaaaagtcactgtggtcgtagacaatttccaaatttttatgcc

SEQ ID NO: 399299 - DNA, 468 bp, Oryza sativa nipponbare
  unsure (1)..(468): unsure at all n locations
ccacgcgtccgcccacgcgtccgctcggccacctccgtggctccattccaagggctcaagtccaccgccgggctccccgtcagccgccgctccaccaactcgggcttcggcaacgtcagcaatggcggaaggatcaagtgcatgcaggtgtggccaattgagggcatcaagaagttcgagaccctatcgtacctgccaccactcaccgtggaggatcttttgaagcagatcgagtacctgcttcgatccaagtgggtgccttgcctcgagttcagcaaggttggattcgtctaccgtgagaaccacaggtctcccgggtactacgatggcaggtattggaccatgtggaagctgcccatgttcggctgcaccgatgccacccaggtgctcaaggagcntgaggaggccaagaaggcctaccccgatgcctttgtccgtatcatcggcttcgacaacgtcaggcaggtg

SEQ ID NO: 399300 - DNA, 450 bp, Oryza sativa nipponbare
  unsure (1)..(450): unsure at all n locations
ccacgcgtccgcgcagatcttcagcgagggcgggctcgactacctcggcaacccgagcctgatccacgcgcagagcatcctcgccatctgggcggtccaggtggtgctcatgggcgccgtcgaggggtaccgcatcgccggcgggccgctcggcgaggtcgtcgacccgctctaccccggcggcagcttcgacccgctcggcctcgccgacgacccggaggccttcgcggagctcaaggtgaaggagatcaagaacggccgcctcgccatgttctccatgttcggcttcttcgtccaggccatcgtcaccggcaagggccccctcgagaacctcgccgaccacctcgccgaccccgtcaacaacaacgcctgggcctacgccaccaacttcgtccccggcaagtgagcgccgccgccgccgtgctgncatggcgacgcatcgccttcagc

SEQ ID NO: 399301 - DNA, 468 bp, Oryza sativa nipponbare
ccacgcgtccggtcgtgcatggaccccaacgtgatggagtccagggtggtggtgagctcctgcggccacgacgggccgttcggcgccacgggcgtcaagcggctgcaggacatcggcatgatcgacgccgtgcccggcatgcgcgccctcgacatgaacaccgccgaggacgagatcgtccgcctcacccgcgaggtcgtccccggcatgatcgtcaccggcatggaggtcgccgagatcgacggcgccccgagaatgggcccgacgttcggagccatgatgatctccggccagaaggcggcgcacctggcgctgaaggcgctcggccggccgaacgccatcgacggcacgatcaagaaggcggcggcggcggcggcgcacccggagctgatcctggcgtcgaaggacgacggcgagatcgtggacgcctgagcgaatagaacagggtaaaaaaaaatccgcaagacg

SEQ ID NO: 399302 - DNA, 475 bp, Oryza sativa nipponbare
  unsure (1)..(475): unsure at all n locations
ccacgcgtccgagaaagcataagcaacacaagggattaactcatcactcacttagctaattaaatcttcgaccatgtcggacaagtgcggcaactgcgactgtgctgacaagagccagtgcgtgaagaaaggtaccagctatggcgtcgtcatagttgaagccgagaagagccacttcgaggaggtcgccgccggcgaggagaacggcggctgcaagtgcggcaccagctgctcctgcaccgactgcaagtgcggcaagtgaagtcacgaagcaaccgaacactcgccgccggcgagtcacctaccttaattagtccacaataaaaaccacccatatgagtgtggtttgtgtgtgtgctgattattgctgaattaaacccgtgtgttatcgattaattaaaccagctggtcgcttcggcgactatgcgtgtatcaacgtatngaattgtgtgatgtgatgtacccgtgctattct

SEQ ID NO: 399303 - DNA, 453 bp, Oryza sativa nipponbare
ccacgcgtccgcccacgcgtccgcccagaagcaggacgacgccgacgtctcccgccgcgcggcgctcgcgctgctggccggagcgacggcggcggtgggggtgaaggtggcgcccgccgccgcggcctacggcgaggcggcgaacgtgttcgggaagcccaagacgaacacggagttcatcgcctacagcggcgaggggttcaagctgctgatcccgtccaagtggaaccccagcaaggagcgcgagttccccggacaggtccttcgctacgaggacaacttctacgccaacagcaacgtctccgttataatcaaccccaccaccaagaagaccatcaccgagttcggctcccccgaggagttcctcgcccaggtcgactttttgcttggcaagcaggcctactccggcaagacagatttcgagggtgggtttgagtcgtacgcggtggcgac

SEQ ID NO: 399304 - DNA, 480 bp, Oryza sativa nipponbare
ggtcgacccacgcgtccggagctcaaaagacacacattccaaaagcatctgtggccatctcctcctagtcctaggctcgcgtcaatggcggcgtccaccatggcactctcctcccctgccgccctcgccggcaaggcggtcgccaatgccaaggtgttcggcgagggccgcgtcacgacgcccatcacgccgcgccccgtggtggggaggaggcaagaaggcgacgatacacaagcagaacgacttcaagcagcccggggagaggtacaggtcgtgggcgccggatagacaggagaggttcatccgccgcttcgccggcgagctcgcgcaccccaaggtctcccctgagctccgcgccatctgggtcaactacctctcccagtgtgatgagtcgttgggggtgaagattgcgaataggctcaacgtgaagccaagcatgtgaaagaactaaggcacaagaatgcatcatctcttggtaaa

SEQ ID NO: 399305 - DNA, 460 bp, Oryza sativa nipponbare
ccacgcgtccgcaccaatggcgcccaccacccccgcctccttcctccgcccgccgccgctgccccaccaccaccacccccgcatcgtccgcctgccccctccctcggcgaccttccgcgtcgctgacctcctcggcggccggggtctctgcaacggcgaggtcggcatccgcaaggagctcgcctccgactcccccgccgcgccgccatccaccaccacttcttccgacgagcccgcggagtcgccaccgccgccgccggctgcgtccggggtggacccggacgcgttcgacaaggagatgatgggcctcaccggcggattccccggcggcgaggtcggcctcaaggacttcgtcgccaagaacccgcctccccccaagccggcgcacaggaaaggtctcgccgccgccgccacggtggagcggccgagggcgccggagctgccgctgttcctccccggg

SEQ ID NO: 399306 - DNA, 451 bp, Oryza sativa nipponbare
ccacgcgtccgcttcttcctacttcgtcttcttgctggtgtgttcgaggaggaggaggaggaggagaagctagcggcggcggcggcaatggcgacgagcgggctgaggagctgcacggcggtgggcgtgccgagcctgctggcgccgtcgtcgaacaggagccgcctgccggtctgcgcctacgccaccacctccgggcgcgtcaccatgtccgccgagtggatgccgggccagccacgccccgcccacctcgacggctcctctcccggtgacttcgggttcgacccgctgggcctcgccaccgtgccggagaacttcgagcggttcaaggagtcggaggtgtaccactgccggtgggccatgctcgctgtgcctggggtgttggtgccggaggcgctggggctgggcaactgggtgcaggcgcaggagtgggcggcggaacccggcggcc

SEQ ID NO: 399307 - DNA, 471 bp, Oryza sativa nipponbare
ccacgcgtccgagaaggagagagcttggtgagctgcagagatggccccctccgtgatggcgtcgtcggccaccaccgtcgctcccttccaggggctcaagtccaccgccggcatgcccgtcgcccgccgctccggcaactccagcttcggcaacgtcagcaatggcggcaggatcaggtgcatgcaggtgtggccgattgagggcatcaagaagttcgagaccctctcctacctgccaccgctcaccgtggaggacctcctgaagcagatcgagtacctgctccgttccaagtgggtgccctgcctcgagttcagcaaggtcggattcgtctaccgtgagaaccacagatcccccggatactacgatggcaggtactggaccatgtggaagctgcccatgttcgggtgcactgacgccacccaaggtgctcaaggagctcgaggaggccaagaaggcgtaccctgatgcat

SEQ ID NO: 399308 - DNA, 476 bp, Oryza sativa nipponbare
cgctctcatcactcttcacccgccgcgccgcgaactccggaaccgaacgccacacgcgccttcctctcacttaatccgccatgcttcctcctagggttgccccctcctctctggccgccgccgccgccgcggcgcctacctatctcgccgccgcggcctcgacccctgcttccgtctggctgcctgtgccgcgtggagccggagccgtggcagtgtgcagggccgccgggaaagggaagggaggtgctcagcggcgtggtcttccagccattcgaggagctcaagggggagctctccctcgtcccccaggccaaggaccagtctcttgctaggcaaaagttcgtcgacgagtgcgaggccgccatcagcgagcagatcaatgtggagttcaatgcatcgtacgcgtaccactcccttttcggctactttgaccgtgacaacgttgctcttaagggattcgccaaattcttcaaaga

SEQ ID NO: 399309 - DNA, 464 bp, Oryza sativa nipponbare
  unsure (1)..(464): unsure at all n locations
ccacgcgtccgcccacgcgtccggcaacacaagggattaactcatcactcacttagctaattaaatcttcgaccatgtcggacaagtgcggcaactgcgactgtgctgacaagagccagtgcgtgaagaaaggtaccagctatggcgtcgtcatagttgaagccgagaagagccacttcgaggaggtcgccgccggcgaggagaacggcggctgcaaggtgcggcaccagctgctcctgcaccgactgcaagtgcggcaagtgaagtcacgaagcaaccgaacactctcacagcggcgagtcacctaccttaattagtccacaataaaaaccacccatatgagtgtggtttgtgtgtgtgctgattattgctgaattaaacccgtgtgttatcgattaattaagcagctggtcgcttcggcgactatgcgtgtatcaacgtatgaatntgtgtgatgtgatgta

SEQ ID NO: 399310 - DNA, 424 bp, Oryza sativa nipponbare
  unsure (1)..(424): unsure at all n locations
ccacgcgtccgcaggaagagcacggggaagggtgtgtaccaattcgttgacaagtacggcgcaaacgtcgacggctacagcccaatctactcgccggaggaatggtctcccaccggtgacacctacgttggtggaaccaccgggcttctgatctgggccgtgaccctcgccgggctcctcggcggcggcgccctcctcgtgtacaaacaccagcgccctcgccggctaaatttcacccaaatccagtctatgtatgtaacaccaagctgggtgtctgcatattcatctgtaatctaagatagccttcctctgaatgcgatgtgatgatgcccactgcttaatcaaactgcattgtgattaatctatgtaacactgtacttgcatgatgatgatatactacacttgatacttgaatntggagatt

SEQ ID NO: 399311 - DNA, 248 bp, Oryza sativa nipponbare
ccacgcgtccggggacccgtggagggacacctgatccgccggggcatgatcggcaaggtcacctaccccgtctaccacgggggcagcttcgaccccgtctgccttgggctctactgggaggactagctttaacaggaagcgtacgaaaacaagaacggcctcctacacatggtgtccatgttcggcttcttcgggcttggcatggaaatcggctagggccctgtggagaacctggccgaccaccttgt

SEQ ID NO: 399312 - DNA, 350 bp, Oryza sativa nipponbare
cgacccacgcgttcagtcctcgtctaccttacctagcagcagcagctagctagcttaattagctatagcagccatggcggcgacggcactgagcagccaggtccggttgccgatgtccctgcgggtggcgacggcgccggcgccggcgcgcgtgtcggtgctgccggcgagcaacaagctgggagacaggctgcggatgcaggcgacgtacaacgtgaagctgatcacaccggacggcgaggtggagctgcatgtgccggacgacgtgtacatcctggaccaggcggaggaggaagggatcgacctgccttactcctgccgcgcgggctcctgctcctcctgcgccggca

SEQ ID NO: 399313 - DNA, 370 bp, Oryza sativa nipponbare
  unsure (1)..(370): unsure at all n locations
ccacgcgtccgacccaatgtcagaagcagttcttttgtgggagagagacaagtctctgaaccaaacacgatacaacctttccccttttgcaatttcactaaatgaatacggcagctaacctggccaagacgttgcctacggctgattcttgggtgaggcctgatcaaaggcctcttgaaaatgcttaatatgagatggctactgcaaagaaacctgcggctgaacgtgcggcaccagctgctcctgcaccgactgcanagtgcgggggagcccacgcggattaacacggatcactgcgacagctaccgatacattggtggttactgggaagcaagggagaccgggaactgggatgggattccagacatct

SEQ ID NO: 399314 - DNA, 440 bp, Oryza sativa nipponbare
cgcccgacgcgtccgcacttttgtttttcatagttgatcacgaaacaactacttgtttggtttaattcgattcgagattatccttaatctgcaccaaactaatcaacgcatgggcgtacgtacagatccatggcatcctgaacgcggagagctggggcatcctgatcccgatgggcgccatgatcgcgcgctacctccgcgtgttcgaggcctcaacaccggcatggttctacctccacatcacctgccagctctccggctacatcctcggcgtcgccggctgggcccctcggcctcaagctcggcagcgagtccaagggcattaacctacagcgcccaccgcaacatcggcatcgccatcttctgcctcgccacgctccaggtgttcgcgctgctgctgaggcccgacaagaagaacaagtacaggttctactggaaca

SEQ ID NO: 399315 - DNA, 467 bp, Oryza sativa nipponbare
ccacgcgtccggctagcttgggaagaggaggaggagcttgagcttggagagagacaacaatggcggctcaggctcttctctctgggaggcagctgctggggaggccattgcaatcttcagtctccaggtcttcttcctccaggaaggcacccttcatggtcagggcagaggccactccccctgccaagcaaggtgctgacaggcagctgtggttcgcatccaagcagtccctgagctacctggatggcacgcttccgggagacttcgggttcgacccgctggggctatcggacccggaggggaccggtgggttcatcgagccacggtggctggcctacggcgaggtgttcaacggccggacggcgatgatgggcgtcgtcggcatggtcgccccggagctcctcggcaagctgggcctcgtccccgccgagacggcgatcccgtggttccagaccggcgtgatcccc

SEQ ID NO: 399316 - DNA, 455 bp, Oryza sativa nipponbare
ccacgcgtccgcccacgcgtccggtaggtgctgatgattgtcaattttggtataggaacttgggcatcaagtgccgactccatgagctcgagaacaagcataggatctctattgctggtgcttcaaagcttttggccaacatcctgtactcctaccgagggatgggactgtcaattggtacaatgattgctggatgggatgagaagggtcctggcttgtactatgttgatagtgagggcgcaaggctcatgggaagccgattctctgatggatcaggttatgtgcatgcctatggtatattggacgagggttaccggtatgtgatgcccgttgaggaagctgctgatttaacaaggcgagctatttaccaagctacattctgcgatggggcaagtggaggttgtgttagcgtttaccatgtgggctcgaacggctggacgaagcttggtggagat

SEQ ID NO: 399317 - DNA, 453 bp, Oryza sativa nipponbare
gcttatgaagaattcaggtgcggtgaaatataaaacatatcttagttttactcccgtataagagtctgttatttaagatagtttgaaagattgagcaccttaaatggttttctactgaatacattgcccagctttcttcgctttgagtagaagagaaagagtagaacagaactgttcagaaagaattagcaaaacgaagcatatcagagcttttattttcttttcaagaacaaatatggtttttctattccttttattgcccatttgctttcatcaaaatatagggtggacgtatattattttgtctattgcagctatatacatttgaaaggaaaaaaaattaaagacgagattttgtcaatgcagcaggtttgaagctggcgattccggtgatctctcttccggtcaccaagctgttgatgtcataagtgccttcgtacgagaagattggct

SEQ ID NO: 399318 - DNA, 421 bp, Oryza sativa nipponbare
aatcaattgagtgggcttagagcaaagcgcgattccattaaggattactttgcaacaactaccaaatcacaagctacaccatacacgccacgcattctggttacatgcttcaaaaactcttccaactcgatcagaagagatcagcacccggagttatttcccatctgcactaccataatcccccctaattaaacacaacacgcgaacaaattaacagcccatagacttgttttttaccaccttcttattcttcttcttcttcttcttcttcttcttcttcttcttcttcttcttggtctacgcttctatcttaagattcttaattttaattagcctcctccgagaagcaccttgttctactgtgcttctgctggtcagagagtacttctgcttctgctggatctactggtagcaaagcaca

SEQ ID NO: 399319 - DNA, 421 bp, Oryza sativa nipponbare
atatacacaatgttagataaaatggggtattgtttttcatgcatcattacacaggtatgaatcatctgtgcaaaaacaataacgcatgcgtgacatttggccatagaagactatgcacatgttaatcaacagacaacacaatcttgaagtatttttcaagcattgcatcctttgagaagtcagtgaaataccccttttcaacctcaagtccttgctctgctgctatctgttccacctgctgctgaacctgatcggcactgacatgatctggatccaggaagcatgcaatctctgtgcagtcatcaccatgggaaagggcaagcgcttgcactgtcgggagtcctccaccacgaccagtcacccttcgggtgatccttcttatggttgggatatccttcgatagtaccggcacattatagtt

SEQ ID NO: 399320 - DNA, 192 bp, Oryza sativa nipponbare
aagctagataggcagtgattccacgcacaatttacatgatcattacatcgtccatcacacaggcactcatgcatcgattacacataggagtattgattcgtgtgactagcttaatgaatttgattagccgatgatctggtccaggacgccgatgttcttgaggccgaggactacccccacccccatgatgtg

SEQ ID NO: 399321 - DNA, 428 bp, Oryza sativa nipponbare
attgtcgacgaatttatcaaatatgcgctagaatacatatcttgtgtgtatatagccggagctttgttttcacatatcctcacccaacgataattgtagtactcttacaataaaaccggccggagagggagggaagagattattacatatgtgttaagagcagaggccattgagatggtacataaccaaactgtaaaataaaaatatatagcatattatatattgatatatcatcaacatagcccaaaacaaagctgcatactattattataggcagcaatccaccagcgcgatgcttgatcttagcttagttgccaccagactcctcgcaacctgggggcttgtaggcgatgaagctaatcaactgcacctgcctgacgttgtcgaagccgatgatacggacaaaggcatcggggtaggccttcttg

SEQ ID NO: 399322 - DNA, 351 bp, Oryza sativa nipponbare
aaaactaacatacccaaactgtttttttcacaattttagcccatgacaatggaaagagtaatttaggtacaagcggtttattgacggtggaaacaaaacattgttttcaccacaacacccaccattggccccaacaaggagcgctttcctttataggacgagagaaaaagtaaaacattacgttttgaagtgaaactgaataattttagtacaccattattattatggataggctctttaggacccccgccgcccttagcgttttgctgctcccattttgtccactggaaggctcactcggaattgttttaatcctttttggtgcccttggcgtaattcttataattgacc

SEQ ID NO: 399323 - DNA, 419 bp, Oryza sativa nipponbare
ttacttattgaagagaaggggggcttctaaaagagtatgaacttgttttttacatcggttacatcatagtacaggtacacaatcaacaaggcatgcagtgctccatccacaattacatcccaatacaccaccaccattcacagcctactccgatcccaaaaaagagaggtaagtcgcgtcgacaaacagtcttttcatcttcctccattggcagccattggtaacactccaacacctgaagaactcctaatttgggggtgaaggcctggaagatggtggcctggccggggtcggcgagatgggctaagaggttgtcgatggggccagtgccggtgtactctgcctggaaccaaactcccatgaccgcgagcatggcgagccgcccgttcttgatctccttggtgcgcagctgcttgatc

SEQ ID NO: 399324 - DNA, 547 bp, Oryza sativa nipponbare
taaatatatatagccggagctgccatatatttcattcacatatgcctcacccaacaacatatagtcgtagcagataccactcttacatcaagtcagagagagatcaggtgaaacaaaaacaaaagcagagcacggccggtaaaatcaaaagacgatgaacaaactgggaacacacgaaacaaggtgggagacatcatcgaatcagagatgaacaattaaacaaggctatatatgacgatgacggcttagttgccaccagactcctcgcagcccgggggcttgtaggcgatgaagctgatgagctgcacctgcctgacgttgtcgaagccgatgatacggacgaatgcatcagggtacgccttcttggcctcctcgagctccttgagcacctgggtggcgtcagtgcacccgaacatgggcagcttccacatggtccagtacctgccatcgtagtatccgggggatctgtggttctcacggtagacgaatccgaccttgctgaactcgaggcagggcacccacttggaacggaggaggtactcgatct

SEQ ID NO: 399325 - DNA, 437 bp, Oryza sativa nipponbare
tttttcgctgaattgaaatctggtggatctcgcgcgattaacaattacatcgatcgagtcggatcgatcttttttccttttttttttcgtgctatcacagaaattacagacacaatagcaagagagaaaaaggaagtaaaaaagaatagagtagtatatataacagcagcaacctcagcagctcaagcgaggtggatgggatgaagaaatgagttgattggatttaggcgagggcgtcggcgccggcgacgatctcgaggatctcgccggtgatcttggcctggcgctggcggttgtagaccatggagaggttcttccggagctcgatggcgttgtcggtggcgctgctcatggcgctcatcctggcggcgagctcgctggcgagcgactcctggagcgcgcggaggatctggctgttgaggtaaaagcgggaggag

SEQ ID NO: 399326 - DNA, 321 bp, Oryza sativa nipponbare
aaaaaggtaaactcttcataatgatggtattaagacattatagctgatgtcttttgatcacactgcgatcaaattatgcatcataagcagtacaactccgcgtcaagaaaaagtagaggagatatatttcttgttattacttaatacagcattcacatatatcgaaccatccggtacgtacgtagtagtactccacgcgttcacatcgatgatcggggacgatatcctcaggtagtacttatgcaaaagcgttggcgtaaactgacgaactgaacggacggacggtcggatttagggctcccataagtccaagttgccgga

SEQ ID NO: 399327 - DNA, 434 bp, Oryza sativa nipponbare
gagtatgatagacctttttacgggggaaaccacacgaatacacgattgattaatttcactgagaatagcacgggtacatcacatcacacaaattcatacgttgatacacgcatagtcgccgaagcgaccagctgcttaattaatcgataacacacgggtttaattcagcaataatcagcacacacacaaaccacactcatatgggtggtttttattgtggactaattaaggtaggtgactcgccggcggcgagtgttcggttgcttcgtgacttcacttgccgcacttgcagtcggtgcaggagcagctggtgccgcacttgcagccgccgttctcctcgccggcggcgacctcctcgaagtggctcttctcggcttcaactatgacgacgccatagctggtacctttcttcacgcactggctcttgtcagcac

SEQ ID NO: 399328 - DNA, 599 bp, Oryza sativa nipponbare
ttttagtgcaactaaagggtaggtaggatttcacggtcgttttacagaagtgattttacatgtatatgagcccggcgaaaattttacatgtatatgagcactatatataggacactctttacatgtatgcataactttgtcccttcatacacctcacttgttcatgaaatcgatgcccttctgaatgctctccatcagctctttctttgccatctccaagccagctctctcaaaatcattcaacggccccagagggagaacctcttcggctccagcacgacctaacctcacttttgttgcaaagaacggcaactcggtcaccgcagatgcaacatatgaacattccacaacgccagcatcaccacgcattgctcgcaagcatgcatcaccaaattttgctgcagcaaaagccattgacaaagttgcagagcctgctcctgcctttgcctcaacaacttctgtgccacccatctgtatgcgtttagtcaaatagctgatttcatctggggtaaatgagcatggggggtggacctgggagaggaggggtaatatagtcactccagcatgcccaccaacaactgggacattgacatcttttg

SEQ ID NO: 399329 - DNA, 594 bp, Oryza sativa nipponbare
ggggcaaaatggtttgcattagaaaagaacgactgtaatcgataaattagtgccatttacagggatggaagctcgcgcttctgagctatagctaaacttattttctaaatgctatgttaaagaatggggaagcaacaaagaacaaggtaaagcatataccaccagccaacccagaaaaaagaaagaaagaaagaaagaacagtaaactaatggccaatttgacatctacagtaaactaattcatgaatttacgacaattagccgtttggcagaggcaaggaactttgcgatcatcagcctcgtcagggtcaaataagtagtcatacgttagctcttcgccggcagagacatttttcttggcgattaggacaatacggctctcgtcatgccccacactcataatccttgcatagcagtttggagtgcaagaatgattaatcaagcgtgccacgttttctttaatctggggcatcaacgactacttcctcgctgattttgaaaagataacaatctttgccttgtacacgatattggtcttcccttaaatcagcaacacttcgtctgacctgctcacctctatactcgagcaccatt

SEQ ID NO: 399330 - DNA, 418 bp, Oryza sativa nipponbare
aggcaaacggggggaatacacgattgattaatttcactgagaatagcacgggtacatcacatcacacaaattcatacgttgatacacgcatagtcgccgaagcgaccagctgcttaattaatcgataacacacgggtttaattcagcaataatcagcacacacacaaaccacactcatatgggtggtttttattgtggactaattaaggtaggtgactcgccggcggcgagtgttcggttgcttcgtgacttcacttgccgcacttgcagtcggtgcaggagcagctggtgccgcacttgcagccgccgttctcctcgccggcggcgacctcctcgaagtggctcttctcggcttcaactatgacgacgccatagctggtacctttcttcacgcactggctcttgtcagcacagtcgc

SEQ ID NO: 399331 - DNA, 593 bp, Oryza sativa nipponbare
aaatatggatagccggagcttccatatatttcattcacatatgcctcacccaacaacatatagtcgtagcagataccactcttacatcaagtcagagagagatcaggtgaaacaaaaacaaaagcagagcacggccggtaaaatcaaaagacgatgaacaaactgggaacacacgaaacaaggtgggagacatcatcgaatcagagatgaacaattaaacaaggctatatatgacgatgacggcttagttgccaccagactcctcgcagcccgggggcttgtaggcgatgaagctgatgagctgcacctgcctgacgttgtcgaagccgatgatacggacgaatgcatcagggtacgccttcttggcctcctcgagctccttgagcacctgggtggcgtcagtgcacccgaacatgggcagcttccacatggtccagtacctgccatcgtaatattcggggggatctgtggttctcacggtagacgaatccgaccttgctgaactcgaggcagggcacccacttggaacggagcaggtactcgatctgcttcagggggccttcacggtgagcggtggcaggtaggaaagggtc

SEQ ID NO: 399332 - DNA, 541 bp, Oryza sativa nipponbare
ttctacctcaacacaataaatggaagagatacaatacagcattcatccagagcaaaaacgcaaaatgcaggacatgtaggctaatgatgcgatagtaatttggccacattagagtagctgctggtagcaaaaaggttgacataatagttatctttcacagtaccacatcgattgaaaggagaatacttggaggcgcgacagtttcctacaatcaaaccagaccaaaacattatactgataaaacagcctactcgtcctcctggctacggagccttgcaagcttgttggtgaccacgatgtcgagctgcgcagcacgctcaacgatctccttgcgcttcttcgtagagacgttgtgggcaatctcggcacagtaggtcctgttgtgcatcatgagcaactccagctcagagacattgtgcaccacaaactttttgaacttgttggggaggtagtgccctggctttcttgtctgagcccgtaaccaatgttggggcatcaaggtgcatccggacgcgtgggcggacgcgtggcggacgcgtgg

SEQ ID NO: 399333 - DNA, 468 bp, Oryza sativa nipponbare
aaatatatatagccggagctgggcagtgggtttcattcacatatgcctcacccaacaacatatagtcgtagcagataccactcttacatcaagtcagagagagatcaggtgaaacaaaaacaaaagcagagcacggccggtaaaatcaaaagacgatgaacaaactgggaacacacgaaacaaggtgggagacatcatcgaatcagagatgaacaattaaacaaggctatatatgacgatgacggcttagttgccaccagactcctcgcagcccgggggcttgtaggcgatgaagctgatgagctgcacctgcctgacgttgtcgaagccgatgatacggacgaatgcatcagggtacgccttcttggcctcctcgagctccttgagcacctgggtggcgtcagtgcacccgaacatgggcagcttccacatggtccagtacctgccatcgtagtatccgggggatct

SEQ ID NO: 399334 - DNA, 366 bp, Oryza sativa nipponbare
aggacgataccttgggacgagtaattcaacaggtacaatacaacattcatccaaaggcaaaacgcaaaatgcagggcatgtaagctaatgatgcgataggaatttggccacattaaaatagctgctggtagcaaaaaggttgacataatagttatctttcacagtaccacatcgattgaaaggagaatacttggaggcgcgacagtttcctacaatcaaaccagaccaaaacattatactgataaaacagcctactcgtcctcctggctacggagccttgcaagcttgttggtgaccacgatgtcgagctgcgcagcacgctcaacgatctccttgcgcttcttcgtagagacgttgtgggcaatc

SEQ ID NO: 399335 - DNA, 345 bp, Oryza sativa nipponbare
gacaccggagaggggatatggatatgattaagcaggtgcagcaaaacgtacattaattaaacaacaacaattaaccctcgggcacgcctgtgttttgttatctcgctcaacatatacgtacgtaatactttgcttgcatagcatagggacgacgacattatattcttaattgataaactcaagaacgcatggagatggatcgagagatttataaatatggagcttgcttgattgattagatgaggtcgtcctccttgtgggtctcgatgacgacgtcggacttggggtaggcgtggcaggtgaggacccagcccgcggcattgctccgtcaggctttcgcccatt

SEQ ID NO: 399336 - DNA, 439 bp, Oryza sativa nipponbare
taaataattaatttactgtatgtaaagtattgataaaaggtgtgcttacaataatgatgaagtatcaggagaaacgtgtcttcaggttacagattattacatgatggtggtacacgaattgtgcggtgatagaaatcatatatgtcctctttccaaaatagactcgatcgatcggtattgctagagtatgagtagcaattattatccgatagagtgaggctgaggccttccgtgactgaagcagattgcaacgctgatcgatctccttacatgctcggcttcgcgctgagacggctcgccagtttctgacccagagacctgtcagcctgagaccagtaggagagccagatgctcctgatctcgtgggtgaggcgagggtcaaagagtgcgtcgatccatctcttgatgaaccggtcttgccttgccggatcccatgaac

SEQ ID NO: 399337 - DNA, 453 bp, Oryza sativa nipponbare
aactaagaccagtttggggtggggtttgatacaaaaattaagatggacggattcacaagagagcaccctctacttaagctttacattacaaggccaaccagcagctgcctgccggccgaccactgcgtgcgcacgcgcgcgcaataatcaaccaatcacacacagtacgcacgcacataaaaaccacccatagccttcacgtacgcccggacgcacgcaccggttcgtgccaagctcaagggtagatggttctcgggatgatgatgtcgccgatgttgttgtgccacgggtccgagaggtggctggccaggttctccagtgggccggtgcccgggtacgccgactgttggacgcagaaacccacaaaagccagcatggccaatcgcccgttcttgatctccttgagcttgtactcctcgaacttgacggggtccttggagaagccgagggggt

SEQ ID NO: 399338 - DNA, 393 bp, Oryza sativa nipponbare
ttatcaattaaaatgcctttggagcggagtcctagataggccccatactaacatcaataacacacatctcggaatgggtcataaagggcaaacataggccggactggtgctctgccaacatacccattatagattaatacacagccctgccatcaccatccatgatcatgtccttgaatgcgcccccacttgggatcataagcagcacatgctcctggggcgggaccatgatatccaacaagtatgggcctggagtctcaagcatatttttgattgcagcacggacttcaatcttatttgttacacggactgcacgaatattgaaccccttagcaatagtcacaaaatctggatatatgtcgctctcacattccgggttgaccaagtatgtat

SEQ ID NO: 399339 - DNA, 427 bp, Oryza sativa nipponbare
  unsure (1)..(427): unsure at all n locations
atccgtgcgggcagcctgtttgtgcccttgtgcaaatgcatttcatttatacaagtagaaggcactcaaatcagccaccacatgaacacacacatgttccatcatcgatcgatctacacatgcatcacccggtcatgcacttacaaacaaaagatctacttgaagaagtacgggaggtcgagcacgtagaggaggaagtaggcccagaggacgccggagatgccgccgaagaagaagccgccggtgaacttggcccagccgtcggcggtctgcagcttgtcggcctccttcttgcggccggtgagcgtcagcgtcggcgccgtggacggctcgccctcgccgaaggaggcgacgccgtacatggtgaggcagacgctgaggatggcgacnaggcctgcggcgcctagggcgccggcctggccgtgca

SEQ ID NO: 399340 - DNA, 387 bp, Oryza sativa nipponbare
  unsure (1)..(387): unsure at all n locations
tgcagagtaaaatgaagagcctgtggttgttggtatttgctaatgctatgcaggtttggggaattagtaagattgctaggaatacatgcttgtactacatgttttatgcacagcagagagacgagacgattgcatggtggttttcacatgtatctgcgcaggtattccactcgcgtggggtgcttgagcttcatgagcgccttgagctcgtacttgcgcaccatctccctcgagatgttgaggtttccggcgatctcgctcagcgtccgcttccccctcccgtccagcccgaacctctgccggatcaccacgctctccttgggcttcagcgaatccaggaggtcgtcnatggcgaggcggaggaaggtgttgtggctgctggtgtcg

SEQ ID NO: 399341 - DNA, 396 bp, Oryza sativa nipponbare
gggcggggttaattttctccatgggcattaattaacaactaattaaacaaggtacgtttttacacctacacgtacacagtacatatacacttgaaagaaagtctcaatgatgcgcaagcacaacaatggcggcgaaacctcggtagatcgatcgatcctcgtaattctactcttcgtcgtcgtcgctgacaaacttgccggtgccggggttgatggcggcaataaaaaaaaagacgacgttgaagaggacgagcggctcgatctcgttgatggggacgccggtctcgatgttgagctgcgcgagggcccccttgccggtgatgatctcgccgatgatggaaaaggcgatgccgagctgcgcgagccggccgacaaacagctcgttggccttggtga

SEQ ID NO: 399342 - DNA, 441 bp, Oryza sativa nipponbare
  unsure (1)..(441): unsure at all n locations
ttaattcacaacaccatattggattgatcaggttcagaacctgcacagaaatacacactaccggtacagatctcaccctctctccaatactcgtacatccatccacgcggtccacacgaatacgtacatctatacggtacacgtacgtacatctactgcaccgngtacacacacgcacactctcctgcagagacgcgcatcgtcgtcaacctagctagcttagctgaaggcgatgcgtcgccatggcagcacggcggcggcggcgctcacttgccggggacgaagttggtggcgtaggcccaggcgttgttgttgacggggtcggcgaggtggtccgcgaggttctcgagggggcccttgccggtgacgatggcctggacgaagaagccgaacatggagaacatggcgaggcggccgttcttgatctccttcaccttgagc

SEQ ID NO: 399343 - DNA, 456 bp, Oryza sativa nipponbare
tcttttttacttgtaagttggggtagcagggacttttattgcaatatttgtagttaatacaccttgcaatcattcttacttagtactaatacacattgaaatatgccataggtaaaatctttaatagctatatatccaagccatattatcgtgtgagatccttatatccaagccatattatcatgtggataattaacatgtccaatagctatatccacaccatattattccccatcttcttgataacttgatacacataggatacgagatgggccttaggcatttgcactggcatcgacaggcttgaactcctggagctccttgaagtccatccatggtttctcccagaccttagcttcatagagcttcttggcatccccttccttcacctcaattgtgaaatagtacaaagtgccagcgacaacttgctgcttcacactcacaagcttttcgaac

SEQ ID NO: 399344 - DNA, 433 bp, Oryza sativa nipponbare
tttttaagttgcaaaccccagggtggttcagtttctgaattctggatggatcatatcagattcatcacagcatcgtacaatctgtgcaagcattggtacatcgagcgatggagagagagagtagtctacaatggcggctgggccattcacgagcccggcgtgaacttggtggcgtagacccaggcgttgttggcgacggggtcggcgaggtggtcgagcaggttctccaaggggcccttgccggtgacgatggcctggacgaagaagccgaacatggagaacatggcgaggcggccattcttgatctccttgaccttgagctcggcgaaggtgacggggtcgtcggcgaggccgagcgggtcgaagtactggccgccggggtagaggtcgttgccgtcgccgacgccggggaggcccgtgatgcggtagccct

SEQ ID NO: 399345 - DNA, 432 bp, Oryza sativa nipponbare
gggcaaataggcagcgatgacacaaataaataacatcattcggtcatacatagttttaacaatagatataataaaagtaaaagactcctccctcctcaccagcacatagcacagcctagcaactacaaaaattcccataacatggcataaaaatttggaaattgtctacgaccacagtgacttttaaaacagaacccccacctttatcactccccccccccccagataagacagtgatacttcagacaaaaacaatccttatcaggccccttaacataactcttctgaacttgatcacagaaggtcagcgacgttggccggcagctcctcaatcaccacattgtagaacctctggatgtcaaacagcatcctctcatcgtcacgggtcacaaagttaatggcaacacctttcctaccaaaacgaccactacg

SEQ ID NO: 399346 - DNA, 429 bp, Oryza sativa nipponbare
acgtggtaccggccattttttttattggcgacgaatttatcagatatgctctagatacatatcttgtgtgtatatagccggagctttgttttcacatatcctcacccaacgataattgtagtactcttacaataaaaccggccggagagggagggaagagattattacatatgtgttaagagcagaggccattgagatggtacataaccaaactgtaaaataaaaatatatagcatattatatattgatatatcatcaacatagcccaaaacaaagctgcatactattattataggcagcaatccaccagcgcgatgcttgatcttagcttagttgccaccagactcctcgcaacctgggggcttgtaggcgatgaagctaatcaactgcacctgcctgacgttgtcgaagccgatgatacggacaaag

SEQ ID NO: 399347 - DNA, 437 bp, Oryza sativa nipponbare
ggaaaaatcattaataatatgggtatatcgaaaacagttggttaaacagagtagtcaagagtcgatcgatcgatgtacacggagacaaaatcaaagacctctctcatcacttggattaattaatactagtaatatttagagactcttgggcaagcatagaaataattagcaaatgaggatggtgatgcaggaggtgtagaggctaggcagcaagggaggggtggtggtggtcagagttggggatggtctccttgtggagatgaccgtctcccttggggacgatgagaccgaagcctccttccttcctcttgtacaggacgttcatctccccggtcttctcgtctctgaaggcgtagaagttgtggtccacattcactagctgctccatcgcctcctccaccgacagcggcggcatctcgaacaccttggtgcgcacc

SEQ ID NO: 399348 - DNA, 383 bp, Oryza sativa nipponbare
gggtgggttcacaacaccatatttcattgatcaggttcaaaacctgcacagaaatacacactaccggtacagatctcaccctctctccaatactcgtacatccatccacgcgggccacacgaatacgtacatttatacgggacacgtacgtacatttactggaccgggtacacacacgcacactctcctgcagagacgcgcatcggcgtcaacctagctagcttagctgaaggcgatgcgtcgccatggcagcacggcggcggcggggctcacttgccggggacgaagttggtggcgtaggcccaggcgttgttgttgacggggtccgcgaggtggtcggccaggttctcgagggggcccttgccggtgacgatggcctggac

SEQ ID NO: 399349 - DNA, 451 bp, Oryza sativa nipponbare
actaggcaaaccacacgaatgcacgatgattaatttcactgagaatagcacgggtacatcacatcacacaaattcatacgttgatacacgcatagtcgccgaagcgaccagctgcttaattaatcgataacacacgggtttaattcagcaataatcagcacacacacaaaccacactcatatgggtggtttttattgtggactaattaaggtaggtgactcgccggcggcgagtgttcggttgcttcgtgacttcacttgccgcacttgcagtcggtgcaggagcagctggtgccgcacttgcagccgccgttctcctcgccggcggcgacctcctcgaagtggctcttctcggcttcaactatgacgacgccatagctggtacctttcttcacgcactggctcttgtcagcacagtcgcagttgccgcacttgtccgacatgggcgaaga

SEQ ID NO: 399350 - DNA, 435 bp, Oryza sativa nipponbare
aaatacttaatagtaatagacggtttgatggagtattacaacatgcagcagtggcattaatacgccagtacattaattaagttacacatatgcaggctccattttggtttcttttaatttatcgtattacagaatttctgtagccttgctgatgatcacttggatatcatgtactagtaattaacaataggatgcatacaaaagatggcccaacgacaacagaagatgcgtgcatctgacattgtctggccttatttggttggtagtactccaattaattaacaagagatgatgcattcttgtgccttagtttcttcacatgcttggcttcacgttgagcctattcgcaatcttcaccctcaacgactcatcacactgggagaggtagttgacccagatggcgcggagctcaggggagaccttggggtgcgcgag

SEQ ID NO: 399351 - DNA, 497 bp, Oryza sativa nipponbare
tcaacaaagaagctaaacgtggatctccgaatcgtttgtttcatagtgccaattcacactaagattccaactgtacatatagcaattaacaacaacacatttactcacttcgaaattactcatcgaatagataatatatatatatatacccctttcacttccatcatctaagaaaatatagatagctgtatacatacaagaagaagcagaagcagcaatggtggtcaagccgcggcggcggtgccttcctcctccttcttcttcttggcctcctctccctcctcctccttggccacatcgtcctccatctccgcggcgagggactcgagcagcacggacttagggttcaccatgggcgggcccttctccctcccctcgagctcgtcgagatcgaaggtgatgagcctgtcccagatccccccctcgaacagcaccccgaccttgccgtcggtgacgcgctgcacgatgccccagtacatgtggtaggcgttgttggg

SEQ ID NO: 399352 - DNA, 427 bp, Oryza sativa nipponbare
  unsure (1)..(427): unsure at all n locations
taactaaaaccagtttgatttggtgtttgatacaaaaattaaaatggacggattcacaagagagcaccctctacttaagctttacattacaaggccaaccagcagctgcctgccggccgaccactgcgtgcgcacgcgcgcgcaataatcaaccaatcacacacagtacgcacgcacataaaaaccacccatagccttcacgtacgcccggacgcacgcaccggttcgtgccaagctcaagggtagatggttctcgggatgatgatgtcgccgatgttgttgtgccacgggtccgagaggtggctggccaggttctccagtgggccggtgcccgggtacgccgactgttggacgcagaaacccacaaaagccagcatggccaatcgcccgttcttgatctncttgagcttgtactcctcgaacttga

SEQ ID NO: 399353 - DNA, 532 bp, Oryza sativa nipponbare
gtataaatatatatagccggagcttccatatatttcattcacatatgcctcacccaacaacatatagtcgtagcagataccactcttacatcaagtcagagagagatcaggtgaaacaaaaacaaaagcagagcacggccggtaaaatcaaaagacgatgaacaaactgggaacacacgaaacaaggtgggagacatcatcgaatcagagatgaacaattaaacaaggctatatatgacgatgacggcttagttgccaccagactcctcgcagcccgggggcttgtaggcgatgaagctgatgagctgcacctgcctgacgttgtcgaagccgatgatacggacgaatgcatcagggtacgccttcttggcctcctcgagctccttgagcacctgggtggcgtcagtgcacccgaacatgggcagcttccacatggtccagtacctgccatcgtagtatcccggggatcttgggttctcacggtagacgaatccgaccttgctgaactcgaggcagggcacccacttggaac

SEQ ID NO: 399354 - DNA, 428 bp, Oryza sativa nipponbare
aacgccagagtggattatcatactgggccttactggctgccagcaaaatctctctagcaacaaacgtgtaaatgctccccaaaatacaccatcaccatgactccatgcatagccacaatatcacaagtatcgctacagccagccgcgccatgttccttttctgcgaggacgcgcgacatacacatgattctgaagctctactgacctagacacagggggaagttcatgaccaaattgggtggttcattcactccattgctactgcgtgcttaatttgatgaatacacagactcgacttattttctttctttagctgcatgatcccatggatggaagaaacgaaacctactactgcccttcacaccgtctcctccattcaagcttcttcctcaagcagcttctgatcaaagtgccacaccccatgcccc

SEQ ID NO: 399355 - DNA, 367 bp, Oryza sativa nipponbare
aggggggggttttttaggcaaaccacaccaatacacgattgattaatttcactgagaatagcacgggtacatcacatcacacaaattcatacgttgatacacccatagtcgccgaagcgaccagctgtttaattaatcaataacacacgggtttaattcagcaataatcagcacacacacaaaccacactcatatgggtgggttttattggggactaattaaggtgggtgactcgcccgctgcgagagttcggttgcttcttgactttaattgccgcactttcagtcagtgcaagagcaatttgtgccccacttgcaaacgccgttcttcttgccggcggggaccttctcgaaatgggtctttttgg

SEQ ID NO: 399356 - DNA, 423 bp, Oryza sativa nipponbare
aatctccaaattcaagtatcgggggtagtatatcatcatcatgcaagtacagtgttacatagattaatcacaatgcagtttgattaagcagtgggcatcatcacatcgcattcagaggaaggctatcttagattacagatgaatatgcagacacccagcttggtgttacatacatagactggatttgggtgaaatttaaccggcgagggcgctggtgttgtagacgaggagggcgccgccgccgaggagcccggcgagggtcacggcccatatcagaagcccggtggttccaccaacgtaggtgtcaccggtgggagaccattcctcctgcgagtagattgggctgtagccgacgacgtttgctccggacttgtcaacgaattggtacacaccctttccctggcttttcctgctgacgcgtag

SEQ ID NO: 399357 - DNA, 455 bp, Oryza sativa nipponbare
tttagaactaggatatatagcttatggaattaactgttctttcaaatacatggagtacgtatttgacagtagtatatatgacacagtaatgcatgcatatatgacaccaaaatgtgatatggatatgattaagcaggtgcagcaaaacgtacattaattaaacaacaacaattaaccctcgggcacgcctgtgttttgttatctcgctcaacatatacgtacgtaatactttgcttgcatagcatagggacgacgacattatattcttaattgataaactcaagaacgcatggagatggatcgagagatttataaatatggagcttgcttgattgattagatgaggtcgtcctccttgtgggtctcgatgacgacgtcggacttggggtaggcgtggcaggtgaggacccagccggcggcaacctggtcgtcgtcgaggaagctctggtcggact

SEQ ID NO: 399358 - DNA, 417 bp, Oryza sativa nipponbare
agctagcaaatcgatccatgcgaccatgcgtgcaaatcagttggagcacaaatttacatgttacacccacaccctacacccatgcataataatacatcgtatatacgtacgtacatacatacccctctcgatcacacgcaccatcgatcgtacaaagttgcgtacatacatacgtacacacatatacgcatacgcacgtacatacatacataattaaaaactcgtaattaattaaatacgtagttgatggcatctctaatggaacttgaggctggtgaggatgttgttgtggacgggatcagcgaggtgatcaagcaggttctgcacggggccaaccccggtgaagagcgcctggacggagaagctcgggaaggcgagcatggcgagcctgccattcttgatctccttgagcttgag

SEQ ID NO: 399359 - DNA, 457 bp, Oryza sativa nipponbare
gatttatatctaggaataacaagcatgtatgcgagggtacaatcacatttgcgggagcagtaccttaaagctaatgagaaacatctattgagctcaaaagagaactttgaacatctactagagatacatgtccaaacaagtgcatagacaagggcgctactacagttcacagccttggataccatgcgccagattgggcagagggaggtgtaagcagctggggcatacgccatttactggtcgacaggagagggctcaaccgggtagtacttgaagtgcagctccccaacattatatgcagaaagccttcgccagccgagcgggccaacatgtgtaacgctcacacaaccaccacttgctccatcacgggatgtagctcgagaaatagcccgtcttgctaactcagcagatgagtcaactggcatcacatagcggtaactctcgtccaagataccat

SEQ ID NO: 399360 - DNA, 348 bp, Oryza sativa nipponbare
ccacgcgtccgtgttcagataacgcagacctcaccggggagtctgctggtgtattcatttggtgcctgactcaaaatgcagagtcctacaagctgtgggaaagacttcatcctgaaaatgttgaagccagtgttgtagtccttagcactatagtcacaaaatggagcgagctgtctcataagctcagtgctgaatctcttaaggtgactctgaagaacttaaggactaagaatgaggcggccctagaagcagcaacggactctggaaagcaggcatctatcaaggccgcggacaagtattccaaggagatccttggaaggttgagccgcggcggagcctgcctgaagg

SEQ ID NO: 399361 - DNA, 303 bp, Oryza sativa nipponbare
ccacgcgtccgcccacgcgtccgggtaaaagtgccaaggacagttacttgttgaatggatatgcactaaacacaggccgtgcagctcaaggaatgcctactagagtaaccccggcatgaattgcatgtgttgattttaaccttcataagacaaaaatgcaatagggtgttcaagtccttgttactgatccaagggaacttgagaaaattcgtgagagagaatcttacataacaaaggagctaatcgagaaaattctgaaggctggtgctaatgtagcactgaccactaatggaattgatgata

SEQ ID NO: 399362 - DNA, 497 bp, Oryza sativa nipponbare
ttcgcgccacgcccccgacaccggctatctatccatctatctactcagctttgcgtcctcccgcgaattcaccgcagcaatggcgtgcctcgtcgccgtccagcctgtcgccgtgaagggcctcgccggcagctccatctccggcaggaagctcgccgtcaggccgtcgccccgggcgctctgccgcaccacccgcaggccgcgcgccgccgtggtggccaagtacggcgagaagagcgtctacttcgacctcgaggacatcggcaacaccaccgggcagtgggacctgtacggctccgacgcgccgtcgccgtacaaccctctccagagcaagttcttcgagacgttcgcggggcccttcaccaagagggggctcctgctcaagttcctgctgctcggcggcggatcgctggtggcctacgtcagcgcgtcggcgtcgccagacctgcttccgatcaagaagggcccgcagctgccgccgacgcccggcccacgcg

SEQ ID NO: 399363 - DNA, 340 bp, Oryza sativa nipponbare
ccacgcgtccggaaaaggcaaatttatggcatcaaacaaaatgtgaaatggtgaagcccatttcgctcatagcgactctgaggctgtcctgtggatgcatctagacatcaacgtgcaggcgttaggcttgaagcaacattgggctaattctaccggagaagccaaataatatcatatctaacagttggtctggaaggttactcttcatggcaagtgccaattttttttccattttctgttatgatgcgtgaaactatcttgtagatgtagatatattgattatggaaggatgaagttgccaattgacctgaggcggtttccttctgcagccaggaaaaat

SEQ ID NO: 399364 - DNA, 499 bp, Oryza sativa nipponbare
attgccgggtcgacccacgcgtacgcccacgcgtccgcggacgcgtgggtttgattgctgggataatggtgcctcggctgagggtgcagagtcctacaagctgtgggaaagacttcatcctgaaaatgttgaagccagcgttgtagtccttagcactatagtcacaaaatggagcgagctggctcataaggtcagtgctgaatctcttaaggtgactctggagaacttaaggactaagaatgaggcgcgcctagaagcagcaacggactctggaaagcaggcatctatcaaggccggggacaagttttccaaggagatccttggaaggtagagccgcggcggagcctgcctgaagggcaggctgctggttatcacgcttgctgttggcgcatgctttgtgctatctcctaaccgggagaatccatcctactggcacaagcttcaagccatggtggcatttcacctggcggactagaagtatatttgtccagccgatgta

SEQ ID NO: 399365 - DNA, 427 bp, Oryza sativa nipponbare
ccacgcgtccgctactactagccagtaagctagctaactaactacgtggctatggcccccaccgtgatggcctcctcggccacctccgtggctccattccaagggctcaagtccaccgccgggctccccgtcagccgccgctccaccaactcgggcttcggcaacgtcagcaatggcggaaggatcaagtgcatgcaggtgtggccaattgagggcatcaagaagttcgagaccctatcgtacctgccaccactcaccgtggaggatcttttgaagcagatcgagtacctgcttcgatccaagtgggtgccttgcctcgagttcagcaaggttggattcgtctaccgtgagaaccacaggtctcccgggtactacgatggcaggtattggaccatgtggaagctgcccatgttcggctgcaccgatg

SEQ ID NO: 399366 - DNA, 453 bp, Oryza sativa nipponbare
ccacgcgtccgacctgctccggtccaaatgggtgccttgcctcgagtttagtaaggtcgggttcgtctaccgtgagaaccacaggtctcctgggtactatgatggcaggtactggaccatgtggaagctgcctatgttcggatgcactgatgccacccaggtgctcaaggagctcgaggaggccaagaaggcatatccagatgcatttgttcgcatcatcggcttcgacaacgtcaggcaggtgcagttgattagcttcatcgcctacaagcccccgggttgcgaggagtccggcggaaactaagctagttggcaagccagcaagctcactcgtgagctctatacagaggagactcgattgatctattcggttttggcagctttgaacgttcgaatcgggccaccttgccatggtttcccctttcccaagttgttgcttcaagtttttttttt

SEQ ID NO: 399367 - DNA, 402 bp, Oryza sativa nipponbare
ccacgcgtccggcaaagctggcgccgccgtagccgggggagctccgaggccgtcgacctgctccgtattctaccctcctcgttgctggtccaagcgaagcagcggtaatggcgtgcgggcgcaggcgtcgacgacggagacgaccgcagcgccggctgcggaggtgactactaaggtggagaaggtgtcgaagaagcaggtggatggcgtggtgacgaacaagtacaggcccaaggagccgtacacggggcggtgcctcctgaacacgaggatcaccggcgacgacgcccccggtgagacgtggcacatggtgttcagcaccgacggcgagatcccctaccgcgaggggcagtccatcggcgtcatccccgacggcatcgacaagaacggcaagccccacaa

SEQ ID NO: 399368 - DNA, 478 bp, Oryza sativa nipponbare
ccacgcgtccgcccacgcgtccggaggatttgttgaggaggactttgctaaggttgctgatttcttcgatgcagcagtgaacttggctttgaaggttaaggctgcagcaggtggaacaaaactgaaggactttgttgccactttgcaatctgatagcaacattcaatccgagattgcaaaacttcgccatgatgtggaggaatatgcaaaacagttccccacaattgggtttgagaaagaaaccatgaagtacaagaactaagaaactttgaatggaacagcaagggtaaaagaaaaggcatcaagctgaattcctgaggtgactgttggaattcttgcaagaacaagtcggtgtaaacatatatccatggagtgccatcttatgtaaaagggacccctggcattttacagcgtgtggaaactttgtcaatagttcttatcgtagacacctactgtaagatgttatgctaatgctata

SEQ ID NO: 399369 - DNA, 487 bp, Oryza sativa nipponbare
  unsure (1)..(487): unsure at all n locations
ccacgcgtccgctggtgaactcgagggagggcccaccggagttcgagcagcccaagatgacgatcgaaaagctcatggagtacggatacatgcttgtgaaggagcaggagaacgtcaagcgtgtgcagctggctgagcagtacttgagcgaggctgctcttggtgacgctaactccgacgccatgaagactggttccttctacggttctgcgccatccagctgaataaaagatctctagctattcgcatcccatcgatgcatcgtaggcggcctgcataggaggaggagggcaaggagcacagcaagcaggtaacctgcctgtgccggaaggttgcaccgaccctgttgccaagaacttcgacccaacggcgaggagcgacgacggcagctgcctttacaccttttaagcaggccggcttgacgctngctattaattatttctcctttttatgttttctctttgttctgtgtatcaaatcgcgccca

SEQ ID NO: 399370 - DNA, 208 bp, Oryza sativa nipponbare
ccacgcgtccgagcaaaagaagaagaagaagaaagaagaagaagaagatgcagaccgctgctagcagtgtcgttggattgtcggccgtgttgcccgctgctgtgaaagggcgcagcctgcaaattcaagctcctcgccgtgttgcgttgcgcgttcgtgcggcgggggcggcggtggcagtggaggctgcggaagtggactacagctt

SEQ ID NO: 399371 - DNA, 374 bp, Oryza sativa nipponbare
ccacgcgtccgcggacgcgtgggcggcaacccggtgccatggggcacgctgccgacgatcctggtcatcgagttcgtcgccatcgccttcgccgagcaccagcgcaccatggagaaggaccccgagaagaagaagtaccccggcggcgccttcgaccccctcggcttctccaaggaccccgtcaagttcgaggagtacaagctcaaggagatcaagaacgggcgattggccatgctggcttttgtgggtttctgcgtccaacagtcggcgtacccgggcaccggcccactggagaacctggccagccacctctcggacccgtggcacaacaacatcggcgacatcatcatcccgagaaccatctacccttgagc

SEQ ID NO: 399372 - DNA, 320 bp, Oryza sativa nipponbare
ccacgcgtccgggctgtttcacatccattttttttggccgggagagagagcatctagctagggagagaaaggaagagacgagaggagagagatggccactgcttatgctcccatggcgagccagctgatgaagagcagcttggtgtgctccaagccgagggggctgtctggtgcttcgctgacaaggaggccccgcttcacagtcaaggccatccagtctgagaagccaacgtaccaggtggtgcagcccatcaatggcgaccccttcatcggcagcctggagacgccggtgacctccagcccgctggtcgcctggtacc

SEQ ID NO: 399373 - DNA, 363 bp, Oryza sativa nipponbare
ccacgcgtccgaagaaagcataagcaacacaagggattaactcatcactcacttagctaattaaatcttcgaccatgtcggacaagtgcggcaactgcgactgtgctgacaagagccagtgcgtgaagaaaggtaccagctatggcgtcgtcatagttgaagccgagaagagccacttcgaggaggtcgccgccggcgaggagaacggcggctgcaagtgcggcaccagctgctcctgcaccgactgcaagtgcggcaagtgaagtcacgaagcaaccgaacactcgccgccggcgagtcacctaccttaattagtccacaataaaaaccacccatatgagtgtggtttgtggtgtgctgatt

SEQ ID NO: 399374 - DNA, 468 bp, Oryza sativa nipponbare
ccacgcgtccgcccacgcgtccgcccacgcgtccgcggacgcgtgggcttcgccatcgtctgcagcggtgggaagaagatcaagaccgacaagccctacgggattggaggtggcatgtcagtcgatattgatgcatctggcaggaagagcacggggaagggtgtgtaccaattcgttgacaagtacggcgcaaacgtcgacggctacagcccaatctactcgccggaggaatggtctcccaccggtgacacctacgttggtggaaccaccgggcttctgatctgggccgtgaccctcgccgggctcctcggcggcggcgccctcctcgtctacaacaccagcgccctcgccggctaaatttcacccaaatccagtctctagatgtaacaacaagctgggtgtctgcatattcatctgtaatgtaagatagccttcctttgaatgcgaatgggtgatgcccactgctta

SEQ ID NO: 399375 - DNA, 393 bp, Oryza sativa nipponbare
ccacgcgtccgcggacgcgtgggatcaggtagaacagtgagagtgaggtgcagaaaaatttgagctgaagctgaggatggcaacatccatgatcacctcgccgctggtggcgccggcccgggccaagggccttccgtccatctcccgccggggatcctccttcgccatcgtctgcagcggtgggaagaagatcaagaccgacaagccctacgggattggaggtggcatgtcagtcgatattgatgcatctggcaggaagagcacggggaagggtgtgtaccaattcgttgacaagtacggcgcaaacgtcgacggctacagcccaatctactcgccggaggaatggtctcccaccggtgacacctacgttggtggaaccaccgggcttctgat

SEQ ID NO: 399376 - DNA, 457 bp, Oryza sativa nipponbare
ccacgcgtccggcatgggtgaccaacataaatttgttcaaggaatacacagacattagcaggggagtacgaagactaggttctgctgctgctgacatgtcccacgttgccctaggcattacagaagcctactgggaataccgacttaagccttgggatatggctgctggtgttctgatagttgaagaagctggtgggatggtgtcacgcatggatggtggggagtttaccgtctttgatcgttctgtccttgtttccaatggtgttgtacatgatcagcttttggatcggattggccctgccacagaagatcttaagaagaaaggaattgatttctccctgtggtttaaacccgacaaataccctaccgacttttaagttgaactcctcacccagagctattttatactactagaagaaaagagaaaaaccgaggatcttatgttaaaatgccatgt

SEQ ID NO: 399377 - DNA, 464 bp, Oryza sativa nipponbare
ccacgcgtccgcggacgcgtgggcgagggcgctgcagaacacgtgcctcaagacgtggggcgggcagccggagaacgtgaaggcggcgcaggacgcgctgctcctccgcgccaaggccaactcgctggcgcagctcggcaagtacaccagcgacggcgaggccgccgaggccaaggagggcatgttcgtcaagaactacgtctactaatccgatccaatccaatcaagacagtgaacctgctgctgctgctgctacgtactacagctactgctatactgctagtacctcgagggcactgtaaccagtgtgtcgtcacagttacaggttgagatcgatggacaaagttaaaactatactgcattaattaattttaccttgagaaccatacggggtcaatatgtatttcaatacatgaatcttttctaagagcgttgatatacatatccctcgtgtttggcctttg

SEQ ID NO: 399378 - DNA, 407 bp, Oryza sativa nipponbare
ccacgcgtccgcccacgcgtccggccatctctctcagctctcacagctcactgcatcaatggccgcggccaccatggcgctctcctccccggtgatggcccgcgcggcgccgtcgacctcctccgcgctcttcggcgaggcgcggatcaccatgcgcaagaccgccgcgaagcccaagccggcggcgtcgtcggggagcccgtggtacggcgccgaccgcgtcctctacctcggcccgctctccggcgagccgccgagctacctcaccggcgagttcccgggcgactacgggtgggacaccgcggggctctccgccgacccggagacgttcgccaagaaccgggagcctggagggatccactcccggtgggcgatgctgggcgcgctcggctgcgtctttccggagc

SEQ ID NO: 399379 - DNA, 427 bp, Oryza sativa nipponbare
ccacgcgtccgggcaggaagagcacggggaagggtgtgtaccaattcgttgacaagtacggcgcaaacgtcgacggctacagcccaatctactcgccggaggaatggtctcccaccggtgacacctacgttggtggaaccaccgggcttctgatctgggccgtgaccctcgccgggctcctcggcggcggcgccctcctcgtctacaacaccagcgccctcgccggctaaatttcacccaaatccagtctatgtatgtaataccaagctgggtgtctgcatattcatctgtaatctaagatagccttcctctgaatgcgatgtgatgatgcccactgcttaatcaaactgcattgtgattaatctatgtaacacttgacttgcatgatgatgatatactacacttgatacttgaatttggagattta

SEQ ID NO: 399380 - DNA, 307 bp, Oryza sativa nipponbare
ccacgcgtccgcccacgcgtccggcgtgatgtgattattatgtcatgtgtccgtgcctcaaatcatggtgtgggtttcgtggcagatatacgccgtatgaatgttgctcttactagagctaggagagctctatgggttgttggtaatgccggtgctcttatgcagtctgaggactgggctttactgatagcagatgcaaaggccaggaaatgttttatggatcttgataccattcccaaggacttccttgccatgaagatctctaacactccaggaaggaacacttcaaataacataaggaacatga

SEQ ID NO: 399381 - DNA, 373 bp, Oryza sativa nipponbare
ccacgcgtccgcgatgctcggcgcgctgggctgcgtgttcccggagctcctcgcccgcaacggcgtcaagttcggcgaggcggtgtggttcaaggcggggtcgcagatcttcagcgagggcgggctcgactacctcggcaacccgatcctgatccacgcgcagagcatcctcgccatctgggcggtccaggtggtgctcatgggcgccgtcgaggggtaccgcatcgccggcgggccgctcggcgaggtcgtcgacccgctctaccccggcggcagcttcgacccgctcggcctcgccgacgacccggagggccttgcggagctcaaggtgaaggagatcaagaacggccgcctcgccatgttctccatgttc

SEQ ID NO: 399382 - DNA, 356 bp, Oryza sativa nipponbare
ccacgcgtccgataatagccgcgcttagcgtaactagacgaacgtactagcagaagaagaagaagaaaatgccggtgagccggatcgcggtgggcgcccccggcgagctgtcccacccggacacggccaaggccgccgtcgccgagttcatctctatgctcatcttcgtcttcgccggatcgggatccggcatggccttcagcaagctgacggacggcggcggcacgacgccgtcggggctgatcgccgcctccctggcgcacgcgctggccctgttcgtggcggtggcggtgggagccaacatctccggcgggcacgtgaaccccggggtgacaatccgcgccgttcgggggggg

SEQ ID NO: 399383 - DNA, 479 bp, Oryza sativa nipponbare
ccacgcgtccgcccacgcgtccggctttggacttctccgagaatatgctttgccagtgttatgaatttattcagcaagatgatactcttgtaaacacaaatcttgctcttgtaagggcagatatttcgagactcccttttgcttcatcttcaattgatgccattcatgctggagctgctatccactgctggccctccccttcgaatgcggtggctgaaataagtcgagtcctgaggcctggtggtgtctttgtagcaacaaccttcttatcttctcccaggaacaatcccttctctgttgaagcgttgcggccactgagacagattgttggaccagttaacaccagctacaattacttcaccgaaggagagctcgaagacttgtgcaaatcctgcggtcttgttaattacagcagcaaggtccagaagtcgttcatcatgttttctgggcagaagccgtagcctaaaattacatcaaaa

SEQ ID NO: 399384 - DNA, 457 bp, Oryza sativa nipponbare
ccacgcgtccggaaagcataagcaacacaagggattaactcatcactcacttagctaattaaatcttcgaccatgtcggacaagtgcggcaactgcgactgtgctgacaagagccagtgcgtgaagaaaggtaccagctatggcgtcgtcatagttgaagccgagaagagccacttcgaggaggtcgccgccggcgaggagaacggcggctgcaagtgcggcaccagctgctcctgcaccgactgcaagtgcggcaagtgaagtcacgaagcaaccgaacactcgccgccggcgagtcacctaccttaattagtccacaataaaaaccacccatatgagtgtggtttgtgtgtgtgctgattattgctgaattaaacccgtgtgttatcgattaattaaagcagtggtcgcttcggcgactatgcgtgtatcaacgtatgaatttgggtgatgtgat

SEQ ID NO: 399385 - DNA, 220 bp, Oryza sativa nipponbare
ccacgcgtccggacgacgatgcgcgtctctgcaggagagtgtgcgtgtgtgtacgcggtgcagtagatgtacgtacgtgtaccgtatagatgtacgtattcgtgtggaccgcgtggatggatgtacgagtattggagagagggtgagatctgtaccggtagtgtgtatttctgtgcaggttctgaacctgatcaatgaaatatggtgttgtgaattaatt

SEQ ID NO: 399386 - DNA, 298 bp, Oryza sativa nipponbare
ccacgcgtccggccgacatcgccgacgaccaaaatcttgaccaggtggagcagaggtgcatcgtgagcgtgtgccagccggggagcaacctgctcgccgccggctactgcatgtactcgagctcggtcatcttcgtgctcaccatcgggacaggggtgtacgtgttcacgctggacccgatgtacggcgagttcgtgctgacgcaagagaaggtgcagatccccaaagcaggcaagatctatgccttcaacgagggcaactaaccgctctgggacgacaagctcaagagctacatgga

SEQ ID NO: 399387 - DNA, 389 bp, Oryza sativa nipponbare
ccacgcgtccggcgacatcgccgccgccgccaccggccgcatcaccatgagcaaggagctgtggtacgggccggatagggtgaagtacctggggccattctcggcgcagacgccgtcgtacctgaggggcgagttcccgggcgactacgggtgggacacggcggggctctccgcggacccggaggcgttcgcgaggaacagggcgctggaggtgatccacggccggtgggcgatgctcggcgcgctgggctgcatcacgccggaggtgctcgagaagtgggtgcgcgtcgacttcaaggagccccggtggttcaaggccggcgcccagatcttctccgacggcggcctcgactacctcggcaaccccaacctggtgcacgcccagagca

SEQ ID NO: 399388 - DNA, 398 bp, Oryza sativa nipponbare
ccacgcgtccgatcgccatctctctcagctctcacagctcactgcatcaatggccgcggccaccatggcgctctcctccccggtgatggcccgcgcggcgccgtcgacctcctccgcgctcttcggcgaggcgcggatcaccatgcgcaagaccgccgcgaagcccaagccggcggcgtcgtcggggagcccgtggtacggcgccgaccgcgtcctctacctcggcccgctctccggcgagccgccgagctacctcaccggcgagttcccgggcgactacgggtgggacaccgcggggctctccgccgacccggagacgttcgccaagaaccgggagcctggagtgatccactcccggtgggcgatgcttggcgcgctcggctgcgtcttcccggagc

SEQ ID NO: 399389 - DNA, 271 bp, Oryza sativa nipponbare
cgacccacgcgtccgcccacgcgtccgcggacgcgtgggtcgacacgcgcacacgacacgacgcaccaatggcgctcgtgtccgcctcctcctccaccaccggcgtcgcggcgctccccggcgccgccagggcctcctccttcctcggcggcgccggcaggagcggcaggctgctgctgaggcaggccgagtcgtcgtccgcgcgggcgtcgttcgccgtgcgcgccgcggagcccgacaggccaatctggttccccggcggcaccacgcc

SEQ ID NO: 399390 - DNA, 383 bp, Oryza sativa nipponbare
ccacgcgtccgctcgtctaccttacctagcagcagcagctagctagcttaattagctatagcagccatggcggcgacggcactgagcagccaggtccggttgccgatgtccctgcgggtggcgacggcgccggcgccggcgcgcgtgtcggtgctgccggcgagcaacaagctgggagacaggctgcggatgcaggcgacgtacaacgtgaagctgatcacaccggacggcgaggtggagctgcaggtgccggacgacgtgtacatcctggaccaggcggaggaggaagggatcgacctgccttactcctgccgcgcgggctcctgctcctcctgcgccggcaaaggtggtctccggcgagatcgaccagtccgaccagagct

SEQ ID NO: 399391 - DNA, 374 bp, Oryza sativa nipponbare
ccacgcgtccgcccacgcgtccgcccacgcgtccgggggtagtgacggcaacatatcaccatccgcaaaaatagattacatttctagtccccatagtcaggtcaggcagccagttccgagaatgacatctcttaccgggccggttggttcaccgtcatttttctcatttcgtgacagcgattcaaatttttttaggttaaagttgtgcctgtgcaattgtacagtatgagcatccaggccaattaacttgttattgcggtcaccgcaaaattcattttaaacatgtccgttgttactccatttgtcgactgtctaccaggttttggtactgccctttactgacatatattatatatgagatgcggttacatatc

SEQ ID NO: 399392 - DNA, 480 bp, Oryza sativa nipponbare
tccgggattcgagccacgcgtccgaagaaaccggcgtgccttcatggtcactgaagggcgcaataggaagaagaagcaagaaaatcaaatgaaacttgaagcagaactccaaaatttgcaggtcgagtggaatggaggctcggatactatggaggaaatacttgggaggatccaacaaagggaagaagccgcagtaaagcgtgaacgagctatggcatatgcattcaatcatcagtggagagcaaggtctgccacaagtcttggaaacttcaactatgaagttggcaagggtggctggggttggagctggatggaccgatggatagcggcacggccatgggagccccgatcactggtccaccccgaaaacctgaagaaaggacaggcaaagaaagaaaatgccagcacaaacccatcagctctgaagcctgcaggcttaaatagtctaaacaacaacatcaatgatcgaaaagcccctaa

SEQ ID NO: 399393 - DNA, 385 bp, Oryza sativa nipponbare
ccacgcgtccgcggcaagctgggcctcgtccccgccgagacggcgatcccgtggttccagaccggcgtgatcccccccgcgggcacctacacctactgggccgacccttacactctcttcgtcttcgagctcgccctcgtcggcttcgccgagcaccgccgcttccaggactggtacacgccgggctccatggggaagcagtacttcctcggcctcgagaagtacctcgccggctccggcgagccggcctaccccggcggcccgctcttcaacccgctcggcttcgggaccaagagcgaggcggagatgaaggagctcaagctcaaggagatcaagaaaatgaggctcgccatgctcgccttcctcggcttctccgtccaggcgc

SEQ ID NO: 399394 - DNA, 353 bp, Oryza sativa nipponbare
ccacgcgtccgccacgcgtccggtggctatggcccccaccgtgatggcctcctcggccacctgcgtggctccattccaagggctcaagtccaccgtcgggctccccgtcagccgccgctccaccaactcgggcttcggcaacgtcagcaatggcggaaggatcaagtgcatgcaggtgtggccaattgagggcatcaagaagttcgagaccctatcgtacctgccaccactcaccgtggaggatcttttgaagcagatcgagtacctgcttcgatccaagtgggtgccttgcctcgagttcagcaaggttggattcgtctaccgtgagaaccacaggtctccccggtactacg

SEQ ID NO: 399395 - DNA, 446 bp, Oryza sativa nipponbare
ccacgcgtccggacttggtacaacccaaaatcaccattccttttggttcgcacaaccaaaaaattattctgaaggtctacaggaagataaaaaaatacggaattgtatcaagaactatatacaaaagaataggaaaaagggctcgaatagaaaaatagaagcagactcaagtttcgaagtaattacacataataaaaaaatggactcaggctcaagttccgaagtaattacacatatagaaattcaaaaagaaatcgatacaatccacgtcataatccatattggattccccaatttattaaagaaaaaaggagcaatcgaagaattagagaaagatctacaaaaagaagttaattctgtaaaccagagacttaatattgggatcgaaaaagtgaaagaaccttatagacaccatgacaaaagtttgttcttcagttttctcttcc

SEQ ID NO: 399396 - DNA, 464 bp, Oryza sativa nipponbare
ccacgcgtccgcttccccgtcttcttcatccgcgacggcatcaagttccccgacgtcatccacgccttcaagcccaacccgcgctcccatgtccaggagtactggagggtcttcgacttcttgtcccaccaccccgagagcctccacaccttcttcttcctcttcgacgacgtcggcatccccaccgattaccgccacatggacggcttcggcgtcaacacctacaccttcgtcacccgcgacgccaaggccaggtacgtcaagttccactggaagcccacctgcggcgtcagctgcttgatggacgacgaggccacgctcgtcggcggcaagaaccacagccacgccacccaggacctctacgactccatcgccgccggcaacttccccgagtggaagcttgtcgtccaggtgatcgacccggaggaggaagagaggttcgacttcgacccgctggatgacac

SEQ ID NO: 399397 - DNA, 388 bp, Oryza sativa nipponbare
ccacgcgtccggaaagatattgactctatcactctgaaagatgcaatcgagctattgcagtatcccaaaattctgggaaaacaccctgatgatgatcttcctgtacttatcacacattctaaagctggatttagtatcagacacaggagaactcttgcttccttgccaaagagtgctgacccaaagaagattaccctcgagcgtgcactgaagctcttgactggtaaaaacgtgagaatgtttggtcgtcctaagggaaaaacgaagaaagaggcagaaccccttgaatggcattaactgagcacctgttcccaaaaccaaactacaacttgcacactgcgggcaaacacaattgtttctgatcagagccgaggatcccggggtgtga

SEQ ID NO: 399398 - DNA, 481 bp, Oryza sativa nipponbare
ccacgcgtccgcccacgcgtccgcccacgcgtccgcctcgatctcctacactcctccaagcaactctcttccaccttccaacctctacaaaactacaagaaaagatcactcactccagctcgtgaaagatcacgcgcgaaaagcagcatctcctcctccgacgagcattgatctgatcgagcgcgcgtcgatcgtcggagaggatggccgccgtgctgccatggcgacgcatcgccttcagctaagctagctaggttgacgacgatgcgcgtctctgcaggagagtgtgcgtgtgtgtacgcggtgcagtagatgtacgtacgtgtaccgtatagatgtacgtattcgtgtggaccgcgtggatggatgtacgagtattggagagggggggagatctgtaccggtagtgtgtatttctgggcaagttcttgacctgatcaatgaaatatggggttggaaataattataaaaataactggtt

SEQ ID NO: 399399 - DNA, 328 bp, Oryza sativa nipponbare
  unsure (1)..(328): unsure at all n locations
ccacgcgtccgatcagagatcaggtagaacagtgagagtgaggtgcagaaaaatttgagctgaagctgaggatggcaacatccatgatcacctcgccgctggtggcgccggcccgggccaagggccttccgtccatctcccgccggggatcctccttcgccatcgtctgcagcggtgggaagaagatcaagaccgacaagccctacgggattggaggtggcatgtcagtcgatattgatgcatctggcaggaagagcacggggaagggtgtgtaccaattcgttgacaagtacggcgcanacgtcgacggctacagcccaatctactc

SEQ ID NO: 399400 - DNA, 482 bp, Oryza sativa nipponbare
ccacgcgtccgcccacgcgtccgcccacgcgtccgaaccgatgaaacgaagatttaatgatcttagcgaagatgaggaagatccgttggcaatgatcaggagcatgtttaggtatgatcctagtaaatatgcaggcagagatgacgatgatagcgacatggaagcagattttgctactatagaaatggaagagcaaagaagcgcgagaattgcaaaggaggaggatgacgagcaacttcgcctgattgaggaggaagaaagacgtgagcaggagaggaagaggcgaaagatggcgcgtggccgatagtagcagctaagttgtacaaatgcttgagttacagcttgagcaaggcttgaactgcaattccacggtcgtacgggccatggtgcttgcagatgatagcacgctttacccccatttatttgccgtgcgatttctcaagagatctatcaagaaaaaaacggcagggatcaagcaaaac

SEQ ID NO: 399401 - DNA, 434 bp, Oryza sativa nipponbare
ccacgcgtccgcccacgcgtccgcccacgcgtccggccgaggtatcgcccttgctagaacgatggccgcgtcggcgctgcaccagaccaccagcttactcggtaccgtccgtcgtggggatgagcttgtccgccgggttggcgactccggtggccgtatcaccatgcgccggaccgtcaagagcgcgccccagagcatgtggtttggacctgaccgtcgcaagtacctgggcccggtctaggagcaaacgccatcataccttaccggagagttcccggcagactacgggtgggacacggcggcgctatgggccgacccggagacgttcgcgaggaacaagtggctaggagcgatccactcacggtgggctatgctgcgggcgctgggcagtgtttgccagagatcctggccaagaacggggtgaagttctggga

SEQ ID NO: 399402 - DNA, 468 bp, Oryza sativa nipponbare
ccacgcgtccggcataagcaacacaagggattaactcatcactcacttagctaattaaatcttcgaccatgtcggacaagtgcggcaactgcgactgtgctgacaagagccagtgcgtgaagaaaggtaccagctatggcgtcgtcatagttgaagccgagaagagccacttcgaggaggtcgccgccggcgaggagaacggcggctgcaagtgcggcaccagctgctcctgcaccgactgcaagtgcggcaagtgaagtcacgaagcaaccgaacactcgccgccggcgagtcacctaccttaattagtccacaataaaaaccacccatatgagtgtggtttgtgtgtgtgctgattattgctgaattaaacccgtgtgttatcgattaattaagcagctggtcgcttcggcgactatgcgtgtatcaacgtatgaatttgtgtgatgtgatgtacccgtgctattc

SEQ ID NO: 399403 - DNA, 397 bp, Oryza sativa nipponbare
ccacgcgtccgaaaaaccaacccaaccgccgccggatcggcctcgttagaacgatggccgcgtcggcgctgcaccagaccaccagcttgctcggcaccgcccctcgccgggatgagctcgtccgccgcgtcggcgactccggtggccgcatcaccatgcgccgcaccgtcaagagcgcgccccagagcatctggtatggacctgaccgtcccaagtacctgggcccgttctcggagcagacgccatcgtacctgaccggagagttcccgggagactacgggtgggacacggcggggctatcggccgacccggagacgttcgcgaggaacagggagctggaggtgatccactcgcggtgggcgatgctgggggcgctgggctgcgtcttcccggagat

SEQ ID NO: 399404 - DNA, 277 bp, Oryza sativa nipponbare
ccacgcgtccgctggagagtttgaaaagaaatatgagccaaccattggtgtcgaagttcaccctctagattttaccaccaactgtggtaagatccgcttctactgctgggacactgctggacaagagaagtttggtggacttagggatggatactatatccatggtcaatgtgcgataattatgtttgatgtcacttcaaggctgacttacaagaatgttccaacatggcataaggacttgtgcagggtgtgtgaaaacatccccattgtcctgtgt

SEQ ID NO: 399405 - DNA, 411 bp, Oryza sativa nipponbare
ccacgcgtccgcggacgcgtgggccaagccaagaagagggagagcaccaaggacacgcgactagcagaagccgagcgaccgcctcctcgatccatatcttccggtcgagttcttggtcgatctcttccctcctccacctcctcctcacaggttcttggtgtagcttgccactttcaccagcaaagtttcatgtctgatctcgacattcagatcccaactgccttcgatccctttgctgaggccaatgctggagactctggtgcggctgcaggatcaaaggactacgttcatgtacgcatccagcagcgtaatggccgtaagagcctgaccactgtccagggattgaagaaggaattcagctacaacaagatcctcaaagatctcaagaaagaagtttgctgcaatggtact

SEQ ID NO: 399406 - DNA, 348 bp, Oryza sativa nipponbare
ccacgcgtccgcccacgcgtccgcccacgcgtccgcccacgcgtccgctcgatcagctgcgcccgcgtgaagcgcctcgtcgacgacgtggtcaccgccatcaggagcggcgtggatccggtccccattggcagtgggcttggtggctcctactacttcaggaacatctccggcgacagggttgccatcgtgaagccgacggatgaggagccttttgcacccaacaacccgaaggggttcgtcgggagagcgcttgggcagccgggactgaagaaatctgtcagggtgggagagacagggttcagggaggtggcggcgtacctgttggatcatgataacttcgcaaat

SEQ ID NO: 399407 - DNA, 388 bp, Oryza sativa nipponbare
ccacgcgtccgcccacgcgtccgcccacgcgtccgctcacgcttctactcactcttcttgctgctgtttcctaggatgcaggagcgtggaagctactcctaccagctgcctctgctatgtcgaccacgcgtggttaggagctgcaaccctttcgacgtgctccgcctgctatttccgcggctctgatgaccaatcccgcttacttcgaggtgggaagatacttgggtggctacagtttcatgaacatgacaagttatccatcttctcaatttggagggcttccagatgttgctggtattcaaaacctcggtcttggatattcaccggaagagattgagcgattgagagctcaagatgttggacaaggagaagctaatattagacttta

SEQ ID NO: 399408 - DNA, 409 bp, Oryza sativa nipponbare
ccacgcgtccgagaggaggaacaacagagtagcctgcacaattctctttatccgagcaaagagctactatctgatgataaggcgatgactgtatctgatcatataaaggaacttccggacaggatgttagcctcactatcggctgcaggggctaagacactacgggcgcttcgcttactccaaagatcttattagaattctagaagcaccagttcgtgtccagggggttcggcttctgcagctctcgcccggagaattgttctgtacaacattgaacgtctctggttattgtgaccttctacttggaggtccagtaattccgcatgatatgatagcgtttgttgtgccggctgtaacatggtatgaacgacccattcctagggcccatagttctgggctggtctgttct

SEQ ID NO: 399409 - DNA, 416 bp, Oryza sativa nipponbare
ccacgcgtccggtggtgtccgtcgcacgcctccccccaatcctcgtgagccctatccgattccgcaccaccgctactcgccgccgtctcctcccctcctccgcgctccgcctcacccgcccgctctcctcctcctgctccgcgtcgccgctcgccgtcgtagcctccatggagacgccgccggagaactaccgcaccaacgtcggcatctgcctcgccgacccctccctcaccaagattttcaccgcgtccaggatcgacatcgccaacacatggcagatgcctcagggtggtattgatgcgggagaggatccgagggaagctgctttcagagaattgagggaggaaacgggtgttacatctgcagaaatggtggctgaggtccccgtttggttaacgtatgatttccctggtgat

SEQ ID NO: 399410 - DNA, 417 bp, Oryza sativa nipponbare
ccacgcgtccgtgggaatacccatactctgctggtggactcttatgcctatcttcctgcaaacatgaaacactctgtgatctcagatgaagtaactacccttgtaatctttgagaggaggtacacaaccattgagggttaccatcctgatctcattgttggatcaactgataagcaaccccttcttgaaaccccaggagaggtatttgagttgaggaagctgctacccacttctctgccttatgactttaatatccatataatggattttcagcctggggaatatcttaatgtgaaggaggttcattacaatcaacatgggttgctgcttttagagggacaaggaatataccgattgggagacaagttgtacccggtgcaatcaggggacaccatttggatggcgcccgtttgtgcc

SEQ ID NO: 399411 - DNA, 320 bp, Oryza sativa nipponbare
cgaccaaggcgtccgcccacgcgtccgaagaaccaaaggctgctgaagaagatttggctttgaaggaaatgactggtcctactgctagggaagaagaagaactgagagaagcaaaacagcacgataaggaaaagctctgtaattttagtcgagcactggctgtactggcatccgcatcgtctgttagcaaggagcgtcaagagttcctcagccttgtcaacaaagagattgaactgtataactctatgcttgaaaaggagggtacagaaggtgaagaggaagctaagaaagcttacatggctgctagagaagagtcggac

SEQ ID NO: 399412 - DNA, 375 bp, Oryza sativa nipponbare
ccacgcgtccgcccacgcgtccgcatgggaggaaaatgagaagacaaaagctgagaacaaggcttcgaagaagctatctgctattctttcctgggagaacacaaagaaagcaaacatagaagctcaactgaagaagattgaggagcaactggaaaagaagaaggctgaatatgcagagaagatgaagaacaaagtcgcgatcgtccacaaggaagctgaggagaagagagcaatggtcgaggcaaagcgcggcgaggaagtcctaaaggccgaggagatggcagccaagtaccgtgccaccggccatgctcccaagaaactcatcgggtgctttggggcctaaagaaattttcgattcacaacgagcaaacgtga

SEQ ID NO: 399413 - DNA, 362 bp, Oryza sativa nipponbare
ccacgcgtccgaggggatccacggctacacggattacaaggccgggttccgccgggagcacacggtgtcgtcggagaaggccggcgggtcgcacgggccgctccgcgcgtcggcgcacatccggctctccgctcggttcgactaccagccggacatttgcaaggactacaaggagacagggtactgtggctatggcgattcctgcaagttcatgcatgacagaggggactacaagtctggatggcagatagagaaggagtgggaggaggcggagaaggcccgcaagcgccgcatcgctatgggtggggatggtagtgattacgaaagcaagggaggaggatgacgatgatgatgaagaagcg

SEQ ID NO: 399414 - DNA, 346 bp, Oryza sativa nipponbare
  unsure (1)..(346): unsure at all n locations
ccacgcgtccggaaagcataagcaacacaagggattaactcatcactcacttagctaattaaatcttcgaccatgtcggacaagtgcggcaactgcgactgtgctgacaagagccagtgcgtgaagaaaggtaccagctatggcgtcgtcatagttgaagccgagaagagccacttcgaggaggtcgccgccggcgaggagaacggcggctgcaagtgcggcaccagctgctcctgcaccgactgcaagtgcggcaagtgaagtcacgaagcaaccgaacactcgccgncggcgagtcacctaccttaattagtccacaataaaaaccacccatatgagtgggggt

SEQ ID NO: 399415 - DNA, 360 bp, Oryza sativa nipponbare
ccacgcgtccgcccacgcgtccgccagcagcagcagcagtagctgagcttgaagcagcagagcgaggtagacatggccgccgccaccatggccctctcgtccccggcgctggccggcaaggccgccgcgaaggtgttcggcgaggggcgcatcaccatgcgcaagtcggcggcgaagcccaagcccgccgcgtcggggagcccgtggtacggcgccgaccgcgtgctctacctcggcccgctctccggcgagccgccgagctacctgaccggcgagttccccggcgactacgggtgggacaccgcggggctctccgccgacccggagacgttcgccaagaaccgggagcctggagggatc

SEQ ID NO: 399416 - DNA, 303 bp, Oryza sativa nipponbare
ccacgcgtccgacacacgctaccagcatatacagcagtggcttagcttgaagcagcagaacgaggaacacatggtcgccgtcaccatatgccctgtaagaccgcagcgctggacgaaaaggcccatcaagaaggtgcatcggcgaggggcacatcaccaatctgcagtcggtggcgatatccaagcgccgtcggatactgagcccctgatacggcgccgaccgtgtgctctaactgggacgactctccagggagccatcgagctacctgaccgaagagttacccggcaactacgggtgggaca

SEQ ID NO: 399417 - DNA, 446 bp, Oryza sativa nipponbare
ccacgcgtccgatccaatacggctcgaagtttatcagtaacgggcagcctggcacggcacaggatgtcgacaggtccaccacccttgctcgcaaagttttccggcttctcaagtgggtcaatgatctgcatggtcttatcagccctcctgctaaggggactcctcttacactggtcttgcttgggaagtccaaaaatgcgctgctctcgactttcttgttcctggaccaatttgtatggttgggaagaacagggatatacaagaacaaggagcgcacagaccggattgtaaggatatccctctactgctggatggcctcttcagtctgtgcagggctagttgagcttggagagcttaagaggctatcaaaatcaatgaggaagctggcgagagagctgagggatactgacaaatatgagaatgaccagtacaagagccagatgaaa

SEQ ID NO: 399418 - DNA, 339 bp, Oryza sativa nipponbare
ccacgcgtccgcccacgcgtccgtccacgcgtccgcccacgcgtccggccacgcgtccgaagaatcgagccttatgctgcattacattatatggcgtatgaacgatacaggtgttggatcttgaataactgcccctcagtggggacaggacccttagtagaccttttagctggttcagcatctggaggaaccgcagcgttgcgtacttatccattggatctggctaggactaaacttgccttccaggtcaatagttcagaccaaatcagtagtggtttgaagaggacaaactctcaaccaaaatatggaggaataaaagatgtttttcgaggtgcttat

SEQ ID NO: 399419 - DNA, 319 bp, Oryza sativa nipponbare
ccacgcgtccgcccacgcgtccgcggacgcgtgggtcaagaagtactcgagcaaagaaggagagagcttggtgagctgcagagatggccccctccgtgatggcgtcgtcggccaccaccgtcgctcccttccaggggctcaagtccaccgccggcatgcccgtcgcccgccgctccggcaactccagcttcggcaacgtcagcaatggcggcaggatcaggtgcatgcaggtgtggccgattgagggcatcaagaagttcgagaccctctcctacctgccaccgctcaccgtggaggacctccttgagcaaatcgagta

SEQ ID NO: 399420 - DNA, 243 bp, Oryza sativa nipponbare
ccacgcgtccggcagccgaacgaccgagctaccgagctaatccagccatggcctccaccgcgctctccaccgcctccaaccctactcagctgtgcaggtctcgcgcctcgctgggcaagcccgtcaagggcctgggcttcggccgggagcgcgtgccgaggacggcgacgaccatcacatgccaggccgcgagcagcatcccggccgaccgcgtcccggacatgggcaagcgccagctgatga

SEQ ID NO: 399421 - DNA, 447 bp, Oryza sativa nipponbare
ccacgcgtccgatattttcatcgctctcgagaactttggagaagctccagctgcggagaagtatggcaaaacttgaattgtatcggaagtttacaaattctctagctttgtcagttcttatctctattgcttggattggctatgagctatacttcaatgcaactgatccattgagtgagctatggcgaagggcttggatcatccctgcgttttggaatgttctctcctatgtcctccttgccatcatatgcatcctttggtctccgtctcgcaatccaacagggtttgcgtattcggaggatacagctgacgaggctgatgaggaaggtctctctcttgtaggcagtgctgtgaaaggaactggagacatagtgaacatgcatgtgtttccagaggataaacgtgcatgacaagttgtcattttttagtgcagctgtactcctggct

SEQ ID NO: 399422 - DNA, 422 bp, Oryza sativa nipponbare
ccacgcgtccgagaaagcataagcaacacaggggattaactcatcactcacttagctaattaaatcttcgaccatgtcggacaagtgcggcaactgcgactgtgctgacaagagccagtgcgtgaagaaaggtaccagctatggcgtcgtcatagttgaagccgagaagagccacttcgaggaggtcgccgccggcgaggagaacggcggctgcaagtgcggcaccagctgctcctgcaccgactgcaagtgcggcaagtgaagtcacgaagcaaccgaacactcgccgccggcgagtcacctaccttaattagtccacaataaaaaccacccatatgagtgtggtttgtgtgtgtgctgattattgctgaattaaacccgtgtgttatcgattaaattaagcagctggtcgcttcggcgac

SEQ ID NO: 399423 - DNA, 348 bp, Oryza sativa nipponbare
ccacgcgtccggcataagcaacacaagggattaactcatcactcacttagctaattaaatcttcgaccatgtcggacaagtgcggcaactgcgactgtgctgacaagagccagtgcgtgaagaaaggtaccagctatggcgtcgtcatagttgaagccgagaagagccacttcgaggaggtcgccgccggcgaggagaacggcggctgcaagtgcggcaccagctgctcctgcaccgactgcaagtgcggcaagtgaagtcacgaagcaaccgaacactcgccgtcggcgagtcacctacctttaattagtccacaaataaaaactaacccatattgaagtgtggttt

SEQ ID NO: 399424 - DNA, 365 bp, Oryza sativa nipponbare
ccacgcgtccgcccacgcgtccgcaatctactcgccggaggaatggtctcccaccggtgacacctacgttggtggaaccaccgggcttctgatctgggccgtgaccctcgccgggctcctcggcggcggcgccctcctcgtctacaacaccagcgccctcgccggctaaatttcacccaaatccagtctatgtatgtaacaccaagctgggtgtctgcatattcatctgtaatctaagatagccttcctctgaatgcgatgtgatgatgcccactgcttaatcaaactgcattgtgattaatctatgtaacactgtacttgcatgatgatgatatactacacttgatacttgaatttggagatta

SEQ ID NO: 399425 - DNA, 423 bp, Oryza sativa nipponbare
  unsure (1)..(423): unsure at all n locations
ccacgcgtccggaagaagtgagaaagcatcctttcatttaatggtatgcttacagtactgagcaatttcccgggagaagaaagatttgtccgcgggcttgggcctattacattaggtggagacagtgatcatgaaaagagggtagaggatctaaagatgctctatagtgcctatgcaatggaggtactttcagatggacatcttaacgatgacaagcttgcggctttgaatcaactgaggaatatatttggactggcgaagtacgaagcagaagcaatcatcacagatgtcaaggctcgagtatttcagacctactaaattctntaacaatgagttggctgcgaccccaaagaaggcagagttcctccaagatatctgcgaagagttgcaatttgatcctctcaacttgcaagtagatgcatg

SEQ ID NO: 399426 - DNA, 482 bp, Oryza sativa nipponbare
  unsure (1)..(482): unsure at all n locations
ccacgcgtccgcaaacgcccacatcacacgcagaaatccgcatcaacagccagccatggcgtccacgctgaccaacgtcggcctgtctaccccggcggcggcggcgtcgtccctcgttaggccggtcgccggagctggacgcgtggtgtttccccgtgttggccgcggcgggttcgcggcggtgagggcgagcgggccggcgacgccgccggacatctcggacaagatgtcggagagcatcgacaaggcgaaggaggcgtgcgcggaggacacggcgagcggcgagtgcgccgcggcgtgggacgaggtggaggagctgagcgcggcggctagccacgcgcgcgacaagctcaaggagacctccgacccgctcgaggcctacttgcaggacaaccctgagaccgacgagtgccgcacctacgacaactgattcttaccattatatngttgctaatctctctgtaataattataagtactggg

SEQ ID NO: 399427 - DNA, 207 bp, Oryza sativa nipponbare
gacggacgcgtccgccgacgcgtgggcggacgcgtgggcggacgcgtgggcgcacacagccgcagcagcagcagtcgcgcacacacgagccacgaagacgatggccacggccacggcgctctccctgagcggcggcagaggccgcagctacggcgtcaggtaccctgacgccgagacgaggcacttctggagcgccgtcccgcggtc

SEQ ID NO: 399428 - DNA, 426 bp, Oryza sativa nipponbare
ccacgcgtccgcgtccgcaaaatcctggacaagcacagagcacccggcgctgctactggtggacggcgtgtcatcgatatgtgcgttggacttcctcatggatgagtgcggagtggacgtggcgctgacgggtctccagaaagcgctctggctgccgacgggtctgagcatcgcgtgcgcgagcgccaaggcgctggaggcgagcaagaccgccaagtcggtgcggtttttcttcaactggaaggactacctaaagttctacaagatgggcacctactgtccctacacccgatgcattcagctcctctacggactgcgcaccggcctcgacctcatgtatgaggaacgcctcgagaacgtcatcaagaggcacaaccgtctcgggacccccaccaagcttgcccgggaggccttggggctcaaaaa

SEQ ID NO: 399429 - DNA, 418 bp, Oryza sativa nipponbare
tagtaaaaaggtaaactcttcataataatgttattaagacattatagctgatgtcttttgatcacactgcgatcaaattatgcatcataggcagtacaactccgcgtcaggaaaaagtagaggagatatatttcttgttattacttaatacagcattcacatatatcgaaccatccggtacgtacgtagtagtactccacgcgttcacatcgatgatcggggacgatatcctcaggtagtacttatgcaaaagcgttggcgtaaactgacgaactgaacggacggacggtcggatttagggctcccataagtccaagttgccggagacgaagtcgtagtggccgccgacgagcttgagggtgccgttggcgatcccctccttgacgaacgggtaggtcttgaggttcttcagggattg

SEQ ID NO: 399430 - DNA, 369 bp, Oryza sativa nipponbare
attggttggtttttattttttttttttttttttttttttttttttttttgggaccctttacaacttatatagccataggaattgtccaattttattaacattataaacagggggaattaatccatggcgatccggccatgggggactagcagttcaatacaaaggatttgcatggatggatcggatcaaaaaaaaggtggggccaaaaccaggaatttaatttaaatttttccccgtgggcccggcgtctgtggcaattttgggccctttttgattggaaacaagttttgggaccccgaccctcttaccttggccaccaacgatccccccccgagcaggaagaactttaacaggaacccccttttggtg

SEQ ID NO: 399431 - DNA, 292 bp, Oryza sativa nipponbare
gtgaaaagaggaatatatagcatattatatattgatatatcatcaacatagcccaaaacaaagctgcatactattattataggcagcaatccaccagcgcgatgcttgatcttagcttagttgccaccagactcctcgcaacctgggggccttgcggccacgaagctaatcaactgcacctgcctgacgttgtcgaagccgatgatacggacaaaggcgtcggggtaggccttcttggcctcctcgagctccttgagcacctgggtggcatcggtgcagccgaacatgggca

SEQ ID NO: 399432 - DNA, 400 bp, Oryza sativa nipponbare
tacagcagaaaatgggaaaccactttatagtcgacgaatcgtcagtataatatctacatgcatctcatcagatgagatcagatcgagtacaacaagatggcgtatgcaggttgcgcatgcatgcatgaaaatcgagataaaaagggattaattaattattaacatatatatatccatcagtagacttccacattccattgctccgacttcttcagctgcttcttgtagtcaagccagtcgatgccgtcttttgcagcgaggtcgatcatgatgtcgtcgatgcctttctccatgcccttgaggccgcacatgtagacgtaggtgttgtccttcttgagcagctcccacagctcgtccttgtactccgccatccgcgtctggatgtacatcttctcccccg

SEQ ID NO: 399433 - DNA, 352 bp, Oryza sativa nipponbare
aggaaagcccatatctttatattatattattattaacaaaaacttgtcatgcccagctatggcttgggcgcgatctgtttcacagaacaaagagaaaacataaaagggggaaataattaatagcaagcgttaagccggcctgtttaaaaggtgtaaaggcagctgccgtcgtcgcttcttgccgttgggtcgaagtttttggcaacagggtcggtgcaacctttcggcacaggcaggttacctgcttgctgggctccttgccctcctcctcctatgcaggccgcctacgatgcattgatgggatgcgaatagctagagatcttttattcagctggatggcgcaaaaccgtaa

SEQ ID NO: 399434 - DNA, 421 bp, Oryza sativa nipponbare
ttttcgatggagtaagtgtattatatgtatgtaaatattatattattgtaaatcattttgaggagctagactagcgtgccttattaacaaggagatatgtaccattacatgatgattaacatataaatctgtagctacatggaattaaggtagtggagcagaggaggaaggatgatagaagactccaattctccatggatgggaatgggatcaggtggccttgcagaactctccgcccagatcgtcgcacgcctcctcggggaacaccgtggtgggctcgtcgtaggataggtagtccctgtcgacttcctccgccgccgcacgagaaacagcaacagcagccgatgatgagagcttggcctctgggtacatctgcacgttgcacgcctcgccgccgatgaggtcgcacgcctccatcgga

SEQ ID NO: 399435 - DNA, 429 bp, Oryza sativa nipponbare
tttaactaagaccagtttgatggcgtgtttgatacaaaaattaagatggacggattcacaagagagcaccctctacttaagctttacattacaaggccaaccagcagctgcctgccggccgaccactgcgtgcgcacgcgcgcgcaataatcaaccaatcacacacagtacgcacgcacataaaaaccacccatagccttcacgtacgcccggacgcacgcaccggttcgtgccaagctcaagggtagatggttctcgggatgatgatgtcgccgatgttgttgtgccacgggtccgagaggtggctggccaggttctccagtgggccggtgcccgggtacgccgactgttggacgcagaaacccacaaaagccagcatggccaatcgcccgttcttgatctccttgagcttgtactcctcgaacttga

SEQ ID NO: 399436 - DNA, 409 bp, Oryza sativa nipponbare
aattatcattgttaaaactttgtcttgccattttaaattatctgcaaagtaagaaagtaacactcccaagttacaacagcacaccatccatatatccatgcaggcagcctgtttgtgcccttgtgcagatgcatttcatttatacaagtagaaggcactcaaatcagccaccacatgaacacacacatgttccatcatcgatcgatctacacatgcatcacccggtcatgcacttacaaacaaaagatctacttgaagaagtacgggaggtcgagcacgtagaggaggaagtaggcccagaggacgccggagatgccgccgaagaagaagccgccggtgaacttggcccagccgtcggcggtctgcagcttgtcggcctccttcttgcggccggtgagcgtcagcgtcg

SEQ ID NO: 399437 - DNA, 422 bp, Oryza sativa nipponbare
actaggcaaaccacacgaatacacgggggattaatttcactgagaatagcacgggtacatcacatcacacaaattcatacgttgatacacgcatagtcgccgaagcgaccagctgcttaattaatcgataacacacgggtttaattcagcaataatcagcacacacacaaaccacactcatatgggtggtttttattgtggactaattaaggtaggtgactcgccggcggcgagtgttcggttgcttcgtgacttcacttgccgcacttgcagtcggtgcaggagcagctggtgccgcacttgcagccgccgttctcctcgccggcggcgacctcctcgaagtggctcttctcggcttcaactatgacgacgccatagctggtacctttcttcacgcactggctcttgtcagcacagtcgca

SEQ ID NO: 399438 - DNA, 356 bp, Oryza sativa nipponbare
ggggttgggcaacagcacaccatccatatatccatgcaggcagcctgtttgtgcccttgtgcagatgcatttcatttatacaagtagaaggcactcaaatcagccaccacatgaacacacacatgttccatcatcgatcgatctacacatgcatcacccggtcatgcacttacaaacaaaagatctacttgaagaagtacgggaggtcgagcacgtagaggaggaagtaggcccagaggacgccggagatgccgccgaagaagaagccgccggtgaacttggcccagccgtcggcggtctgcagcttgtcggcctccttcttgcggccggtgagcgtcagcgtcggcgccgtggac

SEQ ID NO: 399439 - DNA, 525 bp, Oryza sativa nipponbare
  unsure (1)..(525): unsure at all n locations
acatagattaatcacaatgcaggttgattaagcagtgggcatcatcacatcgcattcagaggaaggctatcttagattacagatgaatatgcagacacccagcttggtgttacatacatagactggatttgggtgaaatttagccggcgagggcgctggtgttgtagacgaggagggcgccgccgccgaggagcccggcgagggtcacggcccagatcagaagcccggtggttccaccaacgtaggtgtcaccggtgggagaccattcctccggcgagtagattgggctgtagccgtcgacgtttgcgccgtacttgtcaacgaattggtacacacccttccccgtgctcttcctgccagatgcatcaatatcgactgacatgccacctccaatcccgtanggcttgtcggtcttgatcttctttccaccgctgcanacgaatgcaaaggaggatccccggcgggagatggacggaaggcccttggcccgggccggcgccaccagcggcgaggtgatcatggatg

SEQ ID NO: 399440 - DNA, 364 bp, Oryza sativa nipponbare
gagtcaaaggacttcaataaacaaatgttcagtcaagtacatggcattttaacataagatcctctgtttttctcttttcttctagtagtataaaatagctctgggtgaggagttcaacttaaaagtcggtagggtatttgtcgggtttaaaccacaaggagaaatcaattcctttcttcttaagatcttctgtggcagggccaatccgatccaaaagctgatcatgtacaacaccattggaaacaaggacagaacgatcaaagacggtaaactccccaccatccatgcgtgacaccatcccaccagcttcttcaactatcagaacaccagcagccatatcccaaggcttaagtcggtattccca

SEQ ID NO: 399441 - DNA, 394 bp, Oryza sativa nipponbare
tttgcagaggcaaaacacgaggtatgtatatcaaacgctctagaaaagattcatgtgatgaaatacatgatgaaccacgtatgttctcaaggtaaaattaattaatgcagtatagttttaactttgtccatcgatctcaacctgtaactgtgacgacacactggctacagtgccctcgaggtactagcagtatagcagtagctgtagtacgtagcagcagcagcagcaggttcactgtcttgattggattggatcggattagtagacgtagttcttgacgaacatgccctccttggcctcggcggcctcgccgtcgctggtgtacttgccgagctgcgccagcgagttggccttggcgcggaggagcagcgcgtcctgcgccgccttcacgttc

SEQ ID NO: 399442 - DNA, 383 bp, Oryza sativa nipponbare
tgggaaacgaataaaaggattattgcaaaaacatcatcttcttcttcatcttcttagtgtacacaacaccaactcgatcatcatctcgtcgcactaaacccatcttccccaacccaaagacaacgaactcgctggccacaaatccatccaaccacaattaaccactgctaagctacggtcccccacttcacttgccggggacgaagttggtggcgtacgcccaggcgttgttgttgacggggtcggcgaggtggtcggcgaggttctcgagggggcccttgccggtgacgatggcctggacgaagaagccgaacatggagaacatggcgaggcggccgttcttgatctccttcaccttgagctccgcgaacgcctcggggtca

SEQ ID NO: 399443 - DNA, 345 bp, Oryza sativa nipponbare
aaacccccaaattcaagtttcaagggtagtatatcatcatcatgcaagtccagggttacatagattaatcacaatgcagtttgattaaacagggggcatcatcacatcgcattcagaggaaggctttcttaaattacagatgaatttgcccacccccagcttggtattacatacatagactggatttgggtgaaatttaccccgcgagggccctggtgttgtaaaccaggagggccccccccccgaggagcccggcgagggtcacggcccaaatcaaaagcccggtggttccaccaacgtaggtgtcaccggtgggagaccattcctccggcgagtaaattgggc

SEQ ID NO: 399444 - DNA, 405 bp, Oryza sativa nipponbare
  unsure (1)..(405): unsure at all n locations
ttaattcacaacaccatatttgattgggcaggttcagaacctgcacagaaatacacactaccggtacagatctcaccctctctccaatactcgtacatccatccacgcggtccacacgaatacgtacatctatacggtacacgtacgtacatctactgcaccgngtacacacacgcacactctcctgcagagacgcgcatcgtcgtcaacctagctagcttagctgaaggcgatgcgtcgccatggcagcacggcggcggcggcgctcacttgccggggacgaagttggtggcgtaggcccaggcgttgttgttgacggggtcggcgaggtggtcggcgaggttctcgagggggcccttgccggtgacgatggcctggacgaagaagccgaacatggagaacatg

SEQ ID NO: 399445 - DNA, 318 bp, Oryza sativa nipponbare
cactgaaaatagcacgggtccatcacatcacacaaattcatacgttgatacacgcatagtcgccgaagcgaccagctgtttaattaatcgataacacacgggtttaattcagcaataatcagcacacacacaaaccacactcatatgggtggtttttattggggactaattaaggtaggtgactcgccggcggcaagtgttcggttgcttcgtgacttcacttgccgcacttgcagtcggtgcaagagcagctggtgcccaacttgcagccgccgttttccttgccgggggggaccttcttgaaggggctttttttgg

SEQ ID NO: 399446 - DNA, 265 bp, Oryza sativa nipponbare
aatcaacagtagggagtgaagggcttcacaatgggtttaattaattcgccatcagaaaagaaaatttctacaaatatattataatttagttacaatacttttttttttagaaacacccccgtatatgaaacttgcagtcaagccaagaacttctcgaccttctccacttcctccacgctcccgatgtacagcggcactctctgatggatctccgtaggcatgatgtcaagtatcctctggtggccatcggagcctttgccgccgg

SEQ ID NO: 399447 - DNA, 384 bp, Oryza sativa nipponbare
ttttaagttgcaaacccgaaggtttttcagtttctgaattctggatggatcatatcagattcatcacagcatcgtacaatctgtgcaagcattggtacatcgagcgatggagagagagagtagtctacaatggcggctgggccattcacgagcccggcgtgaacttggtggcgtagacccaggcgttgttggcgacggggtcggcgaggtggtcgagcaggttctccaaggggcccttgccggtgacgatggcctggacgaagaagccgaacatggagaacatggcgaggcggccattcttgatctccttgaccttgagctcggcgaaggtgacggggtcgtcggcgaggccgagcgggtcgaagtactggccgccggggtaga

SEQ ID NO: 399448 - DNA, 379 bp, Oryza sativa nipponbare
tgagtaaacattctgagaaatgttatttagcaataatgtccaacttatatagacatacattgagtaagagcaattaaattagatgctatgctgtgatacagcacagataattaatccagtagcagcctgccttgaactgaagttgtatataagtcgtatctctggtaaccgctgattatatcctcgtaaacctccctaacctttgcaaagaaagcttccctgtcaggctcgaacagcaggttccggtatgcaaaccacccggtgtagccaatgccaacagcttgcatgagaccaggaacgatcggaagcctgtcaattgccgctgcgcctctgcgccttcttgcgcaggatgtcaatgaggcattctttcttcttcacg

SEQ ID NO: 399449 - DNA, 423 bp, Oryza sativa nipponbare
tgcaaaaacatcatctggttcttcatcttcttagtgtacacaacaccaactcgatcatcatctcgtcgcactaaacccatcttccccaacccaaagacaacgaactcgctggccacaaatccatccaaccacaattaaccactgctaagctacggtcccccacttcacttgccggggacgaagttggtggcgtacgcccaggcgttgttgttgacggggtcggcgaggtggtcggcgaggttctcgagggggcccttgccggtgacgatggcctggacgaagaagccgaacatggagaacatggcgaggcggccgttcttgatctccttcaccttgagctccgcgaacgcctcggggtcatcggcgaggccgagcgggtcgaaggcgccgccggggtagagcgggtcgacgacctcgccgagc

SEQ ID NO: 399450 - DNA, 386 bp, Oryza sativa nipponbare
cacttctaaaagagtatcaacgggttttttacatcggttacatcatagtacaggtacacaatcaacaaggcatgcagtgctccatccacaattacatcccaatacaccaccaccattcacagcctactccgatcccaaaaaagagaggtaagtcgcgtcgacgaacagtcttttcatcttcctccattggcagccattgctaacactccaacacctgaagaactcctcatttgggggtgaaggcctggaagatggtggcgtggccggggtcggcgagatgggcgaagaggttgtcgatggggccggtgccggtgtactctgcctggaaccaagctcccatgacggcgagcatggcgagccgcccgttcttgatctccttggtgcgc

SEQ ID NO: 399451 - DNA, 345 bp, Oryza sativa nipponbare
agagtagaactaggatgtgtagcttattaattaactgttctttcaaatacatggagtacgtatttgacagtagtatatatgacacagtaatgcatgcatatatgacaccaaaatgtgatatggatatgattaagcaggtgcagcaaaacgtacattaattaaacaacaacaattaaccctcgggcacgcctgtgttttgttatctcgctcaacatatacgtacgtaatactttgcttgcatagcatagggacgacgacattatattcttaattgataaactcaagaacgcatggagatggatcgagagatttataaatatggagcttgcttgattgattagatga

SEQ ID NO: 399452 - DNA, 382 bp, Oryza sativa nipponbare
tgataatggtaacccgcatctggatatataatattatgatcagtaaaggggcagtaccaaaacctggtagacagtcgacaaatggagtaacaacggacatgtttaaaatgaattttgcggtgaccgcaataacaagttaattggcctggatgctcatactgtacaattgcacaggcacaactttaacctaaaaaaatttgaatcgctgtcacgaaatgagaaaaatgacggtgaaccaaccggcccggtaagagatgtcattctcggaactggctgcctgacctgactatggggactagaaatgtaatctatttttgcggatggtgatatgttgccgtcactacccccggacgcgtgggcggacgcgtgggcggacgcgtgg

SEQ ID NO: 399453 - DNA, 415 bp, Oryza sativa nipponbare
tagcaaatcgatccatgcgacgatgcgtgcaaatcagttggagcacaaatttacatgttacacccacaccctacacccatgcataataatacatcgtatatacgtacgtacatacatacccctctcgatcacacgcaccatcgatcgtacaaagttgcgtacatacatacgtacacacatatacgcatacgcacgtacatacatacataattaaaaactcgtaattaattaaatacgtagttgatggcatctctaatggaacttgaggctggtgaggatgttgttgtggacgggatcagcgaggtgatcaagcaggttctgcacggggccaaccccggtgaagagcgcctggacggagaagccgaggaaggcgagcatggcgagcctgccattcttgatctccttgagcttgagc

SEQ ID NO: 399454 - DNA, 408 bp, Oryza sativa nipponbare
tttttgggtatatagccggagcgatgggttcacatattctgacccaacgataattgtagtactcttacaataaaaccggccggagagggagggaagagattattacatatgtgttaagagcagaggccattgagatggtacatcaccaaactggaaaacaaaaatatatagcatattatatattgatatatcatcaacatagcccaaaacatagctgcatactattattatcggcagcaatccaccagcgcgatgcttgatcttagcttagttgccaccagacttctcgcaacctgggggcttgtaagcgatgaagctaatcaactgcacctgcctgacgttgtcgaagccgatgatacggacaaaggcatcggggtaggccttattggactgctcgagctccttgag

SEQ ID NO: 399455 - DNA, 430 bp, Oryza sativa nipponbare
ttaatagtaatagactgtttgatggagtattacaacatgcagcagtggcattaatacgccagtacattaattaagttacacatatgcaggctccattttggtttcttttaatttatcgtattacagaatttctgtagccttgctgatgatcacttggatatcatgtactagtaattaacaataggatgcatacaaaagatggcccaacgacaacagaagatgcgtgcatctgacattgtctggccttatttggttggtagtactccaattaattaacaagagatgatgcattcttgtgccttagtttcttcacatgcttggcttcacgttgagcctattcgcaatcttcaccgccaacgactcatcacactgggagaggtagttgacccagatggcgcggagctcaggggagaccttggggtgcgcgagc

SEQ ID NO: 399456 - DNA, 408 bp, Oryza sativa nipponbare
  unsure (1)..(408): unsure at all n locations
aaacaagctaattttataattaattcgcaacaccatatttcattgatcaggttcagaacctgcacagaaatacacactaccggtacagatctcaccctctctccaatactcgtacatccatccacgcggtccacacgaatacgtacatctatacggtacacgtacgtacatctactgcaccgngtacacacacgcacactctcctgcagagacgcgcatcgtcgtcaacctagctagcttagctgaaggcgatgcgtcgccatggcagcacggcggccatcctctccgacgatcgacgcgcgctcgatcagatcaatgctcgtcggaggaggagatgctgcttttcgcgcgtgatctttcacgagctggagtgagtgatcttttcttgtagttttgtagaggttggaa

SEQ ID NO: 399457 - DNA, 403 bp, Oryza sativa nipponbare
tttaatctccaaattcaagtgtgaagtgtagtatatcatcatcatgcaagtacagtgttacatagattaatcacaatgcagtttgattaagcagtgggcatcatcacatcgcattcagaggaaggctatcttagattacagatgaatatgcagacacccagcttggtgttacatacatagactggatttgggtgaaatttagccggcgagggcgctggtgttgtagacgaggagggcgccgccgccgaggagcccggcgagggtcacggcccagatcagaagcccggtggttccaccaacgtaggtgtcaccggtgggagaccattcctccggcgagtagattgggctgtagccgtcgacgtttgcgccgtacttgtcaacgaattggtacacacccttcccc

SEQ ID NO: 399458 - DNA, 362 bp, Oryza sativa nipponbare
aactaaactaaaaatctgctggagcgatcacacacacacacacaattaaagtacatacatacatgcactggtgcaactgcaactgaaaggtcctgtgcgtggctactacaagtgcacacatggtacgtaggtaggcaccatctacatcgggtcgttgtgctcacttgccggagactaagctagtggcttatgcccacacattaaaggcgacagggtcggcgacctggaccaaaagggtatcgaaggggcccttaccggttaccatagcctgaacaaagaatcccaacattgaaaacatggcgaggcggacattcttgagctccttcaacttgagctctaggaatgtgtcagggtcgtcgggg

SEQ ID NO: 399459 - DNA, 417 bp, Oryza sativa nipponbare
tactaggcaaaccacacgaatgcacgggggattaatttcactgagaatagcacgggtacatcacatcacacaaattcatacgttgatacacgcatagtcgccgaagcgaccagctgcttaattaatcgataacacacgggtttaattcagcaataatcagcacacacacaaaccacactcatatgggtggtttttattgtggactaattaaggtaggtgactcgccggcggcgagtgttcggttgcttcgtgacttcacttgccgcacttgcagtcggtgcaggagcagctggtgccgcacttgcagccgccgttctcctcgccggcggcgacctcctcgaagtggctcttctcggcttcaactatgacgacgccatagctggtacctttcttcacgcactggctcttgtcagcaca

SEQ ID NO: 399460 - DNA, 404 bp, Oryza sativa nipponbare
gatcagatcatactttggaggggagtctgcggctgcagcattaaagtctcgatccagagaaccaacgaggatgacggacacaagtagataacctagagaactcctccatcgatcacacacacccacacagttcaggtgcatacatacatgcactgatgaaactgcacctggcgggtacgcgcgcgactactacaagggtgcacatggggcagaggatgcgcccaatctcatcgggtacgcgcgctcacttgccggggacgaacttggcggcgtatgcccaggcgttgtgggcgacggggtcggcgacgtggtcgaagaggttctcgatggggcccttgccggtgacgatggcctggacgaagaagccgaacatggagaacatggcgaggcggccgttcttgagc

SEQ ID NO: 399461 - DNA, 395 bp, Oryza sativa nipponbare
agttaagatgaaattcaccgtgtgagtttgcttggatatatctataactaatataaatatttggatttttccggtcgtcacaaatcggacgaagggcgccttcgtccctcgcggtgcgccttcgcccgcagcccccgaatcccaatccctctcacaatcagatacaatagaaataattcccaaaatcggcacaaccaaatcactcaaccacaatcatcacaaaatcacaaaataaacatccaagaagaactacaatatacatcacaatcacaaaactacatcacaaaatttcactcgcctgccgccggatccaaccttgaccgtcgccactgccaccctcagccgtcgccatgctatccatccatggccgccgccaccgccaccggagggagaag

SEQ ID NO: 399462 - DNA, 419 bp, Oryza sativa nipponbare
ttttgtgcaacaccggataaatgaatggcagctcgatgatacaaatagtttaagcataaccatagaagtaacacagcagtgttaaaaaagagccaacaaattcatggcagcaacatgtaacaccacacatcaaaagttttcaacccatcaggcacgcaggaaacgtccacattccacagacaagctaacactagcatgcattggcctaattcagactcttatgaagagactcaggctgaagcatgatagactcatgatcctctctactcgatcagatcgtcatcgtcatctgggagaggttgtgctgctgcagccgcaagctcagcctcatgctgttgctgcattgccaggtcaatgggaacttccggaggtttaagagcaacagcttcaacgaaatgcaggttcgggtcaccagcaag

SEQ ID NO: 399463 - DNA, 475 bp, Oryza sativa nipponbare
aacgctctggaaggagcatatattattcaatcttgatgaaagagggacacaagccatcatctatagtgatggggccttttacaaactttaacacacgggtaacaagcattcattaaaaattaaaagggggctatggtttttgttgtccattgaaaaacccagcctgtttcttaacccaatttactttaccccccccccataaattttttaattgggttgggggggggggggacaaaaccccaaaaaccccattgtggtgtgcttttttttattaatatccacgcccccaccccccaaaaaaaataaaaacccgcttttttcttttttttttccccctcccacaccccaaaataaaactgggcgcacaaccctcttggttgtttggtcacaacccgaaccctcttttttggcaaaaaatttttttttttttgaatttttttatgaaattttgttgtgggtgggaaaattttttttt

SEQ ID NO: 399464 - DNA, 541 bp, Oryza sativa nipponbare
attaagaagcacctgtttaacgtagggaatcaacatgcataatagcccttctccacacccatcaccatcctgatcttgtctacctgaacataacaagtttacatggcaacattgcacaaagctgtaggcatttctcacatgagcatatatcccttcctgtactcactccataataagcaacacaagtagcaagcattacattatttttcttctctgctgctctatggtcctactcaaaacttgcaggaagtgcccagccgctgcttcatccgctgccctgcagccgccgcacgctcctgcagagcttctttcagcagctcctggaacttctcaaggaatatattccactcttctgcattcatgtccgacagcctgacgaagtatacacttgatggaagctgttcgtctgcactcctgttcagagcatgcacactgcccgtagaacccgttgatttattcacaactggggaacttcaaccctccagaatggacacgctccgatgaacgcttggaagattcacttcggccatcatcatcatca

SEQ ID NO: 399465 - DNA, 391 bp, Oryza sativa nipponbare
agaggaaaaacaatatgcatgagggttgttgaagagaaaaacagagcaaatcacatacgaactatgttacaatggggaatgcgatgagacaagaatcaccgccatgactatgatgctcattaatactaaatactacacggaattattgaccacttagcttgaccatacaagcaccacccaaatacaggcgaagcatatggccaaccaagaacagctgaggtcacggatctgtcgactgtgtaagcacattagcactaactacggtcgcaacagcaacatatgtccagaaggaaagcatttggttactagaaaccaaaccgactagccgcagcaacagctgtataacaggcacctgaaaagataattctgagctgaataaaagcacaagcac

SEQ ID NO: 399466 - DNA, 421 bp, Oryza sativa nipponbare
aaaagaacaaacagctgactggcaataacaataacaatgtggcttcttaactacacataagaatgttgcctgtcaagcatcaaacatgtacagcaccaaacatatctgtcttgggagtaatatgttatatacagcaacaccagactttacacaccaggcacgacctttcttgcaccaacaaacacactacgcacttgggagggtgaaagaagcaaagcaaccactgatgaacactttcacgtttgctcgttgtgaatcgaaaatttctttaggccccaaagcacccgatgagtttcttgggagcatggccggtggcacggtacttggctgccatctcctcggcctttaggacttcctcgccgcgctttgcctcgaccattgctctcttctcctcagcttccttgtggacgatcgcgacttt

SEQ ID NO: 399467 - DNA, 518 bp, Oryza sativa nipponbare
  unsure (1)..(518): unsure at all n locations
ttttgaaccttttatgtttgcctcatctatttgggctctgcacaattcacatcctcacagaagcaatacatttgccatacaaaaggctgagctgaaccgagcaagtgagagtaggctagcagatattgttacataaacagaatgcaaaactaattggtagttttctttgtcatctaaaattccacatcatttagattcttcaactctctaacgtacaagtcacattcttcaactgtcagtgggcactattgcttcttgtcttgtgccatcttcttgcggatctcctgtgccgcgttgaagatgccgagtgttggtttgttgcagacaaagcacttcttattcttcgagtgatgctttaatgcacagtgctcgcagaaatagtgcttgcatttcgtgaccactggatcaacaaaaggcttccttgcaaatgtagcaagcaaagggcaacgctttttcatcatcatcgncatcctcctcccctgcttcgtaatcactaccatccccacccatagcgatgc

SEQ ID NO: 399468 - DNA, 425 bp, Oryza sativa nipponbare
cactgagaatagcacgggtacatcacagcacacaaattcatacgttgatacacgcatagtcgccgaagcgaccagctgcttaattaatcgataacacacgggtttaattcagcaataatcagcacacacacaaaccacactcatatgggtggtttttattgtggactaattaaggtaggtgactcgccggcggcgagtgttcggttgcttcgtgacttcacttgccgcacttgcagtcggtgcaggagcagctggtgccgcacttgcagccgccgttctcctcgccggcggcgacctcctcgaagtggctcttctcggcttcaactatgacgacgccatagctggtacctttcttcacgcactggctcttgtcagcacagtcgcagttgccggacttgtccgacatggtcgaagatttaattagc

SEQ ID NO: 399469 - DNA, 373 bp, Oryza sativa nipponbare
aataaggaatgcacaacaccatatttcattgatcaggttcagaacctgcacagaaatacacactaccggtacagatctcaccctctcttcaatacttgtacatccatccacgcggtccacacgaatacgtacatttatacggtacacgtacgtacatttactggaccgggtacacacacgcacacttttctgcagagacgcgcattgtcgtcaacctagctagcttagctgaaggcgatgcgtcgccatggcagcacggcggcggcggcgctcacttgccggggacgaagttggtggcgtaggcccaggcgttgttgttgacggggtcggcgaggtggtcggcgaggttctcgagggggcccttgccggtgac

SEQ ID NO: 399470 - DNA, 410 bp, Oryza sativa nipponbare
atagcccatatctttatattggattagtattaacaaaaacttgtcatgcccatctatggcttgggcgcgatctgatacacagaacaaagagaaaacataaaaaggagaaataattaatagcaagcgtcaagccggcctgcttaaaaggtgtaaaggcagctgccgtcgtcgctcctcgccgttgggtcgaagttcttggcaacagggtcggtgcaaccttccggcacaggcaggttacctgcttgctgagctccttgccctcctcctcctatgcaggccgcctacgatgcatcgatgggatgcgaatagctagagatcttttattcagctggatggcgcagaaccgtagaaggaaccagtcttcatggcgtcggagttagcgtcaccaagagcagcctcgctcaagtact

SEQ ID NO: 399471 - DNA, 373 bp, Oryza sativa nipponbare
ataattaattcggaacggcatataacattgatcaggttgagaacctgcacagaaatacacactaccggggcagatctcaccctgtatgacaatactcgaacatccatgcacgcggtccacacgaatacgtacatatatacgggacacgtacgtacatttactgaaccgggtacacacacgcacactgtcttgcagagacgcgcattggcgagaacctagctagcttagctgaaggcgatgcgtcaccatggcaggacggtggcagcggacctcacttgccggggacgaagttggtggcgtacgcccaagcgacgttgttgacggcgtcagcgaggtggtccgggaggcccttgagggggcccttgccggtgac

SEQ ID NO: 399472 - DNA, 421 bp, Oryza sativa nipponbare
  unsure (1)..(421): unsure at all n locations
agccggagcttccatatatttgattcacatatgcctcacccaacaacatatagtcgtagcagataccactcttacatcaagtcagagagagatcaggtgaaacaaaaacaaaagcagagcacggccggtaaaatcaaaagacgatgaacaaactgggaacacacgaaacaaggtgggagacatcatcgaatcagagatgaacaattaaacaaggctatatatgacgatgacggcttagttgccaccagactcctcgcagcccgggggcttgtaggcgatgaagctgatgagctgcacctgcctgacgttgtcgaagccgatgatacggacgaatgcatcagggtacgccttcttggcctnctcgagctccttgagcacctgggtggcgtcagtgcacccgaacatgggcagcttccacatg

SEQ ID NO: 399473 - DNA, 417 bp, Oryza sativa nipponbare
tgatctgctataaaagagtatccatctgacagattcataaccctcaaaaagggttacttatgcagtgaaaagggttttatgctctttcatacagtgtgacagtgtgtgtacatataatttggaaaaacaaagtgaagatggatttacagcagcgtttctcagatacagcggacttatagctacaagctgatcacacaagtgaactttgctgctgatgatgatatggatcatgttgttatagcttacgcccaccacgggttgtcgccggtcctgaagtcggtctccacccacggcacgaagagaaccttgccgtcgtcgacgtcggcgtgcaccaatgccagcgacaggggagcaggtccacggacgaccctgccctggtttgtgtactgcgagccgtggcaggggcagatgaacttg

SEQ ID NO: 399474 - DNA, 447 bp, Oryza sativa nipponbare
gattaatttcactgagaatagcacgggtacatcacatcacacaaattcatacgttgatacacgcatagtcgccgaagcgaccagctgcttaattaatcgataacacacgggtttaattcagcaataatcagcacacacacaaaccacactcatatgggtggtttttattgtggactaattaaggtaggtgactcgccggcggcgagtgttcggttgcttcgtgacttcacttgccgcacttgcagtcggtgcaggagcagctggtgccgcacttgcagccgccgttctcctcgccggcggcgacctcctcgaagtggctcttctcggcttcaactatgacgacgccatagctggtacctttcttcacgcactggctcttgtcagcacagtcgcagttgccgcacttgtccgacatggtcgaagatttatttagctagtgagtgatga

SEQ ID NO: 399475 - DNA, 313 bp, Oryza sativa nipponbare
actaggcaaaccacacgaatacacgattgattaatttcactgagaatagcacgggtccatcacatcacacaaattcatacgttgatacacgcatagtcgccgaagcgaccagctgcttaattaatcgataacacacgggtttaattcagcaataatcagcacacacacaaaccacactcatatgggtggtttttattggggactaattaaggtaggtgactcgccggcggcgagtgttcggttgcttcgtgacttcacttgccgcacttgcagtcggtgcaggagcagctggtgccgcacttgcagccgccgt

SEQ ID NO: 399476 - DNA, 365 bp, Oryza sativa nipponbare
taatctccaaattcaagtatcaagtgtagtatatcatcatcatgcaagtacagtgttacatagattaatcacaatgcagtttgattaagcagtgggcatcatcacatcgcattcagaggaaggctatcttagattacagatgaatatgcagacacccagcttggtgttacatacatagactggatttgggtgaaatttagccggcgagggcgctggtgttgtagacgaggagggcgccgccgccgaggagcccggcgagggtcacggcccagatcagaagcccggtggttccaccaacgtaggtgtcaccggtgggagaccattcctccggcgagtagattgcggacgcgtgggcggacgcgtgg

SEQ ID NO: 399477 - DNA, 383 bp, Oryza sativa nipponbare
tcctgctggaaaatttgatgaggtaggtcccacttatatcatcatatacaaatactaacacatgcgaaaattatcaagcagaaaagttccatacaaattcatccagacaaacaagtgtaaaaaaccttttttttcccatttcccccttgaactatccgtaaataccaccattccaccaaactcccctctgtcttctacgacaaataatcttttcaacccagtaacttataattaattacagagagattagcaaacatataatggtaagaatcagttgtcgtaggtgcggcactcgtcggtctccgggttgtccttgcagtaggcctcgagcgggtcggaggtctccttgagcttgtcgcgcgcgtggctcgccgccgcgctca

SEQ ID NO: 399478 - DNA, 407 bp, Oryza sativa nipponbare
ctcgctcttttttttttttggactgaaaagagactagatacaagttatctttaaagtataaaggatagtgacctctatgtattgcttgctatacacagctgctggcatcttcaggagaaagatgcattttcgtgactttttcggagctagctcatctcggttaattacaggccaggctgacaacttgtttttaatcctatctaacaaacagcgagaccaacaattgggagaacagaataaattcactgacaacaacagcaggggagtgaacgcctagaaagggcacaacatcaacctgtagccaattctccacagcaagatccgactgtcgcaccgaccgaaagaccccaacagtaataaatgccgctttacctaaattcatatttttctttgtcaggaaatacaat

SEQ ID NO: 399479 - DNA, 364 bp, Oryza sativa nipponbare
aattcacaacaccatatttcattgatcaggttcagaacctgcacagaaatacacactaccggtacagatctcaccctctctccaatactgggacatgcatccacgcggaccacacgaatacgtacatctatacggtacacgtacgtacatctactgcaccgcgtacacacacgcacactctcctgcagagacgcgcatcgtcggcaacctagctagcttagctgaaggcgatgcgtcgccatggcagcacggcggcggcggcgctcacttgccggggacgaagttggtggcgtaagcccaggcgttgatgttgacggggtcggcaaggtggtccgccaggttctcgagggggccctagcccggg

SEQ ID NO: 399480 - DNA, 593 bp, Oryza sativa nipponbare
  unsure (1)..(593): unsure at all n locations
ccacgcgtccgatcatttttggggagcctgaggtgaccacaggagctgctggtgacttgcagcaaattactggcctagccaagcagatggtggttacattcggtatgtcggacattggtccgtggtcgctaatggactcaggagctcagagcggcgatgtcatcatgaggatgatggcaaggaactccatgtcggagaagctcgcggaggacatcgataccgctgtgaagcggttgtccgatgaggcctacgagatcgctttgagccagatcaggagcaaccgggaggccatggacaagatcgtggaggtgctccttgagaaggagacattgagtggtgacgagttcagggcgattctctccgagttcacggagatccctgtcgagaaccgggttcccccagccacgccggcagctctccctgcctaaatcccactagttttgtaggaatggaacatgctgtaagatgttcatattttcgattcttggtgtacactaactntactttgccggccggattttttggcatactacatgtaacttactcttggttaattataaaatggtaattagctgnnaaaanaaannnnaaaa

SEQ ID NO: 399481 - DNA, 396 bp, Oryza sativa nipponbare
ccacgcgtccgcccacgcgtccgcccacgcgtccgcttcgaggaggtcgccgccggcgaggagaacggcggctgcaagtgcggcaccagctgctcctgcaccgactgcaagtgcggcaagtgaagtcacgaagcaaccgaacactcgccgccggcgagtcacctaccttaattagtccacaataaaaaccacccatatgagtgtggtttgtgtgtgtgctgattattgctgaattaaacccgtgtgttatcgattaattaagcagctggtcgcttcggcgactatgcgtgtatcaacgtatgaatttgtgtgatgtgatgtacccgtgctattctcagtgaaattaatcaatcgtgtattcgtgtggtttgcctagtaaaaaggtctatcatactc

SEQ ID NO: 399482 - DNA, 537 bp, Oryza sativa nipponbare
  unsure (1)..(537): unsure at all n locations
ccacgcgtccgccgcgatggaggacgtgctccgggtgatggaccgcgacggggacggcaaggtggggttcgacgacctcaaggcgtacctcggctgggccgggatgccggcggccgacgaggagatccgcgccatgatacgcgtggccggcggcggcgacggcgatggttgcgtggggctcgaggagctcgccatcgtcctcggctgctcgcccacaaattggaccgcatcttctcaaactctgcattgatgcattgattgggagacttcaatttgttggttggtggtgttgtggtgatgtgattgttgagcgattttcgagtttcgagaagcgtgagggatgtttaattgggcgtaactgctcccgaaaataggggtattaaaaactccccgatgcagcttcttccatagaaaaaagttgaaaagtttgtattgaagctgagcatcgatggtgtgagttggnggtaggttttatttggaactaatgagatgtttcttttctcaatccttttttaagcaagtttctttttcaatctg

SEQ ID NO: 399483 - DNA, 291 bp, Oryza sativa nipponbare
  unsure (1)..(291): unsure at all n locations
ccacgcgtccgcgctgggagcgcaacacggaaaccatgggcgtcctggtgaactcgttcgaatcgttggagagccgggcggctcaggcgctcagggacgacccgctctgcgtcccaggcaaggtgctgcctccgatctactgcgtcgggcctttggtcggcggcggcgcggaggaggcggccgagaggcacgagtgcctcgtctggctcgacgctcagccggagcacagcgtcgtgttcctctgcttcgggagcaagggcgtgttctnccgggagcagctcagggagatcg

SEQ ID NO: 399484 - DNA, 522 bp, Oryza sativa nipponbare
ccacgcgtccgcgtctaccgtgagaaccacagatcccccggatactacgatggcaggtactggaccatgtggaagctgcccatgttcgggtgcactgacaccacccaggtgctcaaggagctcgaggaggccaagaaggcgtaccctgatgcattcgtccgtatcatcggcttcgacaacgtcaggcaggtgcagctcatcagcttcatcgcctacaagcccccgggctgcgaggagtctggtggcaactaagccgtcatcgtcatatatagccttgtttaattgttcatctctgattcgatgatgtctcccaccttgtttcgtgtgttcccagtttgttcatcgtcttttgattttaccggccgtgctctgcttttgtttttgtttcacctgatctctctctgacttgatgtaagagtggtatctgctacgactatatgttgttgggtgaggcatatgtgaatgaaatatatggaagctccggctatatatatttatacaaagggtacgagatggatgtga

SEQ ID NO: 399485 - DNA, 663 bp, Oryza sativa nipponbare
ccacgcgtccgcccacgcgtccgcgaatcccaccgcttccctttcctctcctctcctctccccgggaagaagacagcagcggcatccatggcgcccaaggcagagaagaagccggccgcgaagaagcccgcggaggaggagcccgcggcggagaaggccgagaaggcccccgcggggaagaagcccaaggcggagaagcgtctccccgccggcaaggccgagaagggcagcggcgaggggaggaaggcggggcggaagaaggcgaagaagagcgtcgagacctacaagatctacatcttcaaggtgctcaagcaggtccaccccgatatcggcatctcctccaaggccatgtccatcatgaactccttcatcaacgacatcttcgagaagctcgccggggagtccgccaagctcgcccgctacaacaagaagcccaccatcacctcccgcgagatccagacctccgtccgcctcgtcctccccggcgagctcgccaagcacgccgtctccgagggcaccaaggccgtcaccaaattcacctccgcttaggcttcacccctgcatctatctatgtgttagttttagtgctatcgatgattggaaaatggatgttagatcgttagtttggtagtcagatgtcagtgatctggaacagtagctctg

SEQ ID NO: 399486 - DNA, 532 bp, Oryza sativa nipponbare
  unsure (1)..(532): unsure at all n locations
ccacgcgtccgcggacgcgtgggtggggattgattgattgattcggattgggaagaagaagaagcaggggagcatgggcagcaagtcgtacccgacggtgagcgatgagtacctggcggccgtgggcaaggcgaagcgcaagctccgcggcctcatcgccgagaagaactgcgccccactcatgctccgcctcgcgtggcactctgctggcaccttcgatgtgtcgtcgaggaccggcgggcccttcggcaccatgaagaaccccggcgagcagtcccacgccgccaacgccggcctcgacatcgccgtcaggcttctcgaccccatcaaggaccaacttcccatcctctcctacgccgacttctaccagcttgctggcgttgtggccgtcgaggtcaccggcggacctgaggtccccttccatccgggcaggcaggacaagcctgagcctcctnctgaaggccggctttctgatgccacacaaggttctgaccacctaaggcaggtcttttctgcgcagatgggtttgagt

SEQ ID NO: 399487 - DNA, 724 bp, Oryza sativa nipponbare
ccacgcgtccgcaagctgctgcagacgaggatcttctcctactccgacacgcagcgccaccgcctcggaccaaactacctgctgctcccgcccaacgcgcccaagtgcgcccaccacaacaaccactacgacggcttcatgaacttcatgcaccgcgacgaggaggtcgactacttcccatcccgctacgatcctgccaagcacgccccccgctaccccatcccctccgccaccctcaccggccgccgcgagaaggtggtgattgccaaggagaacaacttcaagcagccaggggagaggtaccgttcatgggatccggcaaggcaagaccggttcatcaagagatggatcgacgcactctctgaccctcgcctcacccacgagatcaggagcatctggctctcctactggtctcaggctgacaggtctctgggtcagaaactggcgagccgtctcagcgcgaagccgagcatgtaaggagatcgatcagcgttgcaatctgcttcagtcacggaaggcctcagcctcactctatcggataataattgctactcatactctagcaataccgatcgatcgagtctattttggaaagaggacatatatgatttctatcaccgcacaattcgtgtaccaccatcatgtaataatctgtaacctgaagacacgtttctcctgatacttcatcattattgtaagcacaccttttatcaataatttatat

SEQ ID NO: 399488 - DNA, 563 bp, Oryza sativa nipponbare
ccacgcgtccgcccacgcgtccgcccacgcgtccgcccacgcgtccggagaaagctggtatgtcatgccacaccaaacacgggagggcacgcgtgtaacatggacggatcctgcgctgcaagatcaactacaccatcaacagctgcttatgggtcatcttaaagcggactaacaaaaggaccatcatcacttttgaatgaaagcaggagatcataagccagtgtgcactctggttttgctggcatgcctactacggaccgacttatgagcagggtgtgtttgagtcataaacagatgtccactgtaatcattctgcttagctagacacctgcggggacatggaagcagtgctaccgagttgcgaaactaactaggacggcgatcaactactagacaccaccgcacatcttgatcaccttcactactagacatacggtaagctgtacatgtgcattgcacaagccggcaacagcgaggtattcaagggcggctgatagatcgcgtagagcgcatgcaggtccttcacgcttgtatgatacagatactatgtatatgagctcata

SEQ ID NO: 399489 - DNA, 657 bp, Oryza sativa nipponbare
ccacgcgtccgcccacgcgtccgcccacgcgtccggccggtgatcagcctcctcctccttcttctccatcgccggcgagagagagagagagttagctagctaggatgggttctacagccgccgacatggccgcggcggccgacgaggaggcgtgcatgtacgcgctgcagctggcgtcgtcgtcgatcctgccgatgacgctcaagaacgccatcgagctgggcctgctcgagacgctgcagtccgccgccgtcgccggaggaggggggaaggcggcgctgctgacgccggcggaggtggccgacaagctgccgtccaaggcgaacccggcggcggccgacatggtggaccgcatgctccgcctgctcgcctcctacaacgtcgtcaggtgcgagatggaggagggcgccgacggcaagctctcccgccgctacgccgccgcgccggtgtgcaagtggctgacgcccaacgaggacggcgtctccatggccgccctcgccctcatgaaccaggacaaggtcctcatggagagctggtactaccttaaggacgcagtcctggaccgcggcatcccgttcaacaaggcgtacgggatgacggcgttcgagtaccacggcacggacgcccgcttcaaccgcgtctttaacgagggcatga

SEQ ID NO: 399490 - DNA, 663 bp, Oryza sativa nipponbare
  unsure (1)..(663): unsure at all n locations
ccacgcgtccggtggatgacatggatatcttcaagggtatcaacttgaagcttcttgccttcgagaatatgttgaggacacatcccaagtggcaggggcgggcagtgttggtgcaaattgctaatccggcccgtggaaagggtaaggatcttgaagccatccaggctgagattcatgagagctgcaagaggattaatggagagtttggccagtcaggatacagccctgttgtcttcattgaccgtgatgtgtcaagtgtggagaagattgcctactacacaatagcagaatgtgtggtggtgactgctgtgagggatgggatgaacttgacaccatatgaatatattgtctgtaggcaggggtctgactccacatcagaagtgaatggaccaaagaagagcatgctggtggtatcagaattcattgggtgctcaccatctctgagtggtgctatccgggttaacccatggaatatagaggcaaccgcagaggcactgaatgaggccatatcaatgtcggaacaggagaaacacctaaggcatgagaaacattaccgttatgtcagcacccacgatgttgcttattggtcgaaaagtntcatccaagatttggagagggcttgcaaggaccacttcaggaggacatgttggggcatcgggttgg

SEQ ID NO: 399491 - DNA, 685 bp, Oryza sativa nipponbare
ccacgcgtccgaacgccgccatctaccggccgacggcgcggcagccgacgttcaccgccgacgggtacgagatgagcgtcggggtgaaccacctgggccacttcctcctcgcccgcctcatgctcgacgacctcaagaaatccgactacccgtcgcggcggctcatcatcctcggctccatcaccggcaacaccaacaccctcgccggcaacgtccctcccaaggccgggctaggcgacctccgggggctcgccggcgggctccgcgggcagaacgggtcggcgatgatcgacggcgcggagagcttcgacggcgccaaggcgtacaaggacagcaagatctgtaacatgctgacgatgcaggagttccaccggagattccacgaggagaccgggatcacgttcgcgtcgctgtacccggggtgcatcgcgacgacgggcttgttccgcgagcacatcccgctgttccggctgctgttcccgccgttccagcggttcgtgacgaaggggttcgtgtcggaggcggagtccgggaagcggctggcgcaggtggtgggcgacccgagcctgaccaagtccggcgtgtactggagctggaacaaggactcggcgtcgttcgagaaccagctctcgcaggaggccagcgacccggagaggccaggagctctgggactcagcgagagctc

SEQ ID NO: 399492 - DNA, 413 bp, Oryza sativa nipponbare
ccacgcgtccgcccacgcgtccgcccacgcgtccggccaagaagacagtagacgcgaagttgttcaaagctgatggtaattgtaactagtctggtttatgctcatatgaatggagttgaagaatggataacatcgagctgatgtttctctctggcccatgtttctacaccgtgctgtgcaaagttacatccccttggttgtggttaatattctcgagtcgcgtagtactctgaaatctacacccttgtctattatcatctaggttatgttcatgtagcataagagttgagttgagtcgtcagcaaagaaattttgttctttctgtttcatacttatttttttttggggggggggggggtgtcatccggtttgcccccttctatggttcggtcaccttgaaaggagtaacgttg

SEQ ID NO: 399493 - DNA, 521 bp, Oryza sativa nipponbare
ccacgcgtccgctcagcttatagtcaggtgaggtctgagctgaggttgagagatggcacaggcaatggcgtccatgaccgggctgtcgcagggcgtgcagctgccggccgggcccaggcgcgccggcggcaggtccaggctcgccgtcgtcagggccgacgccgccgccgccgacgtccagaccggccgccgcgccgtgctcggcctcgtcgccaccgggatcgccggcggcgccctcgcgcaggcggcgctcgccgaggccgccaagcccatcaagctcggccccccgccaccgacctccggtggactccctgggacgctgaactcggaccaggcgagggacacggacctgccgttgtgggaaaggttctacctgcagccgctgccgtcgacggaggcggcggcgagggcaaacgagtcggcttaggacatcatcagccttatgccgctcatcgtgaagaggcagtggactttcgtcagggactacctcttcatcatggcctactgcctgcgcttcgacc

SEQ ID NO: 399494 - DNA, 579 bp, Oryza sativa nipponbare
  unsure (1)..(579): unsure at all n locations
gacccacgcgtccgcacaaactgtcaccacaacagccaccaactcctctcaacttcttgatccggcggcggcggcaagatgttcggcggcggcggcggcggcgggatgaagccgctggactacgaggagctgaacgagaacgtgaagaaggtgcagtacgcggtgcggggggagctgtacctgcgcgcctccgagctccagaaggagggcaaggagatcatcttcaccaacgtcggcaacccacacgcgcctcggccagaagccgctcaccttcccccgccaggttgtggcgctgtgccaggcccccttcctgctcgatgatcccaacgtcggccttatcttccccgccgacgccatcgcgcgggccaagcactacctcgccatggcacccggtggactaggtgcttacagtgattcccgaggtatccctggtattaggaagggagtcggcgagttcatcgagaggcggtgatggtatccaaggtgatccagaacttatttacctcacagatggtgccagcaaagggtgtgatgcanatgctgaataccattatcagaaatgagagagaagggattctg

SEQ ID NO: 399495 - DNA, 537 bp, Oryza sativa nipponbare
cgtccgccgaacatatggatatgtttaagggtgtgcatttgaaggttcttgccttcgagaatatgttgaggacacattctaagtgttatgggcgtgcagtgttggtgcaaattgctaatccggcccgtgaaaagggtaaggatcttgaagccatccaagctgatattcatgagagctgcacgaggattaatggtgagtttagtcagtcaggatacagtcctgttgtattcattgaccgagatgtgttatgtgtggagaagattgcctactaaacaataccagaatgtgtggtggtcactgctgagagggatggcatgaacttgacaccatatgaatatatggtctgtaggtaggggtttgacttcacattataagtgaatggaccaaagaagatcatgctgcttgtatcaaaattgatagtttgctcacaatgtctaagtggagctatccctgttaacccatggaatatagaggcacccgcataggcaatgaatgaggccatataaattgtgtgacaggagaaacacattatgcatg

SEQ ID NO: 399496 - DNA, 633 bp, Oryza sativa nipponbare
  unsure (1)..(633): unsure at all n locations
cccgcgtccggcctgaaaacgttggagtcaaggttttggactccgttaacatcaccctgggtgctgaggatgagctgaagaatgctgttggacttgttcgtccagttagtgttgcctttcaggtgatcaacggtttcaggatgtacaagagtggagtttacacaagtgaccattgtggaacttctccaatggatgtgaaccacgctgttctggccgttggctatggtgtcgaaaatggcgttccctactggctcatcaagaactcatggggtgcagactggggtgacaatggttacttcaagatggaaatgggcaagaacatgtgcggtattgctacttgcgcatcctaccctattgttgcatgaggtgcccacggattagttccattgtgtcaatttagttggcctcaataatatatttttctgtccaaggatgaagatgggtatacagaaactgaaactntcttgtgaatataagatcataaggacatgaattagcccagtgcatgtaatcttctcctgtatggttgtgtaggtaatccagcaattggggtttcagagtactcattacaatggctgtaaattcctatttatgcgacagaatggcctattcatatntcatagtgcagttacg

SEQ ID NO: 399497 - DNA, 611 bp, Oryza sativa nipponbare
  unsure (1)..(611): unsure at all n locations
ccacgcgtccgcccacgcgtccgcctcgacctggcgtcgctcgacagcgtcaggcagttcgtcgccaacgtccggcggctggagatgcccgtcgacgtggtggtgtgcaacgccgccgtgtaccagcccaccgccaagcagccgagcttcaccgccgacggcttcgagatgagcgtcggcgtcaaccacctcgggcacttcctcctcgcccgcgagctcctcgccgacctcacctcctccgactacccctccaagcgcctcatcatcgtcggctccatcaccggtaatgacaacctttcttcctcaccagaattaggctgttgtgttctaatgtcaaagcttccaacttctactattttgtagttctccacgtacacaattactacaattactgaactgctaaaaattgcatgttttataaaaaaaattataggaagttgttgtgattaatccaatttttaagtttttctttttcatcgggaagattgaaagagaccttctgaatgtattaagaatngagaaaagttacaagaaaaacataatanggaagttgtcgaggatgatgcgcaccagcgtgtgcgttcaagaacacgagctaccacacaagcaca

SEQ ID NO: 399498 - DNA, 723 bp, Oryza sativa nipponbare
ccacgcgtccggtgctgttctcggcgctgaagcgcgccggcggaacagccttcagcaacatggccgtcgggtacaacaacgtcgacgtggaggccgccaataggaacggcatcgccgtcggcaacacgcctggcgttctgacggagacgacggcggagctggccgcgtctctgtcgctggcggcggcgcggaggatcgtggaggcagatcagttcatgagggctggcctctacgacggatggctcccgcacctgttcgtggggaacttgctcaagggtcagactgtgggagtcatcggagctggtcgaatcggctcagcttacgcaagaatgatgatcgagggcttcaagatgaacttgatctactacgacctgtatcagtccacgcgccttgagaaattcgtcacagcttacgggcagttcctgaaagcaaacggagagcagcctgtgacatggaagagagccgccaccatggaggatgtcctcagggaggccgacgtgattagtctgcaccctgtgttggacaagaccacttaccatctgataaacccggaaaggctggccatcatgaagaaggaagcggttcttgtgaatgcaagtcgaggaccggtgattgatgaggtagcactggtggagcacctcaaggccaaccccatgttccgcgtcggtcttgatgtgtttgaggatgagccttacatgaagcccggcctcgctgacatgaaga

SEQ ID NO: 399499 - DNA, 514 bp, Oryza sativa nipponbare
ccacgcgtccgaagaaagcataagcaacacaagggattaactcatcactcacttagctaattaaatcttcgaccatgtcggacaagtgcggcaactgcgactgtgctgacaagagccagtgcgtgaagaaaggtaccagctatggcgtcgtcatagttgaagccgagaagagccacttcgaggaggtcgccgccggcgaggagaacggcggctgcaagtgcggcaccagctgctcctgcaccgactgcaagtgcggcaagtgaagtcacgaagcaaccgaacactcgccgccggcgagtcacctaccttaattagtccacaataaaaaccacccatatgagtgtggtttgtgtgtgtgctgattattgctgaattaaacccgtgtgttatcgattaattaagcagctggtcgcttcggcgactatgcgtgtatcaacgtatgaatttgtgtgatgtgatgtacccgtgctattctcagtgaaattaatcaatcgtgtattcgtgtggtttgcct

SEQ ID NO: 399500 - DNA, 643 bp, Oryza sativa nipponbare
ccacgcgtccgaagaagcattcgagcaaagaaggagagagctcgttgagctgcagagatggccccatccgtgatggtcgtagcaagacactcaccgttgctcccttcaggggctcagttcacggcacatgcccgctgccgacgctacgaaactgcagtttgcgaaccgtcagcaatggcggcaggatcaggtgcatgcaactgtcggctgttgagggcatcaagaagctcgagaccctttactacctgccacctgtcaccgatgaggacctgctgaagcatatcgagtacctgttccactccaagtgggtgccctgcctcgagttcagcagggacgtattcgtataccgtgagaactacatatccagcggatactacgatggcagcgactgtaccatgtagaagctgaccatgttcgggtgcactgacgccacccagctgctcaaggagctcgaggaggccaataaggcgtaccctgatgcattcgtacggtcatcggcttcgacaacgtcaggcacgtgcagctcatcagcttcatcgcctacaagcccccgggctgcgaggagtctggtggcaactaagccgtcatcgtcatatatagccttgtttaattgttcatctctgattcgatgatgtctcccacc

SEQ ID NO: 399501 - DNA, 587 bp, Oryza sativa nipponbare
ccacgcgtccgcccacgcgtccgcggacgcgtgggcgccggagacgacgaagaagaagggcggcggcggcggcggcggggacgagcgggtggtgcaggtgcacagcgcggaggagctcgacggcgcgctgcgggcggcgaaggagcggctggtggtggtggagttcgcggcgagccacagcgtgaacagcagccgcatctacccgtgcatggtggagctgagccgcacctgcggcgacgtcgacttcctcctcgtcatgggcgacgagtcggacgccacccgggagctgtgccgccgggaggggatcaccgccgtgccccacttcaccttctacaagggcgccgagaaggtccacgaggaggaggggatcggccccgaccagctcgccggcgacgtcctctactacggcgaccaccactccgccgtcgtccagctccactcccgcgccgacgtcgagtccctcatctccgaccaccgcggcgagggcggcaagctggtggtgctcgacgtggggctcaagcgatgcgggccctgcgtgaaggtgtaccccaccgtcgtgaagctgtcgcgcaccatggccgacacca

SEQ ID NO: 399502 - DNA, 764 bp, Oryza sativa nipponbare
ccacgcgtccgcccacgcgtccgcccacgcgtccgcccacgcgtccgcggacgcgtgggggacacgcgactagcagaagccgagcgaccgcctcctcgatccatatcttccggtcgagttcttggtcgatctcttccctcctccacctcctcctcacaggttcttggtgtagcttgccactttcaccagcaaagtttcatgtctgatctcgacattcagatcccaactgccttcgatccctttgctgaggccaatgctggagactctggtgcggctgcaggatcaaaggactacgttcatgtacgcatccagcagcgtaatggccgtaagagcctgaccactgtccagggattgaagaaggaattcagctacaacaagatcctcaaagatctcaagaaagagttttgctgcaatggtactgttgtccaggacccagagcttggccaggtcattcaacttcagggtgatcagaggaaaaacgtatcaaattttcttgttcaggccggcattgtgaagaaggaacacatcaagattcatggtttctgagcaactgccaaaaccattgcaaagactatagtttggggtggagtatacttggttgtgtacatgcctgcgtgttccattgtacacacaaaacctagccacctcttgactcttgagtgtatgcttgttacccgtgtgttgaagtttgtaagaggcaccatcactatagatgatggcttgtgtcccttttcatcagattgaatatatatgctactttgaga

SEQ ID NO: 399503 - DNA, 713 bp, Oryza sativa nipponbare
  unsure (1)..(713): unsure at all n locations
ccacgcgtccgcccacgcgtccggtcgagctgagagtgatcgatctttgttagctagagtgttgagcaatggcgtccaagctgggtatggttgtgctactgatctcgggcctctttgctgcccgttgcgcggccgtggtgaccaccggcgaacccgtcgtcgccggcctctcctgggggttctatgacacgtcgtgcccgtcggtggagggcatcgtgaggtggcacgtcaccgaggccctccgccgcgacatcggcatcgccgccggcctcgtccgcatcttcttccacgactgcttcccgcaggggtgcgacgcgtcggtcctcctgacgggttcccaaagcgagctgggtgagatacccaaccagacgctgcggccgtcggcgctgaagctcatcgaggacatccgcgccgccgtacactccgcctgcggcgccaaggtgtcctgcgccgacatcaccacgctcgccacgcgtgacgccatcgtcgcctccggcgggccctacctttcgacgtgcctctggggcggcgcgacgggctggcaccggcgtcgagcgacaaggtgggcctcctgccggcgcccttcttcgacgtgcccacgctcatccaggcgttcaaggaccgaaacctggacaagacggacctggtnggcgctggtccgcgcgcacaccatcggactaggccactgcggcagctncaacgaccgcttcgat

SEQ ID NO: 399504 - DNA, 77 bp, Oryza sativa nipponbare
ccacgcgtccggtgtatcctaatggccatctggtgtgatggacctgttctattcagatcatgcaacagtttattttc

SEQ ID NO: 399505 - DNA, 519 bp, Oryza sativa nipponbare
ccacgcgtccgcccacgcgtccgagcaaatcggagggtcagagcacgagctggctgctaaagtggacaagtacgcctgcagcatgatcagtggctccggctcgacgctcttcgaggagatgaggctctactacatcgtcaccttcgacggctacaacatctacgacctcatgacaatgatcagcgaggcgaagagcaccaagaccacatgcacggtgctgatccacgtgaagaccaagaaaggccgcggctactcctacagcgagcgcgtccgcgacaagcaccacaggggggacaagcttgatacgacgaccgtgaagcaggacgagttgctggacaagacactggtgcacacctactactacggggaggcgctcatagactacgcgtaccacgataacaggctcatgaagatgcacgcggacttgtggagagccacggctatgagctacatcctgccaggtgtgcgatgctcggcttcgatgtgttcatcatcgagcaggactgcaacacgtttggc

SEQ ID NO: 399506 - DNA, 565 bp, Oryza sativa nipponbare
ccacgcgtccgcccacgcgtccggcaccttccaccgcgtgatcccggagttcatgtgccagggcggcgacttcacccgcggcatcggcacgggaggggagtcgatctactgcgagaagttcgccgacgaggtgttcaagttcaagcacgacagccccggcatcctgtccatggcgaacgccgggcccaacactaacgggtcccagttcttcatctgcaccgtgccctgcagctggctggacgggaagcacgtcttgttcggccgcgtcgtcaagggcatggacgtcgccaaggccatcgagaaggtgggatcccgcggcggcagcaccgtcaagccggtcgtcatcgccgactgctgccagctctcctagatctgtgctgttccccttcgcctttcgccagtatcagtcgtcttgagtcgtccagtccctaaataaggaggaggtggtgggtggtgttagtctttttatgagctcatgtcgtgttggtgcgacgagatcgcccatggtttgattggattagtcggagttcttgtatcgattcggtggatttggatctgctatcct

SEQ ID NO: 399507 - DNA, 711 bp, Oryza sativa nipponbare
ccacgcgtccgcgacgtgctcctgccgttcgtgcacgcggtgcgcgagctggacgacaccacgctgtacgcctcgcggacgctcttcttcctgacggaggacggcacgctgaggccgatcgccatcgagctgacgaggcccaagtcccccaacacgccgcagtggcgccaggtcttcacgccgggctccagcgtcgcggcgtcctggctgtggcagctcgccaaaacgcacgtcctcgcccacgacaccggctaccaccagctcgtcagccactggctgaggacgcactgctgcgtggagccgtacgtgatcgcggcgaaccggcggctgagccagatgcaccccatctaccgactgctgcacccgcacttccgcttcaccatggagatcaacgcccaagcgcgcgggatgctcatcaacgccaatggaatcatcgagagcgccttcgcgccggggaagctctgcatggagctcagctcggcggtttacgacaagttttggaggttcgacatggaggctctgcccgccgatctcatccggaggggcatggcgatcgaatgcgaggatggcaagctggagctgacgatagaggactacccgtacgccaacgacggcctgctcatctgggactccatcaaggagtgggtgtcggattatgtgaaccattactaccagttggcttcagacatccacatggacaaggagctccag

SEQ ID NO: 399508 - DNA, 573 bp, Oryza sativa nipponbare
cccacgcgtccgaagggaaaatgaagatggctatagttatttgagggaaagacggctgggcagaggtgatgcatagcatgtactaggtgatgtcaagctccgtgttcttatggacgctgtccgaccacctcaagctcgccaaggggaagactggcgccctcgtcgtgcttgactgatggtgcgaggccaacaccgacatgtacacctgcatacatctggcccagacacccgcatggattcgctcaagaatggtgctcccgagaggtggagattagtgaaggctcatggaacagctgttggtcttcctagcgaagatgacatgggcaacagcgaagtgggtcacaatgctcttggtgctggtcgcattcttgctcacggtgctaagcttgtggaccttgctcttgcctctgggaaaatttatgatggacaggggttcaattacatcaaagaatgttttgacaagggtaccctgcaccttattgggttgttgagtgatggaggcgctcactcccgtcttgatcaagtgcagctgcttctgaaaggtgccagcgagaggagagcaaaagaatgcgg

SEQ ID NO: 399509 - DNA, 545 bp, Oryza sativa nipponbare
  unsure (1)..(545): unsure at all n locations
cggacgcgtgggcggacgcgtgggccgtgagaaccacagatcccccggatactacgatggcaggtactggaccatgtggaagctgcccatgttcgggtgcactgacgccacccaggtgctcaaggagctcgaggaggccaagaaggcgtaccctgatgcattcgtccgtatcatcggcttcgacaacgtcaggcaggggcagctcatcagcttcatcgcctacaagcccccgggctgcgaggagtctggtggcaactaagccgtcatcgtcatatatagccttgtttaattgttcatctctgattcgatgatgtctcccaccttgtttcgtgtgttcccagtttgttcatcgtcttttgattttaccggccgtgctctgcttttgtttttgtttcacctgacttgatgtaagagtggtatctgctacgactatatgttggtgggtgaggcatatgtgaatgaaatatatggaagctccggctatatatatttatacaaagggtacgagatggatgtgaatccttaaaaaaaaaaanaaananana

SEQ ID NO: 399510 - DNA, 703 bp, Oryza sativa nipponbare
ccacgcgtccggctgcatgcagaaagatagatgacttagctgagaaaaaggaattggattctgcgttagtcttaatgctttcaaaagcttggtcagctgcaaagggtactgacatcacaaaatctgaggctaaagatataatgtttcatctatacatgactgcagtagccaatctccagagacaaatgccaaaggatatcagaatactaaagcatcttataatgattgaggatccagaagaacgcttgagtgcattgaatgacgcatttactcctgggcctgaacttcagggggataatgttgatacattatacacgagtccagaggtattacacacttgggccagtgctattgttgatgcatattataacagcagagaaggcactctccttaggcaagcaagggacttgatgaaccctaaaatcatcaaaagaattgaggagatactaaaattaatcaaggataaatacctctgactctttaagaaaatgggggtttcacattcatactttcctagtgattaggcagtataattaaagaaattggatggccttgcatactctgctttctgcgcagcatcctgctcatcgttccaatcggattctccattgctgcttgaaatggacaatggttatacttgactgattaaatgcagattgatgtagctttgtatggtgtaaaagtgattgtagcatgtgatata

SEQ ID NO: 399511 - DNA, 566 bp, Oryza sativa nipponbare
ccacgcgtccgcaagaagctactgatcttagctgagctagagttccagtgatcattaaggaaagaattagcacttggtcaatcacacataggtaattaagattaattgcgatcgagatcatatcactagctagctagctgtgtgtacggagtacggtgccatggcttccaggacttggcattgctggttgttgctcgtcttcttcctcctctccgacgacgcctccgggcagctgtcgacgtcgtactacgcagatagctgcccgtcggtggagaaggtcgtgcacgccaccgtggcgagcgccatccaggccgagcgccggatgggcgcctccctcatccgcctcttcttccacgactgcttcgtccagggctgcgacgcgtccatccttctggacgacgtgccggcgaccgggttcgtcggcgagaagaccgccgccccgaacaacaactccgtgcgcgggtacgaggtcatcgaccagatcaaggccaacgtcgaggacgtctgcccgggcgttgtctcctgcgccgacatcgtcgccctcgccgcgcgcgacagcaccgcct

SEQ ID NO: 399512 - DNA, 684 bp, Oryza sativa nipponbare
ccacgcgtccgcggacgcgtgggcggacgcgtgggcggacgcgtggggtcgcaacagctacaaacgcccacatcacacgcagaaatccgcatcaacagccagccatggcgtccacgctgaccaacgtcggcctgtctaccccggcggcggcggcgtcgtccctcgttaggccggtcgccggagctggacgcgtggtgtttccccgtgttggccgcggcgggttcgcggcggtgagggcgagcgggccggcgacgccgccggacatctcggacaagatgtcggagagcatcgacaaggcgaaggaggcgtgcgcggaggacacggcgagcggcgagtgcgcggcggcgtgggacgaggtggaggagctgagcgcggcggcgagccacgcgcgcgacaagctcaaggagacctccgacccgctcgaggcctactgcaaggacaacccggagaccgacgagtgccgcacctacgacaactgattcttaccattatatgtttgctaatctctctgtaattaattataagttactgggttgaaaagattatttgtcgtagaagacagaggggagtttggtggaatggtggtatttacggatagttcaagggggaaatgggaaaaaaaggttttttacacttgtttgtctggatgaatttgatgggacttttctgcttgataattttcgc

SEQ ID NO: 399513 - DNA, 715 bp, Oryza sativa nipponbare
ccacgcgtccgcggacgcgtgggcggacgcgtgggcggacgcgtgggcggacgcgtgggcggacgcgtgggctcaatttggtatatctttatcagatctccaccttaacaaactgcagtcgagtctatcgccccacggccttcaccagcttgatcacggcatgcagccgaggatcgccgctggtctaattatcggtcatccggctgctcgggatgatatctcatgcttgttgaccattggtagcccccagaacaacaagaaatcagatggcaagaaggcgccagcccagctgatgcttttcggaaaacccatactcacagagcagcagatatccttgggtgatgctgcttcggtggatgttaagaagagctcttctgatggtaatgctgaaaatacggtgaataagagtaactccgatgtttcaagcccgagaagtaatcagaatggcaccacagataatttgtcatgtggaggagttccattgtgccaagacaacaaggtacttgatgttgggctggaaacagggcactgcaaggtattcatgcagtcggaggatgtcgggcgcacacttgatctctctgttgttggttcatatgaggaattataccggcggcttgctgacatgttcggcatcgagaaagctgagctgatgagtcatgttttctaccgtgatgcggctggggcactcaagccactggagatgaaccttcagcga

SEQ ID NO: 399514 - DNA, 513 bp, Oryza sativa nipponbare
  unsure (1)..(513): unsure at all n locations
ccacgcgtccgcggtgttcttctcgttggctacggcgcatctggttttgctccaatccgcctaaaggataaggcctactggatcatcaagaactcctggggcgagaactggggagagcatgggtactacaagatctgcaggggctccaacgtccgcaacaaatgtggcgtggattctatggtctccaccgtgtctgccatccacacctcaaaggagtagattctgatcagtagtcccccgaccatcctgtggatggttcacagttggtgattctgatattatatataagctagaactacgaaatatacttagtttatgctccatctgcgctgttattgcagttatgataagcagcgatgatgtgaagctgcaactgaatgtttgtcctaagttatatgcttggtttgctacgcaatgctacacgctatttggaggtagctntaagtattatcgccattcacgaacttgtatttttactattaccaatcttttgaatggtctgtattatatgca

SEQ ID NO: 399515 - DNA, 691 bp, Oryza sativa nipponbare
  unsure (1)..(691): unsure at all n locations
ccacgcgtccgatcagaaaccttatccaggattcgaaatgagaaggccaggagatacttgagcnaccatgcggaaaaaacatgctgtccccttctctcagaagttccgcaatactgaccccttggctcttcgtctgctagagcgtttactggcatttgatcctaaagatcggtcttcagctgaagaagctttggctgatccgtacttcgcaagtcttgctaatgtggaacgtgagccctcaagacatccaatctcaaaacttgagtttgaattcgagagacggaagctgacaaaagatgatgttagagaattaatttatcgagagattttggagtatcacccacagatgctgcaagagtatatgaaaggtggagagcagattagcttcctctatccaagtggggttgatcgcttcaaacgacagtttgcacaccttgaggagaactacagcacaggagaaagaggttctccactgcagaggaagcatgcttctttaccgagggagagagtaggtgtatcaaaggatggttataaccaacanaacaccaatgaccaagagaggagtgcagattccgttgcccgactacagtaaggccctccatgtcacangatgcacaacacatggatctgctggccaaaatgggtgaatccacagacttgagttcgaggagctatctgaagagtgcaagca

SEQ ID NO: 399516 - DNA, 718 bp, Oryza sativa nipponbare
  unsure (1)..(718): unsure at all n locations
ccacgcgtccggacccccagaaagcgaccgggaaatcgcaatggcagccatcctcgcgcgcgccggcgccaccgcggccggcggcctccgttccggcggcgacgtcccccggcgccgcaacatggtcgccatcgtcgcggcgacgacgaccaccggcgccgggccggcggtgccgaaggaggggtcgctggagcggccggcgtggtcgggcgagacgccgctgtcccggctcgtcggagcgctcatcgccttcaagccgctctactccctcatgaagctcgcctcccgggaggtcatcatcaggacggcggagaagtcgaacgtcccgtggagggagatgacgaagcaggtgctggagtccgacgtgtacgaggtgttcgacaggatacgcgacctcaacctcgtctaccctgactattatctgaacccattccatgcgtatgatgaaggcaacctgtcatggctggctgcagctgaagctgaaccggcaacgatgtcgattgctaagagggccatacctgacgctggttcaattgaagaagccaatcaaattgttcgcggaaactggctgaatgcaattgaggagcatcacctgaaatactcnggngaattgtcagatcaatgacattctggatattggctgctccgttggagtaagcaccagatacctggctgagaagttcccttagcgagaactgttggttagatctttacccta

SEQ ID NO: 399517 - DNA, 693 bp, Oryza sativa nipponbare
ccacgcgtccgtcttcttcctacttcgtcttcttgctggtgtgttcgaggaggaggaggaggaggagaagctagcggcggcggcggcaatggcgacgagcgggctgaggagctgcagcgcggtgggcgtgccgagcctgctggcgccgtcgtcgaacaggagccgcctgccggtctgcgcctacgccaccacctccgggcgcgtcaccatgtccgccgagtggatgccgggccagccacgccccgcccacctcgacggctcctctcccggtgacttcgggttcgacccgctgggcctcgccaccgtgccggagaacttcgagcggttcaaggagtcggaggtgtaccactgccggtgggccatgctcgctgtgcctggggtgttggtgccggaggcgctggggctgggcaactgggtgcaggcgcaggagtgggcggcggagcccggcggccaggccacgtacctcggcaacccggtgccatggggcacgctgccgacgatcctggtcatcgagttcgtcgccatcgccttcgccgagcaccagcgcaccatggagaaggaccccgagaagaagaagtaccccggcggcgccttcgaccccctcggcttttccaaggaccccgtcaagttcgaggagtacaagctcaaggagatcaagaacgggcgattggccatgctggcttttgtgggttt

SEQ ID NO: 399518 - DNA, 709 bp, Oryza sativa nipponbare
  unsure (1)..(709): unsure at all n locations
ccacgcgtccgaaggtcaacaaccacaacgtccagctggaaggcgtgcaggcactggtggaattcagcaaccaatgccaatgggccaccagcaaatgcttccaaggggtagtcgtggtggttaccgttatgcttctggtcgtggcatgccagacaatgcattccgtggtgttggaggtttagtgccatccccatatgagatgggaagaatgcctctcagtgatgctggtgcaccaccgcaggttccaattggagcattggcctctgcactggccaattcacccccagatcagcaaagactgatgcttggtgaaagtttatacccgcttgttgatcagctggagcatgatcaggcagcgaaggtcactggcatgcttttggagatggaccagactgaagttctccatctcattgagtcacctgatgctcttaaggccaaggtcgctgaggctatggaagttctccgtaatgctcagcagcagcaggcaaataccccaactgatcagctagctgctctcaccctgagcgacggcgtcgtttcttaacttggttggcatcttatatctgagactgcaagtgatgtagtatgtacttggtgtgttttggaacttgaacctgtggggaagtctgtctntatctttgttaaacggcagttcagttacttcagcattgtgtggatctggattnagttcctatntgtgttttcttaa

SEQ ID NO: 399519 - DNA, 748 bp, Oryza sativa nipponbare
  unsure (1)..(748): unsure at all n locations
ccacgcgtccgcccacgcgtccgcccacgcgtccgcccacgcgtccgcccgctcgacggctcctccaacatcgacgccgccgtctccaccggctccatcttcggcatctacagccccaacgacgagtgcctagccgacatcgccgacgaccaaaatcttgaccaggtggagcagaggtgcatcgtgagcgtgtgccagccggggagcaacctgctcgccgccggctactgcatgtactcgagctcggtcatcttcgtgctcaccatcgggacaggggtgtacgtgttcacgctggacccgatgtacggcgagttcgtgctgacgcaggagaaggtgcagatccccaaggcaggcaagatctatgccttcaacgagggcaactacgcgctctgggacgacaagctcaagagctacatggacagcctcaaggagcccgggccgtccgggaagccatactccgcgcgctacatcggcagcctcgtcggcgacttccaccgcacgctgctctacggcggcatctacggctaccccagggaccagaagagcaagaacggcaagctgcggctgctgtacgagtgcgcgccgatgagcttcatcgtcgagcaggccggcggcaagggctccgatggccaccagaggatacttgacatcatgcctacggagatccatcagagagtgccgctgtacatcgggagcgtggaggaagtggagaaggtcnagaagttcttggctttgactgcagtttata

SEQ ID NO: 399520 - DNA, 765 bp, Oryza sativa nipponbare
  unsure (1)..(765): unsure at all n locations
ccacgcgtccgggaggagattttagcaccacatactcacttctgcttgatctgtggcaagggttttaaaagagatgctaatcttaggatgcacatgaggggccatggagacgagtacaaaactgctgcagctcttgcgaaaccttcgaaagattctagcttagagtctgcaccagttacaaggtactcgtgcccatatgttggctgcaagcggaacaaagagcacaagaagttccagcctctcaagacaatcctgtgtgtgaagaaccactacaagagaagccactgtgacaagagctacacctgcagccgttgcaacaccaagaagttctcagttatcgcggacttgaagactcatgaaaagcactgtggccgcgacaagtggctatgctcgtgtggaactaccttctcaagaaaagacaagttatttgggcatgttgctcttttccaagggcacacgcctgcactccctatggatgatatcaaagtaacaggagcatcagagcaacctcaaggcagcgaggcgatgaacaccatggtggggagcgctgggtataacttccccggtagctcatcggacgacatcccaaatcttgacatgaagatggctgatgatccacgctatttctcgccattgagctntgatccttgcttcggtgggcttgatgacttcactcgacctggatttgacatctctgagaatcccttctccttcttgccctcaggatcatgcagcttcgggcagcagaacggagacagctgatcg

SEQ ID NO: 399521 - DNA, 737 bp, Oryza sativa nipponbare
ccacgcgtccgcccagcagcagcagcagcagcagctgagcttgaagcagcagagcgaggtagacatggccgccgccaccatggccctctcgtccccggcgctggccggcaaggccgccgcgaaggtgttcggcgaggggcgcatcaccatgcgcaagtcggcggcgaagcccaagcccgccgcgtcggggagcccgtggtacggcgccgaccgcgtgctctacctcggcccgctctccggcgagccgccgagctacctgaccggcgagttccccggcgactacgggtgggacaccgcggggctctccgccgacccggagacgttcgccaagaaccgggagctggaggtgatccactccaggtgggcgatgctcggcgcgctgggctgcgtgttcccggagctcctcgcccgcaacggcgtcaagttcggcgaggcgggtgtggttcagggcggggtcgcagatcttcagcgagggcgggctcgactacctcggcaacccgagcctgatccacgcgcagagcatcctcgccatctgggcggtccaggtggtgctcatgggcgccgtcgaggggtaccgcatcgccggcgggccgtcgggcgaggtcgtcgacccgctctaccccggcggcagcttcgacccgctcggcctcgccgacgacccggaggccttcgcggagctcaaggtgaaggagatcaagaacgggccgctcgccatgttctccatggttcggttcttc

SEQ ID NO: 399522 - DNA, 542 bp, Oryza sativa nipponbare
ccacgcgtccgcccagcctgatccacgcgcagagcatcctggcgatctggggttgccaggtcgtgctcatgggcgccgtcgaggggtaccgcgtcgccggcggcccgctcggcgaggtcgtcgacccgctctaccccggcggcagcttcgacccgctcggcctcgccgacgaccccgaggcgttcgccgagctcaaggtgaaggagatcaagaacggccgcctcgccatgttctccatgttcgggttcttcgtccaggccatcgtcaccggcaaggggccactggagaacctggccgaccacctcgccgaccccgtcaacaacaacgcatgggcctacgccaccaacttcgtccccggcaagtgagtgtggatctccggcgagcaacggcggtgaggtccattgctttcatgcaggctgcggtgagacgcgcgacgttctcctctttccgcgtacccgaatatttgcttcgttcgttcagattgtgtaaaacaatgttatctggttggttgatgaaagaagtacaatggacctgattgggta

SEQ ID NO: 399523 - DNA, 439 bp, Oryza sativa nipponbare
atgtaaatggttgatttctattaggtaaccgttcagcaaactgtcggtttgggcagcagagagttcagcaaaggggtcaggtgcttgggacccgagtatctgacatggcatacatggaaagaaaaggtgctgcttcttgtcttaacatgaatagtagaaggtatatatccccgaagtactggttttagaccatgtatgttaacatatgtcgtactattgatgagaaactgttcagtgaatcatgtagcctctgcagttgatcagctggagatcacttcctcaagctctcaatgatgtaggcgccgtagaggtccattgagtacttgattgcgttgatggcatcttctgctgggagaaactcattgacagcaacttctttgttctcattcttcttgtagtcttcaaagaagcggcggatctcttgaaggcggtgaggggg

SEQ ID NO: 399524 - DNA, 407 bp, Oryza sativa nipponbare
gggttgggagctaattacattttataattaaccaagagtaagttacatgtagtatgccaaaaaatccggccggcaaagtaaagttagtgtacaccaagaatcgaaaatatgaacattttacagcatgttccattcctacaaaactagtgggatttaggcagggagagctgccggcgtggctgggggaacccggttctcgacagggatctccgtgaactcggagagaatcgccctgaactcgtcaccactcaatgtttccttttaaaggagcacctccacgatcttgtccatggcctcccggttgctcctgatctggctcaaagcgatctcgtaggcctaatcggacaaccgtttaacagcggtatcgatgtcctccgcgagcttctccgacatggagttccttgcca

SEQ ID NO: 399525 - DNA, 396 bp, Oryza sativa nipponbare
gagtatgatagacctttttactaggcaaaccacacgaatacacgattgattaatttcactgagaatagcacgggtacatcacatcacacaaattcatacgttgatacacgcatagtcgccgaagcgaccagctgcttaattaatcgataacacacgggtttaattcagcaataatcagcacacacacaaaccacactcatatgggtggtttttattgtggactaattaaggtaggtgactcgccggcggcgagtgttcggttgcttcgtgacttcacttgccgcacttgcagtcggtgcaggagcagctggtgccgcacttgcagccgccgttctcctcgccggcggcgacctcctcgaagcggacgcgtgggcggacgcgtgggcggacgcgtgg

SEQ ID NO: 399526 - DNA, 439 bp, Oryza sativa nipponbare
tacacataagcatcccacaatggcgaggaagcgcaatatttacaattttgttccttcccgtcacgccttggagggtacacggagtgaaggaaatacaagtaattttttcagtacttgaaaacgaaaagatcccgataaacggagcaggaaggacctagtaaatgctgttgagaatagtcccacattgaaagtttagggggagtggcaccaacttaaaaggggaggggtccctcacctcatgagctagcttttggggtgtagaaaggctttctcccggttgggccaacgtctcccggttttaggccaacaaatgctaccatagactttacttattaatctggcttcaatccaggcccttgcaaagctatctacatgaagccatccagatgattatttacaggtgatcatgtagtgtccagctactcgggtcgaacgctta

SEQ ID NO: 399527 - DNA, 379 bp, Oryza sativa nipponbare
gcaaaaacatcatcttcttctggatcttcttagtgtacacaacaccaactcgatcatcatctcgtcgcactaaacccatcttccccaacccaaagacaacgaactcgctggccacaaatccatccaaccacaattaaccactgctaagctacggtcccccacttcacttgccggggacgaagttggtggcgtacgcccaggcgttgttgttgacggggtcggcgaggtggtcggcgaggttctcgagggggcccttggcggtgacgatggcctggacgaagaagccgaacatggagaacatggcgaggcggccggtcttgatcttcttcaccttgagctccgcgaacgcctcggggtcatcggcgaggccgagcgggtc

SEQ ID NO: 399528 - DNA, 427 bp, Oryza sativa nipponbare
tacacaattatcctcatgaataataatggtattttcacataaagttcttctttttcccgggtacaaataacatcgctacatcacctgcaagatcgtcatcaaaaagagagggagaaatgtgccgctactcaaaggaacacaccatccatacaattgtacatacacaattctaactcgccattctccactggccctcatgtactctccttgctactggacgcctcgagctccttctcctcgccaccgtcgctaaccgccgtctcggttggaggcgggggctggtcgccaccatcatcagactctttcttcagctccgtttcgaactccttggctgcctgctggaagctcttgacggtcttgccgatgctgcggccgatctcgggcagctgcttggggccgaacaccagcgcggcgacgcccgcgatga

SEQ ID NO: 399529 - DNA, 360 bp, Oryza sativa nipponbare
  unsure (1)..(360): unsure at all n locations
agccaactggtagctccaattcatctatagtcaatctaatagcccattcatacaatagttacatactacactattaatatctagtcccacctgtcatagacacactgcgtcttggagtccgtgctacagctggctacaaatctgtagcccgttgctcttctctctcttgatttatcttcgnaaaatatgtttgtagctggcttatagcctgccattgtacctgctctaacgcagcaaagtgtgatgaatgttggtgttgatgatgggatcatgggaagtaaccatgagataacagaggtattgttcgatggagtaagtgtattatatgtatgtaaatattatattattggaaatcatttt

SEQ ID NO: 399530 - DNA, 397 bp, Oryza sativa nipponbare
ggcaggcaaattacatagtaggagacggattataaagaagaaaccaccaccattacactaatacacacaaagctcgatcaagcagcttaattaatttctttcacatgtacgacatgcatcctctgctaactccgggatcaataaaagatgattctttgcagctccagctcgacgacgatccatccgaattaaaatcatttgacctcctggatctcgaccagggcgtagctgagggtcgacacgcccgcggagttcaccttggcgaaccgaaccaccaccgggtaactagtgttgggatcctgatcaacggcgacgacagagccagtgccgacgtaccatgaggactccatcctcaggatcctgaccaaggcgcctgtcttcgggccaatgggaggcg

SEQ ID NO: 399531 - DNA, 446 bp, Oryza sativa nipponbare
ttcacatccatctcgggcccgggggataaatatatatagccggagcttccatatatttcattcacatatgcctgacccaacaacatatagtcgtagcagataccactcttacatcaagtcagagagagatcaggtgaaacaaaaacaaaagcagagcacggccggtaaaatcaaaagacgatgaacaaactgggaacacacgaaacaaggtgggagacatcatcgaatcagagatgaacaattaaacaaggctatatatgacgatgacgggttagttgccaccagactcctcgcagcccgggggcttgtaggcgatgaagctgatgagctgcacctgcctgacgttgtcgaagccgatgatacggacgaatgcatcagggtacgccttcttggcctcctcgagctccttgagcacctgggtggcgtcagtgcaccccaacatgggc

SEQ ID NO: 399532 - DNA, 431 bp, Oryza sativa nipponbare
agttccacaaaaattagatctagttgtcactcgttgaccagcagacacaaggcggtcaaacatcacatacccaggaatcacattcacatggtttaaaatcagagctactgttccagatcactgacatctgactaccaaactaacgatctaacatccattttccaatcatcgatagcactaaaactaacacatagatagatgcaggggtgaagcctaagcggaggtgaatttggtgacggccttggtgccctcggagacggcgtgcttggcgagctcgccggggaggacgaggcggacggaggtctggatctcgcgggaggtgatggtgggcttcttgttgtagcgggcgagcttggcggactccccggcgagcttctcgaagatgtcgttgatgaaggagttcatgatggacatggccttggaggagatgc

SEQ ID NO: 399533 - DNA, 393 bp, Oryza sativa nipponbare
gggttgggccaccaaggggaattcaatccatagttatcttgacagcaaatagcttggtaactttgaaactccacagtacaatacggcggtctagaggtccagacaaagagcttcaaagcaagaatgaagagaaagacatttggaatcacataaaaagatggcccaaagcacactaatttttattacaaccgccacgacagtcttgatcgtactgactctaaggcgcaaaatacaaatcggcattaatcttttgcggatatcccgctctttaaaggctttttattcctcagcaaatcccagttcaaagagcttgaggtgggcctcggcgtaatccgcaaagaaggcgtcctcatccgcagcatatttctccaccagtggacggaaggctgggtc

SEQ ID NO: 399534 - DNA, 416 bp, Oryza sativa nipponbare
aagcagaaaagttccatacaagttcatccagacaaacaagtgtaaaaaaccttttttttcccatttcccccttgaactatccgtaaataccaccattccaccaaactcccctctgtcttctacgacaaataatcttttcaacccagtaacttataattaattacagagagattagcaaacatataatggtaagaatcagttgtcgtaggtgcggcactcgtcggtctccgggttgtccttgcagtaggcctcgagcgggtcggaggtctccttgagcttgtcgcgcgcgtggctcgccgccgcgctcagctcctccacctcgtcccacgccgccgcgcactcgccgctcgccgtgtcctccgcgcacgcctccttcgccttgtcgatgctctccgacatcttgtccgagatgtccg

SEQ ID NO: 399535 - DNA, 413 bp, Oryza sativa nipponbare
cgtaagtaaatatatcagatagtcgattatatatatatataatagcagacaggttacatccattagaactcagaatcaccggaattgaacatcaaaagtacaacacaagcagcagcagcatcagccagcagcaaacgacatgattacccacgcttttggatgaagaacaagaagtacgagaagaagaagacgatggtcgaacaccttgatcgagctcaacaatggcgatcgatcaccaatcacctacttggtgaactcgatggcccaggcgttggcgtaaatgtaagtggccttgaagccggtgaatccggcggcgcgggcgagctccctgaactccctctcgtacctctccttgccgccggggttgtgggcgagcatgatcatgtcgacgtggaacaccccctgctccctcg

SEQ ID NO: 399536 - DNA, 447 bp, Oryza sativa nipponbare
ttaatgtaagcctgtgggtggattgcatgatttgtcgggtaaaaaaaaattactaattgtacatcacttgacaggcctctctcactgaaagctgaaaccccctaaaccccgaagaaattaacagttgaaacgaatgggtaaataataaactcagacgaggccgacgagcttctcgctgaggtcccagagcttcctggccttctccgggtcgctggcctcctgcgagagctggttctcgaacgacgccgagtccttgttccagctccagtacacgccggacttggtcaggctcgggtcgcccaccacctgcgccagccagcttccggactccgcctccgacacgaaccccttcgtcacgaaccgctggaacggcgggaacagcagccggaacagcgggatgtgctcgcggaacaagcccgtcgtcgcgatgcacccccggtacagcga

SEQ ID NO: 399537 - DNA, 458 bp, Oryza sativa nipponbare
ttaagctagaaatctcctcgggcgatgacacacacacacacaattaaggtacatacatacatgcactgctgcaactgcaactgcagggtcggtgcgtggctactacaagtgtacacatggtacgttggttggcaccatctcgatcgtgtcgttgtgctcacttgccggggacgaagttggtggcgtatgcccaggcgttgttggcgacggggtcggcgacgtggtcgaagaggttctcgatggggcccttgccggtgacgatggcctggacgaagaagccgaacatggagaacatggcgaggcggccgttcttgagctccttcaccttgagctcggcgaaggtgtcagggtcgtcggcgaggccgagcgggtcgaaggcgccgcctgggtacaccttgtcgaggccctcgccgagcgggccgccgccgacgcggtagccctcgacgaatcccatgagc

SEQ ID NO: 399538 - DNA, 520 bp, Oryza sativa nipponbare
  unsure (1)..(520): unsure at all n locations
ttactaggcaaaccacacgaatacacgattgattaatttcactgagaatagcacgggtacatcacatcacacaaattcatacgttgatacacgcatagtcgccgaagcgaccagctgcttaattaatcgataacacacgggtttaattcagcaataatcagcacacacacaaaccacactcatatgggtggtttttattgtggactaattaaggtaggtgactcgccggcggcgagtgttcggttgcttcgtgacttcacttgccgcacttgcagtcggtgcaggagcagctggtgccgcacttgcagccgccgttctcctcgccggcggcgacctcctcgaagtggctcttctcggcttcaactatgacgacgccatagctggtacctttcttcacgcactggctcttgtcagcacagtcgcagttgccgcacttgtccgacatggtcgaagatttaattagctaagtgagtgatgangttaatccctngggttgcttatgctttcttcggacgcgtgg

SEQ ID NO: 399539 - DNA, 385 bp, Oryza sativa nipponbare
gttgggggagagaaaattcgctacaaatctccactcagatgatacaaatacacagtgagcacgacaggcgttcaattatgcatgcagttgtgtcatatcacaaaggttctaggtccaggaatgttttcatggctggccaatcgatcgatgatcatcatcagatcatcaccatttccagaagacgttggatccgcacttgtacttctccttcccctcgcactcgatctcgagatcatctgagatgaatgggactttcttctgcttggcgaggtcctggcagccggtgaagttgtaggggaactggcagctgccgaactcgacggtgtacgccctcgcgaagttggcgccgctcgtcgccagcctcttcttgtcgttcagctccttg

SEQ ID NO: 399540 - DNA, 412 bp, Oryza sativa nipponbare
gggaggcggcaacaacaactcaagattgaatcatacgtaagtgcttgctgatacaatatcaacatggagggtacattgccggttccatatgaacaaacataaaaacaccgaaaccccatatggccattatgccgatcctagcctagcttggcgaggacatcgccaagagcagatttggtcaacgtgtagtacttctccgcctcttcggggctcttgatcttggctgcatggtcaagcccgtcaatggtggcgaagagcttgccggtgaggtccttgaggcccttcttctcgtccttgggcttggagttgatgacggttttgaggtcgtagcgcaggtaggaggccctgaggcggaggtcgtccctgacgaacggccactgcttcttctcgatgagcggcttgaggttgatga

SEQ ID NO: 399541 - DNA, 421 bp, Oryza sativa nipponbare
tgcagaaataattttatctatacatgatgcatatcaaggacaagaagttttttttttccttcagtagatcgagttacagattgttgcagcaaataattagcctttcgattgattgattaattaattaattaacagtgccttttaattataactgctcgatcagccacgctgaggcagattctttctctcttctcctggggtagtgctcatcttgttttcatttcacatcctggagtagccatcgtactgatccatgaaagtgtcgttgaacttcttgaagctggtcatgatggcaggcatgtcctcctcagctggcaggatggtcgtcctcaggtggaacaccccttctttttgtccgaaacctgaccctggaacagtggatattccagttgcttcaagaagcttgaggcagtagaaaaca

SEQ ID NO: 399542 - DNA, 394 bp, Oryza sativa nipponbare
ttaattaagctagaggggtgctggatcgatcacacacacacacacaattaaggtacatacatacatgcactgctgcaactgcaactgcagggtcggtgcgtggctactacaagtgtacacatggtacgttggttggcaccatctcgatcgtgtcgttgtgctcacttgccggggacgaagttggtggcgtatgcccaggcgttgttggcgacggggtcggcgacgtggtcgaagaggttctcgatggggcccttgccggtgacgatggcctggacgaagaagccgaacatggagaacatggcgaggcggccgttcttgagctccttcaccttgagctcggcgaaggtgtcagggtcgtcggcgaggccgagcgggtcgaaggcgccgcccacgc

SEQ ID NO: 399543 - DNA, 435 bp, Oryza sativa nipponbare
gacttggggtaaaaatgagattgaacatttccacctcgtcttacaagcgtatatcttgagagctaagtgagtttaatgaaatacaataaattcataaattccccatagataccgaagatattcatttcaacggaactctatacatgcaaatagctatgtacaatcacttacatcggtattcgagattcttcagcacagttaaaaaaataaaggcagccaacttgttcagctgccagtctttcgcggatggagttctcaccattatcgaaggtcaatcacatcaaactttacatcggggttcatatacacatgggagcaatgctcataaattggtgaaccatctagaggggccttatgaggatggaatcctctctccgggcaatcatggatcacacccataccgccaggatcagagagatgaaatataccatgttt

SEQ ID NO: 399544 - DNA, 368 bp, Oryza sativa nipponbare
cgtaactgcactatgaaatatgaataggccattctgtcgcataaataggaatttacagccatgtaatgagtactctgaaaccccaattgctggattacctacacaaccatacaggagaagattacatgcactgggctaattcatgtccttatgatcttatattcacaagaaagtttcagtttctgtatacccatcttcatccttggacagaaaaatatattattgaggccaactaaattgacacaatggaactaatccgtgggcacctcatgcaacaatagggtaggatgcgcaagtagcaataccgcacatgttcttgcccatttccatcttgaagtaaccattgtcaccccagtctgcaccccatg

SEQ ID NO: 399545 - DNA, 421 bp, Oryza sativa nipponbare
  unsure (1)..(421): unsure at all n locations
tttccgattctaatccctccctgtgggttctgattatacaaaaagaactactcacagattgcatagcagcaagggagaataaatgagatgagattagttgcaggaaggaaggaagggctaggcggcatgggcgacgatgtgggcgtagaggaagtggttccaggtgtcggggaggccagggaggcaccagtggatgcagtcggcgtaggtgcgagggtcggcctgctgctccggggtcagcagcttgccctgccgcagcgtgtgcaccgacgtgtgcgcgtccttgcgaagctccgacagcgccgggatgtccacgaatcgcacgcccacccgccggatcgaccgcagcacaccgngcgccaccccgtgcagcctccagtccgtcccgatgtccagcccccctgatgtccggttcacgatc

SEQ ID NO: 399546 - DNA, 430 bp, Oryza sativa nipponbare
tcgatcacccaagctcttatgaccaggggtaatcccaaaaaagaaaacacttgagttacatcttacaacaatcccatattcccatcccatgatccaccagtgaacaacacaactttcactctgcaccatcatatcgtacacatcaagctgatcattaacagctaagtaattcgtgagaaacgcgtcctacaaattctcctccatcgatctttcttggtagagaggagaagaagaagaagagcacagcaaaatcctagacgaaaatcaatagcacatcactctcactcactgatcgtgatcggccaagccgacgagcttctcgctgagctcccagaccttcttggccttctccggatcggaggcctcctcggagagctggttctcgaacgaggccgagttgttgttccagctccagtacaccccggacttg

SEQ ID NO: 399547 - DNA, 418 bp, Oryza sativa nipponbare
tttatgtaaatattatattattgtaaatcattttgaggagctagactagcgtgccttattaacaaggagatatgtaccattacatgatgattaacatataaatctgtagctacatggaattaaggtagtggagcagaggaggaaggatgatagaagactccaattctccatggatgggaatgggatcaggtggccttgcagaactctccgcccagatcgtcgcacgcctcctcggggaacaccgtggtgggctcgtcgtaggataggtagtccctgtcgacttcctccgccgccgcacgagaaacagcaacagcagccgatgatgagagcttggcctctgggtacatctgcacgttgcacgcctcgccgccgatgaggtcgcacgcctccatcggaaacaccgagatgttagagctgt

SEQ ID NO: 399548 - DNA, 461 bp, Oryza sativa nipponbare
aggcaaaccacgacgagtacacgattgattaatttcactgagaatagcacgggtacatcacatcacacaaattcatacgttgatacacgcatagtcgccgaagcgaccagctgcttaattaatcgataacacacgggtttaattcagcaataatcagcacacacacaaaccacactcatatgggtggtttttattgtggactaattaaggtaggtgactcgccggcggcgagtgttcggttgcttcgtgacttcacttgccgcacttgcagtcggtgcaggagcagctggtgccgcacttgcagccgccgttctcctcgccggcggcgacctcctcgaagtggctcttctcggcttcaactatgacgacgccatagctggtacctttcttcacgcactggctcttgtcagcacagtcgcagttgccgcacttgtccgacatggtcgaaagatttattagct

SEQ ID NO: 399549 - DNA, 390 bp, Oryza sativa nipponbare
aaatatatatagccggggctggcatatatttcattcacatatgcctcacccaacaacatatagtcgtagcagataccactcttacatcaagtcagagagagatcaggtgaaacaaaaacaaaagcagagcacggccggtaaaatcaaaagacgatgaacaaactgggaacacacgaaacaaggcgggagacatcatcgaatcagagatgaacaattaaacaaggctatatatgacgatgacggcttagttgccaccagactcctcgcagcccgggggcttgtaggcgatgaagctgatgagctgcacctgcctgacgttgtcgaagccgatgatacggacgaatgcatcagggtacgccttcttggcctcctcgagctccctgagcacct

SEQ ID NO: 399550 - DNA, 440 bp, Oryza sativa nipponbare
atagtatagcccatatctttatatgatattattattaacaaaaacttgtcatgcccagctatggcttgggcgcgatctgatacacagaacaaagagaaaacataaaaaggagaaataattaatagcaagcgtcaagccggcctgcttaaaaggtgtaaaggcagctgccgtcgtcgctcctcgccgttgggtcgaagttcttggcaacagggtcggtgcaaccttccggcacaggcaggttacctgcttgctgtgctccttgccctcctcctcctatgcaggccgcctacgatgcatcgatgggatgcgaatagctagagatcttttattcagctggatggcgcagaaccgtagaaggaaccagtcttcatggcgtcggagttagcgtcaccaagagcagcctcgctcaagtactgctcagccagctgcacacgcttgac

SEQ ID NO: 399551 - DNA, 447 bp, Oryza sativa nipponbare; identical to SEQ ID NO: 386421
  unsure (1)..(447): unsure at all n locations

SEQ ID NO: 399552 - DNA, 447 bp, Oryza sativa nipponbare
tgcgctctcaaagtagcatatgagtatggaatcttgatgaaagagggacacaagccatcatctatagtgatggtgcctcttacaaacttcaacacacgggtaacaagcatacactcaagagtcaagaggtggctaggttttgtgtgtacaatggaacacgcaggcatgtacacaaccaagtatactccaccccaaactatagtctttgcaatggttttggcagttgctcagaaaccatgaatcttgatgtgttccttcttcacaatgccggcctgaacaagaaaatttgatacgtttttcctctgatcaccctgaagttgaatgacctggccaagctctgggtcctggacaacagtaccattgcagcaaaactctttcttgagatctttgaggatcttgttgtagctgaattccttcttcaatccctggacagtggtcaggctctta

SEQ ID NO: 399553 - DNA, 418 bp, Oryza sativa nipponbare
  unsure (1)..(418): unsure at all n locations
gtttttatctgattaagtgtggtgctatgccgaacgatggaaacattaattttgggtttatgctgtgacaaagacagttgtgatgatgtagcactaactgatgatgatgatacatttgacatgcagttactctgtcccgaccgaggaatcgagtagtaactttactttttatgaagcaaaaccattctaactaagcagagaatgcatggaaaccaaacaccacgcgcagatggcatcctcttaattattattactagcacaaaacataaacataaaacgatcactaattactccataagttaattaggcgtcggcggcgaagccttggtcgtcgtcggcagcgttgaggaggtcggaggagcggcggttgggagcggcgcanttgttgcggatctcgccggcgttgccggtgaggacg

SEQ ID NO: 399554 - DNA, 77 bp, Oryza sativa nipponbare
gaaaataaactgttgcatgatctgaatagaacaggtccatcacaccagatggccattaggatacaccggacgcgtgg

SEQ ID NO: 399555 - DNA, 421 bp, Oryza sativa nipponbare
acacaatcaggtccattgtacttctttcatcaaccaaccagataacattgttttacacaatctgaacgaacgaagcaaatattcgggtacgcggaaagaggagaacgtcgcgcgtctcaccgcagcctgcatgaaagcaatggacctcaccgccgttgctcgccggagatccacactcacttgccggggacgaagttggtggcgtaggcccatgcgttgttgttgacggggtcggcgaggtggtcggccaggttctccagtggccccttgccggtgacgatggcctggacgaagaacccgaacatggagaacatggcgaggcggccgttcttgatctccttcaccttgagctcggcgaacgcctcggggtcgtcggcgaggccgagcgggtcgaagctgccgccggggtagagcgggtcga

SEQ ID NO: 399556 - DNA, 405 bp, Oryza sativa nipponbare
acttgagtttgccgactaggaggacgtcaagggccaggaactgcactacgtgggagcctaaccctccgatggagccttactcgacggtgaggagcacctagagggagctggccaacctgctgataagcgtatggtccagctgcttgcagaaccatcacgtcatgacagacaccttgaggccgtgctcaatccaccagcgacgctgtggcgaggcagtactgcaccgactaaccgtacccaagcagcgccaccctgctagactccaacaggaccctccctttgtctacctcgaggggaacgactttgtagttgggtggtaacaagacgccgatgccgttgtctcttaggtagcggaagcaggagtggcggtcgacgatggcctcgatgaaggccaccatgttggag

SEQ ID NO: 399557 - DNA, 364 bp, Oryza sativa nipponbare
ccacggatccgaaagggtctcattgattgatagcgatatcatagaaccagcgacacgaattaagatttaaaaccaaccctaagaaggatcggatatccaacttcaccgaatcgatccaagaactccggctaatccaaccaaaccatgggcgatctgatctcaccaacacgacacgaactcataaaaagactaacaccaccaccaccttcttcttatttagggactcgactactcaagacgactgatactggcgaaaggcgaaggggaacagcacagatctaggagagctggccgcagtcggcgatgaccaccggcttggcggtgctcctcccgcgggatcccaccttctagatggccttgacga

SEQ ID NO: 399558 - DNA, 433 bp, Oryza sativa nipponbare
gacgaggccggattgggaatggattttatttcatacataatgtcacgatgagcacgccaaacagatgcaagctcattggcacaactcaaattgagatgctgttggggatacccatctccatcacggacgtcatgtccttagggtcaccgtaggacggcttgagcagcacgtacggcaccacgccggggccctgccggttctttcgctccggatccttgttccggcagtcgatcatctccgcgatgctcatcatcctctcgttgaacctcccgaacgccggcctgacctccctgtgcgccatccacgctgactccgcatgcgtgcccatgtactcctcgccgggcgagtgtgacgatagcaggttgagcaccggcaggacgagggtggtctggtactgcgatgggaacgtgtctagtaacaccctgacgggatc

SEQ ID NO: 399559 - DNA, 413 bp, Oryza sativa nipponbare
gggagggttcacatccatctcgtaccctttgtataaatatatatagccggagcttccatatatttcattcacatatgcctcacccaacaacatatagtcgtagcagataccactcttacatcaagtcaggtgaaacaaaaacaaaagcagagcacggccggtaaaatcaaaagacgatgaacaaactgggaacacacgaaacaaggtgggagacatcatcgaatcagagatgaacaattaaacaaggctatatatgacgatgacggcttagttgccaccagactcctcgcagcccgggggcttgtaggcgatgaagctgatgagctgcccctgcctgacgttgtcgaagccgatgatacggacgaatgcatcagggtacgccttcttggcctcctcgagctccttgagcacct

SEQ ID NO: 399560 - DNA, 438 bp, Oryza sativa nipponbare
tgagagaaaatagcaacgatggtaccacgctgctttattgcatcacagtatttacaacaaagatacgtcaccacaaatccacatgaaaatatatacagcccatggatgatcagctgtcgttgacgaccctgcagtcgcacctgacctcgccgtcgctgggctgcccgatgttccccatcttcaccatcgccttggcgaagtcggcggcgaacagcgccgggttggcggcgtactgcctcaccagcgcgtcctgcgacccgccgttgaacagcacctggtcggagtggagcaggcctcgccggaccagcaggttgccgtagtaggcgttgtcgaacgcgttctgcgtctgcacgtcgagcggcgccaggttggtgtcgccgttgggtgccgcggcggggcacgcgcggcggcgcaccgcggcgaacgacgggtcgatgt

SEQ ID NO: 399561 - DNA, 425 bp, Oryza sativa nipponbare
  unsure (1)..(425): unsure at all n locations
gcgaaaattatcaagcagaagagttgcatacaaattcatccagacaaacaagtgtaaaaaaccttttttttcccatttcccccttgaactatccgtaaataccaccattccaccaaactcccctctgtcttctacgacaaataatcttttcaacccagtaacttataattaattacagagagattagcaaacatataatggtaagaatcagttgtcgtaggtgcggcactcgtcggtctccgggttgtccttgcagtaggcctcgagcgggtcggaggtctccttgagcttgtcgcgcgcgtggctcgccgccgcgctcagctcctccaccttgtcccacgccgccgngcactcgccgttcgccgtgtcctccgcgcacgcctncttcgccttgtcgatgctctccgacatcttgtccgagatgt

SEQ ID NO: 399562 - DNA, 438 bp, Oryza sativa nipponbare
tgcatataatacagaccattgaaaagattggtaatagtaaaaatacaagttcgtgaatggcgataatacttaaagctacctccaaatagcgtgtagcattgcgtagcaaaccaagcatataacttaggacaaacattcagttgcagcttcacatcatcgctgcttatcataactgcaataacagcgcagatggagcataaactaagtatatttcgtagttctagcttatatataatatcagaatcaccaactgtgaaccatccacaggatggtcgggggactactgatcagaatctactcctttgaggtgtggatggcagacacggtggagaccatagaatccacgccacatttgttgcggacgttggagcccctgcagatcttgtagtacccatgctctccccagttctcgccccaggagttcttgatgatccagta

SEQ ID NO: 399563 - DNA, 449 bp, Oryza sativa nipponbare
tcttcaaagaggaatggaccagagtctcactgataaactgtttcatataccattacaaaaaaagcatggatatgactagatctcactggaaaatgaacatgcccacatgatgcacaagctggctgcttgctattcattcctccatggacagatggactaatctagtgttacatcagagggataatacattaatccatgcaggggtcctgtagtgacagacagcacaatggcaagaagaatatgtgaacatggatgagcataagaagatgccaatcatctcgggctggctgttgcatacttgcattgtccaaagtccaaacttgcagtgcagcattctgcttggaaattatcagcatctggtgcgcctcacagaatcttgcactgatcatcgtcatcgttgtgcactaggagtgcatcctggagacttgttcagacaatccatcgaccga

SEQ ID NO: 399564 - DNA, 439 bp, Oryza sativa nipponbare
tagctcacgactcaatgtaattattgtggttggtacagccgtcgtcctattttatgaacaagggtacagtttttcaactcttttgtttaccagtatacatccacaatcacaattgagatggaacaaaatttcagtgggagatcagatgtttcagaaaggcacggtagcagtgactgtcctatgcctgggatctgtcagtatagaatgaacattaacaaagcctgcttgcctcatcgtctcctccaaatccagcatgtagtattcatccagaaacggttcagtgctcttcatcagagtaaatagcactggtgatagttcctgaagtactttggattttggtgaattgtcggtcagggcgatggtccctcctggccggagcagccgaaatgcttcgttcacgagtcctgtgattgctcgtgctggacactcgtggcacaca

SEQ ID NO: 399565 - DNA, 434 bp, Oryza sativa nipponbare
aacaataaaaagatagcatggaattaaagccgctgctccaatttaccatacgcagcatttgattacaggaataccaaaaaactactaccgatgacaggtattaattattaaaaagcacaggttcagattattgcgacaaaagtttttgatacccgtaagattggacgcttgatagccaaaccacactcagaaccctaaatatgcatacggaggatgtccaatcggatcttcagccaccaccagaagcagatcagtacttgtagtccttgacgtgaaggctctcagaggcaccctcgccgagcacagcatcaccctggtatgtaccaagggtagcctcagagttggccttgcacctggtgatgaaggccttctgcgccttcaccacgttctccgtcttgccgccccaggccttgagcgtgctctgctggagagca

SEQ ID NO: 399566 - DNA, 315 bp, Oryza sativa nipponbare
aagacaaaaaacttgggcgggggtgaaaatcattaatgcaatttcccttacgcaacattggattacctaaattcgatacttctactaccgaagactggggttaaacatggaacaccacaggttgcaatgattgcgacaaaagttttaactaccccctagatcggacgcttgatagccaatccacactgataactgtaaatatgcatacgaaggatgtgcaatcgtatcttatgccaccaccagaagcagatcagtacttaaagtcatcgacgcaagggctataactaagtcgctagacaaacacagcatcatcct

SEQ ID NO: 399567 - DNA, 357 bp, Oryza sativa nipponbare
tttatgcaagacaacgtttaatttctcgaggcacatctacagattagctggctagcttcagtcctacatgtccatattaatttacatcaagagcttttctggcaacaattttgattacacgtgtcgatgaaaaatattacaacaatgactgccctttgttcacttttgtgaagtgtgcacagctatgaaaagctacgatctgtgaacactcctcggagtttgtacattgcgtgaactcatgcttgcagttttcaggagcctgcgaaattcatctaggcttatttttccatctctgtcaatgtcagcctcctccaggaggggatcaatagaacctttcagtcctgtttgcattctcag

SEQ ID NO: 399568 - DNA, 427 bp, Oryza sativa nipponbare
aaaggaaggacctattttttatagtagaaagcaaccgtatttctttctacattgaaatatagaagatgtacattgaaatgtgtcaagaagagatgtaggagcaccctcatggagagggatttttagaagttccattgcatggtttcacaagttatgcaatgaccatcctactttcttctagctgtaatatttccaaaactagttacaagaaatgcgaggatgcccattgtcattgatatggtatggtgatgaagagattcacgaaatatgaatgtggagctcattaaacttttgccgcttcagtaggtgcaccggccctctcagcaataatctgctcatagagatctctaatcttcagtcctacgatagtttggaagagacctgttccattgttgctgccggggaagtctgcatgctttagcatttg

SEQ ID NO: 399569 - DNA, 450 bp, Oryza sativa nipponbare
cgagtttaactaagaccagttggatttcgtgtttgatacaaaaattaagatggacggattcacaagagagcaccctctacttaagctttacattacaaggccaaccagcagctgcctgccggccgaccactgcgtgcgcacgcgcgcgcaataatcaaccaatcacacacagtacgcacgcacataaaaaccacccatagccttcacgtacgcccggacgcacgcaccggttcgtgccaagctcaagggtagatggttctcgggatgatgatgtcgccgatgttgttgtgccacgggtccgagaggtggctggccaggttctccagtgggccggtgcccgggtacgccgactgttggacgcagaaacccacaaaagccagcatggccaatcgcccgttcttgatctccttgagcttgtactcctcgaacttgacggggtcccttggagaa

SEQ ID NO: 399570 - DNA, 396 bp, Oryza sativa nipponbare
attgcaatcccaatattttaagaaaacacaaataggaactgaaatccagatccacacaatgctgaagtaactgaactgccgtttaacaaagataaagacagacttccccacaggttcaagttccaaaacacaccaagtacatactacatcacttgcagtctcagatataagatgccaaccaagttaagaaacgacgccgtcgctcagggtgagagcagctagctgatcagttggggtatttgcctgctgctgctgagcattacggagaacttccatagcctcagcgaccttggccttaagagcatcaggtgactcaatgagatggagaacttcagtctggtccatctccaaaagcatgccagtgaccttcgctgcctgatcatgctccagctgatc

SEQ ID NO: 399571 - DNA, 386 bp, Oryza sativa nipponbare
aagtgcttgctgatacaatatgaacatggagggtacattgccggttccatatgaacaaacataaaaacaccgaaaccccatatggccattatgccgatcctagcctagcttggcgaggacatcgccaagagcagatttggtcaacgtgtagtacttctccgcctcttcggggctcttgatcttggctgcatggtcaagcccgtcaatggtggcgaagagcttgccggtgaggtccttgaggcccttcttctagtacttgggcttggagttgatgacggttttgaggtcgtagcgcacgtaggaggccctgaggcggaggtcgtccctgacgaacggccactgattgttctagatgagcggcttgaggttgatgatgtactgggccg

SEQ ID NO: 399572 - DNA, 433 bp, Oryza sativa nipponbare
ttatagtcagaatcttgttttattttgctgagtcaggcatgtacagagtttctgatgcgcacaggtgaatcttgggctgaagaatagcctagttaatatatatacattgacagatggccactaatttctggagctggtgttcatggagatggcctggccaagtattgcagccattcttcaggcaacccttggctcctcttgagcgtcctgaatgcagcttttgtcaagggtactgcaagaatgtcaaattcctttggcgccttggggaccttgagtagcttcatgtttgcttgctccactgtcttctggcccttcctggagttgcatcttgagcatgcagtcaccagattttcccattcccattttccgccacgtgcagtcggaatgacatgatcaatcgttaggttatcaacagaagaacaatactggcaag

SEQ ID NO: 399573 - DNA, 420 bp, Oryza sativa nipponbare
cccttcacaaggggtttaattaattcgccatcagaaaagaaaatttctacaaatatattataatttagttacaatacttttttttttagaaacacccccgtatatgaaacttgcagtcaagccaagaacttttcgaccttttccacttcctccacgctcccgatgtacagcggcactctctgatggatctccgtaggcatgatgtcaagtatcctctggtggccatcggagcccttgccgccggcctgctcgacgatgaagctcatcggcgcgcactcgtacagcagccgcagcttgccgttcttgctcttctggtccctggggtagccgtagatgccgccgtagagcagcgtgcggtggaagtcgccgacaaggctgccgatgtagcgcgcggagtatggcttcccggacggcccgggc

SEQ ID NO: 399574 - DNA, 441 bp, Oryza sativa nipponbare
taatgtaagcctgtggttttattgcatgatttgtcgggtaaaaaaaaattactaattgtacatcacttgacaggcctctctcactgaaagctgaaaccccctaaaccccgaagaaattaacagttgaaacgaatgggtaaataataaactcagacgaggccgacgagcttctcgctgaggtcccagagcttcctggccttctccgggtcgctggcctcctgcgagagctggttctcgaacgacgccgagtccttgttccagctccagtacacgccggacttggtcaggctcgggtcgcccaccacctgcgccagccgcttcccggactccgcctccgacacgaaccccttcgtcacgaaccgctggaacggcgggaacagcagccggaacagcgggatgtgctcgcggaacaagcccgtcgtcgcgatgcaccccgggtac

SEQ ID NO: 399575 - DNA, 409 bp, Oryza sativa nipponbare
  unsure (1)..(409): unsure at all n locations
tataattaattcacaacaccatatttcattgatcaggttcagaacctgcacagaaatacacactaccggtacagatctcaccttctctccaatactcgtacatccatccacgcggtccacacgaatacgtacatctatacggtacacgtacgtacatctactgcaccgngtacacacacgcacactctcctgcagagacgcgcatcgtcgtcaacctagctagcttagctgaaggcgatgcgtcgccatggcagcacggcggcggcggcgctcacttgccggggacgaagttggtggcgtaggcccaggcgttgttgttgacggggtcggcgaggtggtcggcgaggttctcgagggggcccttgccggtgacgatggcctggacgaagaagccgaacatggagaacat

SEQ ID NO: 399576 - DNA, 420 bp, Oryza sativa nipponbare
ttgacgttggaaatagttatttacatggtgcattccatataaatggccgtatattgttctggatgcttgataaatcatcataggcagaagaactagattaactgtttgtctccatgtcgaatacccacttcaataactggtggttcacccataacgtacactagtgacaacaagctaactgatgcaaattttcagggcattcctcagcttgacttcaccgtctcgatcgcttggattaattcatctagtttggcacctgtgacctccttgacgaccttcccgtccttgagaatcttgaatgttggcacaacctttatgcccagctcctttgcaagagacttgttgtcttgattgcagtcgagtttgaggaacacaacgtcctggtccttctcggacatctcctggaatttcggtgccatc

SEQ ID NO: 399577 - DNA, 436 bp, Oryza sativa nipponbare
tacacaatcaggtccattgtacttctttcatcaaccaaccagataacattgttttacacaatctgaacgaacgaagcaaatattcgggtacgcggaaagaggagaacgtcgcgcgtctcaccgcagcctgcatgaaagcaatggacctcaccgccgttgctcgccggagatccacactcacttgccggggacgaagttggtggcgtaggcccatgcgttgttgttgacggggtcggcgaggtggtcggccaggttctccagtggccccttgccggtgacgatggcctggacgaagaacccgaacatggagaacatggcgaggcggccgttcttgatctccttcaccttgagctcggcgaacgcctcggggtcgtcggcgaggccgagcgggtcgaagctgccgccggggtagagcgggtcgacgacctcgccgagc

SEQ ID NO: 399578 - DNA, 291 bp, Oryza sativa nipponbare
ccacgcgtccgagccgtacatgcagtaaacgcagataagtcggcggcgaaggcgaacacgaccatgggcctaacctaccgggtcctggccgccaagacccccttactaggccatccgcgacaatacagtgccgccgttcgggacatcgacgacggcgacaccggacgaataagcatgagcacggagcagcggtacgggccggatagggggaaggaccaggagccattctgggcgcatacgcaggaagacctgaagggcgagtcactggacgactacgggtgggacacgacg

SEQ ID NO: 399579 - DNA, 350 bp, Oryza sativa nipponbare
ccacgcgtccgggcggggagagcagtggcgaagcacagccagcttgtgaaggaggtggacgtgcgcctctccgcccgcggtggcgagctcagccgaggtcccaagatttgcaggtgcgagatcactctcttcaccaagcgccacggcgtcatccgcgccgaggaggacgccgagtccacctacgccagcatcgacctcgcctcctccatcatcaagaggaagctcaggaagatcaaggagaaggagaccgacgtccgccacctcaaggggaccaagccccccgtctccgactggccgccatcattgctcgacaacaacgacgacgacgcccaggcccagctcaaggatct

SEQ ID NO: 399580 - DNA, 413 bp, Oryza sativa nipponbare
ccacgcgtccgaccgcctctcacaatgtcgaccgccgccgccgccgccgctgcccagagctggtgcttcgccactgtcaccccgcgctcccgcgccacagtcgtcgccagcctcgcctccccatcaccgtcctcctcctcctcctcctccaacagcagcaacctcccggcccccttccgcccccgcctcatccgcaacacccccgtcttcgccgcccccgtcgcccccgccgcgatggacgccgccgtcgaccgcctcaaggatgggttcgccaagttcaagaccgagttctatgacaagaagccggagctcttcgagccgctcaaggccggccaggcacccaagtacatggtgttctcgtgcgccgactctcgcgtgtgccccgcggtgaccatgggcctggagcccggcga

SEQ ID NO: 399581 - DNA, 430 bp, Oryza sativa nipponbare
ccacgcgtccgcccacgcgtccgcccacgcgtccgcacaccccaccagcagcagcagcagtagctgagcttgaagcagcagagcgaggtagacatggccgccgccaccatggccctctcgtccccggcgctggccggcaaggccgccgcgaaggtgttcggcgaggggcgcatcaccatgcgcaagtcggcggcgaagcccaagcccgccgcgtcggggagcccgtggtacggcgccgaccgcgtgctctacctcggcccgctctccggcgagccgccgagctacctgaccggcgagttccccggcgactacgggtgggacaccgcggggctctccgccgacccggagacgttcgccaagaaccgggagcttgaggtgatccactccaggtgggcgatgctcggcgcgctgggcttggtgttcccggagc

SEQ ID NO: 399582 - DNA, 443 bp, Oryza sativa nipponbare
ccacgcgtccgactggacatactctactactactagccagtaagctagctaactaactacgtggctatggcccccaccgtgatggcctcctcggccacctccgtggctccattccaagggctcaagtccaccgccgggctccccgtcagccgccgctccaccaactcgggcttcggcaacgtcagcaatggcggaaggatcaagtgcatgcaggtgtggccaattgagggcatcaagaagttcgagaccctatcgtacctgccaccactcaccgtggaggatcttttgaagcagatcgagtacctgcttcgatccaagtgggtgccttgcctcgagttcagcaaggttgaattcgtctaccgtgagaaccacaggtctcccgggtactaccatggccggtattggaccatgtggaagctgcccatgttcggctgcaccgatgc

SEQ ID NO: 399583 - DNA, 400 bp, Oryza sativa nipponbare
ccacgcgtccggcgcggcggagagacattaatcgatcgatcgatcgatccgattccggccggccatggcagctgctgctccggcgacggcggcggtgcggcgcatgaagctgggctcgcagggtctggaggtctcggcgcaggggctgggctgcatgggcatgtccgccttctacgggccacccaagccggaggccgacatggttgcgctcatccaccacgccgtcgccgccggcgtcacccacctcgacacctccgacatgtacggcccccacaccaacgagctcctcctcggcaaggctctgcaaggcggcgtgagggagaaaggtgaggtggcccacaagtttcgccgtctcgttcgccgacgggaagggtgagatccgcggcgacaccggcgtacg

SEQ ID NO: 399584 - DNA, 382 bp, Oryza sativa nipponbare
ccacgcgtccggcaacgtcagcaatggcggcaggatcaggtgcatgcaggtgtggccgattgagggcatcaagaagttcgagaccctctcctacctgccaccgctcaccgtggaggacctcctgaagcagatcgagtacctgctccgttccaagtgggtgccctgcctcgagttcagcaaggtcggattcgtctaccgtgagaaccacagatcccccggatactacgatggcaggtactggaccatgtggaagctgcccatgttcgggtgcactgacgccacccaggtgctcaaggagctcgaggaggccaagaaggcgtaccctgatgcattcgtccgtatcatcggcttcgacaacgtcaggcaggtgcagctcatcagc

SEQ ID NO: 399585 - DNA, 357 bp, Oryza sativa nipponbare
ccacgcgtccgcggacgcgtgggcggacgcgtgggggagcgcgccgtgcaccgcctatcacaatgtcgaccgacgccgccggcgtcgctgaccagagctggtgcttagccactgtcaccccgcgctcccgcgccacagtcgtcgtcagcctcgcctccccatgaccgtgctgctgctcctgctcctccaacagaagcaacctcccggcccccttccgcccacgccttatgcgcaacacccccgtctatgacgcccccgtcgcccccgccgcgatggacgccgccgtcgaccgactcatggatgggtgcgccaagatcaagaccagagtctatgacaagaagccagagctcttcgagc

SEQ ID NO: 399586 - DNA, 375 bp, Oryza sativa nipponbare
ccacgcgtccgccggctttggatttttcgttctgcctcgcgaccgacgataaaaatcgtgcgtccgatgaggcccttctcccctcatctccggcaagccgcggcggcggcggctgctgcggccactggcgctcctcccctcgccgcagctctcctcaagaattcttctgctccccttatccatggccggctcagcttcagccacacgtcgctgcagtcaccgaacaaccgcgggaaacgaacaggctgggcggtgcgtgtgctgccgctgacggaggagaacgtggagatggtgctggaccaggtgcggccgagcctgatggcggacggcggcaacgtggcgcttgacgagatcgaccggcctcgtcgtcgtgct

SEQ ID NO: 399587 - DNA, 245 bp, Oryza sativa nipponbare
  unsure (1)..(245): unsure at all n locations
ccacgcctccgactttacatactgtactactactagcgcgtaagctagctaactaactacncgtatnctgcccgcaccgtgatggcctcctcgggacaccttttctggggcataagggtagctcaagtccaccggcgggctgcccgtcagccgacgatagattaactagggctaggaatgccggagcaatcacgggcgtgtaaggtcgatccatccatggccaattgagggcataaagaagttcg

SEQ ID NO: 399588 - DNA, 454 bp, Oryza sativa nipponbare
ccacgcgtccgactcgagcaaagaaggagagagcttggtgagctgcagagatggccccctccgtgatggcgtcgtcggccaccaccgtcgctcccttccaggggctcaagtccaccgccggcatgcccgtcgcccgccgctccggcaactccagcttcggcaacgtcagcaatggcggcaggatcaggtgcatgcaggtgtggccgattgagggcatcaagaagttcgagaccctctcctacctgccaccgctcaccgtggaggacctcctgaagcagatcgagtacctgctccgttccaagtgggtgccctgcctcgagttcagcaaggtcggattcgtctaccgtgagaaccacagatcccccggatactacgatggcaggtactggaccatgtggaagctgcccatgttcgggtgcactgacgccacccaggtgctcaaggagctcgagga

SEQ ID NO: 399589 - DNA, 465 bp, Oryza sativa nipponbare
ccacgcgtccgcccacgcgtccgcccacgcgtccgctcctcgtctaccttacctagcagcagcagctagctagcttaattagctatagcagccatggcggcgacggcactgagcagccaggtccggttgccgatgtccctgcgggtggcgacggcgccggcgccggcgcgcgtgtcggtgctgccggcgagcaacaagctgggagacaggctgcggatgcaggcgacgtacaacgtgaagctgatcacaccggacggcgaggtggagctgcaggtgccggacgacgtgtacatcctggaccaggcggaggaggaagggatcgacctgccttactcctgccgcgcgggctcctgctcctcctgcgccggcaaaggggtctccggcgagatcgaccagtccgaccagagcttcctcgacgacgaccaggttgccggcggctgggtcctcacctgccacgcctacccc

SEQ ID NO: 399590 - DNA, 480 bp, Oryza sativa nipponbare
ccacgcgtccggtttggtggacttagggatggatactatatccatggtcaatgtgcgataattatgtttgatgtcacttcaaggctgacttacaagaatgttccaacatggcatagggacttgtgcagggtgtgtgaaaacatccccattgtcctgtgtggtaacaaggttgatgtgaagaacaggcaggttaaagccaagcaggtcacattccacaggaagaagaatctccagtactatgaaatttctgccaagagcaactacaactttgagaagcccttcctttatcttgcaaggaagcttgctggtgacccgaacctgcatttcgttgaagctgttgctcttaaaacctccgaagttcccattgacctggcaatgcagcaacagcatgaggctgagcttgcggctgcagcagcacaacctctcccagatgacgatgacgatctgatcgagtagagaggatcatgagtctatcatgct

SEQ ID NO: 399591 - DNA, 475 bp, Oryza sativa nipponbare
ccacgcgtccgctcgtcgcaacagctacaaacgcccacatcacacgcagaaatccgcatcaacagccagccatggcgtccacgctgaccaacgtcggcctgtctaccccggcggcggcggcgtcgtccctcgttaggccggtcgccggagctggacgcgtggtgtttccccgtgttggccgcggcgggttcgcggcggtgagggcgagcgggccggcgacgccgccggacatctcggacaagatgtcggagagcatcgacaaggcgaaggaggcgtgcgcggaggacacggcgagcggcgagtgcgcggcggcgtgggacgagggtgaggagctgagcgcggcggcgagccacgcgcgcgacaagctcaaggagacctccgacccgctcgaggcctactgcaaggacaacccggagaccgacgagtgccgcacctacgacaactgattcttaccattatatgtttgctaatctct

SEQ ID NO: 399592 - DNA, 425 bp, Oryza sativa nipponbare
ccacgcgtccgcaatatcaggaagtggactgactggcacaaacacaagcatgtttcctgaggtggatagtacttggaagacatttcgcgagatacagagactcttgagcaaaaccaatggcaaagtcatcgctgatgtgatgacttattcgcctcttgcggttcgtgaaagtaccaaccttgatgctgctacaaggttgctacttgaaaccaaatatcgcagattgcctgttgttgatagcactggtaaattggttgggatgatcacaagggggactgttgtcagagctgccctcaaaataaagaagacagctgaagaaactgcttaaattagacagtgtagatgattctttataagtcatttctgggactgcagtcacttggaaatttagtccactgaaacattatttggtgaaatgaactaca

SEQ ID NO: 399593 - DNA, 386 bp, Oryza sativa nipponbare
ccacgcgtccgcccacgcgtccgcccacgcgtccgccttctccgccgcctccgctcttcgctgcacggtgctagctcgccgccgtccgtctcgcgcgcctcaagggttatcacaagatgtatacagcaaggaggaagatccagaaggacaagggtctggagccaactgagtttgaggacactgttgctcaggcattttttgaccttgagaatgggaatcaggagctgaagagtgacttgaaggacctttacatcaatggagcagttcagatggatttacctggcaacaggaaggctgttattatttatgttccatacaggctgcggaaggcatataagaagatccatgtgaggcttgttagggaacttgagaagaaattcagtggg

SEQ ID NO: 399594 - DNA, 488 bp, Oryza sativa nipponbare
ccacgcgtccgagctaccagtggagcatggacttcttctggacaatctattagatcttgctcatgctccttttactcatacatccacctttgccaagggttggagtgttccaagcttggtgaagttcttgacaccttcatctgggcttcaaggatactgggatccatacccgatcgacatggaatttcgaccaccatgcatggtgttgtcaaccattggcatctcaaagcctggaaaactagaggggaagagcaccaagcaatgttcgacgcatctccaccagctccatatctgtttgccctcctctaggaataaaaccaggctgctctaccggatgtctctcgacttcgctccatggatcaagcatgtccctttcatgcatatactatggtcacattttgctgagaaggtcttgaatgaggatcttcgactcgtgctcgggcagcaagaacggatgatcaatggcgcaaatgtctggaactggccag

SEQ ID NO: 399595 - DNA, 399 bp, Oryza sativa nipponbare
ccacgcgtccgattaagttttctcgtccggcggcgtcacccctgcgaattaactaactagctaggccggccatggagacggtggccgcggccagctacacccgcggggcggcgacgcgctcgccagcgtgctgcgccgccatgtccttctcgcagtcctacaggcccaaggccgctagaccgccgagcacgttctacggcgagtcgctgcgggttaacacggcgaggtcgctgccgtctgggaggcagtccaaggcggcgagccgggcggcgctcagcacccggtgcgagatcggggacaggcctggaggagttcctgaccaaggcgacgccggataagaacctcatcaggctgctcatctgcatgggggaggcgatgaggacgatcttgttcaaggtc

SEQ ID NO: 399596 - DNA, 453 bp, Oryza sativa nipponbare
ccacgcgtccgcgggattggaggtggcatgtcagtcgatattgatgcatctggcaggaagagcacggggaagggtgtgtaccaattcgttgacaagtacggcgcaaacgtcgacggctacagcccaatctactcgccggaggaatggtctcccaccggtgacacctacgttggtggaaccaccgggcttctgatctgggccgtgaccctcgccgggctcctcggcggcggcgccctcctcgtctacaacaccagcgccctcgccggctaaatttcacccaaatccagtctatgtatgtaacaccaagctgggtgtctgcatattcatctgtaatctaagatagccttcctttgaatgcgatgtgatgatgcccactgcttaatcaaactgcattgtgattaatctatgtaacactgtactggcatgatgatgatatactacacttggtacttg

SEQ ID NO: 399597 - DNA, 323 bp, Oryza sativa nipponbare
ccacgcgtccggtgagagtgaggtgcagaaaaatttgagctgaagctgaggatggcaacatccatgatcacctcgccgctggtggcgccggcccgggccaagggccttccgtccatctcccgccggggatcctccttcgccatcgtctgcagcggtgggaagaagatcaagaccgacaagccctacgggattggaggtggcatgtcagtcgatattgatgcatctggcaggaagagcacggggaagggtgtgtaccaattcgttgacaagtacggcgcaaacgtcgacggctacagcccaatctactcgccggaggaatggtc

SEQ ID NO: 399598 - DNA, 299 bp, Oryza sativa nipponbare
ccacgcgtccgcccacgcgtccgcccacgcgtccgggatcatcgtgccggggatctactactccgacgacaagctgctgcagacgaggatcttctcctactccgacacgcagcgccaccgcctcggaccaaactacctgctgctcccgcccaacgcgcccaagtgcgcccaccacaacaaccactacgacggcttcatgaacttcatgcaccgcgacgaggaggtcgactacttcccatcccgctacgatcctgccaagcacgccccccgctaccccatcccctccgccaccctcaccg

SEQ ID NO: 399599 - DNA, 473 bp, Oryza sativa nipponbare
  unsure (1)..(473): unsure at all n locations
ccacgcgtccgagaaagcataagcaacacaagggattaactcatcactcacttagctaattaaatcttcgaccatgtcggacaagtgcggcaactgcgactgtgctgacaagagccagtgcgtgaagaaaggtaccagctatggcgtcgtcatagttgaagccgagaagagccacttcgaggaggtcgccgccggcgaggagaacggcggctgcaagtgcggcaccagctgctcctgcaccgactgcaagtgcggcaagtgaagtcacgaagcaaccgaacactcgccgccggcgagtcacctaccttaattagtccacaataaaaaccacccatatgagtgtggtttgtgtgtgtgctgattattgctgaattaaacccgtgtgttatcgattaattaagcagctggtcgcttcggcgactatgcgtgtatcaacgtatgaatntgtgtgatgtgatgtacccgtgctattc

SEQ ID NO: 399600 - DNA, 469 bp, Oryza sativa nipponbare
ccacgcgtccgcccacgcgtccggccttctgcaactcatacggctgtggcctcacagactggaaccttgcgtccacgtatggaaagattggcctttttatttttgcctccttggttggccgaagcggtggcgtgattgctggcctagcagcttgcggtgttatgatgtccatcgtatccaccgctgccgatctcatgcaggacttcaggactggttacctgaccctctcttcaccaaggtccatgtttgtgtcacagttgattgggaccacccttggctgcatcatcgcccctctgaccttttggctctactggactgctttcgatatcggcaatcctgatggcatgttcaaggctccatatgccgtcatctaccgtgagatgtcaatcctgggtgtcgaaagattcttagcgctgccccaacattgcctggcgatctgctcggtcttctttggcgcagctattttgat

SEQ ID NO: 399601 - DNA, 488 bp, Oryza sativa nipponbare
  unsure (1)..(488): unsure at all n locations
ccacgcgtccgatcaagtgcatgcaggtgtggccaattgagggcatcaagaagttcgagaccctatcgtacctgccaccactcaccgtggaggatcttttgaagcagatcgagtacctgcttcgatccaagtgggtgccttgcctcgagttcagcaaggttggattcgtctaccgtgagaaccacaggtctcccgggtactacgatggcaggtattggaccatgtggaagctgcccatgttcggctgcaccgatgccacccaggtgctcaaggagctcgaggaggccaagaaggcctaccccgatgcctttgtccgtatcatcggcttcgacaacgtcaggcaggtgcagttgattagcttcatcgcctacaagcccccaggttgcgaggagtctggtggcaactaagctaagatcaagcatcgcgctggtggattgctgcctataataatagtatgcagcttttgtttgggctatngtgatgatata

SEQ ID NO: 399602 - DNA, 461 bp, Oryza sativa nipponbare
ccacgcgtccgcccacgcgtccgcggacgcgtgggcttctcatcaagcctcaatcaaaaggcttgaagggaagaagagcaactccagcaggtagaaaggccagaagcaaagatggcgatctccagcctacatgccaccacctccctgcactccccatgcaccaccaacacaagcttcaggcagaatcaggtcatcttcttcaccaccagaagcaacaggaggggtagcacaaggtacggaggagcaagaacctttcaggtttcatgctcagtcgacaagccagtggtgattggccttgcagcagactcaggatgcgggaagagcacctttatgcgccggctcaccagtgtgtttggtggtgctgcagagccacccaagggtggcaacccagactcaaacacactcatcagtgacacgacaacggtgatatgcctcgatgactacccatccctggacaggac

SEQ ID NO: 399603 - DNA, 475 bp, Oryza sativa nipponbare
ccacgcgtccggggcactggagatcattgctgcgagtacatgactggtggctgtgtagttgtacttggcaaagttgggaggaatgttgcagctggaatgacgggtggccttgcctatattctagatgaggatgatacactcgtcccaaaggttaacaaggagattgtgaagatgcagagagtgaatgctccagccgggcagatgcagctgaagggcttgattgaggcttacgttgaaaaaacaggcagcgagaaaggtgccacgattttgagagaatgggaggcatatctgccactcttctggcaactggtaccaccaagtgaagaagactctcctgaagcttgtgccgagtttgaacgagtacttgccaagcaagcaacaacagtacaatcgggcgaagtgatctactgcaattcccaagtgatcagattagacaaccaggaaggtgttctttggtactttccaggtgattttt

SEQ ID NO: 399604 - DNA, 406 bp, Oryza sativa nipponbare
ccacgcgtccgcccacgcgtccgcccacgcgtccgggtagacatggccgccgccaccatggccctctcgtccccggcgctggccggcaaggccgccgcgaaggtgttcggcgaggggcgcatcaccatgcgcaagtcggcggcgaagcccaagcccgccgcgtcggggagcccgtggtacggcgccgaccgcgtgctctacctcggcccgctctccggcgagccgccgagctacctgaccggcgagttccccggcgactacgggtgggacaccgcggggctctccgccgacccggagacgttcgccaagaaccgggagctggaggtgatccactccaggtgggcgatgctcggcgcgctgggctgcgtgttcccggagctcctcgcccgcaacggcgtcaagttcg

SEQ ID NO: 399605 - DNA, 483 bp, Oryza sativa nipponbare
ccacgcgtccggcgcgccgtgcaccgcctctcacaatgtcgaccgccgccgccgccgccgctgcccagagctggtgcttcgccactgtcaccccgcgctcccgcgccacagtcgtcgccagcctcgcctccccatcaccgtcctcctcctcctcctcctccaacagcagcaacctcccggcccccttccgcccccgcctcatccgcaacacccccgtcttcgccgcccccgtcgcccccgccgcgatggacgccgccgtcgaccgcctcaaggatgggttcgccaagttcaagaccgagttctatgacaagaagccggagctcttcgagccgctcaaggccggccaggcacccaagtacatggtgttctcgtgcgccgactctcgcgtgtgcccgtcggtgaccatgggcctggagcccggcgaggccttcaccgtccgcaacatcgccaacatggtcccagcttactgcaagatcaagcacg

SEQ ID NO: 399606 - DNA, 461 bp, Oryza sativa nipponbare
ccacgcgtccggacgactcggccccgatccccgccggcgccatctccaagctcctcatcgtcatagcgatgcagacggaggcgctcccgctcgtcaacaagttccacctcgtcgaggcggaggaatccatatttcctaaaggtgccccatggattagataccatggcaactacaaaggccttcacgttgaccttgtatggcctggaaaagatcctgttctcggagttgactgtgttggcacggtatcagcagcacttgtgacttatgcttctattcagtcattgaagccagatctgatcatcaatgctggcactgctggtgggtttaaggccaaaggagcagacattggagatgtctacttagcatccgatgttgcattccacgataggagaatacctatccctgtcttcgacatgtatggaattggaacacgaaaaacatttgctacccctaaatatatg

SEQ ID NO: 399607 - DNA, 481 bp, Oryza sativa nipponbare
ccacgcgtccggagcaacatgcctctgataatgtcaacaaaattttggttggcaacaaggctgatatggatgagagtaaaagggctgtccctactgcgaaaggccaagcactggctgatgagtatggcatcaaatttttcgaaactagtgcgaagacaaacctcaacgtggagcaagtttttttctccattgcacgtgacattaagcagaggcttgctgagaccgactccaagcctgaggacaagacaatcaagattaacaacaagacggatcagggtgccgacaaaccagcagcttctggatctgcatgctgcggctcctgaggagacgttcgccttctcggcctccatcgtttattatttgacattgtttgttccctgtcttgctgttataggaagaatgtcaagaagacacactatgatacggatctgttgtacctatctttgctttcattctttgaagcaactactcatgcttttga

SEQ ID NO: 399608 - DNA, 422 bp, Oryza sativa nipponbare
ccacgcgtccgcccacgcgtccgcccacgcgtccgagcagcagcagcagtagctgagcttgaagcagcagagcgaggtagacatggccgccgccaccatggccctctcgtccccggcgctggccggcaaggccgccgcgaaggtgttcggcgaggggcgcatcaccatgcgcaagtcggcggcgaagcccaagcccgccgcgtcggggagcccgtggtacggcgccgaccgcgtgctctacctcggcccgctctccggcgagccgccgagctacctgaccggcgagttccccggcgactacgggtgggacaccgcggggctctccgccgacccggagacgttcgccaagaaccgggagctggaggtgatccactccaggtgggcgatgctcggcgcgctgggctgcgtgttcccggagcttc

SEQ ID NO: 399609 - DNA, 463 bp, Oryza sativa nipponbare
ccacgcgtccggggctccccagcaagggccgcatgtccgagcaaaccctaagcctccttaagagttgccaattgtcagtcaggcacctcaacccgcggcagtacaccgcagatatcccgcaggtcccaaacttggaggtttggtttcagaggcccaaagatattgtccgcaaactacaatctggggatcttgaccttggcattgttggttttgacatagtcagtgaatatgggcagggtagtgatgatttagtagttgttcatgatgctctcgagtttggacattgtcgtttgtcccttgcggttcctaaggaaggcattttcgagaatataaatactctggaggatttggcaaatatgcctgaatggacacaagagagaccattgcgtgttgttacaggatttggatatgtatggtcgtgaataaactcaaagttgttcaagtgctccccccctcttggaca

SEQ ID NO: 399610 - DNA, 412 bp, Oryza sativa nipponbare
ccacgcgtccgcccacgcgtccgcattgatgctggtggactaacaagggaatggtatcagctgctatcacgagtgatttttgataagggtgcccttctattcacaactgttggaaatgacttgacatttcaaccaaaccctaactcggtgtatcagactgaacacctctcatatttcaaatttgttgggcgagtggttggtaaagctctatttgatggccaacttttggatgtccattttacaagatctttctacaagcacatactaggtgtcaaggttacataccatgacattgaagctattgatcctgcatactataaaaatttgaaatggatgcttgagaatgacataagcgatgttctggacctctccttcagcatggatgcagatgaagagaagcggatattgtatg

SEQ ID NO: 399611 - DNA, 401 bp, Oryza sativa nipponbare
ccacgcgtccgcccacgcgtccgcccacgcgtccgcccacgcgtccgcccacgcgtccgcccacgcgtccgcccacgcgtccgcccacgcgtccggtccacctccgaggctcgatcatgtcgcggtcagcctcccctgtggacggataatcatattcggtggctccatcgctgggctgcactcgccctcacagctgttcctcctcgacccagcggaggagaagccgacatggaggattttgaacgtccctggccagccacccaagttcgcctggggtcatagcacatgcgtggttggcggcaccagggttcttgtcctgggtggccacactgggggaggagtggattctcaatgagctccatgagctgtgcctcgcgagcaggcccgacgaagatgagtga

SEQ ID NO: 399612 - DNA, 481 bp, Oryza sativa nipponbare
ccacgcgtccgctcatcgccatctctctcagctctcacagctcactgcatcaatggccgcggccaccatggcgctctcctccccggtgatggcccgcgcggcgccgtcgacctcctccgcgctcttcggcgaggcgcggatcaccatgcgcaagaccgccgcgaagcccaagccggcggcgtcgtcggggagcccgtggtacggcgccgaccgcgtcctctacctcggcccgctctccggcgagccgccgagctacctcaccggcgagttcccgggcgactacgggtgggacaccgcggggctctccgccgacccggagacgttcgccaagaaccgggagctggaggtgatccactcccggtgggcgatgctgggcgcgctcggctgcgtcttcccggagctcctcgcccggaacggcgtcaagttcgggggagcccggtggttcaaggcgggcttcgcagatcttcaacgagggcgggct

SEQ ID NO: 399613 - DNA, 348 bp, Oryza sativa nipponbare
ccacgcgtccgcgtacgccaccggaagagagagccctgctacgacgacgacgaccatggagctcgcctgcacctgcgagaccgtgttcgcggccgtgctgaagactctctttctgggggcgatgcgcgcgctcgccaatgccgttggcgtcgcgggcgccaagcccgtgccgcgccgagcgctcgtggcgtctgccaagaagtcgtggctcccggccttcaagagcggctccaggtgaatcaacccacctgggctatgctgctcgctctccggtgactgttgcttgaactcgttggggctggccaaggacccgtcggtcctgaagtgtgacaggagggcggggctgat

SEQ ID NO: 399614 - DNA, 455 bp, Oryza sativa nipponbare
ccacgcgtccggcgcactgcctgctgctgcccacccacagccgctgctcgccgccgagagccgccgcagcagcgccgtgtccgtgcggatgtcgtgggacgggcccctctcctcggtccgcctcattatgcagggccgcaacgtcaagctgaatgagaaggtgaaggagcacatcgaggagaaggcggggagagcagtggcgaagcacagccagcttgtgaaggaggtggacgtgcgcctctccgcccgcggtggcgagctcagccgaggtcccaagatttgcaggtgcgagatcactctcttcaccaagcgccacggcgtcatccgcgccgaggaggacgccgagtccacctacgccagcatcgacctcgcctcctccatcatcaagaggaagctcaggaagatcaaggagaaagagaccgacgtccgccaccttaaggggaccaagccccccg

SEQ ID NO: 399615 - DNA, 395 bp, Oryza sativa nipponbare
ccacgcgtccgcggacgcgtgggcggacgcgtgggcgaatccagcagcagctcagccgccgccgatggcgtccacgatcatggccccaacctcccgcgtcctcgccgccaagacccccttcctcggccatccccgcccctccaatgcccccctccgcgacatcgccgccgccgccaccggccgcgtcaccatgagcaaggagctgtggtacgggccggacagggtgaagtacctggggccattctcggcgcagacgccgtcgtacctgaggggcgagttcccgggcgactacgggtgggacacggcggggctctccgcggacccggaggcgttcgcgaggaacagggcgctggaggtgatccacggccggtgggcgatgctcggcgcgctgggct

SEQ ID NO: 399616 - DNA, 423 bp, Oryza sativa nipponbare
ccacgcgtccgcttcacaaaatcaccccaaaaaagatccattctcggagcacaaaagaatcttttgcaaatttgtatcaaacaaaaatggcagttcttggtctatccactgccttctctcctcccagaggttcttgtatagctgtgaggatcaggcatggcgctaggtcagcaaggagcaacctgtccctgaggaggaggagcgccggcggcggcgccattggcgtccgtgccgaggtgagcttcgtcgacggcgacgaggcgaagcggctggtggcggaggaggggtacacggtgctggacatccgggaccggacgcagcgcgagaaggcgcacatcaagaactcagcgcatgtgcccctcttcgtcgagaacgacgacggcgacattggaactattataaagcgcacggtacacagcaact

SEQ ID NO: 399617 - DNA, 420 bp, Oryza sativa nipponbare
ccacgcgtccgcggacgcgtgggggctcccgcacctgttcgtggggaacttgctcaagggtcagactgtgggagtcatcggagctggtcgaatcggctcagcttacgcaagaatgatgatcgagggcttcaagatgaacttgatctactacgacctgtatcagtccacgcgccttgagaaattcgtcacagcttacgggcagttcctgaaagcaaacggagagcagcctgtgacatggaagagagccgccaccatggaggatgtcctcagggaggccgacgtgattagtctgcaccctgtgttggacaagaccacttaccatctgataaacccggaaaggctggccatcatgaagaaaggagcggttcttgtgaatgcaagtcgaggaccggtgattgatgaggtagcactggtggagca

SEQ ID NO: 399618 - DNA, 465 bp, Oryza sativa nipponbare
ccacgcgtccggtctccccctttctgaacacagcaccaccccttctgctgcatctcccacctccctctgaattgtgggcctgaggcgatggcggcgctcgccccgtccaagatgctcggcacccggctcaacttcgccggctcctcccgctacgccaccgcggcaccgaccaccggagcgcagaagatcgtctccctcttcagcaagaagcccgccccgaagcccaagcccgccgccgtcacctcctcgagccccgacatcggcgatgagctcgccaagtggtacggccctgacaggaggatcttcttgccggagggtctcctggaccgctcagaggtgccggactacctcaacggagaggtccccggagactacggctacgacccttttggcctcagcaagaagccagaggacttttccaagtaccaggcctatgagctgatccatgccaggtgggcgatgctc

SEQ ID NO: 399619 - DNA, 479 bp, Oryza sativa nipponbare
ccacgcgtccgcggacgcgtgggcaagttcaagaccgagttctatgacaagaagccggagctcttcgagccgctcaaggccggccaggcacccaagtacatggtgttctcgtgcgccgactctcgcgtgtgcccgtcggtgaccatgggcctggagcccggcgaggccttcaccgtccgcaacatcgccaacatggtcccagcttactgcaagatcaagcacgctggcgtcgggtcggccatcgagtacgccgtctgcgccctcaaggtcgaactcatcgtggtgattggccacagccgctgcggtggaatcaaggccctcctctcactcaaggatggagcaccagactccttccacttcgtctccggcaacttggacttatgggagccctaaatccgaccgtccgtccgttcagttcgtcagtttacgccaacgcttttgcataagtactacctgaggatatcgtccccgatcatcga

SEQ ID NO: 399620 - DNA, 469 bp, Oryza sativa nipponbare
ccacgcgtccgcccacgcgtccgctcgtcgcaacagctacaaacgcccacatcacacgcagaaatccgcatcaacagccagccatggcgtccacgctgaccaacgtcggcctgtctaccccggcggcggcggcgtcgtccctcgttaggccggtcgccggagctggacgcgtggtgtttccccgtgttggccgcggcgggttcgcggcggtgagggcgagcgggccggcgacgccgccggacatctcggacaagatgtcggagagcatcgacaaggcgaaggaggcgtgcgcggaggacacggcgagcggcgagtgcgcggcggcgtgggacgaggtggaggagctgagcgcggcggcgagccacgcgcgcgacaagctcaaggagacctccgacccgctcgaggcctactgcaaggacaacccggagaccgacgagtgccgcacctacgacaactgattcttaccatt

SEQ ID NO: 399621 - DNA, 428 bp, Oryza sativa nipponbare
ccacgcgtccgggcggactacgtgtatgggccggggcggaaccacctgttcgtgcctgggccggtgaacatcccggaccaggtgatcggcgccatgagccgtcagaacgaggactaccgctcgccggcggtgcccgccctcaccaagaccctcctcgaggacgtcaagcagatcttcaagaccaccaccggcacccccttcctcttccccaccaccgggacgggggcgtgggagagcgcgctgacgaacacgctgtcgccgggggacaagatcgtgtcgttcctgatcgggcagttcagcctgctgtggatcgaccagcagcaacgcctcaacttcaacgtggacgtggtggagagcgactggggctacggcgccgacctcgccgccctcgactacaagctccgccaggacccctcccactccatcaa

SEQ ID NO: 399622 - DNA, 435 bp, Oryza sativa nipponbare
ccacgcgtccgccacgcgtccggagaagcctcttttggatctatccattcgggtcaccgtggcagttcggtaattttggcggagaggaggaggaggacgacgacgacgacgacgtgatgggtctcctcgacaagctgtgggacgacaccgtcgcggggccccgccccgacaccggcctcggccgcctccgcaagcacgccgccgcccgccccgccgccgtcaagatcaacgacccgacaggggacgcggcgatggtggccgtcccgccgacgacgccggccggggcggaggaggcgccggtgaaggtgacgcgcagcatcatgatcaagcgccccgcggtgtacccggcgtcgccgaggagcgcggccagcacgccgtcggccttccccgccggatccacccctcccatctcgccgttcgccggcgccgtggtcg

SEQ ID NO: 399623 - DNA, 483 bp, Oryza sativa nipponbare
ccacgcgtccggtcaagagcgtgccccagagcatctggtatggacctgaccgtcccaagtacctgggcccgttctcggagcagacgccatcgtacctgaccggagagttcccgggagactacgggtgggacacggcggggctatcggccgacccggagacgttcgcgaggaacagggagctggaggtgatccactcgcggtgggcgatgctgggggcgctgggctgcgtcttcccggagatcctgtccaagaacggggtgaagttcggggaggcggtgtggttcaaggccggcgcgcagatcttctccgagggggggctcgactacctggggaaccccaacctggtgcacgcgcagagcatcctcgccatctgggcggtccaggtggtgctcatgggattcgtcgagggctaccgcgtcggcggcggcccgctcggcgagggcctcgacaaggtgtacccaggcggcgccttcgacccgctcg

SEQ ID NO: 399624 - DNA, 369 bp, Oryza sativa nipponbare
ccacgcgtccgcacggccacaccacccaccaactgagagctgagcaggcgagcgagcggacatggcagcatcgctccaagccgcggccaccctgatgcagccggccaagctcggcggccgggcctcctccgccgcgctgccatcgcgcccgtcttcgcacgtcgccagggcgttcggcgtcgacaccggtgccgccggcaggatcacgtgctccctgcagtccgacatccgggaggtcgccaacaagtgcgccgatgccgccaagctcgccggcttcgccctcgccacctcagctctgctcgtctcgggcgccagcgcggagggcgtgccgaggaggcttaccttcgacgagattcagagtaagacgta

SEQ ID NO: 399625 - DNA, 363 bp, Oryza sativa nipponbare
gacccacgcgtccgctcgggcttcggcaacgtcagcaatggcggaaggatcaagtgcatgcaggtgtggccaattgagggcatcaagaagttcgagaccctatcgtacctgccaccactcaccgtggaggatcttttgaagcagatcgagtacctgcttcgatccaagtgggtgccttgcctcgagttcagcaaggttggattcgtctaccgtgagaaccacaggtctcccgggtactacgatggcaggtattggaccatgtggaagctgcccatgttcggctgcaccgatgccacccaggtgctcaaggagctcgaggaggccaagaaggcctaccccgatgcctttgtccgtatcatcggc

SEQ ID NO: 399626 - DNA, 428 bp, Oryza sativa nipponbare
ccacgcgtccggaagtactcgagcaaagaaggagagagcttggtgagctgcagagatggccccctccgtgatggcgtcgtcggccaccaccgtcgctcccttccaggggctcaagtccaccgccggcatgcccgtcgcccgccgctccggcaactccagcttcggcaacgtcagcaatggcggcaggatcaggtgcatgcaggtgtggccgattgagggcatcaagaagttcgagaccctctcctacctgccaccgctcaccgtggaggacctcctgaagcagatcgagtacctgctccgttccaagtgggtgccctgcctcgagttcagcaaggtcggattcgtctaccgtgagaaccacagatcccccggatactacgatggcaggtactggaccatgtggaagctgcccatgttcgggtgcactg

SEQ ID NO: 399627 - DNA, 394 bp, Oryza sativa nipponbare
ccacgcgtccgccctttctgaacacagcaccaccccttctgctgcatctcccacctccctctgaattgtgggcctgaggcgatggcggcgctcgccccgtccaagatgctcggcacccggctcaacttcgccggctcctcccgctacgccaccgcggcaccgaccaccggagcgcagaagatcgtctccctcttcagcaagaagcccgccccgaagcccaagcccgccgccgtcacctcctcgagccccgacatcggcgatgagctcgccaagtggtacggccctgacaggaggatcttcttgccggagggtctcctggaccgctcagaggtgccggactacctcaacggagaggtccccggagactacggctacgacccttttggcctcagca

SEQ ID NO: 399628 - DNA, 417 bp, Oryza sativa nipponbare
ccacgcgtccggatccaggtgcgcaagctgcccaagcgcaaccgccgcctcgtccgcgcccgggtccgcgtcgacgccccgctcgacgccgtctgggccacgctcaccgactacgagggcctcgccggcttcatccccggcctctccgagtgccgcctcctcgaccagtccgactgcttcgcccgcctctaccaggtgggtgagcaggatctcgcgctgggtttcaagttcaacgccaggggcaccatcgactgctacgagggcgaattgcagctgctgcccgccggagcgcggaggaaggagatcgccttcaacatgatcgacggcgacttcaaggtcttcgagggcaactggtccgtccaggaagaggttgatgggggggaaatatcaacggatcaagaatttcagactatactt

SEQ ID NO: 399629 - DNA, 378 bp, Oryza sativa nipponbare
  unsure (1)..(378): unsure at all n locations
ccacgcgtccgcccacgcgtccgcgatcagagacggatcatatatatacagcagcgcgccggttgccacctagtagattctgcctgggtcgatgtgtggagccgaattctgtatccagtactagtagtatcatatctgtattctggaataaaagatgagctagctaaggtctcgatcaatcaccatgcatccatggttgatcggcccggtcacgctagctagctttcttcttcttgtgtgttcgtctcgtacgttttgctccttttcgaggngtacgtgtaccagagagagctagagattctacatgcatgtactgcaactccttgtactacgtgcttgttttggattattacacatacatatagctctttttcgtac

SEQ ID NO: 399630 - DNA, 460 bp, Oryza sativa nipponbare
ccacgcgtccgcccacgcgtccggagccacccatcgtgcaccgcgacgtcaagaccaccaacatcctcctcgacgccgacttccacgtcaaggtcgctgactttggcctctcccgcctcttccccctcgacgtcacgcacgtctccaccgctccccagggcaccccaggatacgtggatccggagtatcaccaatgctaccagcttaccgacaagagcgatgtgtacagcttcggcgttgtcctggtggagctcatctcgtcgaagccggcggtggacatcacccggcagcggaacgagatcaacctggccggcatggccatcaacaggatccagaagagccagctcgaggagctcgtggacctcgagctcggctacgagtccgacccggcgacgaagaagatgatgaccatggtcgccgagcttgcttttccgggcctgcagcaaaacgggcagatgag

SEQ ID NO: 399631 - DNA, 377 bp, Oryza sativa nipponbare
ccacgcgtccgttctcctccccctcccggttcggttcggttcgggtccggttcgatttcgtttttttttcttcttcgtggggttggtgggaaagcatggcggcgccggatgttgagtaccgctgcttcgtcggcggcctcgcctgggccaccaacgaccgctccctcgaagccgccttctccaccttcggcgagatcctcgagtccaagatcatcaactatcgggagacgggtaggtccctcgacatcggtatccttagcttcttatgacgcacagggctggcctattcacagacaaactttgtgctggagaagtttcgactgtacttggagccagtgctgtttctgggttctttgcatcggcctgcagtctgcctt

SEQ ID NO: 399632 - DNA, 272 bp, Oryza sativa nipponbare
ccacgcgtccgcacgcgcacacgacacgacgcaccaatggcgctcgtctccgcctcctcctccaccaccgccgtcgcggcgctccccggcgccgccagggcctcctccttcctcggcggcgccggcaggagcggcaggctgctgctgaggcaggccgagtcgtcgtccgcgcgggcgtcgttcgccgtgcgcgccgcggcgcccgacaggccaatctggttccccggcagcaccccgccgccgtggctcgacggcagcctccctggcgactt

SEQ ID NO: 399633 - DNA, 346 bp, Oryza sativa nipponbare
ccacgcgtccggctacaaacgcccacatcacacgcagaaatccgcatcaacagccagccatggcgtccacgctgaccaacgtcggcctgtctacccgggcggcggcggcgtcgtccctcgttaggccggtcgccggagctggacgcgtggtgtttccccgtgttggccgcggcggcttcgcggcggtgagggcgagcgggccggcgaccccgccagacatctcggacaagatgtcggagagcatcgacaaggcgaatgatgcgtgcgcggatgacacggtcagcggccagtgcacagcagcgtgggacgaggaggaggatctgagctcggcagccagccacgctcg

SEQ ID NO: 399634 - DNA, 487 bp, Oryza sativa nipponbare
ccacgcgtccgggcgccgccaagcccgacgccaagttggctgtgaagagtaagggcgcggagaagcccgccgccaagggcaggaaggggaaggccggcaaggaccccaacaagcccaagagggctccctccgctttcttcgtttttatggaggagttccgtaaggagttcaaggagaagaaccccaagaataaatctgtcgctgctgtaggaaaagcagccggtgataggtggaaatccctgaccgaagcggacaaggctccctatgtagccaaggccaacaagctcaaggccgagtacaacaaggccattgctgcctacaacaagggcgagagcactgccaagaaggcacccgccaaggaggaagaggaggacgacgaggaggaatctgacaagtccaagtccgaggtcaatgatgaggatgacgacgagggcagcgaagaagatgaagacgatgacgagtgagcccttcagtggacaagatggag

SEQ ID NO: 399635 - DNA, 451 bp, Oryza sativa nipponbare
ccacgcgtccgagagcaccaccactcgatcgcagcgagacccaccctcaagctccaagctccaagaaccatggccgccacctcgctgtcgccgccgaccgtggccgggctgcggctggcgccgtcgccgcgcgtgcggtcgccgtctgtggcgttcagggcggcgccggcgaggaggaggtcggtggcggcgagggcggagctgagcccgtcgctggtgatcagcctgagcaccggcgtctccctgttcctggggcggttcgtgttcttcaacttccagcgggagaacgtggcgaagcaggtgccggagcagaacggcaagacgcacttcgacgccggcgacgagcgcgccaaggagttcgccggcctgctccggtccaacgaccccgtcggcttcaacctcggtcacgtcctcgcctggggctccctcgggcacatcgtcgcctactaca

SEQ ID NO: 399636 - DNA, 413 bp, Oryza sativa nipponbare
ccacgcgtccgggagctggaggtgatccactccaggtgggcgatgctcggcgcgctgggctgcgtgttcccggagctcctcgcccgcaacggcgtcaagttcggcgaggcggtgtggttcaaggcggggtcgcagatcttcagcgagggcgggctcgactacctcggcaacccgagcctgatccacgcgcagagcatcctcgccatctgggcggtccaggtggtgctcatgggcgccgtcgaggggtaccgcatcgccggcgggccgctcggcgaggtcgtcgacccgctctaccccggcggcagcttcgacccgctcggcctcgtcgacgacccggaggccttcgcggagctcaaggtgaaggagatcaagaacgggcgtcttgcccatgtcttcatgttcggcttttttgt

SEQ ID NO: 399637 - DNA, 375 bp, Oryza sativa nipponbare
ccacgcgtccgcccacgcgtccgcccacgcgtccgcggacgcgtggcggacgcgtgggtggtatgatcttcacattttacaaggcacaaggactctctgttggttcttccttggttgaggaagacaaacttgagcttgcaacatctctccttgcaaaggcaaaagaaaagggtgtctcccttctgttgccatctgacgttatcattgctgataagtttgctcctgatgctaacagccaggttgttccagcatctgctattcctgatggttggatgggtctggatattggtccagattcagtcgcgtcattcaactctaccctggaaacaacacagacagtcatttggaatggacctatgggtgtcttcgaatttg

SEQ ID NO: 399638 - DNA, 438 bp, Oryza sativa nipponbare
cacgacccacgcgtccgcccacgcgtccgcccacgcgtccgggagaagccggcggaggccgaggcggccgtggcgaccaaggagcccgccgccgccaagccgcctcccattggccccaagagaggcaccaaggtgaagatcctgaggagggagtcctactggtacaacggcactggctccgtcgtcaccgttgatcaggatcccaacactcgctacccggtggtggttcggttcgccaaggtgaactacgccggcgtgtcgaccaacaactacgccctggacgagatccaggaggtcaaatgattttaattcggatggatcgtcgtcgagctggagctgcaaagaatcatcttaaattgatcacggagtgaggagaggatgcatgtcgtacatgtggaagaaattaattaaactgcttgatcgagccttgtgtgtatt

SEQ ID NO: 399639 - DNA, 483 bp, Oryza sativa nipponbare
ccacgcgtccgcccacgcgtccgcccacgcgtccgcccacgcgtccggccgcactgcctctaatattttgggtagcacaggcaattacgagtgccatagtgaaggactttttaattttgaagggaccgtgcccgaactgtggcaatgaaaatctttccttctttgggactatactgtctgtgcctagcggtggtgcaagaaacagtgtgaaatgtgcaaattgtagcagttcattggtatacgattctgcatcccgattgattacactcccagaaacagctgaggcttgattgaagatcacttcggacaggagctgcacccaagcaattccttgtatctaccatggagagcaagatgaacttttcatcttgtgacaatcgtgttgtgaagcatccttttttatactccttagtctgcctctttaaatattgtatatatttgcatttattaaaagtttaagaaatagctatgactatatatact

SEQ ID NO: 399640 - DNA, 351 bp, Oryza sativa nipponbare
ccacgcgtccgtgaaagtgctagatctatcacacactgcaattacttccattccagaatgtgataaattggttgcattgcagcatctcgacctgtcatacacacatattatgagattacctgagcgcctatggttattgaaagagttgaggcatctggacctcagtgtgactgttgcacttgaagatactttgaataactgctcaaagttacacaagttgagagtgctgaatctcttccgcagccattacgggattcgtgatgttgatgacctgaatctggattcactgagggatctattggttcttggtatcactatttattcacaagatgtgcttaaagaaatgaacga

SEQ ID NO: 399641 - DNA, 458 bp, Oryza sativa nipponbare
ccacgcgtccgctttgccttcagagaaaccggaagcaatggcgtctgctactctcctcaagtcatctttccttcccaagaagtctgaatggggtgccacccgccaggctgccgcccccaagccggtgactgtctccatggttgtccgcgctggtgcctacgacgatgagcttgtcaagaccgcgaaaaccattgcatcaccaggaaggggtatccttgccatggatgagtcgaacgcgacctgcggtaagaggcttgcgtcaattggccttgagaacaccgaggccaaccgccaggcttaccggaccctccttgtcaccgcaccgggcttgggacagtacatctccggtgctatcctcttcgaggagactctgtaccagtcaactgtagatggcaagaagattgtcgacatcctcactgagcagaaaatcgttccaggtatcaaggtcgacaagggtc

SEQ ID NO: 399642 - DNA, 282 bp, Oryza sativa nipponbare
ccacgcgtccggaagaaatggccgctttatcttagcaccaaaaacacaatcctgaagaaatatgatggaaggttcaaggatattttccaggaggtctatgaagctgggtggaaatccaagtttgaggctgccggaatatggtatgagcatcgcttaatcgatgacatggttgctatatccactaagaagagaaggggcttatgtgtgctctgcgcaagattcacttgagatatgcacagtgatttcttatctcaagggtttgggtcattgggtttgatgaca

SEQ ID NO: 399643 - DNA, 437 bp, Oryza sativa nipponbare
ccacgcgtccgcccacgcgtccgaaagaagaggttggaaaccttggtggtgtagttagtgccaccgcccctgtctggagtggcatgtagttttcgcaaggctttgtttatgattttgtcgatggcgaggagatgaaggcatcgcaggtgtggcaacggggcagcaaggacatgacagccatgccccctccgcgccaacgaggcgccgccaagaagcccatgtggataatcgtgctgctgtcgctggtgtgcgtcgcgctcatcggggcctacgcgtaccctccgcgccgctactccgcgtgctacttcttcgcttcgagcgtctgcactcctttcaaggattggctccctactgtgacccgacgggagcgaacagacgaaaagatcgtctcgtctgttgttatgagggatctccttgcaatgcccatgcctgtctcg

SEQ ID NO: 399644 - DNA, 470 bp, Oryza sativa nipponbare
ccacgcgtccgcccacgcgtccgcccacgcgtccgtcaggatcggccacctcggccacctcaacgagctgcaattgatgggtgccctgagtggagtggagatggtgctcaaggacatcggctacccggtgaagctcggctccggcgtggcggcggcggcggcgtacctgtcgaattcgacgccgctcatcccgtccaggatctgaagcacaacgaacgaaggaaggaaagcaattctcagcagcgatggttctgcctgcagtttggcagaacggaacagcggcaaattaatcctattgcatataatttggtctctgtatgtaaagttaaatttttatacgctccatcgatcagctctatgctaaggagtaaggagtataattttgtgaaggtactgcagcttttacttaattaatcttgaacctcgatgtatacaacagtgaacaggtaaattaatcattattccctaat

SEQ ID NO: 399645 - DNA, 393 bp, Oryza sativa nipponbare
ccacgcgtccgggcctgtctaccccggcggcggcggcgtcgtccctcgttaggccggtcgccggagctggacgcgtggtgtttccccgtgttggccgcggcgggttcgcggcggtgagggcgagcgggccggcgacgccgccggacatctcggacaagatgtcggagagcatcgacaaggcgaaggaggcgtgcgcggaggacacggcgagcggcgagtgcgcggcggcgtgggacgaggtggaggagctgagcgcggcggcgagccacgcgcgcgacaagctcaaggagacctccgacccgctcgaggcctactgcaaggacaacccggagaccgacgagtgccgcacctacgacaactgattcttaccattatatgtttgctaatctctct

SEQ ID NO: 399646 - DNA, 384 bp, Oryza sativa nipponbare
gaccaaagcaaagccgaaaacccagctgttacagtaataagctcggcgagataccaaatcataaacttctaaaacaaactttgcaaaaacaaggacaattggccaagggagaaagaaaggttaacacaacctggggatggggcattaataaacccgtttccaaatccttggtcatgaaacaggggcgcttgaacatcttgttccggagcaccacggaggacttgttgagctgcgccaacgggatgccaaggagggggagcaacatgagagacatgttgaacatgttcgggggggcaaccatgcacaccttcatcttattcttcttcaaaccgacctcgtacgggatcagcgcgaacacgccctgatcacgaacgcctatggtga

SEQ ID NO: 399647 - DNA, 427 bp, Oryza sativa nipponbare
tggaaaaatcattaataatataaatatatcgaaaacagttggttaaacagagtagtcaagagtcgatcgatcgatgtacacggagacaaaatcaaagacctctctcatcacttggattaattaatactagtaatatttagagactcttgggcaagcatagaaataattagcaaatgaggatggtgatgcaggaggtgtagaggctaggcagcaagggaggggtggtggtggtcagagttggggatggtctccttgtggagatgaccgtctcccttggggacgatgagaccgaagcctccttccttcctcttgtacaggacgttcatctccccggtcttctcgtctctgaaggcgtagaagttgtggtccacattcactagctgctccatcgcctcctccaccgacagcggcggcatctcgaacacct

SEQ ID NO: 399648 - DNA, 424 bp, Oryza sativa nipponbare
ttttaaaaaggtaaactcttcataataatattattaagacattatagctgatgtcttttgatcacactgcgatcaaattatgcatcataggcagtacaactccgcgtcaggaaaaagtagaggagatatatttcttgttattacttaatacagcattcacatatatcgaaccatccggtacgtacgtagtagtactccacgcgttcacatcgatgatcggggacgatatcctcaggtagtacttatgcaaaagcgttggcgtaaactgacgaactgaacggacggacggtcggatttagggctcccataagtccaagttgccggagacgaagtcgtagtggccgccgacgagcttgagggtgccgttggcgatcccctccttgacgaacgggtaggtcttgaggttctccagggattggttcac

SEQ ID NO: 399649 - DNA, 369 bp, Oryza sativa nipponbare
  unsure (1)..(369): unsure at all n locations
tataattaattcacaacaccatatttcattgatcaggttcagaacctgcacagaaatacacactaccggtacagatctcaccctctctccaatactcgtacatccatccacgcggtccacacgaatacgtacatctatacggtacacgtacgtacatctactgcaccgngtacacacacgcacactctcctgcagagacgcgcatcgtcgtcaacctagctagcttagctgaaggcgatgcgtcgccatggcagcacggcggcggcggcgctcacttgccggggacgaagttggtggcgtaggcccaggcgttgttgttgacggggtcggcgaggtggtcggcgaggttctcgagggggcccttggccg

SEQ ID NO: 399650 - DNA, 414 bp, Oryza sativa nipponbare
  unsure (1)..(414): unsure at all n locations
aattgtagtactcttacaataaaaccggccggagagggagggaagagattattacatatgtgttaagagcagaggccattgagatggtacataaccaaactgtaaaataaaaatatatagcatattatatattgatatatcatcaacatagcccaaaacaaagctgcatactattattataggcagcaatccaccagcgcgatgcttgatcttagcttagttgccaccagactcctcgcaacctgngggcttgtaggcgatgaagctaatcaactgcacctgcctgacgttgtcgaagccgatgatacggacaaaggcatcggggtaggccttcttggcctcctcgagctccttgagcacctgggtggcatcggtgcagccgaacatgggcagcttccacatggtccaatacct

SEQ ID NO: 399651 - DNA, 444 bp, Oryza sativa nipponbare
ttaaaaaaaaatgtgacctcagaactttatttattattcgcacacgtactgcgcacaaactaataaaaccacactttacaacaccactagctaggttttagacacaaacaagcataagcgatggtttaacaagagcgagcaacgcgtctgatacaatgaacacttatacaaaatctggtgtgtgctctgccatttgagctaaatttgaaccgggattttgtatttgaacatatgaaaacgtttactctgctttccaagacgacaatggaggggtctcagaatccttccaagtgccggccgtctgagcatagcggtcaccttgaacaacatctgtgctggcataggactcaagttcagtcatttccccaggggtgagcttcacagatagagctgctacattttgattgaaattctcgatttttgttgtcccaggtatggggcata

SEQ ID NO: 399652 - DNA, 438 bp, Oryza sativa nipponbare
taggattcacatccatctcgtaccctttgtataaatatatatagccggagcttccatatatttcattcacatatgcctcacccaacaacatatagtcgtagcagataccactcttacatcaagtcagagagagatcaggtgaaacaaaaacaaaagcagagcacggccggtaaaatcaaaagacgatgaacaaactgggaacacacgaaacaaggtgggagacatcatcgaatcagagatgaacaattaaacaaggctatatatgacgatgacggcttagttgccaccagactcctcgcagcccgggggcttgtaggcgatgaagctgatgagctgcacctgcctgacgttgtcgaagccgatgatacggacgaatgcatcagggtacgccttcttggcctcctcgagctccttgagcacctgggtggcgtcagtgca

SEQ ID NO: 399653 - DNA, 418 bp, Oryza sativa nipponbare
ttaaaaaggtaaactcttcataataatattattaagacattatagctgatgtcttttgatcacactgcgatcaaattatgcatcataggcagtacaactccgcgtcaggaaaaagtagaggagatatatttcttgttattacttaatacagcattcacatatatcgaaccatccggtacgtacgtagtagtactccacgcgttcacatcgatgatcggggacgatatcctcaggtagtacttatgcaaaagcgttggcgtaaactgacgaactgaacggacggacggtcggatttagggctcccataagtccaagttgccggagacgaagtcgtagtggccgccgacaagcttgagggtgccgttggcgatcccctccttgactaacgggtaggtcttgaggttctccagggattggt

SEQ ID NO: 399654 - DNA, 449 bp, Oryza sativa nipponbare
aacctgatgtaaaatgggttgttgttctcttcattgaattaatagatgctgaatgttttgttggattatatcttacagacaagagacttctgatttattttggtttttcctagtcagaacacttgcatttaaagatggtatgataggttcagacgttcagtacttcagttttgattcaaaaccacaagactgagactgaataccacaaaatcactgaaaatcaaagttttgttttctcttgagttgctgcataactgaactcatgtttctactctgtcaactgaacagccaggatggatggtatcttttccctcagtttttgtgttacagctacacgtactgtcattacacccgctgcaggtccagttaaccgaactttgacgacggattcatcaatctgaacaagatcaaggcttccaccttcggtgccggaaaggtatggtctgatc

SEQ ID NO: 399655 - DNA, 266 bp, Oryza sativa nipponbare
ttcaagcttaatatcccaatatgtattggaacttatcagcagagtatatttacacttacatacaagtactcagcttacattgcataaagagcagctatagtggaagtaaaaactatatacagacaaattaccctcggcgcttgctgaggcgccatgagtttggctcgttgtatctgtcatacagaggctcaatcctttcttggcgcttccgcttactgatcttcgttgggtctgcagatctgtagaacctcggtgcggacgcgtgg

SEQ ID NO: 399656 - DNA, 428 bp, Oryza sativa nipponbare
ttttgtataaatatatatagccggagcttccatatatttcattcacatatgcctcacccaacaacatatagtcgtagcagataccactcttacatcaagtcagagagagatcaggtgaaacaaaaacaaaagcagagcacggccggtaaaatcaaaagacgatgaacaaactgggaacacacgaaacaaggtgggagacatcatcgaatcagagatgaacaattaaacaaggctatatatgacgatgacggcttagttgccaccagactcctcgcagcccgggggcttgtaggcgatgaagctgatgagctgcacctgcctgacgttgtcgaagccgatgatacggacgaatgcatcagggtacgccttcttggcctcctcgagctccttgagcacctgggtggcgtcagtgcacccgaacatgggca

SEQ ID NO: 399657 - DNA, 405 bp, Oryza sativa nipponbare
ggagacgcaagagtagaactaggatatatagcttattaattaactgttctttcaaatacatggagtacgtattttgcaggagtatatatgacacaagaatgcatgcctatattacaccaaaatgggatatggatatgattaagcaggtgcagcaaaacgtacattaattaaacaacaacaattaaccctcgggcacgcctgtgttttgttatctcgctcaacatatacgtacgtaatactttgcttgcatagcatagggacgacgacattatattcttaattgataaactcaagaacgcatggagatggatcgagagatttataaatatggagcttgcttgattgattagatgagggcgtcctccttgtgggtctcgatgacgacatccgacttggggtaggcgt

SEQ ID NO: 399658 - DNA, 453 bp, Oryza sativa nipponbare
cggatgccggacgcgctcgtcctttttttttttttgaagaagaatattgtgcgacacgggataaataaataccagctcgatgatacaaatagtttaagcataaccatagaagtaacacagcagtgttaaaaaagagccaacaaattcatggcagcaacatgtaacaccacacatcaaaagttttcaacccatcaggcacgcaggaaacgtccacattccacagacaagctaacactagcatgcattggcctaattcagactcttatgaagagactcaggctgaagcatgatagactcatgatcctctctactcgatcagatcgtcatcgtcatctgggagaggttgtgctgctgcagccgcaagctcagcctcatgctgttgctgcattgccaggtcaatgggaacttccggaggtttaagagcaacagcttcaacgaaatgcaggttcgggt

SEQ ID NO: 399659 - DNA, 416 bp, Oryza sativa nipponbare
gctggaaaatttgatgatttatttcccacttatatcatcatatacaaatactaacacatgcgaaaattatcaagcagaaaagttccatacaaattcatccagacaaacaagtgtaaaaaaccttttttttcccatttcccccttgaactatccgtaaataccaccattccaccaaactcccctctgtcttctacgacaaataatcttttcaacccagtaacttataattaattacagagagattagcaaacatataatggtaagaatcagttgtcgtaggtgcggcactcgtcggtctccgggttgtccttgcagtaggcctcgagcgggtcggaggtctccttgagcttgtcgcgcgcgtggctcgccgccgcgctcagctcctccaccttgtcccacgccggcgggcactcgcc

SEQ ID NO: 399660 - DNA, 445 bp, Oryza sativa nipponbare
taaaccagttctagcaatcagatatgcagatcacaggactgtcaaaacttttcgcatataggaaaccacagttatagtctattttaggaagagtagcagcatttgcggccaaagatagccgtcgactaactatgacatggtttacgcagtctcggtcatggggtagtcgaacacgacgtccttcccacagagcctcctgtagacagagctgaaagtgtcgagcttgtactcggtgttgttgcgctcctttgggtccaggaagatcttcatgatttttctaccatccaagtggtatctgacacgcttcccaacaatctctgctggatacacaacatcctccaagatgccatcatgaacagcagtaagtgtgcgggtacgagggcgaacaacagctgagcctttctttgggggcctcactattcttctagttgcaaccagaaccaca

SEQ ID NO: 399661 - DNA, 443 bp, Oryza sativa nipponbare
ttaatcaatagtatgatcatagatatgcatcatagcgtgacatgcgatcgacttttacatgggtaaaaggggaggaaaaaaaaaaagaagaaaaacaaatcaacctcagattacaattgcatcccgtgatgctgtcgctagtgtacacttaaaattacacagaatgacgtcgcctatcattctctccttccattagcctttcctctccagaacccaattcaatctgcaacgaagctcagggagatggtgaaccaaccatgcagggacgcacgcctaaacaaactgtgcatatacatccactgactagttctggccatcatcatcttcatcttcatcttcatctcgccaagaaatacgacaagaattgaaaagaggctattggcaatgcagctactatgatccactctcactttggttactgaatggcaacctgtctactcccc

SEQ ID NO: 399662 - DNA, 418 bp, Oryza sativa nipponbare
tgcttagtggcaaaacagaaatgcgaatttacctttatatgcaactgtttacaccaaaaggggaaaaaaacgggtaccttgcaaaaaggagtataactttgcagtttcaagtcccacttcaactacaacccaatctgcattacaggatgggagtctaaaacgactgcagtttcagcgtttttgaggcctgcagagacactgggctcgcgttgcagcaaaagattaggcggcggcgcccacggtggcgccggcggtgagcctcgacgagccgtagagagtctcctcgaaccggatgatctcgttcttggaaccgtaggccacttgagtccgctcgtcgaggttgttgatcaccttgtccagcaccgactgtttgccgtcgctgctgtacccgccggctttctctatcaagaaacccaac

SEQ ID NO: 399663 - DNA, 429 bp, Oryza sativa nipponbare
ttcaagtatcaagtgtagtatatcatcatcatgcaagtacagtgttacatagattaatcacaatgcagtttgattaagcagtgggcatcatcacatcgcattcagaggaaggctatcttagattacagatgaatatgcagacacccagcttggtgttacatacatagactggatttgggtgaaatttagccggcgagggcgctggtgttgtagacgaggagggcgccgccgccgaggagcccggcgagggtcacggcccagatcagaagcccggtggttccaccaacgtaggtgtcaccggtgggagaccattcctccggcgagtagattgggctgtagccgtcgacgtttgcgccgtacttgtcaacgaattggtacacacccttccccgtgctcttcctgccagatgcatcaatatcgactgacatg

SEQ ID NO: 399664 - DNA, 441 bp, Oryza sativa nipponbare
tttaatctccaaattcaagtatcaagtgtagtatatcatcatcatgcaagtacagtgttacatagattaatcacaatgcagtttgattaagcagtgggcatcatcacatcgcattcagaggaaggctatcttagattacagatgaatatgcagacacccagcttggtgttacatacatagactggatttgggtgaaatttagccggcgagggcgctggtgttgtagacgaggagggcgccgccgccgaggagcccggcgagggtcacggcccagatcagaagcccggtggttccaccaacgtaggtgtcaccggtgggagaccattcctccggcgagtagattgggctgtagccgtcgacgtttgcgccgtacttgtcaacgaattggtacacacccttccccgtgctcttcctgccagatgcatcaatatcgactgacat

SEQ ID NO: 399665 - DNA, 439 bp, Oryza sativa nipponbare
taaataattaatttactgtatataaattattgataaaaggtgtgcttacaataatgatgaagtatcaggagaaacgtgtcttcaggttacagattattacatgatggtggtacacgaattgtgcggtgatagaaatcatatatgtcctctttccaaaatagactcgatcgatcggtattgctagagtatgagtagcaattattatccgatagagtgaggctgaggccttccgtgactgaagcagattgcaacgctgatcgatctccttacatgctcggcttcgcgctgagacggctcgccagtttctgacccagagacctgtcagcctgagaccagtaggagagccagatgctcctgatctcgtgggtgaggcgagggtcaaagagtgcgtcgatccatctcttgatgaaccggtcttgccttgccggatcccatgaac

SEQ ID NO: 399666 - DNA, 409 bp, Oryza sativa nipponbare
gaatcatacgtaagtgcttgctgatacaatatcaacatggagggtacattgccggttccatatgaacaaacataaaaacaccgaaaccccatatggccattatgccgatcctagcctagcttggcgaggacatcgccaagagcagatttggtcaacgtgtagtacttctccgcctcttcggggctcttgatcttggctgcatggtcaagcccgtcaatggtggcgaagagcttgccggtgaggtccttgaggcccttcttctcgtccttgggcttggagttgatgacggttttgaggtcgtagcgcaagtaggaggccctgaggcggaggtcgtccctgacgaacggccactgcttcttttcgatgagcggcttgaggttgatgatgtcctgggccgactccttcgccc

SEQ ID NO: 399667 - DNA, 454 bp, Oryza sativa nipponbare
taggcaaaccacacgaatacacgattgagtaatttcactgagaatagcacgggtacatcacatcacacaaattcatacgttgatacacgcatagtcgccgaagcgaccagctgcttaattaatcgataacacacgggtttaattcagcaataatcagcacacacacaaaccacactcatatgggtggtttttattgtggactaattaaggtaggtgactcgccggcggcgagtgttcggttgcttcgtgacttcacttgccgcacttgcagtcggtgcaggagcagctggtgccgcacttgcagccgccgttctcctcgccggcggcgacctcctcgaagtggctcttctcggcttcaactatgacgacgccatagctggtacctttcttcacgcactggctcttgtcagcacagtcgcagttgccgcacttgtccgacatggtccaagattta

SEQ ID NO: 399668 - DNA, 446 bp, Oryza sativa nipponbare
atcataaacagagaaagatattaacagaaagaacaaagttactgcacttttgcgcagtctaatttacaacagagagaaatatatacatgtgaaaattcttttctattttggcatccaaataaacaacggattttgcgctattttcagctggtaagggatggcttgaagtacatgcacattggtgggtcaatcctcatgatggacaatatcgcagatggaacactccagatcccatcaccgcagatcaaaccagatgcaatcgcgcctgcaaagtcctcagattccttgcggttcaccctctcccagacaaacaggataaccgtcccaacgaacatgtcgatcgcaaagtacgccccaatgtagaatgggacagccatagccatcgggagcgggatgaacttggagacgctcttcggagtgacgtcccgcaggaggttgatcaaaat

SEQ ID NO: 399669 - DNA, 413 bp, Oryza sativa nipponbare
ggggaactaacaatcagcatgcaaatatttcaagcctgatttgacaaagcagtcaacctttcgttaatatttcctatcctattatacaaaaacaaaattgtctcaaacgtgactaccttttgtatagggcactaacactggccatgtgaatactattcttcaactgttgtgaaaaagaacttgaataattggcaagtatctatctacataaactgttatagatgttcacaaatgaaacagcatgttggtccagcacgttgcttagttcgtggctactgtcttcccttcacaaacatcacatacaattgaaccaaggccttcacagtatggacacttcgtatcttcaccgacccactccaaaaactgtggttcaatgttcggctcacctgttccatcacattctacgcacatga

SEQ ID NO: 399670 - DNA, 437 bp, Oryza sativa nipponbare
tgtatatagccggagctttggggtcacatatcctcacccaacgataattgtagtactcttacaataaaaccggccggagagggagggaagagattattacatatgtgttaagagcagaggccattgagatggtacataaccaaactgtaaaataaaaatatatagcatattatatattgatatatcatcaacatagcccaaaacaaagctgcatactattattataggcagcaatccaccagcgcgatgcttgatcttagcttagttgccaccagactcctcgcaacctgggggcttgtaggcgatgaagctaatcaactgcacctgcctgacgttgtcgaagccgatgatacggacaaaggcatcggggtaggccttcttggcctcctcgagctccttgagcacctgggtggcatcggtgcagccgaacatgggca

SEQ ID NO: 399671 - DNA, 433 bp, Oryza sativa nipponbare
ttttaaaggaaggacctatttgttatagtagaaagcaaccgtatttctttctacattgaaatatagaagatgtacattgaaatgtgtcaagaagagatgtaggagcaccctcatggagagggatttttagaagttccattgcatggtttcacaagttatgcaatgaccatcctactttcttctagctgtaatatttccaaaactagttacaagaaatgcgaggatgcccattgtcattgatatggtatggtgatgaagagattcacgaaatatgaatgtggagctcattaaacttttgccgcttcagtaggtgcaccggccctctcagcaataatctgctcatagagatctctaatcttcagtcctacgatagtttggaagagacctgttccattgttgctgccggggaagtctgcatgctttagcatttgct

SEQ ID NO: 399672 - DNA, 423 bp, Oryza sativa nipponbare
ttttttttttttttttttttgggggagaaaactacttgacagtacactttattcactatagctgtatgcacatgcgactcgcatgcccccactggacgggtataaatgtaagaactaatgtgtccagaaccaaaaatacgattacataggacacgaatcctgtacaggaatggagaagtttaaaagtgtgtcttcactgcctctgcaaatagcaacctagcgtcagcaaaccaatttacaggggggtggttaactagggcgtgcaagtgcaagggcgcaaagaagaatcctccacgatcatgtgaaacttcgtttcaaaagatgccttgggcagagcttccacaaaatcgcagtctttgggggcacttcggtgcttcacaagtatgccagttgttattttgttttccttgatgcggtcccagg

SEQ ID NO: 399673 - DNA, 413 bp, Oryza sativa nipponbare
  unsure (1)..(413): unsure at all n locations
ttttataattaattcacaacaggatatttcattgatcaggttcagaacctgcacagaaatacacactaccggtacagatctcaccctctctccaatactcgtacatccatccacgcggtccacacgaatacgtacatctatacggtacacgtacgtacatctactgcaccgngtacacacacgcacactctcctgcagagacgcgcatcgtcgtcaacctagctagcttagctgaaggcgatgcgtcgccatggcagcacggcggcggcggcgctcacttgccggggacgaagttggtggcgtaggcccaggcgttgttgttgacggggtcggcgaggtggtcggcgaggttctcgagggggcccttgccggtgacgatggcctggacgaagaagccgaacatggagaacatg

SEQ ID NO: 399674 - DNA, 401 bp, Oryza sativa nipponbare
aaaaggtagtaaaaagggaaactgttcataataatattattaagacattatagctgatgtcttttgatcacactgcgatcaaattatgcatcataggcagtacaactccgcgtcaggaaaaagtagaggagatatatttcttgttattacttaatacagcattcacatatatcgaaccatccggtacgtacgtagtagtactccacgcgttcacatcgatgatcggggacgatatcctcaggtagtacttatgcaaaagcgttggcgtaaactgacgaactgaacggacggacggtcggatttagggctcccataagtccaagttgccggagacgaagtcgtagtggccgccgacgagcttgagggtgccgttggcgatcccctccttgacgaacgggtag

SEQ ID NO: 399675 - DNA, 429 bp, Oryza sativa nipponbare
  unsure (1)..(429): unsure at all n locations
aaacaagctaattttataattgattcacaacaccatatttcattgatcaggttcagaacctgcacagaaatacacactaccggtacagatctcaccctctctccaatactcgtacatccatccacgcggtccacacgaatacgtacatctatacggtacacgtacgtacatctactgcaccgngtacacacacgcacactctcctgcagagacgcgcatcgtcgtcaacctagctagcttagctgaaggcgatgcgtcgccatggcagcacggcggcggcggcgctcacttgccggggacgaagttggtggcgtaggcccaggcgttgttgttgacggggtcggcgaggtggtcggcgaggttctcgagggggcccttgccggtgacgatggcctggacgaagaagccgaacatggagaacatggcgag

SEQ ID NO: 399676 - DNA, 446 bp, Oryza sativa nipponbare
tgagaggctgaaactatataggagaacggggcaactattggacggcagtatatacggtattacacatgaacattacacagcattgcgatttacaattgccggaagtggataataatccgtgccggacagtgaaaagtcacatgacgtggcgaagaaaagctaagaaagaaacaagaaactgtgtcgggcgctggaaacttcgaaattctcattacaaaggatcgagaggaagaaggaagaagtgtggggaaaatttttggagcgaggtggagttacaaaggcaggagcagcagcagcttctacattatcacttccactgggtggcgactatgtcaccgaggtcgacgaccctctgcgagtatccccagtcgttggtggaccaggcgatgaccttcaccatgtggtcgcccatgaccatgctgagcgacacggttatggtgcacgac

SEQ ID NO: 399677 - DNA, 430 bp, Oryza sativa nipponbare
tactactattacatagggttgggacaacaacagatatcagtaataatcataggatctaaataaataagaacaagcaatggagttgggaatcactcatcttcgtcgggcctgctcgcgaggcacagctcatggagctcattgagaatccactcctccccagtgtggccacccaggacaagaaccctggtgccgccaaccacgcatgtgctatgaccccaggcgaacttgggtggctggccagggacgttcaaaatcctccatgtcggcttctcctccgctgggtcgaggaggaacagctgtgagggcgagtgcagcccagcgatggagccaccgaatatgattatccgtccacaggggaggctgaccgcgacatgatcgagcctcggaggtggaccggacgcgtgggcggacgcgtgggcggacgcgtggg

SEQ ID NO: 399678 - DNA, 431 bp, Oryza sativa nipponbare
gggaaacgaataaaatcattggggcaaaaacatcatcttcttcttcatcttcttagtgtacacaacaccaactcgatcatcatctcgtcgcactaaacccatcttccccaacccaaagacaacgaactcgctggccacaaatccatccaaccacaattaaccactgctaagctacggtcccccacttcacttgccggggacgaagttggtggcgtacgcccaggcgttgttgttgacggggtcggcgaggtggtcggcgaggttctcgagggggcccttgccggtgacgatggcctggacgaagaagccgaacatggagaacatggcgaggcggccgttcttgatctccttcaccttgagctccgcgaacgcctcggggtcatcggcgaggccgagcgggtcgaaggcgccgccggggtagagcgggtcga

SEQ ID NO: 399679 - DNA, 435 bp, Oryza sativa nipponbare
tgaaatatacttactaatcctggggccttaattatatatattacatatggcacatacactgacaagaaaaacaaaaaaaaatatctctttgattaattcacatatatggatcacgcacacaacccaacctaaaagcggacacgaacacaacaagattcatctggatactgctcatacaacctcaaattgttggatacgagcccatgcacgcgcacgatcgatgcaacagttagcgatcaaacacgaaacgcgcatgcaagcgaaacccaactctgtgtgtcagatccatggctagcgagagcggggttgattgctcataggccgagggcgccgagcggggtcttgccctggtcgggctggaagtagaagatgagcatggccagcatggcgaggcggacgtgcttgatcatggcgagcttgagccggttgagcttg

SEQ ID NO: 399680 - DNA, 359 bp, Oryza sativa nipponbare
gggaaaggaaagacctctctcatcacttggattaattaatactagtaatatttagagactcttgggcaagcatagaaataattagcaaatgaggatggtgatgcaggaggtgtaaaggctaggcagcaagggaggggtggtggtggtcaaagttggggatggtctccttgtggagatgaccgtctcccttggggacgatgagaccgaagcctccttccttccttttgaacaggacgttcatctccccggacttatcgtctctgaaggcgtaaaagttgtggtccacattgactagctggtccatcgccttctccaccgacagggggggcatctcgaacaccttggtgagcaccaccttg

SEQ ID NO: 399681 - DNA, 442 bp, Oryza sativa nipponbare
tgcaaaccccaacttttttcaggttctgaattctggatggatcatatcagattcatcacagcatcgtacaatctgtgcaagcattggtacatcgagcgatggagagagagagtagtctacaatggcggctgggccattcacgagcccggcgtgaacttggtggcgtagacccaggcgttgttggcgacggggtcggcgaggtggtcgagcaggttctccaaggggcccttgccggtgacgatggcctggacgaagaagccgaacatggagaacatggcgaggcggccattcttgatctccttgaccttgagctcggcgaaggtgacggggtcgtcggcgaggcctagcgggtcgaagtactggccgccggggtagaggtcgttgccgtcgccgacgccggggaggccgttgatgcggtagccctcgacgaggcccatgagga

SEQ ID NO: 399682 - DNA, 431 bp, Oryza sativa nipponbare
gtattcaagaggaaatacattgggatatgccaacaattccctacatattacacactgagcctaactttcttttcatcatgaaaagatctccccaagtccgcctaagttaaccttgcaatgggaacatgaatccccaagaggagaaccaaaatgcatgaaaagagatacaattctgatcacaatttgattccagccaagtcaaaaagcttttcagcctggtcagggaacaatgtgatgaaaaggtaggcacttatcaacacagttccaagaacagcggaaatcttcccttgcaccgtcacaagtcctgctttccctgcgttttgcagctcacttttgccaacagattcaaatgttcctggcttcagtgtctgaagccctgatttgatgcatgccagattttggaagccttctctctccaatacatcagcagc

SEQ ID NO: 399683 - DNA, 458 bp, Oryza sativa nipponbare
ttttacgggtgtaataacatacatgtagctcgcatgttttaagactcacaaaattacagtcgtactagtggtataataacaaggaattgaagctagctagtatattatatatatatatatatatgtgtgtgtgtgtgtgtgtgtgtgtgtgtgaaattagatatcaaaagtctggctgacagcttgttgcccgctccgctagaacagcaagcatatgcacctcgatctagacttcatgtagtggagtatgatcttgaaccgacagatataatatgatggaccgagctccagttcttagagctttgacgatggcaggccgagttgtttggcattaacaatgctggggcaagcagctggcggcgttgcatcctccttgagaaatggctccactagattcgggttcccccaaaccggataacccttgatcttgccaagaacgtttagagcagcaaggggtg

SEQ ID NO: 399684 - DNA, 446 bp, Oryza sativa nipponbare
ttcagccacaaatccaaacactgggtccttcctatcagaagatcagaatgaacaggttttcaaattcatctcccaactcgacgataatttacacgtacatttaacacattcttccacccttctcaaactcctcccttcttcttcccgggtaagattaaaattaacttgaggccagccagcgtcgccggcggcgagatgtttacaggctgggcgtcctctcggcggcgccggagatgacggtgagcaggttgttgccgaaggggtcgctgaggtgcttggagaggttctcgacggggccctcgccggtgacgtaggcctggatgaagaaccccagcatggagaacatggccagccgcccgttcttgatctccttcaccttcagcagcgccgcctggtccgggtcgctcgccagccccagcgggtcgaatgggccacctgggtggagc

SEQ ID NO: 399685 - DNA, 433 bp, Oryza sativa nipponbare
ttagtaaaaaggtaaactcttgataatagtattattaagacattatagctgatgtcttttgatcacactgcgatcaaattatgcatcataggcagtacaactccgcgtcaggaaaaagtagaggagatatatttcttgttattacttaatacagcattcacatatatcgaaccatccggtacgtacgtagtagtactccacgcgttcacatcgatgatcggggacgatatcctcaggtagtacttatgcaaaagcgttggcgtaaactgacgaactgaacggacggacggtcggatttagggctcccataagtccaagttgccggagacgaagtggaaggagtctggtgctccatccttgagtgagaggagggccttgattccaccgcagcggctgtggccaatcaccacgatgagttcgaccttgagggcgc

SEQ ID NO: 399686 - DNA, 398 bp, Oryza sativa nipponbare
ggaaaaaaaagtttccacaaagttcctgctggaaaatttgatgatttatttcccacttatatcatcatatacaaatactaacacatgcgaaaattatcaagcagaaaagttccatacaaattcatccagacaaacaagtgtaaaaaacctttttttttcccatttcccccttgaactatccgtaaataccaccattccaccaaactcccctgtgtcttctacgacaaataatcttttcaacccagtaacttataattaattacagagagattagcaaacatataatggtaagaatcagttgtcgtaggtgcggcactcgtcggtctccgggttgtccttgcagtaggcctcgagcgggtcggaggtcttcttgagcttgtcgcgcgcgtggctcgccg

SEQ ID NO: 399687 - DNA, 421 bp, Oryza sativa nipponbare
  unsure (1)..(421): unsure at all n locations
agttaaaattaagaggcattagggaatgatgattaatttaactgttcactggtgtatacatcgaggttcaagattaattaagtaaaagctgcagtaccttcacaaaattatactccttactccttagcatagagctgatcgatggagcgtataaaaatttaactttacatacagagaccaaattatatgcaataggattaatttgccgctgttccgttctgccaaactgcaggcagaaccatcgctgctgagaattgctttccttccttcgttcgttgagcttcagatcctggacgggatgagcggcgtcgaattcgacaggtacgccgtcgncgccggcacgccggagccgagcttcaccgggtagccgatgtccttgagcaccatctccactccactcagggcacccatcaattgcagc

SEQ ID NO: 399688 - DNA, 429 bp, Oryza sativa nipponbare
gatgatgacagacagaaattaattaagctagaaatctcctcgatcgatcacacacacacacacaattaaggtacatacatacatgcactgctgcaactgcaactgcagggtcggtgcgtggctactacaagtgtacacatggtacgttggttggcaccatctcgatcgtgtcgttgtgctcacttgccggggacgaagttggtggcgtatgcccaggcgttgttggcgacggggtcggcgacgtggtcgaagaggttctcgatggggcccttgccggtgacgatggcctggacgaagaagccgaacatggagaacatggcgaggcggccgttcttgagctccttcaccttgagctcggcgaaggtgtcagggtcgtcggcgaggccgagcgggtcgaaggcgccgcctgggtacaccttgtcgaggccc

SEQ ID NO: 399689 - DNA, 444 bp, Oryza sativa nipponbare
ttttagaaacaaaagctaaaaattaaaaccatcaacagcccgatcgagtttgcattactagatacacacattgcagccttccttccctctctccatgtatcgatatatcaacccggccacgcacaaaacatttgttcattccctactcgagctgcgcgtaccacaccccttggatcttgacatccttgggcaccttggcgccgaggtctgtgtccgacggctgcacgctctcgaagacgccaatcacctcgccggtctctggcttgctcttggtgacgctcaacgtgatgttgcccgtcgacgacgaggcgttcttgacgttctccttagcgagctcctcctcgtctcctctgcctccggcggggagcgccacagcgttgtcgtagccggtagagccaccgcggccctttgggtcgaggaaggacgaaccacggtagctgggca

SEQ ID NO: 399690 - DNA, 408 bp, Oryza sativa nipponbare
tttttcacccaacgataattgtagtactcttacaataaaaccggccggagagggagggaagagattattacatatgtgttaagagcagaggccattgagatggtacataaccaaactgtaaaataaaaatatatagcatattatatattgatatatcatcaacatagcccaaaacaaagctgcatactattattataggcagcaatccaccagcgcgatgcttgatcttagcttagttgccaccagactcctcgcaacctgggggcttgtaggcgatgaagctaatcaactgcacctgcctgacgttgtcgaagccgatgatacggacaaaggcatcggggtaggccttcttggcctcctcgagctccttgagcacctgggtggcatcggtgcagccgaacatgggca

SEQ ID NO: 399691 - DNA, 420 bp, Oryza sativa nipponbare
aaatatatatagccggagcttgcatatatttcattcacatatgcctcacccaacaacatatagtcgtagcagataccactcttacatcaagtcagagagagatcaggtgaaacaaaaacaaaagcagagcacggccggtaaaatcaaaagacgatgaacaaactgggaacacacgaaacaaggtgggagacatcatcgaatcagagatgaacaattaaacaaggctatatatgacgatgacggcttagttgccaccagactcctcgcagcccgggggcttgtaggcgatgaagctgatgagctgcacctgcctgacgttgtcgaagccgatgatacggacgaatgcatcagggtacgccttcttggcctcctcgagctccttgagcacctgggtggcgtcagtgcacccgaacatgggca

SEQ ID NO: 399692 - DNA, 391 bp, Oryza sativa nipponbare
tgatgaaaaccacttcgagacggtttactcaggtagcaaatatttctcagccacaaatccaaacacttggtccttcctatcagaagatcagaatgaacaggttttcaaattcatttcccaactcgacgataatttacacgtacatttaacacattcttccacccttctcaaactcctaccttcttcttcccgggtaagattaaaattaacttgaggccagccagcgtcgccggcggcgagatgtttacaggctgggcgtcctctcggcggcgccggagatgacggtgagcaagttgttgccgaaggggtcgctgaggtgcttggagaggttctcgacggggccctcgccggtgacgtaggcctggatgaagaaccccagcatggagaacat

SEQ ID NO: 399693 - DNA, 292 bp, Oryza sativa nipponbare
tttttacatccatttggttctggtgaacaaaggaaacacgagacgagctttctttttgcgatcaaaaacacagatgggcaaccacacagtaacacaaactagatagtcgttccacacaaaactaacgatgataacgatcggatgatgatgatgtgagctccattagatagatagataactgggccatgagggccccaccgataaaatcttccagttcccgaaggagttgcaatctactaagctgccggaaacaccgtcgtatcacgagtcgcctgcacggtctccaactgag

SEQ ID NO: 399694 - DNA, 355 bp, Oryza sativa nipponbare
ggagccgtcaacaacaactcaagattgaatcatacgtaagtgcttgctgatacaatatcaacatggagggtacattgccggttccatatgaacaaacataaaaacaccgaaaccccatatggccattatgccgatcctagcctagcttggcgaggacatcgccaagagcagatttggtcaacgtgtagtacttctccgcctcttcggggctcttgatcttggctgcatggccaagcccgtcaatggtggcgaaaagcttgcccgtgaggtccttgaggcccttcttctcgtacttgggcttggagttgatgacgggtttgaggtcgtaacgcaggtaggaggccctgagggggag

SEQ ID NO: 399695 - DNA, 437 bp, Oryza sativa nipponbare
ttctaaaagagtatcaacttgtttttgacatcggttacatcatagtacaggtacacaatcaacaaggcatgcagtgctccatccacaattacatcccaatacaccaccaccattcacagcctactccgatcccaaaaaagagaggtaagtcgcgtcgacgaacagtcttttcatcttcctccattggcagccattgctaacactccaacacctgaagaactcctcatttgggggtgaaggcctggaagatggtggcgtggccggggtcggcgagatgggcgaagaggttgtcgatggggccggtgccggtgtactctgcctggaaccaagctcccatgacggcgagcatggcgagccgcccgttcttgatctccttggtgcgcagctccttgatcttctccggcgagccggtgccccagccgagcgggtcaaaccac

SEQ ID NO: 399696 - DNA, 423 bp, Oryza sativa nipponbare
aatctaacatacgcaaactgatattatcacaatgttagccgatgacaatggaaagagtaatctaggtacaagcggatcattgacggtggagacaagacattggctgcaccacaacacccaccagtggcgccaacaaggagcgctatccgttataggacgagagaaaaagtaaaacatcacgatgtgaagtgaaactgaataattctagtagacgatgatgatgatggataggctccttaggacgcccgccgcccttagcgtcttgctgctcccatcttgtccactggaaggctcactcgtcatcgtcttcatcctcttcgctgccctcgtcgtcatcctcatcattgacctcggacttggacttgtcagattcctcctcgtcgtcctcctcttcctccttggcgggtgccttcttggcagtgc

SEQ ID NO: 399697 - DNA, 150 bp, Oryza sativa nipponbare
gatgaagagaacttcacttctaaaagagtatcaacttgttttttacatcggttacatcatagtacaggtacacaatcaacaaggcatgcagtgctccatccacaattacatcccaatacaccaccaccattcacagcctactccgatccc

SEQ ID NO: 399698 - DNA, 429 bp, Oryza sativa nipponbare
gtataaaatatggtcccatttaattcaatggcgcaagcaggaagtatcccccctcatggctgagtcccagccaacaaaaataaagtatgtccaccccaaaaaaatcgccccagttacaacaaatgattcgattattgtaaaagacacaatagtaccaccacggcaacatttaagctaggataacttggtttaaacttttgtctaccaaaaccaactaccgatagtgtaagcagctggaacgttattatctccactcgagcaaatgataactccgcatattaacctccaactgaagaccttatattccaatctgcttctcgaacttctggatttgattcaagaatatccatgtcatcatcacatggggagcaatcctgacacagtacacagggaagccagtgtagaacttgaatgggccaccgctcttga

SEQ ID NO: 399699 - DNA, 439 bp, Oryza sativa nipponbare
  unsure (1)..(439): unsure at all n locations
aattcacaacaccatatttcatggatcaggttcagaacctgcacagaaatacacactaccggtacagatctcaccctctctccaatactcgtacatccatccacgcggtccacacgaatacgtacatctatacggtacacgtacgtacatctactgcaccgngtacacacacgcacactctcctgcagagacgcgcatcgtcgtcaacctagctagcttagctgaaggcgatgcgtcgccatggcagcacggcggcggcggcgctcacttgccggggacgaagttggtggcgtaggcccaggcgttgttgttgacggggtcggcgaggtggtcggcgaggttctcgagggggcccttgccggtgacgatggcctggacgaagaagccgaacatggagaacatggcgaggcggccgttcttgatctccttcaccttgagc

SEQ ID NO: 399700 - DNA, 434 bp, Oryza sativa nipponbare
ttattcaaacgatttccagcatgtctataaaacattggtctcttacatttcgagtggttgaagaggtgcgagaaaggagtagaatatagcaagtttagaatggtacatgaagaagatgcaacaaaatgaaacttagcctcatacggccacagtgacagcttcatcaagtgcaatgactccaggaagttcctttccttccaacagctccaagctagcaccacctcccgttgaaatgtggctcataacatctgcaactcccaccttctcaacagcggcaacagaatcacctcctccaataatggttgtaacacccttgccgctaaggtctgccaacttctttgcaatagcctcagttcctactgcaaacttgtcaaattcgaagacacccataggtccattccaaatgactgtctgtgttgtttccagggtagagc

SEQ ID NO: 399701 - DNA, 421 bp, Oryza sativa nipponbare
agggttcgtagaatgatggaaatttatgtgcatgtacaatttggccgtagaagaaagaatacaacggttataagcaagggattatcaagtccacgaggaagaagcagaggcaggcaaattacatagtattatacggattataaagaagaaaccaccaccattacactaatacacacaaagctcgatcaagcagcttaattaatttcttccacatgtacgacatgcatcctctcctcactccgtgatcaatttaagatgattctttgcagctccagctcgacgacgatccatccgaattaaaatcatttgacctcctggatctcgtccagggcgtagttgttggtcgacacgccggcgtagttcaccttggcgaaccgaaccaccaccgggtagcgagtgttgggatcctgatcaacggtga

SEQ ID NO: 399702 - DNA, 420 bp, Oryza sativa nipponbare
tttgacgacagtttagttcatgtacaatataaactttccaaagtgtttatacagtatatatagtcatagctatttcttaaacttttaataaatgcaaatatatacaatatttaaagaggcagactaaggagtataaaaaaggatgcttcacaacacgattgtcacaagatgaaaagttcatcttgctctccatggtagatacaaggaattgcttgggtgcagctcctgtccgaagtgatcttcaatcaagcctcagctgtttctgggagtgtaatcaatcgggatgcagaatcgtataccaatgaactgctacaatttgcacatttcacactgtttcttgcaccaccgctaggcacagacagtatagtcccaaagaaggaaagattttcattgccacagttcgggcacggtcccttcaaa

SEQ ID NO: 399703 - DNA, 416 bp, Oryza sativa nipponbare
tgaaaaaattgtatatacatgtataccatgaaaaatgaatgtaacgttggtcctgaaaaaatgatggtaaatgtcgatagtgtacataattgaccactgaaaacgggatcctgtcagattggaatgaagtacttgctctccatatgtgccaccgcctccttgtcctcccacagcagtttcttccaccaatcagatgaaccacaaatttgcttcagtttaccacagttgtgagtgctgcacagtgggatgcgtctcaaatttgggcagtcttccactcgaagagtctcaaggcagggaaaatctcttggcgtgcaaatgcttctcagcttcttcacatcagtcagcacaattgatctcaactttgggaagtcaggttgcctcgttgcgccattggttgattctccattgacgctttg

SEQ ID NO: 399704 - DNA, 429 bp, Oryza sativa nipponbare
gcagtaaccaaatcgattcacaggccacacatacaggtagtatacagattcgtctacacacaaggttattgcagaggcaaaacacgaggtatgtatatcaaacgctctagaaaagattcatgtgatgaaatacatgatgaaccacgtatgttctcaaggtaaaattaattaatgcagtatagttttaactttgtccatcgatctcaacctgtaactgtgacgacacactggctacagtgccctcgaggtactagcagtatagcagtagctgtagtacgtagcagcagcagcagcaggttcactgtcttgattggattggatcggattagtagacgtagttcttgacgaacatgccctccttggcctcggcggcctcgccgtcgctggtgtacttgccgagctgcgccagcgagttggccttggcgcgga

SEQ ID NO: 399705 - DNA, 431 bp, Oryza sativa nipponbare
taaaccatccaaatgaggaacatagataattttccagtcggacgctaactgatagggataaaacaactatcagcaatgacagattgttctatatatcctttatttgggaggtcccgtctacgtgatatcagcatctatggactgcttggatcgacaacaatttgtaccgatgctgtaaatgttcattcagtccagaatgagaactcgaatggtaatggtgatacagccaaaatgactttaaaagaagggaaatgaagcactgaagttggcaagagtatcttgtaaaaagctcagttggctgccagtcttgaccggagctccgcagcaaccgcatcaatgaactcttcagtgttcaggtaatggcttcttgtgacgtttgaagacccgtgaataagaagagcaaggtctttggtcatcttcccagattccac

SEQ ID NO: 399706 - DNA, 420 bp, Oryza sativa nipponbare
gggataaatatatatagccggagcttccatatatttcattcacatatgcctcacccaacaacatatagtcgtagcagataccactcttacatcaagtcagagagagatcaggtgaaacaaaaacaaaagcagagcacggccggtaaaatcaaaagacgatgaacaaactgggaacacacgaaacaaggtgggagacatcatcgaatcagagatgaacaattaaacaaggctatatatgacgatgacggcttagttgccaccagactcctcgcagcccgggggcttgtaggcgatgaagctgatgagctgcacctgcctgacgttgtcgaagccgatgatacggacgaatgcatcagggtacgccttcttggcctcctcgagctccttgagcacctgggtggcgtcagtgcacccgaacat

SEQ ID NO: 399707 - DNA, 402 bp, Oryza sativa nipponbare
gctggaaaatttgatgatttatttcccacttatatcatcatatacaaatactaacacatgcgaaaattatcaagcagaaaagttccatacaaattcatccagacaaacaagtgtaaaaaaccttttttttcccatttcccccttgaactatccgtaaataccaccattccaccaaactcccctctgtcttctacgacaaataatcttttcaacccagtaacttataattaattacagagagattagcaaacatataatggtaagaatcagttgtcgtaggtgcggcactcgtcggtctccgggttgtccttgcagtaggcctcgagcgggtcggaggtctccttgagcttgtcgcgcgcgtggctcgccgccgcgctcagctcctccaccttgtcccacgcc

SEQ ID NO: 399708 - DNA, 441 bp, Oryza sativa nipponbare
ccacgcgtccgcggacgcgtggggaaaaaaaaagagaggccacgaagagagctcagctgctgcctctagcttacttggtgataaggaggaggaggaggaggagggcaccgacatggccgcagccacggcgtacaccgtggcgctcctcggcgccaccggcgcgcgcgtccccgccgctccacgctccgccgcgcttctgccgcgccgcggcggcgtgctccaaccgttgtgcctgcagcactcgcattgactgttcttgttaaagaaaatggccgcatgtcaaggacaccacaaccattggagaggggaaaatgttctctcctggttacctgagggctacatttgataatcctgaatatgacaagctcatcaactactatgttaaggagaagtacacattgcgttacactggaggaatggttcctcgtgtcaaccacatca

SEQ ID NO: 399709 - DNA, 436 bp, Oryza sativa nipponbare
ccacgcgtccgcacgagatacccatcgacgaggaagatctccctgaccgggatgatgatgaggatgacgatgggatgggtgatatgcaagaggatgattcccaatatgcatttcgtgctcatacagacgagatattcgctgtggcatgcagtcctacagatgcatcacttgtggcttctggagggaaagacgatagaggattcctgtggaagattggatcagcagaggatgttttggagctggccgggcacacagatactgtctgcacggttgctttcagttcagatgggaatcttttggcttctggaagttttgatggacgcataaatgtgtggaatacagctacacgaacacttcagggaacccttgaaggttctggatctggcttcgagtggcttaaatggcatccacgagggcatttgataattgcaggatc

SEQ ID NO: 399710 - DNA, 455 bp, Oryza sativa nipponbare
ccacgcgtccgcccacgcgtccgcccacgcgtccgcaagcttagagggtcattgaaaattgccgctatcaaagcccctggttttggtgagcgcaagacccagtacttggatgatattgccattctaactggagcaactgtaatcagggatgaagttgggctgtcacttgacaaggcagacaaatcagttttaggaacggctgcaaaggtggtccttaacaaagagtcaacaacaattgttggtgatggcagtacacaggaagaagtgactaagagggttgcacaaataaaaaatctcatcgaggctgccgaacaagaatacgagaaggaaaagctcaatgagaggattgcaaagcttgctggtggtgttgcagtcattcaggtgggagcacaaacagagaccgaactaaaagagaagaagttgagagttgaggatgccctaaatgctaccaaagc

SEQ ID NO: 399711 - DNA, 475 bp, Oryza sativa nipponbare
ccacgcgtccgctttccacgccagtttggtcgctctcgatttcgatttcccccaaatccaccgcaagagaaagccaagtcgccgccgagaagcgaagaggagatggcccgtacgaagcagaccgcccgcaagtccaccggcggcaaggccccgaggaagcagctcgccaccaaggcggcgaggaagtctgctccgaccaccggcggcgtgaagaagccccaccgctacaggccggggacggtggcgctccgcgagatccgcaagtaccagaagagcacggagctcctgatccgcaagctccccttccagcgcctcgtccgcgagatcgcgcaggacttcaagaccgacctccgcttccagagccacgcggtgctcgccctttcagaggccgccgaggcctaacctcgcggtctcttcgaggacaccaacctctgcgccatccacgccaaaggcgtcaccatcatgcccaaggaca

SEQ ID NO: 399712 - DNA, 470 bp, Oryza sativa nipponbare
ccacgcgtccggcttactgcacgatcaaacacgctggcatctggtcagacatcaagtacgcacgtctgatcacctaaaggacgaactcatagaggcgatcggccacagactctgcggtgaaatgaaggccctcatcttactcaacgatggaccaccagactccttgcacttggtcgaggactgactcacgaccgctttcccgggactgaaaaaagttcaaaccgaccacgccttgctggctttcgatgaccaatgcgccatctaggagaacgaggccgtgaaccaatccctggaaaacctcaagacctacctgttcgtgacggaggagatcgacaaccgacccgtcaagctcctggggggacactaccacttcgtctacggcaacttggacttatgggagccctaaatacgaccgtctcgtcgatcagttcgacagtttacgccaacgcttttgcataagtactacctga

SEQ ID NO: 399713 - DNA, 442 bp, Oryza sativa nipponbare
ccacgcgtccgcccacgcgtccgggcaaggatggcttatctgagagccgcaaggatggtgaatatgtgctgacttatgaagacaaggatggagactggatgcttgttggcgatgttccatgggagatgtttgccaactcttgtcgcagactcaggatcatgaaaggttcagatgcaattggacttgctccaagggcagttgataagtccaaaaaccgcaactagaatggtttctgccccacagtcaaaagcaagatggagatcaaatgactgtagggaattttctgaaaaccaagaagtctaacagttttaagatggagtctgccttatggtctgtactacatggtttgctattgtgaaagttaaaaaaaaaggtgtcttgttatgttagcttcgccaaatctcctagggacataaactctatttgattgtgcccaagtctt

SEQ ID NO: 399714 - DNA, 470 bp, Oryza sativa nipponbare
ccacgcgtccgcgccatctctctcagctctcacagctcactgcatcaatggccgcggccaccatggcgctctcctccccggtgatggcccgcgcggcgccgtcgacctcctccgcgctcttcggcgaggcgcggatcaccatgcgcaagaccgccgcgaagcccaagccggcggcgtcgtcggggagcccgtggtacggcgccgaccgcgtcctctacctcggcccgctctccggcgagccgccgagctacctcaccggcgagttcccgggcgactacgggtgggacaccgcggggctctccgccgacccggagacgttcgccaagaaccgggagctggaggtgatccactcccggtgggcgatgctgggcgcgctcggctgcgtcttcccggagctcctcgcccggaacggcgtcaagttcggcgaggcccggtggttcaaggcgggctcgcagatcttcagcgagggc

SEQ ID NO: 399715 - DNA, 471 bp, Oryza sativa nipponbare
ccacgcgtccgaagacatgggtggaccagtcgatggtggtttcagtgtagcattcgaccctcttgatgggtccagcattgtcgacacgaacttcacagttggaaccatatttggtgtctggcctggtgacaagctgacaggcgtcaccggtggagaccaagttgctgctgccatgggcatctatggccctcgcactacttacattatcgctctcaaagattgtcctggaactcatgaattccttcttcttgatgaaggaaaatggcagcatgtcaaggacaccacaaccattggagaggggaaaatgttctctcctggtaacctgagggctacatttgataatcctgaatatgacaagctcatcaactactatgtcaaggagaagtacacattgcgttacactggaggaatggttcctgatgtcaaccagatcatagttaaggagaagggcatcttcaccaacgtgacgtc

SEQ ID NO: 399716 - DNA, 469 bp, Oryza sativa nipponbare
ccacgcgtccgcccacgcgtccggccggactacctcaacggagaggtccccggagactacggctacgacccttttggcctcagcaagaagccagaggacttctccaagtaccaggcctatgagctgatccatgccaggtgggcgatgctcggcgccgctgggttcatcatccccgaggcctgcaacaagtttggcgcaaactgcggccccgaggccgtctggttcaagaccggcgccctcctcctggacggcaacaccctcaactacttcggcaacagcatccccatcaacctcatcgtcgccgtcgccgccgagtcgtcctcgtcggcggcgccgagtactaccggatcatcaacggcctggatctggaggacaagctccacccaggtggcccattcgacccgctggggctggcgagcgacccggaccaggcggcgctgctgaaggtgaaggagatcaagaacgggcg

SEQ ID NO: 399717 - DNA, 264 bp, Oryza sativa nipponbare
ccacgcgtccgctccgatcgcaaatactctctctcgccgatagcagcagcagcagcaatggccgccgtcgccgccgcatccaccgccttcgccgccaagccgcgcctggcgcgcgcgccgtcgtccccggccgcgcggttctccgtgtcgtgctccgcgtcgggcaacaacggcggcgccggcgagatggcgcagtcgctggcggcgtcggccaagacgttctccgcggcgctggcgctgtcctcggtgctgctctcctcggcg

SEQ ID NO: 399718 - DNA, 462 bp, Oryza sativa nipponbare
ccacgcgtccgcccacgcgtccgcccacgcgtccgcccacgcgtccgattcagagtaagacgtacatggaggtgaagggaaccggcacggcgaaccagtgcccgacggtggagggcggcgtcgactccttcgccttcaaggccggcaagtacaacatgaagaagttctgcctggagccgacgtccttcaccgttaaggcggagggcgtggccaagaacgcgccacccgagttccagaagaccaagctcatgacccgcctgacctacaccctcgacgagatcgagggcccgctcgaggtcagctccgacggaaccatcaagttcgaggagaaggacggaatcgactacgccgccgtcaccgtgcagctgccgggaggcgagcgcgtgccgttcctcttcaccatcaagaatctggtcgccaccggcaagccggagagcttcggcgggcccttcctcgtgccca

SEQ ID NO: 399719 - DNA, 436 bp, Oryza sativa nipponbare
ccacgcgtccgcccacgcgtccgcccacgcgtccggttgggaaggaaatcgatgctgctgttgatgcaaaattgaggcagggggctaaggcccatcatactgcaacacatctcctacaatctgctcttaaaagtatcattggttcagaaacatcacaggcaggatcccttgtggcatttgaccgtctccgatttgacttcaatttccaccgccccctttctgaagaggaattgatgaaaattgaatcacttgtaaaccaatgggttagcagtgctactcatcttgagacaaaagtgatggatctgcaagatgcaaaaaatgctggtgcaattgcaatgtttggagagaaatatggcgagcaggtcagagttgtagaggtccctggggtgtctatggaactctgtggtggaactcatgtgagtaacaccgctgagat

SEQ ID NO: 399720 - DNA, 401 bp, Oryza sativa nipponbare
ccacgcgtccgcccacgcgtccgcccacgcgtccgcccacgcgtccgcccacgcgtccgccggcttccagacgcttctctcctcctctaatctcaagtctctgtctcgtcgtcctcgcatctccactcgccatgggcaagattaagatcggaatcaacggtttcggaaggatcgggaggctcgtggccagggtggccctccagagcgaggatgtcgagctcgtcgccgtcaacgaccccttcatcaccaccgactacatgacctacatgttcaagtacgataccgtgcacggccaatggaagcacagcgacatcaagatcaaggactccaagactctgctcttgggcgagaagccggtcaccgttttcggcatcaggaaccctgacgagattccgtgggct

SEQ ID NO: 399721 - DNA, 471 bp, Oryza sativa nipponbare; identical to SEQ ID NO: 387936

SEQ ID NO: 399722 - DNA, 457 bp, Oryza sativa nipponbare
ccacgcgtccgtatagccggagcttccatatatttcattcacatatgcctcacccaacaacatatagtcgtagcagataccactcttacatcaagtcagagagagatcaggtgaaacaaaaacaaaagcagagcacggccggtaaaatcaaaagacgatgaacaaactgggaacacacgaaacaaggtgggagacatcatcgaatcagagatgaacaattaaacaaggctatatatgacgatgacggcttagttgccaccagactcctcgcagcccgggggcttgtaggcgatgaagctgatgagctgcacctgcctgacgttgtcgaagccgatgatacggacgaatgcatcagggtacgccttcttggcctcctcgagctccttgagcacctgggtggcgtagtgcacccgaacatgggcagcttccacatggtccagtacctgccatcgtagta

SEQ ID NO: 399723 - DNA, 457 bp, Oryza sativa nipponbare
ccacgcgtccgcggacgcgtgggcaaagaaggagagagcttggtgagctgcagagatggccccctccgtgatggcgtcgtcggccaccaccgtcgctcccttccaggggctcaagtccaccgccggcatgcccgtcgcccgccgctccggcaactccagcttcggcaacgtcagcaatggcggcaggatcaggtgcatgcaggtgtggccgattgagggcatcaagaagttcgagaccctctcctacctgccaccgctcaccgtggaggacctcctgaagcagatcgagtacctgctccgttccaagtgggtgccctgcctcgagttcagcaaggtcggattcgtctaccgtgagaaccacagatcccccggatactacgatggcaggtactggaccatgtggaagctgcccatgttcgggtgcactgacgccacccaggtgctcaaggagctcgag

SEQ ID NO: 399724 - DNA, 464 bp, Oryza sativa nipponbare
ccacgcgtccgggacacggccacaccacccaccaactgagagctgagcaggcgagcgagcggacatggcagcatcgctccaagccgcggccaccctgatgcagccggccaagctcggcggccgggcctcctccgccgcgctgccatcgcgcccgtcttcgcacgtcgccagggcgttcggcgtcgacaccggtgccgccggcaggatcacgtgctccctgcagtccgacatccgggaggtcgccaacaagtgcgccgatgccgccaagctcgccggcttcgccctcgccacctcagctctgctcgtctcgggcgccagcgcggagggcgtgccgaggaggcttaccttcgacgagattcagagtaagacgtacatggaggtgaagggaaccggcacggcgaaccagtgcccgacggtggagggcgggtcgactccttcgccttcaaggccggcaagtacaacat

SEQ ID NO: 399725 - DNA, 429 bp, Oryza sativa nipponbare
  unsure (1)..(429): unsure at all n locations
ccacgcgtccgaaggaattcagctacaacaagatcctcaaagatctcaagaaagagttttgctgcaatggtactgttgtccaggacccagagcttggccaggtcattcaacttcagggtgatcagaggaaaaacgtatcaaattttcttgttcaggccggcattgtgaagaaggaacacatcaagattcatggtttctgagcaactgccaaaaccattgcaaagactatagtttggggtggagtatacttggttgtgtacatgcctgcgtgttccattgtacacacaaaacctagccacctcttgactcttgagtgtatgcttgttacccgtgtgttgaagtttgtaagaggcaccatcactatagatgatggcttgtgtccctctttcatcaagattgaataatatatgctactttgagagcgcanaa

SEQ ID NO: 399726 - DNA, 467 bp, Oryza sativa nipponbare
ccacgcgtccgcccacgcgtccgggaggcatcaggatgggaaccccagcactgacctcaagaggatttgttgaggaggactttgctaaggttgctgatttcttcgatgcagcagtgaacttggctttgaaggttaaggctgcagcaggtggaacaaaactgaaggactttgttgccactttgcaatctgatagcaacattcaatccgagattgcaaaacttcgccatgatgtggaggaatatgcaaaacagttccccacaattgggtttgagaaagaaaccatgaagtacaagaactaagaaactttgaatggaacagcaagggtaaaagaaaaggcatcaagctgaattcctgaggtgactgttggaattcttgcaagaacaagtcggtgtaaacatatatccatggagtgccatcttatgtaaaaaggacccctggcattttacaacgtgtggaaactttgtcaa

SEQ ID NO: 399727 - DNA, 469 bp, Oryza sativa nipponbare
ccacgcgtccgcatatcacttgtggaagagaaggtggctgccatggaacaaggaaaaataacaaaactctttcccagctatttgttatatgaatttcctagcttagttggtggaagagtatggaaagcggaacaggatctactgttgctgaaagcattaataaagcatgggtatgcaaggtggcaatatatatcagatgacagagataatgggatttttgaggctgcacgacaagagctgaggcttcctactgctaatgaactgattagttctcactcaaacaatgagacaaacggaaatctggaaagcacacaagaaggccagtcgaacccaacgagcatgatccattacagggatacacagagaaagatagttgagtttattagaaagagataccatcttttggagagatgtttgaatcttgaatacgctgtgattaaaacaaaaacccctgttcctgatgatctcg

SEQ ID NO: 399728 - DNA, 469 bp, Oryza sativa nipponbare
ccacgcgtccgaatcaaagaaggcaaggcaattgagaagccaatctacaaccatgttactggtctcctagacccaccggagcttatccagccccccaagatttttgtcattgagggcttacatcccatgtttgatgaacgtgtgagggacctcctagatttcagcatctacctggacatcagtgacgaggttaaatttgcatggaaaattcagagggatatggcagagcgcggtcacagccttgaaagcatcaaggctagtatcgaagccaggaaaccagattttgatgccttcattgatccccagaagcaatatgctgatgcagtgattgaagttctgccaacccagcttattcctgatgacaatgaaggaaaggtgctacgtgttaaattgatcatgaaagaaggtgtaaagaacttcaacccagtttacctcttcgacgaaggatcaagcatcacctgggtccctt

SEQ ID NO: 399729 - DNA, 468 bp, Oryza sativa nipponbare
ccacgcgtccgcggacgcgtgggcggacgcgtgggcggacgcgtgggggaggagcttgagcttggagagagacaacaatggcggctcaggctcttctctctgggaggcagctgctggggaggccattgcaatcttcagtctccaggtcttcttcctccaggaaggcacccttcatggtcagggcagaggccactccccctgccaagcaaggtgctgacaggcagctgtggttcgcatccaagcagtccctgagctacctggatggcacgcttccgggagacttcgggttcgacccgctggggctatcggacccggaggggaccggtgggttcatcgagccacggtggctggcctacggcgagggttcaacggccggacggcgatgatgggcgcgtcggcatggtcgccccggagctcctcggcaagctgggcctcgtccccgccgagacggcgatcccgggttccaga

SEQ ID NO: 399730 - DNA, 466 bp, Oryza sativa nipponbare
ccacgcgtccgcttcaagcattgcaattccattctatccagctgcagcagctgctgttgctgcatactggggctgcatggttccaggagcttggaacgctccatggccaccgcagtcccaatcccaatcggtttcatcatcaagtgctgcttctccagtatccacaatgaccaactgcttcagattaggaaagcaccctagagatggtgatgaggaactggatagcaagggtaatggcaaggtgtgggtgccgaagacggttcggatcgacgatgtcgacgaggtggccaggagctctatctggtcgcttattgggatcaagggtgacaaggtgggagcagatcatggcagaggatgcaagcttgcaaaggtttttgagtcaaaggatgaggcaaaggcatcaactcacacagcgatcagcagcttgccattcatgcaggggaacccggctgccctaacacgctcg

SEQ ID NO: 399731 - DNA, 463 bp, Oryza sativa nipponbare
ccacgcgtccggtggctggcctacggcgaggtgttcaacggccggacggcgatgatgggcgtcgtcggcatggtcgccccggagctcctcggcaagctgggcctcgtccccgccgagacggcgatcccgtggttccagaccggcgtgatcccccccgcgggcacctacacctactgggccgacccttacactctcttcgtcttcgagctcgccctcgtcggcttcgccgagcaccgccgcttccaggactggtacacgccgggctccatggggaagcagtacttcctcggcctcgagaagtacctcgccggctccggcgagccggcctaccccggcggcccgctcttcaacccgctcggcttcgggaccaagagcgaggcggagatgaaggagctcaagctcaaagagatcaagaaaatgaggctcgccatgctcgccttcctcggcttctccgtccaggcgc

SEQ ID NO: 399732 - DNA, 464 bp, Oryza sativa nipponbare
ccacgcgtccgcccacgcgtccgcccacgcgtccgcccacgcgtccgcggacgcgtgggctggagctgatgcgcagatatgtgtgtggagcacagatgggtgggataaattaaagagcagaatgttacagataccatcaagtcgtccatcatctataatcttagacacacgtgttcagttccatcaggatcaattgcactttcttgttgtgcatgagacccagattgccatatatgaaactacaaaattagaacccgtgaagcagtggcctgtccgggagaactcttctgcaataacgcatgccatgttctcctgcgatagtcaattgatttatgcaagctttctggatgccactgtttgcatatttaatgcatcgaggttgagactccaatgtcgaattcttacagcatcctatcttcctcagaatatcagctcaaatgtttatcctgtcgtgtggcggcaca

SEQ ID NO: 399733 - DNA, 412 bp, Oryza sativa nipponbare
ccacgcgtccgcccacgcgtccgggaggccaagaaggcctaccccgatgcctttgtccgtatcatcggcttcgacaacgtcaggcaggtgcagttgattagcttcatcgcctacaagcccccaggttgcgaggagtctggtggcaactaagctaagatcaagcatcgcgctggtggattgctgcctataataatagtatgcagctttgttttgggctatgttgatgatatatcaatatataatatgctatatatttttattttacagtttggttatgtaccatctcaatggcctctgctcttaacacatatgtaataatctcttccctccctctccggccggttttattgtaagagtactacaattatcgttgggtgaggatatgtgaaaacaaagctccggctatatacac

SEQ ID NO: 399734 - DNA, 463 bp, Oryza sativa nipponbare
ccacgcgtccgcacaatcaaagcctcatacaagaagctagctagctagtactcaagctaaatacctagctagcagtagcaggcgaccagctgcatttttccagaggaaaaatctctcagtttagcttaattaattagctcttgggagaagaaggcaagaagaaaatggacagggtgaacaggctggcggcgcagcgggcggtggtgatcttcagcatgagctcgtgctgcatgtgccacaccgtgacgcgcctcttctgcgagctcggggtgaacccgacggtggtggagctggacgaggacccgagggggaaggagatggagaaggcgctggcgaggctcctcggccgcagccccgccgtgcccggggtgttcatcggcgggaggctcgtcggctccaccgacaaggtcatgtcgctgcacctcagcggcaaccttgtcccgctgcttcgcaatgcggtgcc

SEQ ID NO: 399735 - DNA, 467 bp, Oryza sativa nipponbare
ccacgcgtccggagcgggccggcgacgccgccggacatctcggacaagatgtcggagagcatcgacaaggcgaaggaggcgtgcgcggaggacacggcgagcggcgagtgcgcggcggcgtgggacgaggtggaggagctgagcgcggcggcgagccacgcgcgcgacaagctcaaggagacctccgacccgctcgaggcctactgcaaggacaacccggagaccgacgagtgccgcacctacgacaactgattcttaccattatatgtttgctaatctctctgtaattaattataagttactgggttgaaaagattatttgtcgtagaagacagaggggagtttggtggaatggtggtatttacggatagttcaagggggaaatgggaaaaaaaaggttttttacacttgtttgtctggatgaatttgtatggaacttttctgcttgataattttcgcatgtgtta

SEQ ID NO: 399736 - DNA, 462 bp, Oryza sativa nipponbare
ccacgcgtccgggcgctcgtctccgcctcctcctccaccaccgccgtcgcggcgctccccggcgccgccagggcctcctccttcctcggcggcgccggcaggagcggcaggctgctgctgaggcaggccgagtcgtcgtccgcgcgggcgtcgttcgccgtgcgcgccgcggcgcccgacaggccaatctggttccccggcagcaccccgccgccgtggctcgacggcagcctccccggcgacttcggcttcgaccccctgggtctcggatcggacccggagagcttgcggtggaacgtgcaggcggagctggtgcactgccggtgggcgatgctgggcgcggcgggcatcttcatcccggagttcctgaccaagatcggcatcctcaacacgccgtcgtggtacaccgccggcgagcagcaatacttcaccgacaccaccaccctcttcatcatcgagctc

SEQ ID NO: 399737 - DNA, 472 bp, Oryza sativa nipponbare
ccacgcgtccgaacaaaggagcggatgacatacccagaatatgttatttggagttacatactctgagcactgttgtaaatggtttctgaaaatgacaaatgagcataattgcatctccgtctcccaattccaatccattttcacgttgctcacatgttatgtcatgaagagagaaagaaagagaggaaaaaggcatatgtttggtgggaggagcaaatcggagcttcaattattgtgctttgttttggccagggtactactttacaacaagctcatgtatctggctgcaaggagaaggagaaggtaggctccagccatggcttcccagctctccgccgccacatccgtgccgcagttccatggcctccggacctactcctctcctaggtccatggtgacgctgccatcgttgaggatgagcaagaagaggtcccagggcatccggtgcgactacatcggctcagccaccaac

SEQ ID NO: 399738 - DNA, 467 bp, Oryza sativa nipponbare
ccacgcgtccgcccacgcgtccgcacgagctcaaaagacacacattccaaaagcatctgtggccatctcctcctagtcctaggctcgcgtcaatggcggcgtccaccatggcactctcctcccctgccgccctcgccggcaaggcggtcgccaatgccaaggtgttcggcgagggccgcgtcacgatgcgcaagtcggcggccaagcccaagcccgccgcggcgtcggggagcccgtggtacggcgccgaccgcgtgctctacctcggcccgctctccggcgagccgccgtcctacctcaccggcgagttccccggcgactacggctgggacaccgccgggctgtcggccgacccggagacgttcgccaagaaccgggagctggaggtgatccactgccggtgggccatgctgggcgcgctcggctgcgtcttcccggagctcctcgcccgcaacggcgtgaagttc

SEQ ID NO: 399739 - DNA, 472 bp, Oryza sativa nipponbare
ccacgcgtccggctcggcgaggtcgtcgacccgctctaccccggcggcagcttcgacccgctcggccgtggccgacgacccggaggccttcgcggagctcaaggtgaaggagatcaagaacggccgcctcgccatgttctccatgttcggcttcttcgtccaggccatcgtcaccggcaagggccccctcgagaacctcgccgaccacctcgccgaccccgtcaacaacaacgcctgggcctacgccaccaacttcgtccccggcaagtgagcgccgccgccgccgtgctgccatggcgacgcatcgccttcagctaagctagctaggttgacgacgatgcgcgtctctgcaggagagtgtgcgtgtgtgtacgcggtgcagtagatgtacgtacgtgtaccgtatagatgtacgtattcgtgtggacccgcgtggatggatgtacgagtattggagagagggtgagatctg

SEQ ID NO: 399740 - DNA, 437 bp, Oryza sativa nipponbare
  unsure (1)..(437): unsure at all n locations
ccacgcgtccgatggccgcctcgccatgttctccatgttcggcttcttcgtccaggccatcgtcaccggcaagggccccttggagaacctgctcgaccacctcgccgaccccgtcgccaacaacgcctgggtctacgccaccaagttcacgccgggctcgtgaatggcccagccgccattgtagactactctctctctccatcgctcgatgtaccaatgcttgcacagattgtacgatgctgtgatgaatctgatatgatccatccagaattcagaaactgaaaaaagttggggtttgcaacttatgtgtcagctgctgctttaagcttagttaactcttttgatgttttaatttgtacatttgtgtactttgtaatgatccatacgagacctagtgtttgattattgctaatttgctgtggcattttcttgcnnna

SEQ ID NO: 399741 - DNA, 473 bp, Oryza sativa nipponbare
gccgcctccctccgccgctttcttcccctttaaaaccctcccaaaattcaaacgcgaccaagccgccggcgaggtgaacgaaacccaaccatggcaggcggcggaggtggcgaggggaaggtggcgtgcgcggcgtggatccggcgccgggaggagaaggagaaggcgacgcgcgtcttcgcggcgtacgggcgggcggggtcgccgccggccgtggaggtgctcgggttcgactccaaggagtgctccctctccgaacccctggcgagggcggagctcggggaggagccgggcgacgcgccgcgtggcatcacggtgcaccccagcggcgacgagctcgtctgcgccacggccaaggggtgcaggctattcaagctgatttttgaagagttcactgttcgacttatttcaagagacgctccaccacttgaatccgttggaccgcagaagtgtcttgcttttagcactgatgg

SEQ ID NO: 399742 - DNA, 469 bp, Oryza sativa nipponbare
ccacgcgtccggcattgttcttcttctctagctattagtggtggggaataatggctcccgccaccaccgcagcaatggccctcgcgccgcctccttcccatcaccatcaccatcaccatgtcaagcagctgcagctccctccgtctgtctccgtctccgtgcccctccgctccggtttccttggccgcgcactgcctgctgctgcccacccacagccgctgctcgccgccgagagccgccgcagcagcgccgtgtccgtgcggatgtcgtgggacgggcccctctcctcggtccgcctcattatgcagggccgcaacgtcaagctgaatgagaaggtgaaggagcacatcgaggagaaggcggggagagcagtggcgaagcacagccagcttgtgaaggaggtggacgtccgcctctccgcccgcggtggcgagctcagccgaggtcccaagatttgcaggtgcgagat

SEQ ID NO: 399743 - DNA, 465 bp, Oryza sativa nipponbare
  unsure (1)..(465): unsure at all n locations
ccacgcgtccgcagcaacggtggaaggatcagctgtatgcaggtgtggccgattgaaggcatcaagaagtttgagaccctgtcgtacctgccaccgctcacggtcgaggacctcttgaagcagatcgagtacctgctccggtccaaatgggtgccttgcctcgagtttagtaaggtcgggttcgtctaccgtgagaaccacaggtctcctgggtactatgatggcaggtactggaccatgtggaagctgcctatgttcggatgcactgatgccacccaggtgctcaaggagctcgaggaggccaagaaggcatatccagatgcatttgttcgcatcatcggcttcgacaacgtcaggcaggtgcagttgattagcttcatcgcctacaangcccccggttgcgagggagtccgcggaaactaagcttggttggcaggccagcaagctcactcgtgagctctatac

SEQ ID NO: 399744 - DNA, 471 bp, Oryza sativa nipponbare
ccacgcgtccgcccacgcgtccgtgctccttcctcccagtgtctctcaagagcggtgcagggttcacaaggcaggagaaaatgggggagatcaccaatgtcatggagtaccaggccatcgcgaagcagaagcttccgaagatgatctacgactactacgcctctggagctgaggatgagtggactctcaaggagaacagggaggcattctccaggatcttgtttcgtccccgcatcctgatcgatgtctcaaagatcgacatgtccgcaactgttcttgggttcaagatatcaatgcccataatgattgctcccagtgccatgcagaagatggctcaccctgacggagagtatgcaacagccagggcagcttcagcagcaggaactataatgacactgtcatcttgggctacttcaagtgttgaggaggtcgcctcaactggaccaggaatccgtttcttccagctatacg

SEQ ID NO: 399745 - DNA, 473 bp, Oryza sativa nipponbare
  unsure (1)..(473): unsure at all n locations
ccacgcgtccggcaacagcggaagctctcgcgatggggaagttcgtcatctgcgcggagcatccatcgaacgagttcttcatgtcgttcccgaactgcctgacgtacaggaccccggaggagttcgtcgccagggtgaacgaggccatggccagggaaccccagcctctcaccccggagcaaaggtacaacctgtcgtgggaggcagcaaccgagaggttcatggagtactcagacctcgacaaggttctcagccaacctgttacagaaggcgtgcacagaagcaagacgagaagaacaattcagagtaatctgtcggacgccatggatggaggattgcgtttgctcaccactgcctaactggtangcgggttctcaggctggcaacgggagcgattcctggtacgcgcgactacgacaagcaacaactgcgtggacatggggcctcctgccgcctcaagtgcagcaccctgt

SEQ ID NO: 399746 - DNA, 473 bp, Oryza sativa nipponbare
ccacgcgtccgcgaaatcaaaagcacacccaagagagagtagtggtagttccagagcggtctgcttgcgaagttgcgatgcctgccatggccaagcccgcctcccgcgctgccaagcccgcgtcggcgccgaagaagcagaaggcaaagccctccgccgccgccggtggctcctcccacccgccttatttcgagatgatcaaggaggcgatcacggtgcttaaggagaggaccggctcgagcgcgcacgccatcgccaagtacatggaggagaagcacggggcgtcgctgccggccaactacaagaagatgctctccatccagctgcgcgggttcgcttccaagggcaagctcgtcaaggttaaggcctcctacaagctctccgacgccgccaaggactcgcccaaggccaagcctgccgcccccgcccccaaggcagcagcgccgaagccagcgaaggacgccgccaaaccc

SEQ ID NO: 399747 - DNA, 466 bp, Oryza sativa nipponbare
ccacgcgtccgccgacaagccctacgggattggaggtggcatgtcagtcgatattgatgcatctggcaggaagagcacggggaagggtgtgtaccaattcgttgacaagtacggcgcaaacgtcgacggctacagcccaatctactcgccggaggaatggtctcccaccggtgacacctacgttggtggaaccaccgggcttctgatctgggccgtgaccctcgccgggctcctcggcggcggcgccctcctcgtctacaacaccagcgccctcgccggctaaatttcacccaaatccagtctatgtatgtaacaccaagctgggtgtctgcatattcatctgtaatctaagatagccttcctctgaatgcgatgtgatgatgcccactgcttaatcaaactgcattgtgattaatctatgtaacactgtacttgcatgatgatgatatactacacttgatacttg

SEQ ID NO: 399748 - DNA, 468 bp, Oryza sativa nipponbare
ccacgcgtccgcccacgcgtccggcaggccgcgcgccgccgtggtggccaagtacggcgagaagagcgtctacttcgacctcgaggacatcggcaacaccaccgggcagtgggacctgtacggctccgacgcgccgtcgccgtacaaccctctccagagcaagttcttcgagacgttcgcggggcccttcaccaagagggggctcctgctcaagttcctgctgctcggcggcggatcgctggtggcctacgtcagcgcgtcggcgtcgccagacctgcttccgatcaagaagggcccgcagctgccgccgacgcccggcccacgcggcaagatctaaattaaattcctcgtctctgcctcaccttcttcttgatccgatccatccatgcaaatcctctgtactgtactgctagtcccccatggccggatcgccatggattaattccccctgtttatgatgttgatata

SEQ ID NO: 399749 - DNA, 469 bp, Oryza sativa nipponbare
  unsure (1)..(469): unsure at all n locations
ccacgcgtccgcccacgcgtccgcggacgcgtgggcagcttcgtcgcccgcgccggcggtgtggacgatgcgccgctggtcgggaacaaggcgcccgacttcgatgcggaggcagtcttcgaccaggagttcatcaacgtgaagctgtccgactacatcgggaagaagtacgtcattctcttcttctacccgttggacttcaccttcgtctgcccgaccgagattaccgctttcagtgacagatacgatgagttcgagaagttgaacactgagatcctcggtgtttcaattgacagtgtgttctcccatcttgcatgggtgcagacagacaggaaatctggtgggcttggtgatctgaaatacccattgatttcagatgttactaaatcaattttcaagtnctttggtgtcttgatccctgaccagggaattgctctgagaggacttttcatcattgacaagggaggga

SEQ ID NO: 399750 - DNA, 468 bp, Oryza sativa nipponbare
ccacgcgtccgcggaaggtacgccatgaagcttaattccgaggcctacgccgtcacgtggcgcttcgacgccgaggccctgccctaggacctgttgctccaagggctcactgttctacaggacgacggacagctcgacctcaccataaaggactacccgtacgccaacgacgggctgctggtctggaactccatcaagcagtgggcgtcggattacatcgacttctactacaagtccgacgaggaggtcgcctgctacgaggaggtgcgggcgtggtgggaggaggtgcgcaccaaggggcacgccgacaagaaggacgagccgtggtggccggcggtggacacccgggacgggctcataagcgtcttgaccaccatcatgtaggtgacctacggccaccacgccgtcgtcaacttcgggcagtaccactacggcggctacttcccgaaccggacgacggtgatgagg

SEQ ID NO: 399751 - DNA, 459 bp, Oryza sativa nipponbare
ccacgcgtccgcccacgcgtccgaagaaagcataagcaacacaagggattaactcatcactcacttagctaattaaatcttcgaccatgtcggacaagtgcggcaactgcgactgtgctgacaagagccagtgcgtgaagaaaggtaccagctatggcgtcgtcatagttgaagccgagaagagccacttcgaggaggtcgccgccggcgaggagaacggcggctgcaagtgcggcaccagctgctcctgcaccgactgcaagtgcggcaagtgaagtcacgaagcaaccgaacactcgccgccggcgagtcacctaccttaattagtccacaataaaaaccacccatatgagtgtggtttgtgtgtgtgctgattattgctgaattaaacccgtgtgttatcgattaattaagcagctggtcgcttcggcgactatgcgtgtatcaacgtatgaattt

SEQ ID NO: 399752 - DNA, 467 bp, Oryza sativa nipponbare
ccacgcgtccggatttgtttcagggaggatgaggagtcgcaatgtcgtcgctgcaaaggctgcgcaggacagttcagaaccgtcatccgggagcgttgtgaagtatgtccagagttcgttcagcagtcctgaagacctctttgctctagctggtataggatttgcagggattgccgcattatgggcttctataaatcttgtagaggtcatcgacaagcttcctgttctccctctactctttgaattaattggcatattggttgcatggttgttcatatatcaaaacctactattcaagccagacagggaaaagtttctgaacaacatcaagagttccgtatctcgcgtcttggggcagtaatttgaggcgaaaatggaacacaagcagccttaactcttgccgtcgtgattcgctttcttcaggcctggagaaaccaatgaatatttaactggatgtgcaaaatgtg

SEQ ID NO: 399753 - DNA, 469 bp, Oryza sativa nipponbare
ccacgcgtccgatccctgcaagcgacgaacacatctcatcacacccgtcacctctcctctcccccaaatctcgcgctccgctcctgctcctgctcctgccatggaggaggctcaggttgtggaatccaaggacggaacgatctcagttgcttcagcatttgctggtcatcaggaagccgtacaagacagggatcacaaatttttgtctaaagcagttgaagaagcttaccaaggagtagattgtggccatggaggtccatttggtgcagttgttgtccgtaatgatgagatagtagttagttgccataacatggttttggattacactgatccaactgcgcatgctgaagtaactgcaataagagaggcttgcaaaaagcttggaaaaattgagttgtcagactgtgaaatgtatgcatcatgtgaaccttgcccaatgtgtttcggcgctgtgcatctatcacggatt

SEQ ID NO: 399754 - DNA, 470 bp, Oryza sativa nipponbare
ccacgcgtccggcaaagaaggagagagcttggtgagctgcagagatggccccctccgtgatggcgtcgtcggccaccaccgtcgctcccttccaggggctcaagtccaccgccggcatgcccgtcgcccgccgctccggcaactccagcttcggcaacgtcagcaatggcggcaggatcaggtgcatgcaggtgtggccgattgagggcatcaagaagttcgagaccctctcctacctgccaccgctcaccgtggaggacctcctgaagcagatcgagtacctgctccgttccaagtgggtgccctgcctcgagttcagcaaggtcggattcgtctaccgtgagaaccacagatcccccggatactacgatggcaggtactggaccatgtggaagctgcccatgttcgggtgcactgacgccacccaggtgctcaaggagctcgaggaggccaagaaggcgtaccctgat

SEQ ID NO: 399755 - DNA, 460 bp, Oryza sativa nipponbare
  unsure (1)..(460): unsure at all n locations
ccacgcgtccgccggcagcgacttcaaccccttcaacttccagcccaccctcgacgccaacgagaacgagctcgccaacgggaggctggcgatgctggcgttcttggggttcctggtgcaggacaacgtgacgcacaaggggcccttcgacaacctgctgcagcacctgtctgacccgtggcacaacaccatcatccagaccctgtcaggctgagcgtgtgatcgatttcatcagggccagggcatctcaaggagcttgatgagttcaggctggtgaaaccgatgattgggcgatggaagatgttctcttcttgtttcttctttttttttttgaggagtatgcatgtataagatgttaatgaattggggggaggagagagagagagnatcatgtgatgagattcagacttactgcgtgtgtaggacaattgcttactgcatgcatgagatctacacgcat

SEQ ID NO: 399756 - DNA, 471 bp, Oryza sativa nipponbare
ccacgcgtccggtcgaggaccggcgggcccttcggcaccatgaagaaccccggcgagcagtcccacgccgccaacgccggcctcgacatcgccgtcaggcttctcgaccccatcaaggaccaacttcccatcctctcctacgccgacttctaccagcttgctggcgttgtggccgtcgaggtcaccggcggacctgaggtccccttccatccgggcaggcaggacaagcctgagcctcctcctgaaggccgtcttcctgatgccacacaaggttctgaccacctaaggcaggtcttttctgcgcagatgggtttgagtgacaaggacatagttgctctttctggtggtcacaccctgggaagatgccacaagggaggatctggctttgagggagccctggcgtccaaccccttgatctttgacaactcttacttcaccgagcttgggagtggcgagaaggaaggccttctt

SEQ ID NO: 399757 - DNA, 436 bp, Oryza sativa nipponbare
ccacgcgtccgcccacgcgtccgcccacgcgtccgcccacgcgtccgcccacgcgtccgatcagagatcaggtagaacagtgagagtgaggtgcagaaaaatttgagctgaagctgaggatggcaacatccatgatcacctcgccgctggtggcgccggcccgggccaagggccttccgtccatctcccgccggggatcctccttcgccatcgtctgcagcggtgggaagaagatcaagaccgacaagccctacgggattggaggtggcatgtcagtcgatattgatgcatctggcaggaagagcacggggaagggtgtgtaccaattcgttgacaagtacggcgcaaacgtcgacggctacagcccaatctactcgccggaggaatggtctcccaccggtgacacctacgttggtggaaccaccgggcttctgat

SEQ ID NO: 399758 - DNA, 462 bp, Oryza sativa nipponbare
  unsure (1)..(462): unsure at all n locations
ccacgcgtccgcaaaaaaccaacccaaccgccgccgcatcgccctcgttagaacgatggccgcgtcggcgctgcaccagaccaccagcttcctcggcaccgcccctcgccgggatgagctcgtccgccgcgtcggcgactccggtggccgcatcaccatgcgccgcaccgtcaagagcgcgccccagagcatctggtatggacctgaccgtcccaagtacctgggcccgttctcggagcagacgccatcgtacctgaccggagagttcccgggagactacgggtgggacacggcggggctatcggccgacccggagacgttcgcgaggaacagggagctggaggtgatccactcgcggtgggcgatgctgggggcgctgggctgcgtcttcccggagatcctgtccaagaacggggtgaagttcggggaggcgntgggttcaaggccggcgcgcagatcttc

SEQ ID NO: 399759 - DNA, 291 bp, Oryza sativa nipponbare
ccacgcgtccggttattgataccgagaacaagtttgtatccacaggatttgccaaggaaattgcaagggtcgcccaaggtaaatactattacctgccgaatgcttcagacgctgttatttccgccgccaccaagactgcactctcggacctgaagagttcgtgatcctggagagcgttttaccttcagataatgagtggtttttaccttttaccttgtttggtgcagcagtgtccatgtttcgtgtaactttgggacgtttcggctgtgataaccaattttggcataaaaa

SEQ ID NO: 399760 - DNA, 467 bp, Oryza sativa nipponbare
  unsure (1)..(467): unsure at all n locations
ccacgcgtccgcccacgcgtccgatcctcaatggcggccttcaacaagctcggtagcttcctcaggcacagtggcttgacaagcagtgcctcggccggctcttcccctgccatgttcaatgctgctcgtctgatgtccaccaagcttttcgttggtggtctttcttggaatactaatgacgattcgctgaaagaggcattcaccagcttcggggatgtgactgaagctcgggtgatcaatgacagagaatctggaaggtcaagagggtttggctttgttagctttgccaatggcgatgatgccaagagtgccatggatgccatggacggtaaggaacttgagggacggagtatccgcgtgaacttcgcgaatgagagacctccagggaaccgaggtggcggcgggtatttgtgtggntggcgtggtatggtaaccaaggaggctatggtgatggcaaccgaggctat

SEQ ID NO: 399761 - DNA, 459 bp, Oryza sativa nipponbare
ccacgcgtccggaaaaatggaagctctggatgacacttctcctgaaaacatagaagttacagcgaattccaaaaatacgatgccatataatactctaagtgggcttgaagtagcaaataatcggaaaaccttggagagtttcaggatgttcaaagattcgtcagatgcaatagattcagtgaacttactagtaactgtcgaagacactggcataggaataactaaggatgctcaaactcgcatttttacacctttcatgcaagcggatggttccacctcaaggacatatggtggaactggaattggtttgagtattacgaaacgcctggttgaattgatgggtggagaaataagggttgtgagtaaaccaggagttagtagtacattttcttttactgctattttcaaggaaaataggaaagatccaggggatatcaaaaggtattgtcctgaacctac

SEQ ID NO: 399762 - DNA, 469 bp, Oryza sativa nipponbare
ccacgcgtccgcgcttcgcttcctcccctctctaagccggggaagctaagccatggcgtccgtcaccgcccgcaccccggtcgcagccctccgctcgtcggcgtcgctcaagtctaccttcctagggcaatcctccacccgcctcgcccgcgcaccgactacgaggcgtaatgttcgggcggaggccaagggagagtggctccccggcctcccttctcccacctacctcaacggcagcttgccaggcgataacgggttcgacccgttgggtctggcggaggacccggagaacctgcggtggttcgtgcaggcggagctggtgaacgggcggtgggcgatgctgggggtggccgggatgctgctgcctgaggtgctgacgaagatcgggttgatcgacgcgccgcagtggtacgacgccggcaaggccacctacttcgcgtcgtcgtcgacgctgttcgtcatcgagttc

SEQ ID NO: 399763 - DNA, 471 bp, Oryza sativa nipponbare
ccacgcgtccgggcgcgtcaccatgtccgccgagtggatgccgggccagccacgccccgcccacctcgacggctcctctcccggtgacttcgggttcgacccgctgggcctcgccaccgtgccggagaacttcgagcggttcaaggagtcggaggtgtaccactgccggtgggccatgctcgctgtgcctggggtgttggtgccggaggcgctggggctgggcaactgggtgcaggcgcaggagtgggcggcggagcccggcggccaggccacgtacctcggcaacccggtgccatggggcacgctgccgacgatcctggtcatcgagttcgtcgccatcgccttcgccgagcaccagcgcaccatggagaaggaccccgagaagaagaagtaccccggcggcgccttcgaccccctcggcttctccaaggaccccgtcaagttcgaggagtacaagctcaaggagatcaa

SEQ ID NO: 399764 - DNA, 476 bp, Oryza sativa nipponbare
ccacgcgtccgcatcgcgtcctcctccgtcgctactgaatgggtaaagggcaagcaaatggaggaagtagtgactataaaaaacactgagattgccaagcacttgtcacttccaccagtaaagctccattgtagcatgcttgctgaggatgcaattaaagctgccgtgaaagactatgaagcaaagaaggcgaagctagcacaaaagggtgaagagaaggctgccgaagcatgagtgccagaggttctgtcatgaagaatgttgcagtgccctgcgtactcgtagtaaagaacctgtcatgaagaagtctctgctctgcttcttgctggcgggaaatagtgtgtaacgctcacaaactctatgcagcatgtatcataaggatgaaggcaaacatttttgaataaatgtgctgtcatcttgaaagaaaaaaaaaaggtgtatgcgtgtgtatggcctagtaatgaacatatggtacg

SEQ ID NO: 399765 - DNA, 428 bp, Oryza sativa nipponbare
ccacgcgtccgcccacgcgtccgcgtggagatgccggcgccggaggggtggacgaagaagtttactccccagagaggggggagatttgagattgtttttgtttcaccaactggagaagagattaagaacaagagacagctgagccagtatctgaaggcacaccctggaggccctgcatcctcagagtttgattggggaactggtgatactccaaggcgctctgctcgcattagcgagaaagttaaggctttcgatagcccagaaggggagaagatcccgaaacgttctaggaactcatctggcagaaagggcaagcaggagaaaaaggaggccaccgaaaatgaagaagcgaaagacgctgaagctgacaaggaggcccctagcgaagatgctccaaaggagactgatgtagagacaaagcctgctga

SEQ ID NO: 399766 - DNA, 288 bp, Oryza sativa nipponbare
ccacgcgtccggcgagctgggagggtatggagagaggagaggtcatccttttgttgattactacttaaattaggaaagctgggttggtggttaatggcgacttgcatggtggtgatttgtaatataagaacacccaagatgatgaattaatgcatccacttgtacatcgatcgatcgatcttggtatttgactaagtgagtgtgactgtgaatgcacatatgcacactgcatagactttacctgacatgtattgatattaataaagttataacaggtgtctcgctatc

SEQ ID NO: 399767 - DNA, 468 bp, Oryza sativa nipponbare
ccacgcgtccgctcattctatttaagcaattggcatacgatgcaaatttcctgcgtgtgcctgatattcggtggcttggggtcttcacatctgattttgaggattatcgccttccagactgctgcctacttcacttgtcgtctgaagacagaaggaaagctgaaggaattctctcaaggtgttacttgcacagggaagccccacaatggaggttggagttagaagccatgttgcaaaagggtgtcaaatttgagattgaggcgttatctgcatgttccatttcctttttatcagaagagtacattcccaagaagatcaaacaaggaagacatatataagattggttgtacctgtatctatccagaaattttcatgtggcaaaagtcttattttgtttttgtcatgctaactgtagtcacatgtatggcactctggtagtttaacccccagcaagtattttgtagcaat

SEQ ID NO: 399768 - DNA, 461 bp, Oryza sativa nipponbare
ccacgcgtccggttctccctcacacactgaacaccatggcggcggcggcggcggctccggctctatccttggccgaggcggcgccggtgacagcagttctggcaccgtgtcccacgccctcgaggacgttccgccgccgcagctgggtcgcggctatctgccggcccgccctgaaatgccaccacagtcgtcccctgaccgccgtggtcgccgcggctgcggctgccgctgcggcgggggactcgacgtcggccggcgtattccacggcgagtgcttcgtcgtgggggataacatcgacaccgaccagatcatcccggccgagcacctgaccctggtcccgtccaagcccgacgagtaccgcaagctcggctcgttcgccttcgtcggcctccccaccgcggcctacccgacgccgttcgtcgcccccggggaggagaccacccgcttacccgtcatcatc

SEQ ID NO: 399769 - DNA, 465 bp, Oryza sativa nipponbare
ccacgcgtccgccctgatattttcaacattcttctccaaatttttgaagatgggcatctgtcggactcacagggccgcagagtgtccttcaagaacacattgattgtcatgacatcaaatattggttctacatcaatttcaaagggaagacgaagcatgggtttcatgacagaagatactgaatcaagctcatatgttgcaatgaaatctctagtaatggaagagttgaaggcatttttccgtccagaattgctcaacagaatcgatgagatggttgtattccgtcccttagagaaaactcagatgctagcaattcttgatatcatcctacaagaagtgaagggtaggctgttagcccttggaataggccctgaggtgtccgatgcaatgaaggacctgatttgcgaagaaggctatgacaagagctacggtgcgcggccactgaggagagccgtcacccacctg

SEQ ID NO: 399770 - DNA, 452 bp, Oryza sativa nipponbare
ccacgcgtccgcgtcgtcggtggcagcggcggcgagcacgttcctggggactaggctggcggacccggcgccgcagagcgggaggatcgtggcgaggttccgcttcggctgctggaagaaggcggcggcgaagaaggcggcgaggccgtcggcgccgacgacggacaggccgctgtggttccccggcgcggtggcgccggactacctggacgggtcgctcgtcggcgactacggcttcgacccgttcggcctcgggaagccggcggagtacctgcagttcgagctggactcgctggaccagaacctggccaagaacaacgccggcgagatcatcggcacccggttcgagaccggcgaggtgaagtccaccccgttccagccctacaccgaggtgttcgggcctccagcgcttccgcgagtgcgagctcatccacggccgctgggccatgctc

SEQ ID NO: 399771 - DNA, 433 bp, Oryza sativa nipponbare
  unsure (1)..(433): unsure at all n locations
ccacgcgtccggccacgcgtaccttgatggatactatgacggggacttaagaggaaaacagatgaggctcgagaccgggccagaaaacttcaagtgcaggctgggcgnnaaggggtacaacagactgagggccatgctcgttgtgcctgggatgttggtaacagaggcactgaagctgaacaactgggtgcaggcgacacgagtgggctggcggagacagccggacaggccacgtaacctaggcactcaggagccaagtgggcacgctggcgactaacgtggtcatcgaagacgaacgcatcgactgcgctgagcaccagtggaccatggagaatgacgcagagaagaagaagtactccggcggagcattcgagccctttgggttgtacacggaccccgtgaagtataggagtacaagctcaatgagatcaag

SEQ ID NO: 399772 - DNA, 470 bp, Oryza sativa nipponbare
  unsure (1)..(470): unsure at all n locations
ccacgcgtccgcggacgcgtgggcggacgcgtgggcggacgcgtgggttgttgtgtttagcctgactgcctacacattctgggctgcaaagaggggccgtgacttcagcttccttggccctttcctcttcgcctccctcattgtgctgctcgtgtttgcgttcattcagatcctattcccgctgggcaggatctcccagatgatctatggcgggatcgcgtcgctcatcttcagtggctacatcgtctacgacacggacaacatcatcaagcgctacacctacgaccagtacgtctgggccgccgtctccctctnacctgacgtcatcaacctcttcctctccctcatgaccctcttcagggcagccgactgagttcctcgcatcgcgtcacatcgtgttcatatacgttttcatcagtgaatgtgaaaatgctctgcctttatcatgagtcgcgtacccaaaaacaaca

SEQ ID NO: 399773 - DNA, 464 bp, Oryza sativa nipponbare
  unsure (1)..(464): unsure at all n locations
gagccacgcgtcacggctgacgtgcggggaggcggtgtggttcaaggccggcgcgcagatcttctccgagggggggctcgactacctggggaaccccaacctggtgcacgcgcagagcatcctcgccatctgggcggtccaggtggtgctcatgggattcgtcgagggctaccgcgtcggcggcggcccgctcggcgagggcctcgacaaggtgtacccaggcggcgccttcgacccgctcggcctcgccgacgaccctgacaccttcggcgagctcaaggtgaaggagctcaagaacggccgnctcgccatgttctccatgttcggcttcttcgtccaggccatcgtcaccggcaagggccccatcgagaacctcttcgaccacgtcgncgaccccgtcgccaacaacgcctgggcatacgccaccaacttcgtccccgcaagtgagcacaacgacacgatcg

SEQ ID NO: 399774 - DNA, 232 bp, Oryza sativa nipponbare
ccacgcgtccggccacgcgtacctggatggctcctatcacggtgacttacggtgaaaacggatgggcctcgacaccgggccagagaacttcgagcggctgagggggtcggatgggtaacactgactgtgggccatgctcgttgtgcctgggatgttggtgacagaggcactgaagctgaacaactgggtgcaggcgcacgagtgggctggcagagaccgccgggcaggccac

SEQ ID NO: 399775 - DNA, 465 bp, Oryza sativa nipponbare
ccacgcgtccgcccacgcgtccggggactcgctcctcaactggctccgaagcttgtttttcaagcaggagatggagctctccctggttggcctgcagaatgctgggaaaacatcactagttaatgctgttgctacaggtggctacagcgaagacatgattccaactgtaggatttaatatgcgaaaagtcacaaaggggaatgttacgattaaactttgggatcttggagggcaacggagattccggaccatgtgggagcgctattgccgtggagtttctgcaatcctatatgtggtggatgctgctgaccgggatagcattccgatagctaaaagtgaattgcatgacctgctgacaaaacaatctttagctgggattcctttactagtccttggcaacaaaattgacaagtcagaagctgtttcaaagcaagcgttggttgatcaactaggcctggaattgat

SEQ ID NO: 399776 - DNA, 428 bp, Oryza sativa nipponbare
ccacgcgtccgcccacgcgtccggctcgctcatcgccatctctctcagctctcacagctcactgcatcaatggccgcggccaccatggcgctctcctccccggtgatggcccgcgcggcgccgtcgacctcctccgcgctcttcggcgaggcgcggatcaccatgcgcaagaccgccgcgaagcccaagccggcggcgtcgtcggggagcccgtggtacggcgccgaccgcgtcctctacctcggcccgctctccggcgagccgccgagctacctcaccggcgagttcccgggcgactacgggtgggacaccgcggggctctccgccgacccggagacgttcgccaagaaccgggagctggaggtgatccactcccggtgggcgatgctgggcgcgctcggctgcgtcttcccggagctcctcgcccg

SEQ ID NO: 399777 - DNA, 455 bp, Oryza sativa nipponbare
ccacgcgtccggaaggacggaatcgactacgccgccgtcaccgtgcagctgccgggaggcgagcgcgtgccgttcctcttcaccatcaagaatctggtcgccaccggcaagccggagagcttcggcgggcccttcctcgtgcccagctaccgtggttcgtccttcctcgacccaaagggccgcggtggctctaccggctacgacaacgctgtggcgctccccgccggaggcagaggagacgaggaggagctcgctaaggagaacgtcaagaacgcctcgtcgtcgacgggcaacatcacgttgagcgtcaccaagagcaagccagagaccggcgaggtgattggcgtcttcgagagcgtgcagccgtcggacacagacctcggcgccaaggtgcccaaggatgtcaagatccaaggggtgtggtacgcgcagctcgagtagggaatgaacaaatg

SEQ ID NO: 399778 - DNA, 355 bp, Oryza sativa nipponbare
agaaagcgaagaaattgttttgaatttcgaagaaacaactgatagtaggtttgatacagtttttgcactacgctgttactgcacatgggagcagaacatattctcgtagagatatacaaacatcacacagaggaagcagcagcaagcactctagagagtcaccccccaaaacttccccggacaaatgcagctgcttaattactccgttccagcgatcttcttcttcaaggtctcgatgtcggtcgccaactctttcctgctctccttgaagaggaggtagcggtagacgaaccagccggtgtagccgaggccgacgagctccaggatcttggggggcagcggcacggagttgatg

SEQ ID NO: 399779 - DNA, 386 bp, Oryza sativa nipponbare
ggctcacacaaaaattgattcgacttgcagttgtaatcccctagacgagggtgtttaattgtacaactcgcaggggctccatgtataaaatctcaatcccctggcctataaccaaagtggctgaggagaccattgtacagttttgcgttggcttcatcatgtattggtaactactgctactatggtttcacttgaacatggaaatgtcgaagatgagggcagagccatccgtggacacggagacgatggagttgccatcagcagagacggcgagggactgcacgacgtcaccgtggccggcgaaggccctcacgcactccccggagaggctgtcccagattcgcaccatgccgtcgatgcaccccgacgccacgaacctggacggg

SEQ ID NO: 399780 - DNA, 535 bp, Oryza sativa nipponbare
  unsure (1)..(535): unsure at all n locations
ggatgaatgtcaacggtgaaccccagagagcatgaaatctttcaaatatcttccttcgtaatttgacagccgttccagttacaccacaaattttgctatagtgaccctgtttatttcacttcccatgggaacaaatcaaattgtctcgaaactactcaaatctcaccaaaattcagattcaagcctactacccaaaaattgacggccagtgaccttcccggagaacaagtaactgtaacttagtcatcagtacccgtagccggagttgtccatcgggttggtgacgggcgcaggctcaggctccttgatctcgacgacgacgacatccgatgtgaggaatgtcttggccaccgacgcagcatgctcaagacaacatctcaccaccttagtggggtcaatgataccagcagccatcaaatcctcgtactgtccaagtgcagcatttgaaccaaacctggaagttttggttggagagaaccttctcggtaacaacgcttncattaacaccagcattcttagcaatcaatttaagcgg

SEQ ID NO: 399781 - DNA, 418 bp, Oryza sativa nipponbare
aaccgcaaaatccaaagaacggcaataacatttgattttgagtctttaaccgaaccctgtttttacactaattaaccgaccaaaccctattacaaagctgctaatgaaaacgagatctaaaacgcggaagcgagaggggaatcaacaagttgaccacgtcacgtcgtcgtcgttgatccccccagatcgcttcggcgctacgcaacgcaaccgcgtcgaaggcggcggcttacgcgcgctcgccgcggatgcggcgggcgagctggatgtccttgggcatgatggtgacgcgcttggcgtggatggcgcagaggttggtgtcctcgaagagaccgacgaggtaggcctcggcggcctcctggagggcgagcaccgcgtggctctggaagcggaggtcggtcttgaagtcctgcgcgat

SEQ ID NO: 399782 - DNA, 422 bp, Oryza sativa nipponbare
agtaaaaaggtcaactcttcataatggtattattaagacattatagctgatgtcctttgatcacactgcgatcaaattatgcatcatcggcagtacagctccgggtcaggaaaaaggcgcggagatatatgtcttgtgattacttaatacagcattcacatatgtcgaaccatccggtacgtacgtagtagtactccacagcgttcacattgaagatcggagaccatatcctgaggtggtacttatgctaaagcggcggcgtaaactgactaactgcactgaccgacggtcggatttagggctcccataagtccaagttgccggagacgaagtcgctgtggcccacgacgagcttgagggtgctcggggcgatcccctccttgacgaacgggtaggtcttgaggagcttcagggattggttc

SEQ ID NO: 399783 - DNA, 435 bp, Oryza sativa nipponbare
aaagcactaattaatccttccatgccacaatataaacaatttagactacatatttacactatacatagccagaaatggttatattttgggatcgagggagtatttgtttccgatctaatagagatgagaaatccgctaatcagaataacaccacggataagtacctagaccattagttgggaaacgaataaaatcattattgcaaaaacatcatcttcttcttcatcttcttagtgtacacaacaccaactcgatcatcatctcgtcgcactaaacccatcttccccaacccaaagacaacgaactcgctggccacaaatccatccaaccacaattaaccactgctaagctacggtcccccacttcacttgccggggacgaagttggtggcgtacgcccaggcgttgttgttgacggggtcggcgaggtggtccg

SEQ ID NO: 399784 - DNA, 361 bp, Oryza sativa nipponbare
ggcaaaaaggagtataactttgcagtttcaagtcccacttcaactacaacccaatctgcattacaggatgggagtctaaaacgactgcagtttcagcgtttttgaggcctgcagagacactgggctcgcgttgcagcaaaagattaggcggcggcgcccacggtggcgccggcggtgagcctcgacgagccgtagagagtctcctcgaaccggatgatctcgttcttggaaccgtaggccacttgagtccgctcgtcgaggttgttgatcaccttgtccagcaccgactgtttgccgtcgctgctgtacccgccggctttctctatcaagaaacccaacggcgccacctcgaacaggagcc

SEQ ID NO: 399785 - DNA, 424 bp, Oryza sativa nipponbare
tcaacgatgatgaaaaccacgtggagacaatttactcaggtagcaaatatttctcagccacaaatccaaacacttggtccttcctatcagaagatcagaatgaacaggttttcaaattcatctcccaactcgacgataatttacacgtacatttaacacattcttccacccttctcaaactcctcccttcttcttcccgggtaagattaaaattaacttgaggccagccagcgtcgccggcggcgagatgtttacaggctgggcgtcctctcggcggcgccggagatgacggtgagcaggttgttgccgaaggggtcgctgaggtgcttggagaggttctcgacggggccctcgccggtgacgtaggcctggatgaagaaccccagcatggagaacatggccagccgcccgttcttgatctcct

SEQ ID NO: 399786 - DNA, 423 bp, Oryza sativa nipponbare
gcacgaaggaattgtgctcaagaatcttaagatggtaaatacacacaagagagaggtacggtatacaagacttagtttttcttaagtacaacagatcttccattcctccatgatcctatcagcttctacacccaaaccacacaaatcaccatgcacgagccctcttcctccactgccaaatcaactcacctggggcttgagtagccaagcatccatgtggtgatcagtagccgatgtcagcgtcgtcgacgacgaggttgccggtgatgagctcacggtaggcggcgacgggccagatgaaccccctcgggaggagcttgacggcgagctcgacgtcgatgatgatctccctcatggccggcttcttctcgccgctgatggcgatgaggtagctcctgccgacccagccgatccagccggcga

SEQ ID NO: 399787 - DNA, 372 bp, Oryza sativa nipponbare
ttttggaaggcaaatgttcgtgaagataggcacatatatgtatcgtacaatgtcctctccgcttgtcgaaatgcaaataacatcatcgggggatatgatcatcagttcacgagaacagaggaagaaacaaaagctaaaaattaaaaccatcaacagcccgatcgagtttgcattactagatacacacattgcagccttccttccctctctccatgtatcgatatatcaacccggccacgcacaaaacatttgttcattccctactcgagctgcgcgtaccacaccccttggatcttgacatccttgggcaccttggcgccgaggtctgtgtccgacggctgcacgctctcgaagacgccaatcacctcgccg

SEQ ID NO: 399788 - DNA, 398 bp, Oryza sativa nipponbare
aatagtatattaagtaagtatagtatgaattgactattacattgtatatagatgatttatagctagtagtggactatattattaaacttgctctgttgagtttttttttgggacggggtagttacaaatggtacaagctggttttctgcaaagtacgtacgcaaccgggcagaaaaaaaatcccaaaacaacaatttcctatttttggttgacgaaaaatgttactgccactgtgaaccatatagccgtaaggctgttctattccctatgtacatggttcagtacaaaaatcagctcgacttcgacgatatagcagcaacaatttcatcccgtgccttctcgagcgcacccggcaagttctccggcttccgtccaccggcttgggcaaaattgggctt

SEQ ID NO: 399789 - DNA, 402 bp, Oryza sativa nipponbare
  unsure (1)..(402): unsure at all n locations
ttttgnnntgcncatgaaatggaattgggtaacccaacacaaacacgtacttacacttgcagtaaaagttttatgcatctgctctaccgttcttttgtaccttacagaatttgaacccatggatctcatgtcatacgtcacagctaccctaaaaagcacgtatatgtatcagttcctgttgaccgcattgaagttgtagacggctacctccatgcctacatttatgaacagcaccacgcccacaaactctatgcttaccataatgttgttgagcgtactacacagctcggatcttgacatccttagctaagttaccgccaaggtctgcgtcacacggttgaacgctcttaaatacaccaatcaccttgccggtctctgacttgctcttggtgacgctcaact

SEQ ID NO: 399790 - DNA, 375 bp, Oryza sativa nipponbare
aaggcaaagctgcgagcgcgagatcatcttattactacagcttcttggcgatatgctacagtagcttcttcctcccttgcaaaaagaaacccaaaccttatctacaacgcaacacacacaccggacacagagcgctcgatcgatcgaagcagacgagacgacgatggcgaactactactaggtaagcgacaacacctaggctatacagggatacagcgcgcggcggcgacgggcggctagacagcagccatgatcatgcgctggccttgttggccttcttggagatggcggagcggatggatttgggcggctgcatcggcttcgcgggggcggccttcctcgccctcttggcgcgggctgggcgggcggggggaa

SEQ ID NO: 399791 - DNA, 532 bp, Oryza sativa nipponbare
ttagcattaacaccacaatggggtatcatattgttccttattggctgccagcaaaatctctctagcaacaaacgtgtaaatgcccccaaaatacaccatcaccatgactccatgcatagccacaatatcacaagtatcgctacagccagcggcgccatgttccttttctgcgaggacgcgcgacatacacatgattctgaagctctactgacctagacacagggggaagttcatgaccaaattggttggttcattcactccattgctactgcgtgcttaatttgatgaatacacagactcgacttattttctttctttagctgcatgatcccatggatggaagaaacgaaacctactactgcccttcacacagtctcctccattcaagcttcttcctcaagcagcttctgatcaaagtgccacaccccatgcccctttcccactcttcttaagttggcgaacttactcagagatcttcttgatggcttcaacctgctcctcaaggaattcgctctcaacgaagtcggtcagc

SEQ ID NO: 399792 - DNA, 530 bp, Oryza sativa nipponbare
cggacgcgtgggcaaagaaggagagagcttggtgagctgcagagatggccccctccgtgatggcgtcgtcggccaccaccgtcgctcccttccaggggctcaagtccaccgccggcatgcccgtcgcccgccgctccggcaactccagcttcggcaacgtcagcaatggcggcaggatcaggtgcatgcaggtgtggccgattgagggcatcaagaagttcgagaccctctcctacctgccaccgctcaccgtggaggacctcctgaagcagatcgagtacctgctccgttccaagtgggtgccctgcctcgagttcagcaaggtcggattcgtctaccgtgagaaccacagatcccccggatactacgatggcaggtactggaccatgtggaagctgcccatgttcgggtgcactgacgccacccaagtgctcaaggagcttgagggaggccaagaggcgtaccctgatgcattcgtccgtatcatcggcttcgacaacgtcaggcaggtgcagctcatcagcttcatc

SEQ ID NO: 399793 - DNA, 529 bp, Oryza sativa nipponbare
aaatatatatagccggagcttccatatatttcattcacatatgcctcacccaacaacatatagtcgtagcagataccactcttacatcaagtcagagagagatcaggtgaaacaaaaacaaaagcagagcacggccggtaaaatcaaaagacgatgaacaaactgggaacacacgaaacaaggtgggagacatcatcgaatcagagatgaacaattaaacaaggctatatatgacgatgacggcttagttgccaccagactcctcgcagcccgggggcttgtaggcgatgaagctgatgagctgcacctgcctgacgttgtcgaagccgatgatacggacgaatgcatcagggtacgccttcttggcctcctcgagctccttgagcacctgggtggcgtcagtgcacccgaacatgggcagctttcacatggtccaatacctggcctatggaatttccgggggatctgtggttctcacggtagacgaatccgaccttgctgaactcgaggcagggcacccacttggaac

SEQ ID NO: 399794 - DNA, 370 bp, Oryza sativa nipponbare
gggaagaaacaaaagctaaaaattaaaaccatcaacagcccgatcgagtttgcattactagatacacacattggagccttccttccctttttccatgtatcgatatatcaacccggccacgcacaaaacatttgttcattccctactcgagctgcgcgtaccacaccccttggatcttgacatccttgggcaccttggcgccgaggtctgtgtccgacggttgcacgctttcgaagacgccaatcacctcgccggtctttggcttgctcttggggacgctcaacgtgatgttgcccgtcgacaacaaggcgttcttgacgttctccttagcgagctcctcctggtttcctttgcctccggcggggagcgc

SEQ ID NO: 399795 - DNA, 297 bp, Oryza sativa nipponbare
ggcgctctcaaagtagcatatattattcaatcttgatgaaagagggacacaagccatcatctatagtgatggtgcctcttacaaacttcaacacacgggtaacaagcatacactcaagagtcaagaggtggctaggttttgtgtgtacaatggaacacgcaggcatgtacacaaccaagtatactccaccccaaactatagtctttgcaatggttttggcagttgctcaaaaaccatgaatcttgatgtgttccttcttcacaatgccggcctgaacaagaaaatttgatacggttt

SEQ ID NO: 399796 - DNA, 426 bp, Oryza sativa nipponbare
ttacaagttacgatttgtaaagacgaaaaattccgcaatcatgcgaattattcacagaatacaccaaagtatgtgtaactgcttgtccaagaagatagtgaaggttaatatagcattagcataacatcttacagtaggtgtctacgataagaactattgacaaagtttccacacgctgtaaaatgccaggggtcccttttacataagatggcactccatggatatatgtttacaccgacttgttcttgcaagaattccaacagtcacctcaggaattcagcttgatgccttttcttttacccttgctgttccattcaaagtttcttagttcttgtacttcatggtttctttctcaaacccaattgtggggaactgttttgcatattcctccacatcatggcgaagttttgcaatctcggattgaat

SEQ ID NO: 399797 - DNA, 415 bp, Oryza sativa nipponbare
  unsure (1)..(415): unsure at all n locations
tagcaaatcgatccatgcgacgatgcgtgcaaatcagttggagcacaaatttacatgttacacccacaccctacacccatgcataataatacatcgtatatacgtacgtacatacatacccctctcgatcacacgcaccatcgatcgtacaaagttgcgtacatacatacgtacacacatatacgcatacgcacgtacatacatacataattaaaaactcgtaattaattaaatacgtagttgatggcatctctaatggaacttgaggctggtgaggatgttgttgtggacgggatcagcgaggtgatcaagcaggttctgcacggggccaaccccggtgaagagcgcctggacggagaagccgaggaaggcgagcatggcgagcctgccattcttgatctncttgagcttgagc

SEQ ID NO: 399798 - DNA, 419 bp, Oryza sativa nipponbare
agcaaatcgatccatgcgaccgtgcgtgcaaatcagttggagcacaaatttacatgttacacccacaccctacacccatgcataataatacatcgtatatacgtacgtacatacatacccctctcgatcacacgcaccatcgatcgtacaaagttgcgtacatacatacgtacacacatatacgcatacgcacgtacatacatacataattaaaaactcgtaattaattaaatacgtagttgatggcatctctaatggaacttgaggctggtgaggatgttgttgtggacgggatcagcgaggtgatcaagcaggttctgcacggggccaaccccggtgaagagcgcctggacggagaagccgaggaaggcgagcatggcgagcctgccattcttgatctccttgagcttgagctcctt

SEQ ID NO: 399799 - DNA, 382 bp, Oryza sativa nipponbare
aaaaagaaaaaaatcctgaagtctgtaccaaagttcagttttacacctcacagaaaatggcccgtgtctgcagctgtgtttttttttcgacagtcatgcgttcctttgtcgaaggggaacaacgtacgggcagccaatccgagcacagttttttttgtttagcagttctgcccggggacaggcaatgtgtgtgcttcgttacattataggagtatttttttttgcacctacgcgagcccgtacttggacaggggtcttagttttcgtacactttgcactcgtcggtctccgggttgtccttgcagaagtcctccagtgggtcgccgttgccctgcaccgccgcgccgggccacttgctcgccaccagatgcgccagatcgac

SEQ ID NO: 399800 - DNA, 378 bp, Oryza sativa nipponbare
gggttgggtttttttttttttttttttttttttttttttttttttttttttttttttttggggaaaaaaacccgagcttttttttaaaaaatccccacccaacaaaaattggaggacttttacaaaaaaacccccccgagagggggggaaaaaatttttccattttttttaaaagcaaaggcccttgaaatgggccataaccaaaccggaaaaaaaaaatatttagcctattttttattggtatatcaacaacatagcccaaaacaaagctggattcttttttttttggccgcaatccaccaccccgatgcttgatcttaacttaattgccaccaaacttcttgaaacctgggggcttttaggcgaaaaaactaataa

SEQ ID NO: 399801 - DNA, 428 bp, Oryza sativa nipponbare
attgcagtgcaaaaaaggcctggacggactatttattttcccttagatatacctgacctgcctgatacaaaccaaagtacccgtataaaattattctgcgccacggtatcagtccaaatcaagaaccagtcgctggtaggtatagttgcgtcgttggtgctacacccagagggcacccgcattgcgaagcagcgggacaaggttgccgctgaggtgcagcgacatgaccttgtcggtggagccgacgagcctcccgccgatgaacaccgccggcacggcggggctgcggccgaggagcctcgccagcgccttctccatctccttccccctcgggtcctcgtccagctccaccaccgtcgggttcaccccgagctcgcaaaagaggcgcgtcacggtgtggcacatgcagcacgagctcatgctgaaga

SEQ ID NO: 399802 - DNA, 393 bp, Oryza sativa nipponbare
ggacacaatgattagggatcacttattcattatagttcttccatgctgctctaccacagcaaaacgtttcagacaccatcaaaccagacttaagggtacacattacaggtaaatagtacacaatgaaacgggacacgaccaaggaccagaccagacaaccatagctccattggggaagacaaataggcagacttgtgaaccctagaacagcagcagctccatggctgaggacttactggccaccacggaggcggagcaccaggtggagtgtggactccttctggatgttgtaatccgcaagggtgcggccatcctcaagctgcttaccagcaaagatcaaaccctgctggtccggggggatgccctccttgtcctggatcttcgccttcacgt

SEQ ID NO: 399803 - DNA, 403 bp, Oryza sativa nipponbare
gctggagagattggatgatttatttcccacttatatcatcatatacaaatactaacacatgcgaaaattatcaagcagaaaagttccatacaaattcatccagacaaacaagtgtaaaaaaccttttttttcccatttcccccttgaactatccgtaaataccaccattccaccaaactcccctctgtcttctacgacaaataatcttttcaacccagtaacttataattaattacagagagattagcaaacatataatggtaagaatcagttgtcgtaggtgcggcactcgtcggtctccgggttgtccttgcagtaggcctcgagcgggtcggaggtctccttgagcttgtcgcgcgcgtggctcgccgccgcgctcagctcctccaccttgtcccacgcc

SEQ ID NO: 399804 - DNA, 400 bp, Oryza sativa nipponbare
tcacttctaaaagagtatcaacttggggtttacatcggttacatcatagtacaggtacacaatcaacaaggcatgcagtgctccatccacaattacatcccaatacaccaccaccattcacagcctactccgatcccaaaaaagagaggtaagtcgcgtcgacgaacagtcttttcatcttcctccattggcagccattgctaacactccaacacctgaagaactcctcatttgggggtgaaggcctggaagatggtggcgtggccggggtcggcgagatgggcgaagaggttgtcgatggggccggtgccggtgtactctgcctggaaccaagctcccatgacggcgagcatggcgagccgcccgttcttgatctccttggtgcgcagctccttgatct

SEQ ID NO: 399805 - DNA, 529 bp, Oryza sativa nipponbare
ttttggttgacagaaacaaagtgtaagctagataagcactgattccacgcacaatttacatgatcattacatcgtccatcacacaggcactcatgcatcgattacacataggagtattgattcgtgtgactagcttaatgaatttgattagccgatgatctggtccaggacgccgatgttcttgaggccgaggacgacgccgacgcccatgatgtggccgacggcgccgcaggccagcgtgtcggcgagcgtgaacccggcggggtcgccggtctgcaggccggagtcgcgcgcctccagcttcagccccgccgtcgacttcctgttcgccgacggcgccagcccgaacctccccgcgaacagcatcagcgtcgtcgtcgtcaccatgataacgttggtggctgagccgatgtaatcgcaccggatgccctgggaaccttttttggcttattctcaaacattggcaggggtcaccattggaccttaggagaggagtaggtcccggaggccatggaactgcggcacggat

SEQ ID NO: 399806 - DNA, 374 bp, Oryza sativa nipponbare
acacaatcaggtccatggtacgtctttcatcaaccaaccagataacattgttttacacaatctgaacgaacgaagcaaatattcgggtacgcggaaagaggagaacgtcgcgcgtctcaccgcagcctgcatgaaagcaatggacctcaccgccgttgctcgccggagatccacactcacttgccggggacgaagttggtggcgtaggcccatgcgttgttgttgacggggtcggcgaggtggtcggccaggttctccagtggccccttgccggtgacgatggcctggacgaagaacccgaacatggagaacatggcgaggcggccgttcttgatctccttcaccttgagctcggcgaacgcctcggggtcgtc

SEQ ID NO: 399807 - DNA, 402 bp, Oryza sativa nipponbare
aaggcagagcaccatatttcattgatcaggttcagaacctgcacagaaatacacactaccggtacagatctcaccctctctccaatactcgtacatccatccacgcggtccacacgaatacgtacatctatacggtacacgtacgtacatttactgcaccgggtacacacacgcacactctcctgcagagacgcgcatcgtcgtcaacctagctagcttagctgaaggcgatgcgtcgccatggcagcacggcggcggcggcgctcacttgccggggacgaagttggtggcgtaggcccaggcgttgttgttgacggggtcggcgaggtggtcggcgaggttctcgagggggcccttgccggtgacgatggcctggacgaagaagccgaacatggagaacat

SEQ ID NO: 399808 - DNA, 295 bp, Oryza sativa nipponbare
ggggttggttttttttttttttttttttttttttggcaagaaaatgccccagcaaattagcaataatcaaacccttggtctcgtttgggtcattccaaagtccacaaatgtccaaattaaaacatcaaaagagttaacttagcttaaagccgccgctgacacataagttgcaaaccccaacttttttcagtttctgaattctggatgggtcatttcagattcatcacaggttcgtacaatttgtgcaagcattggttcatcgagcgatggaaagagagagttttctacaatgggg

SEQ ID NO: 399809 - DNA, 427 bp, Oryza sativa nipponbare
tggaaaaatcattaatggtataaatatatcgaaaacagttggttaaacagagtagtcaagagtcgatcgatcgatgtacacggagacaaaatcaaagacctctctcatcacttggattaattaatactagtaatatttagagactcttgggcaagcatagaaataattagcaaatgaggatggtgatgcaggaggtgtagaggctaggcagcaagggaggggtggtggtggtcagagttggggatggtctccttgtggagatgaccgtctcccttggggacgatgagaccgaagcctccttccttcctcttgtacaggacgttcatctccccggtcttctcgtctctgaaggcgtagaagttgtggtccacattcactagctgctccatcgcctcctccaccgacagcggggggatcttgaacacct

SEQ ID NO: 399810 - DNA, 517 bp, Oryza sativa nipponbare
atggagggtggtctgagtatagtattacatataagtatcgtttttgacgatttgtacaatatatttattacgatgtgtatgtgcatatgattagcctggtgctagcattcacatatgcatgctcttcaacctatgttgatacatacatatgtacatacatacacagctgatgttgacacaaacaagatgaaaaaaaaaaactgaagcaacaaactgggaaaggggaaaccaatgcaaggtggcccgattcgaacgttcaaagctgccaaaaccgaatagatcaatcgagtctcctctgtatagagctcacgagtgagcttgctggcttgccaactagcttagtttccgccggactcctcgcaacccgggggcttgtaggcgatgaagctaatcaactgcacctgcctgacgttgtcgaaaccgatgattcgaacaaaatgcctttggaatatgccttctgggcctcctcgagctccttgagcacctgggtggcatcagtgcatccgaacataggcag

SEQ ID NO: 399811 - DNA, 423 bp, Oryza sativa nipponbare
tcatgaagtaacttatatatatgtggaactccgttaattaaaaattaaaggagtatataaaccggttccgtaaatatcttaaggcgagatatacagatgccaaataggtgtacagtactcgaaattacaaagattataccagtataattaatcgttgggattaagagcatgaacgacccagttacgaggggtgcacggagtacgtgtgttgcttgcgcgcgtgtggatcgacgagattcttttgcaaaaattacctaattaattaatcggcgtgctctctggcgtcgtcgatattgtttattgtttggctagagttcgccggcggcggcggcggcgaggtcctcacaacctggggaaggggcgggcgaggcggtcggcgtcggtgtagatgtgggcgcgggtgatgtcggcgagcgaggtgca

SEQ ID NO: 399812 - DNA, 408 bp, Oryza sativa nipponbare
tacattcaactgatcacagccggcctggagttcattcctgcttgaacaacaaaggtacagagatcatactacacacccagaacactgaagcacttgccatgcaggcagtacttctcttttatgaaaagatgatacagatcagttgcaactatgttacaccaccaccatgtacaacgaccggacaccgaaacatcatcctagtgcagagctgtgaggattgcagtggcgctctcaaccttgaaggttgcaccacagatctcttcttcatttgcaggaacagcagtcaccttgttctttgggttctcatagcacttcaagcctccaagagcattggaatagaagcaaccttgtgggaaaggtgcaagtgacttgccacatgatcctttaagcaggtcaatgtcgttagag

SEQ ID NO: 399813 - DNA, 427 bp, Oryza sativa nipponbare
ttctcccactctttgaaaaggggtataccattaacttgctgtctgcacaaaggagagcttcatgttgacaaggaacctagtaccaacgtaccatatatacttgaagctccaattttactgacaaaaaacaatattactacaagcagtacaatacaatgacaacaatagcttagactagttacccatgttacagtacgagactttacaaagatctacatgacttgtcatgtacagtacatatgtacctacaaactatccagtaacttagtgcatgcagatgcaggtttggtttacttcaccaaccatatacagggtgctgcacttgaggcggcaggaggcccatgtccacgcagtgttgcttgtcgtagtcgcgcgtaccaggaatcgctcccgttgccagcctgagaacctcgctaccagttaggca

SEQ ID NO: 399814 - DNA, 433 bp, Oryza sativa nipponbare
ccaaattcaagtatcaagtggggtatatcatcatcatgcaagtacagtgttacatagattaatcacaatgcagtttgattaagcagtgggcatcatcacatcgcattcagaggaaggctatcttagattacagatgaatatgcagacacccagcttggtgttacatacatagactggatttgggtgaaatttagccggcgagggcgctggtgttgtagacgaggagggcgccgccgccgaggagcccggcgagggtcacggcccagatcagaagcccggtggttccaccaacgtaggtgtcaccggtgggagaccattcctccggcgagtagattgggctgtagccgtcgacgtttgcgccgtacttgtcaacgaattggtacacacccttccccgtgctcttcctgccagatgcatcaatatcgactgacat

SEQ ID NO: 399815 - DNA, 424 bp, Oryza sativa nipponbare
agccataggaatagtgcggtgggatcaacatcataaacagggggaattaatccatggcgatccggccatgggggactagcagtacagtacagaggatttgcatggatggatcggatcaagaagaaggtgaggcagagacgaggaatttaatttagatcttgccgcgtgggccgggcgtcggcggcagctgcgggcccttcttgatcggaagcaggtctggcgacgccgacgcgctgacgtaggccaccagcgatccgccgccgagcagcaggaacttgagcaggagccccctcttggtgaagggccccgcgaacgtctcgaagaacttgctctggagagggttgtacggcgacggcgcgtcggagccgtacaggtcccactgcccggtggtgttgccgatgtcctcgaggtcgaagtagacgct

SEQ ID NO: 399816 - DNA, 417 bp, Oryza sativa nipponbare
tgaaacgcactaacatgtatacatgtataacacgaccaaaacaaagccttatttgttagggaacaaagtaacagctggtggcgaacaagtaacaaaatccgatcagacgagcacacggtactacactttggagacgaaacgcaatggctctcgcgaaagcaaaaaaactccctacatccatcaccaggcatatgcatatgtgtgcttagatggccgcgaagtactccttgcttcccttggggtcaggcttcatcgacttgtcaccgggcttccatccggccgggcacacctcgtccgggttgtcctggacgtactgcaacgcctgaagggtcctcatggtctcatctacactgcgtccaatggcaaggttgttaatggtagagtgctgaatcactccctccttgtcaatgatgaaaa

SEQ ID NO: 399817 - DNA, 437 bp, Oryza sativa nipponbare
ctagaaaactcatcgggctgagctttatttcaataacctctttactaatttgtggcattctagtaactcaaacacactagcaaatgcctctcccgtggcaggcaggcatacacgggagctattagtgttggtacatgatcttagtgtacaaatcttaaccatctccaatcttgtcccaaatgcagctagctatcttagctagcgaaactcagatggagatgctgtttgggatgcccctcccggtgaccccgggcgtggagaacggcttgagcagctcgtacggcacgatgccggcgccgcacctgttcctgagctccgggtcgttgttccgctcgtcgacgatgccctcgatctccttcatcctccctgcgaacctctcgaacgccgccttgaccctcggctccggcagccacgccggctcggcgtgctcccccatg

SEQ ID NO: 399818 - DNA, 415 bp, Oryza sativa nipponbare
gggttgggtttttttttaggcaaaccacacgaatacacgattgattaatttcactgagaatagcacgggtacattacattacacaaattcatacgttgatacacgcataggcgccgaagcgaccagctgcttaattaatcgataacacacgggtttaattcagcaataattagcacacacacaaaccacactcatatgggtggtttttattggggactaattaaggtaggtgactcgccggcggcgagtgttcggttgcttcgtgacttcacttgccgcacttgcagtcggtgcaggagcagctggtgccgcacttgcagccgccgttctcctcgccggcggcgacctcctcgaagtggctcttctcggcttcaactatgacgaccccatagctggtacctttctttacgcactg

SEQ ID NO: 399819 - DNA, 430 bp, Oryza sativa nipponbare
ccctcataatgagagtaacatatatttaaattgatagcttatggtccactaatggcagaatgccgaaggttacattattctttctgacttctgaacgtttggaacttttgcgatgtgaaatcccacaatgtatttacttacaattagtacatccgaaacttctccttagtgttctcgaagacttgttcagcaatcagggctccattgccatctgcccgccttatctccaagttggccttctggtagtaagcagttcccctcaaagcatcagcaatgaagtcatcgaatccaatggcaatagcagcttctgccttggctccatacaccagcctcttaatccgtgatagatgcacagcgccgaaacacattgggcaaggttcacatgatgcatacatttcacagtctgacaactcaatttttccaagctttt

SEQ ID NO: 399820 - DNA, 396 bp, Oryza sativa nipponbare
  unsure (1)..(396): unsure at all n locations
ggtgtgggtttttttttttttttttttttttnggataaaaatatatagccggagcttccatatttttcattcacatttgcctcacccaacaacatttagtcgtagcaaatcccactcttacattaagtcaaagagagatcaggtgaaacaaaaacaaaagccgagcccggccggtaaaatcaaaagacgatgaacaaactgggaacacacgaaacaaggggggagacattttcgaatcagagatgaacaattaaacaaggcttttttttacgatgaccgcttaattgccaccaaactcctctcaacccgggggcttttaggccataaaacttattagctgcacctgccttaccttttccaaaccctttattccgcccaatgccttaggggacccct

SEQ ID NO: 399821 - DNA, 365 bp, Oryza sativa nipponbare
tagctggaacactgctggtagggtgggatagtttatacccgtgttgaactgtacatcacaaattaaccactcaactcacccactcacctatgcatactgattcatgcttgcaagaaacatttaccacaacacacacagttagtttgaatctaatgagatacatgtgtatgtatctcctaccaccataccattaacatggtatacatgcatactccacaaaactaaatggacgaatcaagacgagatcttgttccatcgcccaatcatggagatgaccagcctgaactcattaagctccttgagatgccctggccctgatgaaatctatcacacgctcagcctgacagcgtatggatgatggtgtt

SEQ ID NO: 399822 - DNA, 422 bp, Oryza sativa nipponbare
tttttgaagaacgggcaaacagcaacagttggttcatccatcaaggggaattcaatccatagttatcttgacagcaaatagcttggtaactttgaaactccacagtacaatacggcggtctagaggtccagacaaagagcatcaaagcaagaatgaagagaaagacaattggaatcacataaaaagatggcccaaagcacactaatttttattacaaccgccacgacagtcttgatcgtactgactctaaggcgcaaaatacaaatcggcattaatcttttgcggatatcccgctctctaaaggcttcttattcctcagcaaatcccagttcagagagcttgaggtgggcctcggcgtaatccgcaaagaaggcgtcctcatccgcagcatatttctccaccagtggacggaaggctgggtc

SEQ ID NO: 399823 - DNA, 420 bp, Oryza sativa nipponbare
aaatctccaaatggaagtatcaagtgtagtatatcatcatcatgcaagtacagtgttacatagattaatcacaatgcagtttgattaagcagtgggcatcatcacatcgcattcagaggaaggctatcttagattacagatgaatatgcagacacccagcttggtgttacatacatagactggatttgggtgaaatttagccggcgagggcgctggtgttgtagacgaggagggcgccgccgccgaggagcccggcgagggtcacggcccagatcagaagcccggtggttccaccaacgtaggtgtcaccggtgggagaccattcctccggcgagtagattgggctgtagccgtcgacgtttgcgccgtacttgtcaacgaattggtacacacccttccccgtgctctttctgccagatg

SEQ ID NO: 399824 - DNA, 435 bp, Oryza sativa nipponbare
aattcgatcatccctgggatgcggcctgcggcttacattaaatctcgatccaaagaagcaaagatgatgacagacagaaattaattaagctagaaatctcctcgatcgatcacacacacacacacaattaaggtacatacatacatgcactgctgcaactgcaactgcagggtcggtgcgtggctactacaagtgtacacatggtacgttggttggcaccatctcgatcgtgtcgttgtgctcacttgccggggacgaagttggtggcgtatgcccaggcgttgttggcgacggggtcggcgacgtggtcgaagaggttctcgatggggcccttgccggtgacgatggcctggacgaagaagccgaacatggagaacatggcgaggcggccgttcttgagctccttcaccttgagctcggcgaaagtgtcagggt

SEQ ID NO: 399825 - DNA, 291 bp, Oryza sativa nipponbare
tttttatgccaaaatggggtgtgacagccgaaacgtcccaaagttacacgaaacatggacactgctgcaccaaacaaggtaaaaggtaaaaaccactcattatctgaaggtaaaacgctctccaggatcacgaactcttcaggtccgagagtgcagtcttggtggcggcggaaataacagcgtctgaagcattcggcaggtaatagtatttaccttgggcgacccttgcaatttccttggcaaatcctgtggatacaaacttgttctcggtatcaataaccggacgcgtgg

SEQ ID NO: 399826 - DNA, 430 bp, Oryza sativa nipponbare
  unsure (1)..(430): unsure at all n locations
gtcttgtgaacgaatgctcggtgcagatcaaatatgaaataataagacttgctgacacactcgagtaatgaccctctacacattgcaatagatatgaagacatgcatgtgttctcagttctcactcacaaaaaagcaccattcgcatcctaggccttcacgccaagcatataaagtgcaatatgaagatttaatcttcacctagaatttcaacgacgacggatactaaacggtacaaaagtaaacaataataaggcttcacataagccacatcaggtcctaagctcattatttaagcaagtcagtgcccactttagtactgccctccatagcctcggttgccatcaccatagcctccttggttaccataaccaccgncaccaccaccatacccgccgccacctcggttccctggaggtctctcattcgcg

SEQ ID NO: 399827 - DNA, 405 bp, Oryza sativa nipponbare
tttttaagcgtagtttatccaccataattaagatcgagaccatgagatagctagaacactgctgctaccatgagatagtttatccccctgtagtactgtacatcagaaattcaccactcaactcaccccctcacccatgcatccagatccatgcatgcaggaaacaattaccacaacacacacagtaagtctgaatctcatcacatccatctctctctctctcctccccccaattcattaacatcttatacatgcatactccacaaaaaaaaaaagaagaaacaagaagagaacatcttccatcgcccaataatcggtttaaccagcctgaatcatcaagctccttgagatgccctggccctgatgaaatcgatcacacgctcagcctgacagcgtctggatgat

SEQ ID NO: 399828 - DNA, 435 bp, Oryza sativa nipponbare
gagtttaactaagaccagtttgatttcgtgtttgatacaaaaattaagatggacggattcacaagagagcaccctctacttaagctttacattacaaggccaaccagcagctgcctgccggccgaccactgcgtgcgcacgcgcgcgcaataatcaaccaatcacacacagtacgcacgcacataaaaaccacccatagccttcacgtacgcccggacgcacgcaccggttcgtgccaagctcaagggtagatggttctcgggatgatgatgtcgccgatgttgttgtgccacgggtccgagaggtggctggccaggttctccagtgggccggtgcccgggtacgccgactgttggacgcagaaacccacaaaagccagcatggccaatcgcccgttcttgatctccttgagcttgtactcctcgaacttgacgg

SEQ ID NO: 399829 - DNA, 433 bp, Oryza sativa nipponbare
gccttatctcgcgaccgtaattgcgtaccatatgttcattactaggccatacacacgcatacaccttttttttttctttcaagatgacagcacatttattcaaaaatgtttgccttcatccttatgatacatgctgcatagagtttgtgagcgttacacactatttcccgccagcaagaagcagagcagagacttcttcatgacaggttctttactacgagtacgcagggcactgcaacattcttcatgacagaacctctggcactcatgcttcggcagccttctcttcacccttttgtgctagcttcgccttctttgcttcatagtctttcacggcagctttaattgcatcctcagcaagcatgctacaatggagctttactggtggaagtgacaagtgcttggcaatctcagtgttttttatagtcactac

SEQ ID NO: 399830 - DNA, 291 bp, Oryza sativa nipponbare
ggggatagcgagacacctgttataactttattaatatcaatacatgtcaggtaaagtctatgcagtgtgcatatgtgcattcacagtcacactcacttagtcaaataccaagatcgatcgatcgatgtacaagtggatgcattaattcatcatcttgggtgttcttatattacaaatcaccaccatgcaagtcgccattaaccaccaacccagctttcctaatttaagtagtaatcaacaaaaggatgacctttcctttctccataccctcccagctcgccggacgcgtgg

SEQ ID NO: 399831 - DNA, 523 bp, Oryza sativa nipponbare
taatgataatttctttggtatgagaaacaatattatcgaaacgagataggcaaatcggcaggtataaacgagtgtattacataaggtgttacataagatcacatggactaatacatcatagttcagtactctgtaacttttaacttattccaaaaacaccactgatgacacacaacctaggtaaaaacagcagtacaactgatggacaatcgcatagaggtgcaataggttcaaatccacaacccagtcttacttgctatctgcagaggcctcgactatcttgacagcagaccaaactcgcctttccctcacgcagacttggatgcgatcattccggtcttccgggcataggcaaagatcccgcctgcctcaataaccggcccggcatcgccgataggcttcagcttgtactgcttgccggatgtgtggttgatcatgacgccattattaaggtccaacctgacaacatccccggtcttgcactccttccaggctccagtgtccgctagctccaacgggtaga

SEQ ID NO: 399832 - DNA, 410 bp, Oryza sativa nipponbare
tccacccaggtggcccattggaccggctggggctggcgagcgacccggaccaggcggcgctgctgaaggtgaaggagatcaagaacgggcggctggccatgttctccatgctggggttcttcatccaggcctacgtcaccggcgagggccccgtcgagaacctctccaagcacctcagcgaccccttcggcaacaacctgctcaccgtcatctccggcgccgccgagaggacgcccagcctgtaaacatctcgccgccggcgacgctggctggcctcaagttaattttaatcttacccgggaagaagaagggaggagtttgagaagggtggaagaatgtgttaaatgtacgtgtaaattatcgtcgagttgggagatgaatttgaaaacctgttcattctgatccaccac

SEQ ID NO: 399833 - DNA, 340 bp, Oryza sativa nipponbare
tagtcaaataccaagagcgatcgatcgatgtacaagtggatgcattaattcatcatcttgggtgttcttatattacaaatcaccaccatgcaagtcgccattaaccaccaacccagctttcctaatttaagtagtaatcaacaaaaggatgacctctcctctctccataccctcccagctcgctcgtcatcacaaaactaaacagcgcgcgcgaacgcacaccaacgcattgatcccgtttgaattgcgcgcgaaagagcttaaattaagaggatgaggagaaggtgtcgaagatggtggtgtggagcgggtcgctgaggtgggtggcccagttgttgag

SEQ ID NO: 399834 - DNA, 396 bp, Oryza sativa nipponbare
ttcaacaacaactcaagattgagtcatacgtaagtgcttgctgatacaatatcaacatggagggttcattgccggttccatatgaacaaacataaaaacaccgaaaccccatatggccattatgccgatcctagcctagcttggcgaggacatcgccaagagcagatttggtcaacgtgtagtacttctccgcctcttcggggctcttgatcttggctgcatggtcaagcccgtcaatggtggcgaagagcttgccggtgaggtccttgaggcccttcttctcgtccttgggcttggagttgatgacggttttgaggtcgtagcgcaggtaggaggccctgaggcggtggtcgtccctgacgaacggccactgctttttctagatgagcggcttga

SEQ ID NO: 399835 - DNA, 354 bp, Oryza sativa nipponbare
  unsure (1)..(354): unsure at all n locations
ggaggacagacagaagttaagtgaagctagaaatctcctcgatcgatcacacacacacacacaattaaggtacatacatacatgcactgctgcaactgcaactgcagggtcggtgcgtggctactacaagtgtacacatggtacgttggttggcaccatctcgatcgtgtcgntgtgctcacttgccggggacgaagttggtggcgtatgcccaggcgttgttggcgacggggtcggcgacgtggtcgaagaggttctcgatggggcccttgccggtgacgatggcctggacgaagaagccgaacatggagaacatggcgaggcggccgttcttgagctccttaaccttgagct

SEQ ID NO: 399836 - DNA, 291 bp, Oryza sativa nipponbare
aactaagaccagttggattccgaggctgatacacagattaagatggacggattcacaagagagcaccctctactcaagctctacattacaaggccaaccagcagctgcctgccggccgaccactgagtgcgcacgcacgcgcaataatcaaccaatcacacacagtacgcacgcacataaaaaccacccatagcctgtacgtacgcccggacgcacgcaccggttcgagccaagctcatgggtagatggttctcgggatgatgatgtcgccgatgttgttgagccacgggt

SEQ ID NO: 399837 - DNA, 530 bp, Oryza sativa nipponbare
aataaagaataataaaatattcaaggaatttacatgaaatacaggatttgatgctcaagtatttgacaccatactgtaggacagtgacaccaacgagaaaccatagattacaaggtagtcactttttaacttttggaccataaaactggagataaacaaactgaattcatatcagcacgcatcaagtgatagacatacacaaccctactttgctgttctggagtgcttgataagccaatcaatgacaacatctatgtttacagagtccttgcaagagatcatgtagcagcaaacttcccggtcctttatcaattccaggcctagttgatcaaccaacgcttgctttgaaacagcttctgacttgtcaattttgttgccaaggactagtaaaggaatcccagctaaagattgttttgtcagcaggtcatgcaattcacttttagctatcggaatgctattccgggtagcagcttccaccacatataggattgcagaaactccacggcaatagcgctcccacatggtccgga

SEQ ID NO: 399838 - DNA, 430 bp, Oryza sativa nipponbare
cgggggatatgatcatgagttcacgagaacagaggaagaaacaaaagctaaaaattaaaaccatcaacagcccgatcgagtttgcattactagatacacacattgcagccttccttccctctctccatgtatcgatatatcaacccggccacgcacaaaacatttgttcattccctactcgagctgcgcgtaccacaccccttggatcttgacatccttgggcaccttggcgccgaggtctgtgtccgacggctgcacgctctcgaagacgccaatcacctcgccggtctctggcttgctcttggtgacgctcaacgtgatgttgcccgtcgacgacgaggcgttcttgacgttctccttagcgagctcctcctcgtctcctctgcctccggcggggagcgccacagcgttgtcgtagccggtagagcca

SEQ ID NO: 399839 - DNA, 389 bp, Oryza sativa nipponbare
cgcgtccgcggacgcgtgggtcgcccaggcgtccgtgtgacggcacctgtcgactatactgccaccaccactgagcggccactactcatccagctaactaggagaaggaaaaaagaagaacacagatactttggtaacaagcaagaaattggcacagaaatggctctgaggctgtgggctagctcagctgccaatgccctcaagatctcatgcagtggagccaccagggctgcacctgcctactcaatctccagatacttctccactgttcttgatgggttgaagtacagctcctctcatgagtgggtcaagaatgatggctctgtggccacaattggaattacagaccatgctcagggccatctgggagaggtggtgttcgtggagct

SEQ ID NO: 399840 - DNA, 471 bp, Oryza sativa nipponbare
ccacgcgtccgcgccaagggttatggaacagaggaggtcatcgaattttgcgtagaatttatcgaagaccttcgcccaatcggggtacctgaatcacgccatgaagggagactacggggaaagggaactctcggaaggaaagcaataacgacggtagacaacaatttattccgtaaagcccatttcactgttctgcaacactcttcattggtagctccttacatcgaggagcacttggctctagttcgcgccaggaacatcggtaagtccgatgcatggattacacggcatcacattgatactttccccgcgtggctacgacaacatctcatgggtaacgagtcgatcaaccaacaacttgccttcctggcgaggggaccgtctgggtcgatcgcgacattccagggatatgagatcaatgggtacacattctacacgagagcccaagacatgaagagcacgaaccaaaac

SEQ ID NO: 399841 - DNA, 424 bp, Oryza sativa nipponbare
ccacgcgtccgcccacgcgtccgcccacgcgtccgggactgtgtgccataaatcataattgcgtggaaaaccttacatgaatatctttcactgtcgatgacatgtgactggacggttacattactccatatttggtctcgatggttttctataattgataaatgttttattttcatttatatagtacatttatcttagatacagaggagggcttgttttattagacaatagctgtgggattttgaaggtgaagacgtaaagacaagactgagccaataattaattttcaccgacatgcatgtctcactcggcagttgcaacatacaatgctgttcttgtattagctgagatgttaaccacaaaccaaaccaacatttcaaagtttaacaattttaagatccaatgcagcaatacataacccaaa

SEQ ID NO: 399842 - DNA, 473 bp, Oryza sativa nipponbare
ccacgcgtccgcccacgcgtccgcccacgcgtccgcccaacgctcatctccaggcaacaactgttcgccagaattgttggtggccttggcggtcgtgctgctgaggagatcatttttggggagcctgaggtgaccacaggagctgctggtgacttgcagcaaattactggcctagccaagcagatggtggttacattcggtatgtcggacattggtccgtggtcgctaatggactcaggagctcagagcggcgatgtcatcatgaggatgatggcaaggaactccatgtcggagaagctcgcggaggacatcgataccgctgtgaagcggttgtccgatgaggcctacgagatcgctttgagccagatcaggagcaaccgggaggccatggacaagatcggtgaggtgctccttgagaaggagacattgagtggtgacgagttcaaggcgattctcttcgagttcaacgagat

SEQ ID NO: 399843 - DNA, 465 bp, Oryza sativa nipponbare
ccacgcgtccggagatcaggtagaacagtgagagtgaggtgcagaaaaatttgagctgaagctgaggatggcaacatccatgatcacctcgccgctggtggcgccggcccgggccaagggccttccgtccatctcccgccggggatcctccttcgccatcgtctgcagcggtgggaagaagatcaagaccgacaagccctacgggattggaggtggcatgtcagtcgatattgatgcatctggcaggaagagcacggggaagggtgtgtaccaattcgttgacaagtacggcgcaaacgtcgacggctacagcccaatctactcgccggaggaatggtctcccaccggtgacacctacgttggtggaaccaccgggcttctgatctgggccgtgaccctcgccgggctcctcggcggcggcgccctcctcgtctacaacaccagcgccctcgccggctaaatttc

SEQ ID NO: 399844 - DNA, 427 bp, Oryza sativa nipponbare
ccacgcgtccgccacgcgtccgccgatcgatggctgccgccggagatggagcaggaggcggcggcgagcagctgacggtgctcggcgcgtgggggagcccgttcctggtccgggtgcgcctggcgctcaacctcaaggggctcagctacgagtacgtggaggtggacctcgccggcaagagcgacctcctcctcgccgccaaccccgtccacgccaaggtccccgtcctcctccacgccgggaggcccgtctgcgagtccatgctcatcgtcgagtacctcgacgaggccttcccttcctcctcctcctccgccgccgcggccaccacgatcctccccgccgccgacgacccctacgcccgcgccgtcgcccgcttctgggccgccttcgtcgacggcgagctgctgagcgggtggattgggatcta

SEQ ID NO: 399845 - DNA, 474 bp, Oryza sativa nipponbare
ccacgcgtccgcccacgcgtccgcccacgcgtccgcccacgcgtccgcccacgcgtccgcacagttgaacattttcttcaacttcttgttagagatcaacagaagctaagaactattcttggcagtaacatgtcaaataagatgtgggaaagtcttgttgagcatgcgaagacatgtgttttgagtggcaaacactatatatattactcaagcgatgcaagaagtgttggagcaatattcaataacatatatgagttcactggtttgattgctgatgatcagtacatttcagctgaaaacctttctgaaaaccagaggttgtttgcggatacactagtgaaacaagcatatgatgactggatcaacgttgtcgaatatgatggcaaggaactgttgagattcaagcagaaaaagaaatctgtcacgacaagaagtgatacagcaaaggcttcaactagctacccttcttcatat

SEQ ID NO: 399846 - DNA, 420 bp, Oryza sativa nipponbare
ccacgcgtccgcccacgcgtccgacccccgtcttcgccgcccccgtcgcccccgccgcgtgatccgggaggccgcgacgaccgccagcgaacggaagggaaaaaaaaaagtcaaaaactagagccgatcgtttgatccattcgatatagggaagatgagtggatgcctctgcctcccccgctataaaaaggccccaaacgggacgccatcgccaccaccaccagcagcagcggccgaagcggaagcagcagcagcagcagcggcgacgaagccgtccatagattcttcttcctccccgtcactcctcaccaacaaccatcccccaccctccaagatggacgccgccgtcgaccgcctcaaggatgggttcgccaagttcaagaccgagttctatgacaagaagccggagctcttcgagcc

SEQ ID NO: 399847 - DNA, 476 bp, Oryza sativa nipponbare
ccacgcgtccgccgacttggcacgtcgttgccggtgctcgtcgcttcctcgccctgtgccgccgaggccatcctgcgcacgcatgacgacgtgttcgcgtcgcggccacgcaccgttctagcggatatcatcttctacggctcgcgcgacattggcttcgcaccgtatggcgaggattggcggcaggcaaggaagcttgtgaacacgcacctgctgagtgtcaacaaggtgcagtcgctatggcttgcccgtgaggaggaggtgaaaattgtgatggagaagataagcaaagcggcattcgcacgtgaagcagtggatataggccagattctttgctcattcacaaacgatctcgcatgccgtgttgtgtcaaggaagttagtcggggatgacaggcagaaaaagctcctccaagagttggttaataagacaataaagctgctttctatcttcaacggggaggagtacttttcaat

SEQ ID NO: 399848 - DNA, 418 bp, Oryza sativa nipponbare
ccacgcgtccgcccacgcgtccgcccacgcgtgcgcccacgcgttcgcccacgcgtccggccatctctctcagctctcacagctcactgcatcaatggccgcggccaccatggcgctctcctccccggtgatggcccgcgcggcgccgtcgacctcctccgagctcttcggcgaggcgcggatcaccatgcgcaagaccgccgcgaagcccaagccggcggcgtcgccggggagcccgtggtacggcgccgaccgcgttctctacctcggcccgctctccggcgagccggcgagctacctcaccggcgagttcccgggcgactaccggtgggacaccgcggggctctccgccgacccggagacgttcgccaagaaccgggagcctggggtgatccactcccggtgggcgatgctgggc

SEQ ID NO: 399849 - DNA, 479 bp, Oryza sativa nipponbare
ccacgcgtccgcttcctcccccctccaactccaagaaatcgactgacgccaacgagaacgagacgccatcgctgccatgggtttgcaggaggagtttgaggagttcgccgagaaggccaagaccttgcctgacacaatttccaacgaggacaagctgcttctctatggcctctacaagcaggcaaccgttggcccggttaccactgggcgcccaggtattttcaacctgaaagacagatacaaatgggatgcttggaaggccgttgaagggaaatccaaggaggaagctatggccgattacatcaccaaggtgaagcagctgctggaggaggcttctgcatccacttcttaggctattatgaacaacaccatcaatagtgctgcatatatgtaccaataaacataaatactataccatcatcaggcgctttgtgatcatcccttctctgtacttgtaatagtttcaagcagactcggtc

SEQ ID NO: 399850 - DNA, 414 bp, Oryza sativa nipponbare
ccacgcgtccgcccacgcgtccgcggacgcgtgggttgaggtaagataagtatgaagagatagggtagaaatatctttacaagagtacaaagatgcggggcattgggggtggggccctgtagcgagcaagccaaatgggagaacaccacatatcagctgaatcttatccatagaaaagagggaattgaaggggcaggaaggatatcccggccttgtggcacacttgactggagatgtataaagagaggaggatgtgaagaaagaagatatctaccaccaagctaattaagcaaaagaagaagaagaagaaagaagaagaagaagatgcagaccgctgctagcagtgtcgttggattgtcggccgtgttgcccgctgttgtgaaggggcgcaatctgcatattcaggcttctcgc

SEQ ID NO: 399851 - DNA, 472 bp, Oryza sativa nipponbare
ccacgcgtccgcgagagagagagagagagagagagagagaggcgacgagacggcgattgctcggttctcccgcgggcggcggcgagccggcgagggcttctccggtggggggcggcgagctatcctagcgcccgccttgggagcgctctcgcggatctcctttggagctttgatagcatagcaaggtcatggcagaggttgcagatttaactggggatgaggtgttcttaagacggtggtcagaaaagcaaaggatgatgctatagctccaactgatagtcttcccttggttgatgttcattatgaaggcacactcgctgaaaatggtgaagttttcgacaccactcatgaagacaactctattttctcatttgaaattgggcaaggagctgtcattaaagcatgggatatagctttaagaactatgaaaggtggtgaagttgcaaaaataacatgcaagccagaatacgca

SEQ ID NO: 399852 - DNA, 409 bp, Oryza sativa nipponbare
ccacgcgtccgattccaacaagaacaccttcgatttcgatccaccaatctaacacaacatccaatatccatggccgattcaggcagcgacgccccgatcagcaaccgccccgaggaggaggtgacggtggagaagacgccggagatggaggcggcggcggaggaggagaggctgaggtatctggagttcgtgcagcaggcggcggcgcaggtgctggtgctggcggcggcggcgtacgcgtacgccaagcagggcgccggcccgctccgccccggcgtcgaccacgtcgagggcaccgtcaaggccgtcgtcggccccgtctacgaccgcttccatggcgtccccctcgacctcctcaagttcctcgaccgcaaggttggtgagtccgtccaggagctggaccgccgcg

SEQ ID NO: 399853 - DNA, 448 bp, Oryza sativa nipponbare
ccacgcgtccgaataatctcagggagaagctacgcagattggaatctgagaagagtaatatagaggaagagatcgatcgtcttgagccagtaaaggaggagttggagacccgtattggtaaaaaggaacgggaagtgagagttcttgagaaaaaaataaatgagattgtggaccgtatttacaaagattttagcaagtcagttggggtgaagaacatccgtgaatatgaagagaggcaacttaaagatgctcaagcactacaggagaggaagctaagcctgagtaatcaaatgtcaaaattgaaataccagctggaatatgaacaaaaacgagatatgcaggcaccaattattaaattaaaggagacacgtgaatctctagagaaggaacttaagagtttacaggagagagagtctgaagctagggcggaagctgaacaaatttcaaa

SEQ ID NO: 399854 - DNA, 468 bp, Oryza sativa nipponbare
ccacgcgtccgcccacgcgtccgcccacgcgtccggataattcgtcgttcgttttgtgcatccatccagaattcgttccagatccagccagccagccatctcaagcttctctcttctcttgttattaagagcaagcaaacagtagtctagcgaagcgagactgcgagagcagagcattgttcttcttctctagctattagtggtggggaataatggctcccgccaccaccgcagcaatggccctcgcgccgcctccttcccatcaccatcaccatcaccatgtcaagcagctgcagctccctccgtctgtctccgtctccgtgcccctccgctccggtttccttggccgcgcactgcctgctgctgcccacccacagccgctgctcgccgccgagagccgccgcagcagcgccgtgtccgtgcggatgtcgtgggacgggcccctctcctcggtccgcctcattatgc

SEQ ID NO: 399855 - DNA, 475 bp, Oryza sativa nipponbare
ccacgcgtccggacctccgcctccccaatccgtcccgtctcctcgcccgccgccctcgactcccgtctcctcgcctgccgctggcgccgatctccatcctgctagcagaggtggcgccggcgtcctcctgctcccgccgcattcgcatcctaatccatcccatccggcctcggcctcgaatttcgtctcctcgcccgccgcttgcgccgatccccatcctgcgagcagaggtggcgcccggcgtcctccttcttccaccgcatcgtcgctcgccggcaaaatgggcccaagagttgtatttatgttcatcatcgctgtaatgcttttgggagatacaagcttggcctttgataatgctgttggtgaaaagatttcaaatatggaaacatccctgacaatgaaggtagatccacaactatgccaaatttgtgaggagttgccacagaagctctcttctatcttaatgagaatgaga

SEQ ID NO: 399856 - DNA, 205 bp, Oryza sativa nipponbare
cacgcgtccgcgcacatctttttctctctcagctttcacagtctcactgcattaatggacgcggccaccatggggctgggcttcctggtgatgaccctcgcggctccttcaaccttctacgcgctctttggagaggcgcggatcaccatgcgcaagaccgctgtgaagcttatgctggaggagacctttgggagcccgagaaacg

SEQ ID NO: 399857 - DNA, 447 bp, Oryza sativa nipponbare
ccacgcgtccgcccacgcgtccgcccacgcgtccgcccacgcgtccgatcagagatcaggtagaacagtgagagtgaggtgcagaaaaatttgagctgaagctgaggatggcaacatccatgatcacctcgccgctggtggcgccggcccgggccaagggccttccgtccatctcccgccggggatcctccttcgccatcgtctgcagcggtgggaagaagatcaagaccgacaagccctacgggattggaggtggcatgtcagtcgatattgatgcatctggcaggaagagcacggggaagggtgtgtaccaattcgttgacaagtacggcgcaaacgtcgacggctacagcccaatctactcgccggaggaatggtctcccaccggtgacacctacgttggtggaaccaccgggcttctgatctgggccgtgaccctcgccgggc

SEQ ID NO: 399858 - DNA, 474 bp, Oryza sativa nipponbare
ccacgcgtccggtggagaacattggcaagaggctggtgaactcgagggagggcccaccggagttcgagcagcccaagatgacgatcgaaaagctcatggagtacggatacatgcttgtgaaggagcaggagaacgtcaagcgtgtgcagctggctgagcagtacttgagcgaggctgctcttggtgacgctaactccgacgccatgaagactggttccttctacggttctgcgccatccagctgaataaaagatctctagctattcgcatcccatcgatgcatcgtaggcggcctgcataggaggaggagggcaaggagcacagcaagcaggtaacctgcctgtgccggaaggttgcaccgaccctgttgccaagaacttcgacccaacggcgaggagcgacgacggcagctgcctttacaccttttaagcaggccggcttgacgcttgctattaattatttctcctttttatg

SEQ ID NO: 399859 - DNA, 458 bp, Oryza sativa nipponbare
ccacgcgtccgcccacgcgtccggcccagcaccttagcgaggaggtgcggagaaggttctacaagaactggtgcaaaagcaagaagaaggctttcactaagtatgcccttaagtatgacagtgatgctggcaagaaagaaatccagatgcaacttgagaagatgaagaagtacgcatctattgttcgtgttattgcccacactcagatcagaaagatgaagggcttgaagcagaagaaggctcacctcatggagatccagatcaacggtggcactatcgccgacaaggtggactatggctacaagttctttgagaaggaaatccctgttgatgcagtcttccagaaggacgagatgattgacatcattggtgtcactaagggtaagggttatgaaggtgtcgtcactcgttggggtgtcacccgccttcctcgcaagacccacaggggtctccgcaag

SEQ ID NO: 399860 - DNA, 466 bp, Oryza sativa nipponbare
  unsure (1)..(466): unsure at all n locations
ccacgcgtccgcccacgcgtccgcccacgcgtccgcccaccttggcaaaaagaaaagaaaaataatatcatcgcactttttgctgcccttttcatcccctcggatattcacgaagcaaatctctctgcaattcttttcttttttttttttttgatcttgcggatcttctccattgaggaaaggcgagagctttgggatcgattccgggccatggcgaaggaggtggatccgtgcgaccacggcgaggtcgtcgacgccgggtgcgtccgcgccgtgctggccgagctcgtcctcaccttcgtcttcgtcttcaccggcgtcgccgccaccatggccgcaggggtgccggaggtggcgggggcggcgatgccgatggcggcgctggcgggggtgggatcgcgacggcgctggcggcgggggtgctggtgacngcgngttccacgtgtccggcgggcacctgaacccc

SEQ ID NO: 399861 - DNA, 467 bp, Oryza sativa nipponbare
ccacgcgtccgcggacgcgtgggtgaaattccataaagcatgttcccttttggaggtgtctgagccagcagtcattcatttcgagaatgagtcttaccagagctatctcaaacttctgcaagctttggttcatgaccacccatcaatctcagaagatatgaaaattgagtcacatattatgcttgtttctgagaaaatactacggaagtatctcaaatgtgcagggcgtgaacgatctaacgattcatctggtagagatccagcattacgctggaaactgcctttgggcactgctaagaaggaggaactgtctgctagaacttcattggtccttcatgtgatgcagttattgggtggcctagagagggactgctttaggagaaacctgcccctgtttttccccttattaactaacctcattcgctgtgagcatagctttgggaaagttcagcttgcactgtatgata

SEQ ID NO: 399862 - DNA, 401 bp, Oryza sativa nipponbare
ccacgcgtccgaggagcttgagcttggagagagacaacaatggcggctcaggctcttctctctgggaggcagctgctggggaggccattgcaatcttcagtctccaggtcttcttcctccaggaaggcacccttcatggtcagggcagaggccactccccctgccaagcaaggtgctgacaggcagctgtggttcgcatccaagcagtccctgagctacctggatggcacgcttccgggagacttcgggttcgacccgctggggctatcggacccggaggggaccggtgggttcatcgagccacggtggctggcctacggcgaggtgttcaacggccggacggcgatgatgggcgtcgtcggcatggtcgccccggagctcctcggcaagcttggcctcgt

SEQ ID NO: 399863 - DNA, 465 bp, Oryza sativa nipponbare
  unsure (1)..(465): unsure at all n locations
ccacgcgtccgagcataagcaacacaagggattaactcatcactcacttagctaattaaatcttcgaccatgtcggacaagtgcggcaactgcgactgtgctgacaagagccagtgcgtgaagaaaggtaccagctatggcgtcgtcatagttgaagccgagaagagccacttcgaggaggtcgccgccggcgaggagaacggcggctgcaagtgcggcaccagctgctcctgcaccgactgcaagtgcggcaagtgaagtcacgaagcaaccgaacactcgccgccggcgagtcacctaccttaattagtccacaataaaaaccacccatatgagtgtggtttgtgtgtgtgctgattattgctgaattaaacccgtgtgttatcgattaattaagcagctggtcgcttcggcgactatgcgtgtatcaacgtatgaatttgngtgatgtgatgtacccgtgct

SEQ ID NO: 399864 - DNA, 392 bp, Oryza sativa nipponbare
ccacgcgtccgctcagctgcaaggagaaggagaaggtaggctccagccatggcttcccagctgtccgccgacacatccgtgccgaagttccatggcctccggacctactcctctactaggtccatggtgacgctgacatcgtcgaggatgagcaagaagaggtcccagggcatgcggtgcgactacatcggctcagccaccaacgttatcatggtgacgacgacgacgctgatgctgttcgcggtgaggttcgggctggcgccgtcggcgaacaggaagtcgaccgcggagctgaagctggaggcgcacgactccggcctgcagaccggcgaccccaccgggttcacgctcgccgacacgctggcctgcagggtcgtctgccacatcatggg

SEQ ID NO: 399865 - DNA, 259 bp, Oryza sativa nipponbare
  unsure (1)..(259): unsure at all n locations
tccgattcccggtcgaccacgcgtccggcagcagcagcagcaatggccgccctcgccgccgcatccaccgccttcgccgccaagccgcgcctggcgcgcgcgccgtcgtccccggccgcgcggttctccgtgtcgtgctccgcgtcgggcaacaacggcggcgccggcgagatggcgcagtcgctggcggcgtcggccaagacgttctccgcggcgctggcgctgtcctcggtgctgctcttcctggcggngacgttct

SEQ ID NO: 399866 - DNA, 169 bp, Oryza sativa nipponbare
  unsure (1)..(169): unsure at all n locations
acgtccgnattcccgatcgacccacgcgtccgcggacgcgtgggcggacgcgtgggcggacgcgtgggccgtcatcgagcagtcggtgtcccccggcgggggcgcgtggctcggcgggcagctgttctccgccatggtggtgcacaagccggcgcacctgttcctcgac

SEQ ID NO: 399867 - DNA, 468 bp, Oryza sativa nipponbare
ccacgcgtccgagacgcccctatagggatgattattcaccccgggggtcagcctattcggacctaggtcctcgtagtgctccccgcctttctgataggcgagcatatattgatgatggttatggagggaagattgaccgtcctttaccaacatatagggagggccgtggtcgtgattatgatacaatgtctggttcaaaacgctcatatgctgagatggatgatgtgccacctcgatatcatgacattagtgttcgtcagtctaaggcacgcttagactatgatgttggtggcagcagtgcccggtatgcagatacatatagcgagaggcttggacgatcacatgcgggatacagtggtggcagatctgtctctggtcatgatccagtgtacagtagtggtcggcatggcatgagtttatgaggttccgcaagcagtaatgatgctggtggaatgtactcatcaaatt

SEQ ID NO: 399868 - DNA, 476 bp, Oryza sativa nipponbare
ccacgcgtccgagcgaatccagcagcagaagcagcagcagcagctcagccgccgccgatggcgtccacgatcatggccccaacctcccgcgtcctcgccgccaagacccccttcctcggccatccccgcccctccaatgcccccgtccgcgacatcgccgccgccgccaccggccgcatcaccatgagcaaggagctgtggtacgggccggatagggtgaagtacctggggccattctcggcgcagacgccgtcgtacctgaggggcgagttcccgggcgactacgggtgggacacggcggggctctccgcggacccggaggcgttcgcgaggaacagggcgctggaggtgatccacggccggtgggcgatgctcggcgcgctgggctgcatcacgccggaggtgctcgagaagtgggtgcgcgtcgacttcaaggagcccgtgtggttcaaggccggcgcccagatcttctccga

SEQ ID NO: 399869 - DNA, 475 bp, Oryza sativa nipponbare
ccacgcgtccgcccacgcgtccgcccacgcgtccgagttgagttggggattgattgattgattcggattgggaagaagaagaagcaggggagcatgggcagcaagtcgtacccgacggtgagcgatgagtacctggcggccgtgggcaaggcgaagcgcaagctccgcggcctcatcgccgagaagaactgcgccccactcatgctccgcctcgcgtggcactctgctggcaccttcgatgtgtcgtcgaggaccggcgggcccttcggcaccatgaagaaccccggcgagcagtcccacgccgccaacgccggcctcgacatcgccgtcaggcttctcgaccccatcaaggaccaacttcccatcctctcctacgccgacttctaccagcttgctggcgttgtggccgtcgaggtcaccggcggacctgaggtccccttccatccgggcaggcaggacaagcctgagccttctc

SEQ ID NO: 399870 - DNA, 476 bp, Oryza sativa nipponbare
ccacgcgtccgcggacgcgtggggcagagatggccccctccgtgatggcgtcgtcggccaccaccgtcgctcccttccaggggctcaagtccaccgccggcatgcccgtcgcccgccgctccggcaactccagcttcggcaacgtcagcaatggcggcaggatcaggtgcatgcaggtgtggccgattgagggcatcaagaagttcgagaccctctcctacctgccaccgctcaccgtggaggacctcctgaagcagatcgagtacctgctccgttccaagtgggtgccctgcctcgagttcagcaaggtcggattcgtctaccgtgagaaccacagatcccccggatactacgatggcaggtactggaccatgtggaagctgcccatgttcgggtgcactgacgccacccaggtgctcaaggagctcgaggaggccaagaaggcgtaccctgatgcattcgtccgtatcatcggc

SEQ ID NO: 399871 - DNA, 424 bp, Oryza sativa nipponbare
ccacgcgtccgcaatgggttacgacattggggccttcctggggaacttgattttggcatatttttcacaagatggacacgctgatcaagcaaatgatcgtaaggcttacaagaaatggatcttgaagacaattgaagattcatggaatttgttccacaagaagtttgtcgaattatggaataaacacaaagatgggaatggggaagcatacctgccccctatatacaacagctcagagcttttgtgccttgcacagaagaagtacatgacaagcctatttcatgacagtcttggatttggttcagcaaaaatgatcaggagaattgttggaattgctcatgttgaggattttgagtcgattgaggatgccagcaagagagcttcgtgtgagcgacgtgcccttaattgtgcaaaggcaatcctg

SEQ ID NO: 399872 - DNA, 475 bp, Oryza sativa nipponbare
  unsure (1)..(475): unsure at all n locations
ccacgcgtccgcccacgcgtccggccactactcatccagctaactaggagaaggaaaaaagaagaacacagatactttggtaacaagcaagaaattggcacagaaatggctctgaggctgtgggctagctcagctgccaatgccctcaagatctcatgcagtggagccaccagggctgcacctgcctactcaatctccagatacttctccactgttcttgatgggttgaagtacagctcctctcatgagtgggtcaagaatgatggctctgtggccacaattggaattacagaccatgctcagggccatctgggagaaggggtgttcgtggagctgccggaggcggnggcgaaggtgagccagggaggtgcattcggcaacgtggagagtgtgaaggccaccagcgacatcaactcccccatcttcggtgaggtcgtcgaggttaacgacaagctctctgagacaccncgcctga

SEQ ID NO: 399873 - DNA, 420 bp, Oryza sativa nipponbare
ccacgcgtccgcacgagctcaaaagacacacattccaaaagcatctgtggccatctcctcctagtcctaggctcgcgtcaatggcggcgtccaccatggcactctcctcccctgccgccctcgccggcaaggcggtcgccaatgcgaaggtgttcggcgagggccgcgtcacgatgcgcaagtcggcggccaagcccaagcccgccgcggcgtcggggagcccgtggtacggcgccgaccgcgtgctctacctcggcccgctctccggcgagccgccgtcctacctcaccggcgagttccccggcgactacggctgggacaccgccgggctgtcggccgacccggagacgttcgccaagaaccgggagcctggagtgatccactgccggtgggccatgctgggcgcgctcggctgcgtct

SEQ ID NO: 399874 - DNA, 475 bp, Oryza sativa nipponbare
ccacgcgtccgcgagatcttaaaccgagtaacattctcttggatagcgaaatgaaccctaaaatttcagactttgggttagcaagaatatttagctcaaataacacagaaggaaacacaacaagaagagtggttggtacatacggctacatggctccggagtatgcttctgtgggcctcttctctatcaaatccgacgtattcagctttggtgttctatttcttgagattatcagtggaaaaaagaattctggttcccatcatagtggagactttatcaatctccttggatttgcatggtcactatggggagagggaagatggcttgaactcatcgatgaatcattagtttccaaatatcctcctgcagaaaatgaaatcatgaggtgcattaacatagcattgctgtgtgtacaagagaatgcagctgatcgaccaaccatgtcagatgttgttgcaatgctaagcagcaagac

SEQ ID NO: 399875 - DNA, 358 bp, Oryza sativa nipponbare
  unsure (1)..(358): unsure at all n locations
ccacgcgtccgcccacgcgtccgcccacgcgtccggaggaggaggaggaggaggagaagctagcggcggcggcggcaatggcgacgagcgggctgaggagctgcagcgcggtggncnttcctagccttctggctccgtcattcaacaagatccgtctgacggtttttgcttacgccctttcctgtataaggcctatcttctccaggaatgtatttatttctangtatattgtaccatgaattccaaaatctagaggcatgcatgcaaatgttgattgttgtacgagtcatttatagcaggaatacttgagataagtcgagcttacgttttgtacggctgtaagaactgatgactgtta

SEQ ID NO: 399876 - DNA, 435 bp, Oryza sativa nipponbare
ccacgcgtccgtggaggtgatccactcgcggtgggcgatgctgggggcgctgggctgcgtcttcccggagatcctgtccaagaacggggtgaagttcggggaggctgtgtggttcaaggccggaccgcaaatcttctgcgagggggggctcgactacctggggaaccccaacctggtgctcgcgcacagatttctcaccatctgcatgatatatgtgttgctcatggaattcacagagggctaccaccacaatggttatccttttgcataggtaccaggtaccattctctatggatggataattgtagtctgaatcgtaaaatgttattcctttactggggcatcatacttgttcattctggtattctgtatcgctgtaactttactggtgattattcacaattcttatgctttacatcagcatgttagatcatt

SEQ ID NO: 399877 - DNA, 474 bp, Oryza sativa nipponbare
ccacgcgtccggttaggttagagaaacgagcccctgttaagccttgtccttctcttcttgatttagactaccctgttgttactagtactggtcctgacaacaaggcagatgaatctactgagctagtggggaatttcatcggcttcgatggagataccagttcagaggaggataatgtgcctgcatcttatggcaaggtgcctgctggtgaattggtggcgcttctagatggtccagaactcagcaataagatagatgacatgatcgaggccaacttatcgggcttcggcaacgtcagcaatggcggaaggatcaagtgcatgcaggtgtggccaattgagggcatcaagaagttcgagaccctatcgtacctgccaccactcaccgtggaggatcttttgaagcagatcgagtacctgcttcgatccaagtgggtgccttgcctcgagttcagcaaggttggattcgtctacc

SEQ ID NO: 399878 - DNA, 473 bp, Oryza sativa nipponbare
ccacgcgtccgcccacgcgtccgcccacgcgtccgctgttcttctttgaatacttgggtcctcttcttatctaccccatgttctattacttgcctgtctacaaatatttcggatacgagggagagcgggtcatgcatcctgtccagacttacgccatgtactattggtgtttccactacttcaagaggatcatggagacgttctttgttcaccgcttcagccacgcgacttctcctgtatcaaatgtcttcaggaactgtgcctactactggacctttggagcttacattgcttactactgcaaccacccgctttacacccctgtgagtgaattgcagatgaagattgggtttggatttgggattctctgccaaattgcaaacttttattgccatatcctgctgaggaaccttagaagtccgagtggtaacggtggctatcagattcctcgtggcttcctgttcaacatagtg

SEQ ID NO: 399879 - DNA, 469 bp, Oryza sativa nipponbare
  unsure (1)..(469): unsure at all n locations
ccacgcgtccgagcgaatccagcagcagaagcagcagcagcagctcagccgccgccgatggcgtccacgatcatggccccaacctcccgcgtcctcgccgccaagacccccttcctcggccatccccgcccctccaatgcccccgtccgcgacatcgccgccgccgccaccggccgcatcaccatgagcaaggagctgtggtacgggccggatagggtgaagtacctggggccattctcggcgcagacgccgtcgtacctgaggggcgagttcccgggcgactacgggtgggacacggcggggctctccgcggacccggaggcgttcgcgaggaacagggcgctggaggtgatccacggccggtgggcgatgctcggcgcgctgggctgcatcacgcncggggtgctcgagaagtgggtgcgcgtcgacttcaaggagccccggtggttcaaggccggcgcccagatct

SEQ ID NO: 399880 - DNA, 462 bp, Oryza sativa nipponbare
ccacgcgtccgcccacgcgtccgatcgagtacctgcttcgatccaagtgggtgccttgcctcgagttcagcaaggttggattcgtctaccgtgagaaccacaggtctcccgggtactacgatggcaggtattggaccatgtggaagctgcccatgttcggctgcaccgatgccacccaggtgctcaaggagctcgaggaggccaagaaggcctaccccgatgcctttgtccgtatcatcggcttcgacaacgtcaggcaggtgcagttgattagcttcatcgcctacaagcccccaggttgcgaggagtctggtggcaactaagctaagatcaagcatcgcgctggtggattgctgcctataataatagtatgcagctttgttttgggctatgttgatgatatatcaatatataatatgctatatatttttattttacagtttggttatgtaccatctcaat

SEQ ID NO: 399881 - DNA, 458 bp, Oryza sativa nipponbare
ccacgcgtccgcggacgcgtgggcggacgcgtgggcggttagaaatataaccccccaaaaaaagtagtattgaaaataaaaaaccaggttcttctttctggaaagacaatatttctttcatccttttgcattgaaataacaaattgaaatcaaaataatatgattcaacctcagacccttttaaatgtagcagataacagtggagctcgaaaattgatgtgtattcgagtcataggagctgctagtaatcagcgatatgctcgtattggtgatgttattgttgctgtaatcaaagacgcagtgccccaaatgcctctagaaagatccgaagtaattcgagctgtaattgtacgtacatgtaaagagttcaaatgcgaagacggtataataatacgctatgacgacaatggcagcggtatcaatgatcaaaaaggaaatccaaaaagaacctcgcgttt

SEQ ID NO: 399882 - DNA, 478 bp, Oryza sativa nipponbare
  unsure (1)..(478): unsure at all n locations
ccacgcgtccgcccacgcgtccgacaattcgtactttcttgagctactgaagggggaatctgaggggcttctgaagctcccaactgacaaggcattgttggaagatccttcatttagacgctatgtggatctttatgccagggatgaagacaccttcttcaaggactacgctgaatcgcacaagaagctttctgaacttggcttcactccacggagcagcggccctgcatctacgaaatctgatctttcaactggtgctgtactcgcacagagtgctgtcggggnagctgttgctgcagctgtagttatcgtgagctacctatacgaggcttctaagaagagcaagtaagattgctatgttcttcatcagcatggcctcatagtaagtatcagggtcaaataacagaattctagtgatgatccagccatacgaacacttncttcatgtctacatataccctatcaatatttcatgggg

SEQ ID NO: 399883 - DNA, 344 bp, Oryza sativa nipponbare
ccacgcgtccgccaagatatcgcaggaggagtacctcaacgccggcaggcagggcgtcggccagaacttccgcagcatcggcaagaacgtcagccccatcgaggtcaagttcaccggcaagaacgtcttcgacatctagacttcttcttcttcttcttcttctctcataatcgacctattaattacttgtgttttgggtggatggacatgtaattttaatcatctgtcaggctgctcttcagttattgatgatggtgtaatcgatcgatggtgggatataatctcttcttataatattgtagtatatgtttggtgaattttgatgcgtgttcattaacgtgtta

SEQ ID NO: 399884 - DNA, 480 bp, Oryza sativa nipponbare
  unsure (1)..(480): unsure at all n locations
ccacgcgtccgcgctctcctctcctcgccgcctcgccgcctcgcatggccgcgtcctactacaacaacccgccgccgccgcactcctcgtacgcggccccgcctccgccgccgccgccgccgccgggcacctccctgtacgcctcctaccgccaccacgcctaccctcctcacccgccgccgccgcccgcgtacgtcggcgcgtactacgaccacgcggcggagccactgccgccgcgcgacgagctccgcacgctcttcatcgcgggcctccccggcgacgccaagggccccgaggtctacaacctcttccgcgacttccccggctatgtctcctcccacctccgcacctncggcaaatcctcgcaggcatatgcgttcgctgtctttgcagatcaaccttctgccttagctgcaatgagtgccacanacggaaggatatttgaccttgagaataattgcacactgcatgtagatcttg

SEQ ID NO: 399885 - DNA, 469 bp, Oryza sativa nipponbare
ccacgcgtccgcaagtcgcgaggagtcgagaggtgagcggcaatggcgggcgtcggctgccacttcctcctctgcctctccccgccgctctactccatacgccgtcccgccgccgcccaccgcccggccaaagcgcgatcccatatcagctgttgctcgaggcacgacgacgcagaggcatgttcaacaagcaagcccttgaccaatggcaaggaagaagaaaaaaccactccttccagacgaaaatgccttgcttgcctatgtgctgtgacattaatcagtgcatcaggtccaacaatgcttacaccaaacggactcgcttcggatatgatgagcaagcctgctgtatgccggaattgcaacggtagcggtgctgtattatgtgacatgtgcggcggcactggaaaatggaaggccctcaaccgaaagagagcaaaagatgtctatctattcacagagtgcccaaact

SEQ ID NO: 399886 - DNA, 390 bp, Oryza sativa nipponbare
ccacgcgtccggttgtgcaagggacacagctcttagcaattgacacaggagctgctatgggtttgttaagaagagctcttattggggatgaactaactcataaggaaaagcaggctcttcaaagaaccctgacagatttagcctctgttgttcctataggaatactcatgcttctgccagtaactgctgttgggcatgctgctattttggctttcatccagagatatgtgccttccatgatcccatccacctatgctccagagaggttagatctcctcaggcaacttgaaaaagtgaaggaaatgggagttgctgaaggtagtagtgaagaaatggtagaagcttgtagttcgagaggtgaccaagtgaaataagcaaaccatgtacaga

SEQ ID NO: 399887 - DNA, 370 bp, Oryza sativa nipponbare
ccacgcgtccgttttgatctgatcgatggacatggcgtcgcccatgctctccgccagagcaccgtgctcactccagggaggcgggcttgtcagaagctctcctgatctgaggagctcgtgcccactgccggtgcagcggaatgcctcatagcacgacttgatgaacacggcgtcgttgaggacccacacgagaggaacgagcggcggggcgcggtcgtgcccgacgagatcgaccctgcacgcggggatcaaagctttcgggcagctcgggcgcacttttctgcagggctgcaacggacgcggtgaccgctatcacatggacgtcatcgacataaacgacaccggaggcgcgaagcaggcgtggcacctt

SEQ ID NO: 399888 - DNA, 393 bp, Oryza sativa nipponbare
ccacgcgtccgcaagaaagcataagcaacacaagggattaactcatcactcacttagctaattaaatcttcgaccatgtcggacaagtgcggcaactgcgactgtgctgacaagagccagtgcgtgaagaaaggtaccagctatggcgtcgtcatagttgaagccgagaagagccacttcgaggaggtcgccgccggcgaggagaacggcggctgcaagtgcggcaccagctgctcctgcaccgactgcaagtgcggcaagtgaagtcacgaagcaaccgaacactcgccgccggcgagtcacctaccttaattagtccacaataaaaaccacccatatgagtgtggtttgtgtgtgtgctgattattgctgaattaaacccgtgtgttatcg

SEQ ID NO: 399889 - DNA, 349 bp, Oryza sativa nipponbare
ccacgcgtccgccacgcgtccgctcctccccctctttaccttttcctcctcggttcggttccgtggttcgtctagggtttagtgggttgagatggcggcgccggatgtcgagtaccgctgcttcgtcggcggcctcgcctgggccaccgacgaccgctccctcgaggccgccttctccacctacggcgagatcctcgactccaagatcatcaacgacagggagacggggaggtcacgtgggtttggcttcctcaccttctactacgagcagtcgatgcgcgacgccatcgagggcatgaacggcaaggagctcgacggccgcaacatcacccgtaatgaggcccagtcc

SEQ ID NO: 399890 - DNA, 413 bp, Oryza sativa nipponbare
ccacgcgtccgcgacgtacgtaccatcatggctgctactatccccgcttctccggccactctgcagccatgcaagaaaaacgtgagcggcagcatgctcatccggtcgcctccgcgcccttggaggaggaggctcccccagcacgttgtaatagttgatgcgagctcatcgtctcgtggcccgaaggcagcgacgggtggccggctcgagacgtcgactgacgctgcagcggtggccggggaggatggagacgtgatccggaggctgcagaacggaccggacgtgcgtggcgttgcgctggaaggggagaacggccgggccgtggacctcacgccgctggcggtcgaggtgatcgccgagagcttccgggagtggctgcgggaggagctccagcagctggagagcgggaggga

SEQ ID NO: 399891 - DNA, 417 bp, Oryza sativa nipponbare
ccacgcgtccgcccacgcgtccgaccgccgccgcatcgccctcgttagaacgatggccgcgtcggcgctgcaccagaccaccagcttcctcggcaccgcccctcgccgggatgagctcgtccgccgcgtcggcgactccggtggccgcatcaccatgcgccgcaccgtcaagagcgcgccccagagcatctggtatggacctgaccgtcccaagtacctgggcccgttctcggagcagacgccatcgtacctgaccggagagttcccgggagactacgggtgggacacggcggggctatcggccgacccggagacgttcgcgaggaacagggagctggaggtgatccactcgcggtgggcgatgctgggggcgctgggctgcgtctttcccgagatcctgtccaagaacggggtgaa

SEQ ID NO: 399892 - DNA, 465 bp, Oryza sativa nipponbare
ccacgcgtccgcgcacacttagccgtacgcctgcccggacggctgaagccgaggtggacgactcgacgaagagagaatgatgaagatctaacacgcagacattcaccctgatgatcaatgtgtacaggaaggcaaagcaaccaatgtcatcgatgaaagttttcaacgagatgaagtcgattgggtgcaagcctaatatctgcacttacactgccctggtgaatgcatttgcgagggaaggcctgtgcgagaaggctgaagaagtgttcgaggagatgcagcaggcagggcacgagcctgacgtgtatgcttacaatgccctcatggaagcttacagccgcgctggattgccgcaaggcgcatcggagatcttctccttgatgcagcacatggggtgtgagcctgacagagcttcatacaacatcttggtagatgcatatggaagagccggccttcatgaagatg

SEQ ID NO: 399893 - DNA, 451 bp, Oryza sativa nipponbare
ccacgcgtccgcggacgcgtgggcggacgcgtggggaaaacatagcagggtcactcaacatatcagaaaagaaagtactcaatgctacagaggctgtgaacaaggttctttcgttggatcaacaagcatttccatccttaaacggcttacctggagagacactgcacagttacatagaggatcaaaatgtcgcaaatgatccatggcatggatttgaggagtggtatctcaaggaagaagtcaacaagcttttaaactcaactctcaacgagcgtgagagggacattatccggttatatcatggcataggaaaacaatgccatacatgggaggatattagcagacaattcgggttgtcgagggagagggtgaggcaagtaggactcatcgcaatggagaagctgaagcatgctgcgaggaggaaaaatttggaggcattgcttgaggatta

SEQ ID NO: 399894 - DNA, 470 bp, Oryza sativa nipponbare
ccacgcgtccgatggagctaacatgaatgctcaggtcggattgacaagccctggctttattggagcagatgtttgccaccttaaccttcacaagacattctgcattccacatggtgggggtggtcctggaatgggtcctattggtgttaagaagcacttagcaccatttttaccatctcatccagtgatcaccaccggtggcttccctctccctgagaaaaccgaccctcttggtaccatttctgctgccccatggggatcagcgttgattctaccaatttcctacacatacatagccatgatgggttctaagggtctcactgatgcttcaaagattgcaatcttgaatgcaaactacatgacaaagcgtctggagaaacactacccagttcttttccgtggagtcaatggaactgttgcccatgagttcattattgatttaagaggatttaagacgactgctggtatag

SEQ ID NO: 399895 - DNA, 347 bp, Oryza sativa nipponbare
ccacgcgtccgcccacgcgtccgcgccgttgagatgggttgctttgggtgcttctcgccggaggtggacgacgacctcaagccatccaagcccaattaccactcttctgacgaatcatcaggcgccgacgcgaggagaaaggtcgcgccgttggcgacggatggggggaacggctacgcgcacagcttcaccttcaaggatctgtcagtggcgaccggctacttcaacgaggcgaatttcatcggagaaggtggctttgggaaggtgtacaaaggcaagatcaatgggcagatggtggcagtgaagcagctcacccgggacggcgtgcaggggaggaacgagttctt

SEQ ID NO: 399896 - DNA, 459 bp, Oryza sativa nipponbare
ccacgcgtccgggaaagcccatcaagtttgtagggcgaggagaacgcatggaagatcttgagcctttctatcctgatcgtatggcacaacgaatcttgggaatgggagatgtactttcatttgttgaaaaggcacaggaagtgatgcgtcaagaagatgctgaggaattacagaagaagatcctgagtgcaaaatttaacttcaatgacttcttgaagcaaacacaagctatcgcacaaatgggttcatttagtcgtataattggcatgattccaggcatgaacaaggttacccctgctcaaattcgtgaagcggagaaaaaccttaaatttatggagtccatgatcaacgtaatgacccctgaggaaagggaaagaccagagctacttgctgaatcacgcgagaggaaggatagagtggccaaggaatccggaaaaaacgaacgacaggtgagccaat

SEQ ID NO: 399897 - DNA, 460 bp, Oryza sativa nipponbare
ccacgcgtccgtcaagaagtactcgagcaaagaaggagagagcttggtgagctgcagagatggccccctccgtgatggcgtcgtcggccaccaccgtcgctcccttccaggggctcaagtccaccgccggcatgcccgtcgcccgccgctccggcaactccagcttcggcaacgtcagcaatggcggcaggatcaggtgcatgcaggtgtggccgattgagggcatcaagaagttcgagaccctctcctacctgccaccgctcaccgtggaggacctcctgaagcagatcgagtacctgctccgttccaagtgggtgccctgcctcgagttcagcaaggtcggattcgtctaccgtgagaaccacagatcccccggatactacgatggcaggtactggaccatgtggaagctgcccatgttcgggtgcactgacgccacccaggtgctcaaggagctcga

SEQ ID NO: 399898 - DNA, 451 bp, Oryza sativa nipponbare
ccacgcgtccgtaaagtattccccaccggagaatgaagaaatcgcttcaaggcttacacagagatttgatgatacagaagaaaaggttaagctgaggttacagactcattatcaaaatgtagaatccttgctatcaatttacgaagatgtgatagttgaggtaaaaggggatgctttggtggatgatgtgtttgctgagatcgacaagcagctgacttctagccttgataagaaaacagaaatggtggctagcgcatgagcaaaagatctgtgccgattgaacgtgctcagattcacttattttatacttttccatgtagttggaaattggaagtatgggaattttggtttgaagaatcccattattgttgtagacaaatggaagtgacaaagcatcgacaggatgaatgttagaaatctttctatcatacctttgatgtacatgcatagc

SEQ ID NO: 399899 - DNA, 384 bp, Oryza sativa nipponbare
ttccgggctacgacctcacgcggacgaagacgaagaaagaacaggaggaagatgcagaccgctgttagcagtgtcgttggcattgtcggccgagttgcccgctgatgtgaatgcgctcagcctgccgattctggctgctctccgcggtgcgttgcgcgatcttgcggccgcggacggcgtggcattcgacgctgccgagtgggacatacagctctaacatatctgtgtttacgatggaggcgtgctacctcatcggcggcgaggcgtgcaacgtgcagatgtactcagaggccaagctctcatcatcgggtgcttgtgctgtttctcgtgcggcggcggaggaagtcgacagggactacctatcctacgacgagcccacccacg

SEQ ID NO: 399900 - DNA, 460 bp, Oryza sativa nipponbare
ccacgcgtccgcggacgcgtgggtaatgatgccagtacacaggaggagttttaaagatgtgtacttagtttatgaactcatggatactgacctgcatcagataatcaagtcacctcagggtctttccaatgatcactgccaatattttctttttcagttgcttcgaggactgaaatatctccattcagcagagatactccacagagacctgaaacctggaaatctactggttaatgcaaactgtgatctcaagatatgtgattttggtcttgcacgcacaaacagtagtaaaggtcagtttatgactgagtatgttgtcacccgctggtatagagctcctgagttgctcctttgctgtgacaactatggcacttccaatgatgtttgggtctgtggttgcatcttcgctgagctacttggtcggaaaactatttttccaggaactgagtgccctaatcag

SEQ ID NO: 399901 - DNA, 405 bp, Oryza sativa nipponbare
ccacgcgtccgcccacgcgtccgcccacgcgtccgcccacgcgtccgcccgccgccgcggcctacggcgaggcggcgaacgtgttcgggaagcccaagacgaacacggagttcatcgcctacagcggcgaggggttcaagctgctgatcccgtccaagtggaaccccagcaaggagcgcgagttccccggacaggtcctccgctacgaggacaacttcgacgccaacagcaacgtctccgtcataatcaaccccaccaccaagaagaccatcaccgagttcggctcccccgaggagttcctcgcccaggtcgacttcttgcttggcaagcaggcctactccggcaagacagattccgagggtgggtttgagtcggacgcggtggcgacggcgaacatcctggaga

SEQ ID NO: 399902 - DNA, 350 bp, Oryza sativa nipponbare
ccacgcgtccgcgcaagttcttcgttggtggcaactggaaatgcaacgggaccactgatcaggtggacaaaattgtgaaaattctgaatgagggacagattgcttctacagatgttgttgaggtggttgtcagcccaccttatgtgttccttcccgtggtcaagagtcagctgcgcccggagatccaagttgctgctcaaaattgttgggtgaagaagggcggggctttcaccggtgaggtcagcgctgagatgcttgtcaaccttagtattccctgggttattcttggacactcttaaaagaggagtttgttgggtgaatcaaatgagtttgttggagacaaagtggca

SEQ ID NO: 399903 - DNA, 465 bp, Oryza sativa nipponbare
ccacgcgtccgcggacgcgtgggcgtctaccttacctagcagcagcagctagctagcttaattagctatagcagccatggcggcgacggcactgagcagccaggtccggttgccgatgtccctgcgggtggcgacggcgccggcgccggcgcgcgtgtcggtgctgccggcgagcaacaagctgggagacaggctgcggatgcaggcgacgtacaacgtgaagctgatcacaccggacggcgaggtggagctgcaggtgccggacgacgtgtacatcctggaccaggcggaggaggaagggatcgacctgccttactcctgccgcgcgggctcctgctcctcctgcgccggcaaggtggtctccggcgagatcgaccagtccgaccagagcttcctcgacgacgaccaggttgccggcggctgggtcctcacctgccacgcctaccccaaggttcgacgtcgtca

SEQ ID NO: 399904 - DNA, 352 bp, Oryza sativa nipponbare
acgcagaagaagaagaagaaagaagaagaagaagatgcagaccgctgctagcagtgtcgttggattgtcggccgtgttgcccgctgctgtgaaggggcgcagcctgcagattcaggctcctcgccgtgttgcgttgcgcgttcgtgcggcggcggcggcggtggcagtggaggctgcggaggtggactacagctctaacatctcggtgtttccgatggaggcgtgcgacctcatcggcggcgaggcgtgcaacgtgcagatgtacccagaggccaagctctcatcatcggctgctgatgctgtttctcgtgcggcggcgggggaagtcgacagggactacctatgctacgac

SEQ ID NO: 399905 - DNA, 445 bp, Oryza sativa nipponbare
ccacgcgtccgaaactttctgatgagattgcttctgagatgttcagggagcatgcaaagaagttagttgaagaaaacatttcaacagccttgaacaacttgaataaccgaacacaggttgttgaagaagtgaaaagcatcctttcatttaatggtatgcttacagtactgagcaatttcccgggagaagaaagatttgtccgcgggcttgggcctattacattaggtggagacagtgatcatgaaaagagggtagaggatctaaagatgctctatagtgcctatgcaatggaggtactttcagatggacatcttaacgatgacaagcttgcggctttgaatcaactgaggaatatatttggactggcgaagtacgaagcaaaagcaatcatcacagatgtcaaggctcgagtatttcagacctactaaattctttaacaatgagt

SEQ ID NO: 399906 - DNA, 474 bp, Oryza sativa nipponbare
ccacgcgtccgcccacgcgtccgcccacgcgtccgcccacgcgtccggcattccccacacccgcggcggcggcggcggcggcatctcgcttccgcggccggtagccctgatcggcgtcggcacctctctaggcgtcggcggcaggcttccccaccccgaaagcagccgcgacggtactcccgcaccacctcccgcctttctgctgcctcgcatcgcctcccgccgccgctacatcctccgtccactcgctgcttcatctgatgttgcctcccataatccacagcagcgctccatatggtggtgcagcgcttgatccggagcagctccgatgctggacacgatggccaggagcaactcagcccatttcgacattttccccaattctcctccccatctaaccctaatcacctaatacccaaaccctagacacgggagccgagcaagaggaggcgtaccggtgcggcggcggcgagc

SEQ ID NO: 399907 - DNA, 391 bp, Oryza sativa nipponbare
ccacgcgtccgctctcaggcaggcaatcagcggcgaggcaccagcccaccggccggcaatggcgtccacctcctgcttcctccaccagtccacggcccgcgtcgccgcgcgcgtcgcctccccgtccccggcgacacggacccacctcctcgtctgccgcgcccagaagcaggacgacgccgacgtctcccgccgcgcggcgctcgcgctgctggccggagcgacggcggcggtgggggtgaaggtggcgcccgccgccgcggcctacggcgaggcggcgaacgtgttcgggaagcccaagacgaacacggagttcatcgcctacagcggcgaggggttcaagcttgtgatcccgtccaagtggaaccccagcaaggagcgcgagttcccc

SEQ ID NO: 399908 - DNA, 307 bp, Oryza sativa nipponbare
taaagcctgaagattcagttattaatcgtatacggatacagagcagttgttgcaacagggagaaattaggtcggagtgacaaaatgggaagaaaaaaaaacagagaggaagagcctagtgagcgtcttcctcctcgcagtgcttggtgtacttggccgggtccagcagggcgtccagctccgacgggctgctcggcttcaccttgatcatccacccgtcctcgtacgggcttgagttaatcaagccgggtgtctcagagagcttgtcgttaacctcgacgacctcaccggagatgggggagttgatg

SEQ ID NO: 399909 - DNA, 418 bp, Oryza sativa nipponbare
acatcaattgatttatatggataatcaatacatccaaaatagtttacatcgtgtacacaataattacggcacgtactttctcctcactattgttccctccttgtgatcgctgcgtgagtaaggggtgtcttcatttgataggaggatgctagggtcaatcgtcaccgtgaaagggggttgcccatccaactgatcgtaatcctcgtcagtcttgtcctcaactccgacgatttttcttttgcctgggagaaccacttgacgcttaggctcatcaggccctctgcccttctttcctttgctagacatgtccttcacgaaaaagacttgcgttacatcattggcaaggacaaaaggttcgtccgagtatccaaccttgttaaggtcaacagttgtcatcccactgtcatcaatcattacg

SEQ ID NO: 399910 - DNA, 399 bp, Oryza sativa nipponbare
aaaaaaaaatgtgacctcagaactttatttattattcgcacacgtactgcgcacaaactaataaaaccacactttacaacaccactagctaggttttagacacaaacaagcataagcgatggtttaacaagagcgagcaacgcgtctgatacaatgaacacttatacaaaatctggtgtgtgctctgccatttgagctaaatttgaaccgggattttgtatttgaacatatgaaaacgtttactctgctttccaagacgacaatggaggggtctcagaatccttccaagtgccggccgtctgagcatagcggtcaccttgaacaacatctgtgctggcataggactcaagttcagtcatttccccaggggtgagcttcacagatagagctgctacattt

SEQ ID NO: 399911 - DNA, 418 bp, Oryza sativa nipponbare
tatcccaaacaatctttttacatggctgattatcaacgttgataaaatcctcgagggcaaaaagaaaataataattatacagcccttacaggcctacaagctgcacaagcatcttattactacctggcaatatatgcattctgcaaatgaaaccatctaaagagaccagactactaaaaggaattatctagcagaggctcatgggtcctcttgaccaagaacaatgactcatagaccagcccagcgagaggcccgccaatcagcggcccgagccagtagatccagtggtgggtccacactccagtggccagcgccggcccaaatgaccgggccgggttcattgacgcgccggagaagttgccaccagcgatggtgttggcaccgacgatgaggcccgtgagcagcgggccgaaacccg

SEQ ID NO: 399912 - DNA, 417 bp, Oryza sativa nipponbare
cagctaattacattttataattaaccaagagtaagttacatgtagtatgccaaaaaatccggccggcaaagtaaagttagtgtacaccaagaatcgaaaatatgaacatcttacagcatgttccattcctacaaaactagtgggatttaggcagggagagctgccggcgtggctgggggaacccggttctcgacagggatctccgtgaactcggagagaatcgccctgaactcgtcaccactcaatgtctccttctcaaggagcacctccacgatcttgtccatggcctcccggttgctcctgatctggctcaaagcgatctcgtaggcctcatcggacaaccgcttcacagcggtatcgatgtcctccgcgagcttctccgacatggagttccttgccatcatcctcatgatgaca

SEQ ID NO: 399913 - DNA, 388 bp, Oryza sativa nipponbare
aaattcaagtatcaagtgtagtatatcatcatcatgcaagtacagtgttacatagattaatcacaatgcagtttgattaagcagtgggcatcatcacatcgcattcagaggaaggctatcttagattacagatgaatatgcagacacccagcttggtgttacatacatagactggatttgggtgaaatttagccggcgagggcgctggtgttgtagacgaggagggcgccgccgccgaggagcccggcgagggtcacggcccagatcagaagcccggtggttccaccaacgtaggtgtcaccggtgggagaccattcctccggcgagtagattgggctgtagccgtcgacgtttgcgccgtacttgtcaacgaattggtacacaccct

SEQ ID NO: 399914 - DNA, 349 bp, Oryza sativa nipponbare
tttggaaaaagtagaggagatgtatttcttgttattacttaatacagcattcacatatatcgaaccatccggtacgtacgtagtagtactccacgcgttcacatcgatgatcggggacgatatcctcaggtagtacttatgcaaaagcgttggcgtaaactgacgaactgaacggacggacggtcggatttagggctcccataagtccaagttgccggagacgaagtcgtagtggccgccgacgagcttgagggtgccgttggcgatcccctccttgacgaacgggtaggtcttgaggttctccaaggattggttcacggcctccttctccaagatggcgcattggtca

SEQ ID NO: 399915 - DNA, 373 bp, Oryza sativa nipponbare
gggaaacgaataaaatcattattgcaaaaacatcatcttcttcttcatcttcttagtgtacacaacaccaactcgatcatcatctcgtcgcactaaacccatcttccccaacccaaagacaacgaactcgctggccacaaatccatccaaccacaattaaccactgctaagctacggtcccccacttcacttgccggggacgaagttggtggcgtacgcccaggcgttgttgttgacggggtcggcgaggtggtcggcgaggttctcgagggggcccttgccggtgacgatggcctggacgaagaagccgaacatggagaacatggcgaggcggccgttcttgatctccttgaccttgagctccgagaacgcc

SEQ ID NO: 399916 - DNA, 303 bp, Oryza sativa nipponbare
ttttaataacagtcatgatcgagtaacaggaccgagtctgcttgaaactattacaagtacagagaagggatgatcacaaagcgcctgatgatggtatagtatttatgtttattggtacatatatgcagcactattgatggtgttgttcataatagcctaagaagtggatgcagaagcctcctccagcagctgcttcaccttggtgatgtaatcggccatagcttcctccttggatttcccttcaacggccttccaagcatcccatttgtatctgtctttcaggttgaaaatacctgggcgccc

SEQ ID NO: 399917 - DNA, 371 bp, Oryza sativa nipponbare
tttttatatgtatgtaaatatgatatgattgtaaatcattttgaggagctagactagcgtgccttattaacaaggagatatgtaccattacatgatgattaacatataaatctgtagctacatggaattaaggtagtggagcagaggaggaaggatgatagaagactccaattctccatggatgggaatgggatcaggtggccttgcagaactctccgtccagatcgtcgcacgcctcctcggggaacaccgtggtgggctcgtcgtaagataggtagtccctgtcgacttcctccgccgccgcacgagaaacagcaacagcagccgatgatgagagcttggcctctgggtacatctggacgttgcacgcc

SEQ ID NO: 399918 - DNA, 373 bp, Oryza sativa nipponbare
gaggcaggcaaattacatagtggtatgcggattataaagaagaaaccaccaccattacactaatacacacaaagctcgatcaagcagcttaattaatttcttccacatgtacgacatgcatcctctcctcactccgtgatcaatttaagatgattctttgcagctccagctcgacgacgatccatccgaattaaaatcatttgacctcctggatctcgtccagggcgtagttgttggtcgacacgccggcgtaggtcaccttggcgaaccgaaccaccaccgggtagcgagtgttgggatcctgatcaacggtgacgacggagccagggccggtgtaccagtaggactccctcctcaagatcttcaccttggt

SEQ ID NO: 399919 - DNA, 432 bp, Oryza sativa nipponbare
ttgcgaaaacagcattactggcctctcatttttttttttactggtgcacgtaacacaatgcggctgtgcgcacacacaatgctcatttggtgctccttaattatacaaatttctacaaagtataactaatacacaaatagcattcagctagctgagtttctacgtcaaccatataagcagttatacacaagttaaaaatattagactggctaaccacacacatgaagactccaaacaaagtggattcatgcttctctatacttcgtcaggtcgaaggttagggttctcgagcaacatcgttctgagtccctataaacaccaaccagcgcttcagctttgtcatagaaactgtccttcagcgatataacgatgctctgaaatccacatcctccattatcttgttcatcaacgcgcttgcatgactttgatctg

SEQ ID NO: 399920 - DNA, 369 bp, Oryza sativa nipponbare
ggggaaatcaaagacctctctcatcacttggattaattaatactagtaatatttagagactcttgggcaagcatagaaataattagcaaatgaggatggtgatgcaggaggtgtagaggctaggcagcaagggaggggtggtggtggtcaaagttggggatggtctccttgtggagatgaccgtctcccttggggacgatgagaccgaagcctccttccttcctcttgtacaggacgttcatctccccggtcttctcgtctttgaaggcgtagaagttgtggtccacattcactagctgctccatcgcctcctccaccgacagggggggcatcttgaacaccttggtgcgcaccaccttggtgagcacc

SEQ ID NO: 399921 - DNA, 392 bp, Oryza sativa nipponbare
ttgggaaacgaataaaatcatgattggaaaaacatcatcttcttcttcatcttcttagtgtacacaacaccaactcgatcatcatctcgtcgcactaaacccatcttccccaacccaaagacaacgaactcgctggccacaaatccatccaaccacaattaaccactgctaagctacggtcccccacttcacttgccggggacgaagttggtggcgtacgcccaggcgttgttgttgacggggtcggcgaggtggtcggcgaggttctcgagggggcccttgccggtgacgatggcctggacgaagaagccgaacatggagaacatggcgaggcggccggtcttgatctccttcaccttgagctccgcgaacgcctcggggtcatcggcgag

SEQ ID NO: 399922 - DNA, 417 bp, Oryza sativa nipponbare
tttaaattcaagtatcaagtggagtgtatcatcatcatgcaagtacagtgttacatagattaatcacaatgcagtttgattaagcagtgggcatcatcacatcgcattcagaggaaggctatcttagattacagatgaatatgcagacacccagcttggtgttacatacatagactggatttgggtgaaatttagccggcgagggcgctggtgttgtagacgaggagggcgccgccgccgaggagcccggcgagggtcacggcccagatcagaagcccggtggttccaccaacgtaggtgtcaccggtgggagaccattcctccggcgagtagattgggctgtagccgtcgacgtttgcgccgtacttgtcaacgaattggtacacacccttccccgtgctcttcctgccagatgca

SEQ ID NO: 399923 - DNA, 337 bp, Oryza sativa nipponbare
  unsure (1)..(337): unsure at all n locations
ttatagtatancccaggtgtggatattatattattattaacaaaaacttgtcatgcccagctatggcttgggcgcgatctgatacacagaacaaagagaaaacataaaaaggagaaataattaatagcaagcgtcaagccggcctgcttaaaaggtgtaaaggcagctgccgtcgtcgctcctcgccgttgggtcgaagttcttggcaacagggtcggtgcaaccttccggcacaggcaggttacctgcttgctgtgctccttgccctcctactcctatgcaggccggctacgatgcattgatgggatgcgaatagctagagatcttttattcaact

SEQ ID NO: 399924 - DNA, 371 bp, Oryza sativa nipponbare
taaacataactatcgaggtcggaattcataaatctcaacagtttgatcatccgcagcaccagcagctcagagtagcaaagcatttaaactgggtactcaaaatatctgccacaaaactcaggacaagtacagaaactgggaaagctatcaggtgaggttcgattgaattctgatggcctaggccttgagcttgccgaagaacctctgcttctcgtcggtggtctggaagcgaccgtgcccgaacttggacgaggtgtcgatgaacttgagcttgatctcctccagggcgagccgcgaggtctgcttcagcagcgactggcggagggtgacgactctcttcttcggaccgacgcagcaacccttgatcatga

SEQ ID NO: 399925 - DNA, 276 bp, Oryza sativa nipponbare
tattttattttttttgtttgggtttataactttttaactttttaactttatattcaaaacaaaaaaatataattccattcaaatatcataaaatctatattgaaaaaaaagacaattaaaattacataaaaagatctcccaaaacacactaatttttattacaaccaccaccacaatattaatcttacttactctaaagctcaaaaaacaaatcatttttaatcttttgcggatatccaactctctaaaggcttataattcctcaacaaatcccat

SEQ ID NO: 399926 - DNA, 437 bp, Oryza sativa nipponbare
gttaccaatcaacttggattgattgatccatttccactaagaatgacaaatacatgttgcctgcaattcgagtatataaatttaaagcggaaaaaaagaacaacttgatggacgactttaaagtctcttttctgaagaaaatactatacaaaagacaagtaatacaaaggacaaaatgctacatgccaaaatttttgtcattcgtgagcaaaccatttctttgtaaaacctcagcagacctggaagtcagaaagacttgttctaacttccaatattcagttgcctctgaagtctgaacccccatcgaattgaaatgtatgttagaaaaagaatgtcaaatgagcctcaaaagaccatctccaggcacctgggtcgatgttaaatgatgcttcaaacagaattctgaaagcgcaggttccaactgccagtcatttaca

SEQ ID NO: 399927 - DNA, 381 bp, Oryza sativa nipponbare
tggagcacaaatttggatgtgacacccacaccctacacccatgcataataatacatcgtatatacgtacgtacatacatacccctctcgatcacacgcaccatcgatcgtacaaagttgcgtacatacatacgtacacacataaacgcatacgcacgtacatacatacataattaaaaactcgtaattaattaaatacgtagttgatggcatctctaatggaacttgaggctggtgaggatgttgttgtggacgggatcagcgaggtgatcaagcaggttctgcacggggccaaccccggtgaagagcgcctggacggagaagccgaggaaggcgagcatggcgagcctgccattcttgatctccttgagcttgagctcct

SEQ ID NO: 399928 - DNA, 417 bp, Oryza sativa nipponbare
ttttagcacgggtacatcagatcagggaaattcatacgttgatacacgcatagtcgccgaagcgaccagctgcttaattaatcgataacacacgggtttaattcagcaataatcagcacacacacaaaccacactcatatgggtggtttttattgtggactaattaaggtaggtgactcgccggcggcgagtgttcggttgcttcgtgacttcacttgccgcacttgcagtcggtgcaggagcagctggtgccgcacttgcagccgccgttctcctcggcggcggcgacctcctcgaagtggctcttctcggcttcaactatgacgacgccatagctggtacctttcttcacgcactggctcttgtgagcacagtcgcagttgccgcacttgtccgacatggtcgaagatttaatta

SEQ ID NO: 399929 - DNA, 372 bp, Oryza sativa nipponbare
  unsure (1)..(372): unsure at all n locations
gttctcaagaatcttaagatggtaaatacacacaagagagaggtacggtatacaagacttagtttttcttaagtacaacagatcttccattcctccatgatcctatcagcttctacacccaaaccacacaaatcaccatgcacgagccctcttcctccactgccaaatcaactcacctggggcttgagtagccaagcatccatgtggtgatcagtagccgatgtcagcgtcgtcgacgacgaggttgccggtgatgagctcacggtaggcggcgacgggccagatgaaccccctcgggaggagcttgacggcgagctcgacgtcnatgatgatctccctcatggccggcttcttctcgccgctgatggcgat

SEQ ID NO: 399930 - DNA, 447 bp, Oryza sativa nipponbare
  unsure (1)..(447): unsure at all n locations
tatttcctcatcctttttattgattgctcccagagagacggatccatggaagttttcttgccctcatcaggcaagcagagcacacacacacggtggcagtggaagtgctatgaacaagacgctaatcaacatccagagctaaaacaaacaaggggatcaatgcaaatcccgaaaaaaaaacacaggggaaagtccacatcttcttctcgtccccaactcctccgtgtcaccaccacgtcttgcggatttttttttaccctgttctattcgctcaggcgtccacgatctcgccgtcgtccttcgacgccaggatcagctccgggtgcgccgncgncggcgncgncttcttgatcgtgccgtcgatggcgttcggccggccgagcgccttcagcgccaggtgcgccgccttctggccggagatcatcatggctccgaacgtcgggccca

SEQ ID NO: 399931 - DNA, 375 bp, Oryza sativa nipponbare
tgcaaaccccaacttgtttcagtttctgaattctggatggatcatatcagattcatcacagcatcgtacaatctgtgcaagcattggtacatcgagcgatggagagagagagtagtctacaatggcggctgggccattcacgagcccggcgtgaacttggtggcgtagacccaggcgttgttggcgacggggtcggcgaggtggtcgagcaggttctccaaggggcccttgccggtgacgatggcctggacgaagaagccgaacatggagaacatggcgaggcggccattcttgatctccttgaccttgagctcggcgaaggtgacggggtcgtcggcgaggccgagcgggtcgaagtactggccgccggggtag

SEQ ID NO: 399932 - DNA, 307 bp, Oryza sativa nipponbare
caatccatagttatcgggacggcaaatagcttggtaactttgaaactccacagtacaatacggcggtctagaggtccagacaaagagcatcaaagcaagaatgaagagaaagacaattggaatcacataaaaagatggcccaaagcacactaatttttattacaaccgccacgacagtcttgatcgtactgactctaaggcgcaaaatacaaatcggcattaatcttttgcggatatcccgctctctaaaggcttcttattcctcagcaaatcccagttcagagagcttgaggtgggcctcggcgta

SEQ ID NO: 399933 - DNA, 419 bp, Oryza sativa nipponbare
taaatatatatagccggagcgtccatatatttcattcacatatgcctcacccaacaacatatagtcgtagcagataccactcttacatcaagtcagagagagatcaggtgaaacaaaaacaaaagcagagcacggccggtaaaatcaaaagacgatgaacaaactgggaacacacgaaacaaggtgggagacatcatcgaatcagagatgaacaattaaacaaggctatatatgacgatgacggcttagttgccaccagactcctcgcagcccgggggcttgtaggcgatgaagctgatgagctgcacctgcctgacgttgtcgaagccgatgatacggacgaatgcatcagggtacgccttcttggcctcctcgagctccttgagcacctgggtggcgtcagtgcacccgaacatggg

SEQ ID NO: 399934 - DNA, 370 bp, Oryza sativa nipponbare
  unsure (1)..(370): unsure at all n locations
ttcagagaaccaactgaacacgtgggaaagcctgaagattcagttattaatcgtatacggatacagagcagttgttgcaacagggagaaattaggtcggagtgacaaaatgggaagaaaaaaaacagagaggaagagcctagtgagcgtcttcctcctcgcagtgcttggtgtacttggccgggtccagcanggcgtccagctccgacgggctgctcggcttcaccttgatcatccacccgtcctcgtacgggcttgagttaatcaggccgggtgtctcagagagcttgtcgttaacctcgacgacctcaccggagatgggggagttgatgtcgctggtggccttcacactctccacgttgccgaatgca

SEQ ID NO: 399935 - DNA, 373 bp, Oryza sativa nipponbare
acacaatcaggtccattgtggttgtgggatcaaccaaccagataacattgttttacacaatctgaacgaacgaagcaaatattcgggtacgcggaaagaggagaacgtcgcgcgtctcaccggagcctgcatgaaagcaatggacctcaccgccgttgctcgccggagatccacactcacttgccggggacgaagttggtggcgtaggcccatgcgttgttgttgacggggtcggcgaggtggtcggccaggttctccagtggccccttgccggtgacgatggcctggacgaagaacccgaacatggagaacatggcgaggcggacgatcttgatctccttcaccttgagctcggcgaacgccttggggtcgt

SEQ ID NO: 399936 - DNA, 361 bp, Oryza sativa nipponbare
ggaaaaacgacagggttataattctgttatgatatcttcaaatactacgtacattggatcaacgaaagccacatgacacatgaagaataaactatctagcacttatggcagatatggtcatatcattaacactacatggctcagtaagaacagattgctcttcatttgccactctcacattgaaatatcccgggtgcttaggttcagccaggaccatcgtcttgctgtttagcattgcaacaacatctgacatggttggtcgatcagctgcattctcttgtacacacagcaatgctatgttaatgcacctcatgatttcattttttgcaggaggatatttggaaactaatgattcattgat

SEQ ID NO: 399937 - DNA, 438 bp, Oryza sativa nipponbare
aactaagaccaggttgatttcgtgtttgatacaaaaattaagatggacggattcacaagagagcaccctctacttaagctttacattacaaggccaaccagcagctgcctgccggccgaccactgcgtgcgcacgcgcgcgcaataatcaaccaatcacacacagtacgcacgcacataaaaaccacccatagccttcacgtacgcccggacgcacgcaccggttcgtgccaagctcaagggtagatggttctcgggatgatgatgtcgccgatgttgttgtgccacgggtccgagaggtggctggccaggttctccagtgggccggtgcccgggtacgccgactgttggacgcagaaacccacaaaagccagcatggccaatcgcccgttcttgatctccttgagcttgtactcctcgaacttgacggggtccttgg

SEQ ID NO: 399938 - DNA, 325 bp, Oryza sativa nipponbare
gtagatcctataatagcgaggcatcattaattcgatcatcccttggatgcggcctgcggcttacattaaatctcgatccaaagaagcaaagatgatgacagacagaaattaattaagctagaaatctcctcgatcgatcacacacacacacacaattaaggtacatacatacatgcactgctgcaactgcaactgcagggtcggtgcgtggctactacaagtgtacacatggtacgttggttggcaccatctcgatcgtgtcgttgtgctcacttgccggggacgaagttggtggcgtatgcccaggcgttgttggcgacggggt

SEQ ID NO: 399939 - DNA, 386 bp, Oryza sativa nipponbare
ggggacgggataccatccattttttttattgtcgacgaatttatcagatatgctctagatacatatcttgtgtgtatatagccggagctttgttttcacatatcctcacccaacgataattgtagtactcttacaataaaaccggccggagagggagggaagagattattacatatgtgttaagagcagaggccattgagatggtacataaccaaactgtaaaataaaaatatatagcatattatatattgatatatcatcaacatagcccaaaacaaagctgcatactattattataggcagcaatccaccagcgcgatgcttgatcttagcttagttgccaccagactcctcgcaacctgggggcttgtaggcgatgaaactta

SEQ ID NO: 399940 - DNA, 522 bp, Oryza sativa nipponbare
  unsure (1)..(522): unsure at all n locations
gcaaaccccaactttgttcaggttctgaattctggatggatcatatcanattcatcacagcatcgtacaatctgtgcaagcattggtacatcgagcgatggagagagagagtagtctacaatggcggctgggccattcacgagcccggcgtgaacttggtggcgtagacccaggcgttgttggcgacggggtcggcgaggtggtcgagcaggttctccaaggggcccttgccggtgacgatggcctggacgaagaagccgaacatggagaacatggcgaggcggccattcttgatctccttgaccttgagctcggcgaaggtgacggggtcgtcggcgaggccgagcgggtcgaagtactggccgccggggtagaggtcgttgccgtccccgacgccggggaggccgttgatgcggtagccctcgacgaggcccatgaggacgacctggaatcccagcacggcgaggatgctcttggcgtgcaccangttgggggttgcgaggtagtccaggccgtcgtcgg

SEQ ID NO: 399941 - DNA, 445 bp, Oryza sativa nipponbare
gtagtactcttacaataaaaccggccggagagggagggaagagattattacatatgtgttaagagcagaggccattgagatggtacataaccaaactgtaaaataaaaatatatagcatattatatattgatatatcatcaacatagcccaaaacaaagctgcatactattattataggcagcaatccaccagcgcgatgcttgatcttagcttagttgccaccagactcctcgcaacctgggggcttgtaggcgatgaagctaatcaactgcacctgcctgacgttgtcgaagccgatgatacggacaaaggcatcggggtaggccttcttggcctcctcgagctccttgagcacctgggtggcatcggtgcagccgaacatgggcagctttcacatggtccaatacctgccatcgtagtacccgggagacctgtggttctcac

SEQ ID NO: 399942 - DNA, 417 bp, Oryza sativa nipponbare
atgtccaaagtgcttttaaatagtgaagctatgtcatctccatataattccccatgaaatattgatagggtatatgtagacatgaaggaagtgttcgtatggctggatcatcactagaattctgttatttgaccctgatacttactatgaggccatgctgatgaagaacatagcaatcttacttgctcttcttagaagcctcgtataggtagctcacgataactacagctgcagcaacagctaccccgacagcactctgtgcgagtacagcaccagttgaaagatcagatttcgtagatgcagggccgctgctccgtggagtgaagccaagttcagaaagcttcttgtgcgattcagcgtaatccttgaagaaggtgtcttcatccctggcataaagatccacatagcgtctaaatg

SEQ ID NO: 399943 - DNA, 344 bp, Oryza sativa nipponbare
taacacgttaatgaacacgcatcaaaagtcaccaaacatatactacaatattataagaagagattatatcccaccatcgatcgattacaccatcatcaataactgaagagcagcctgacagatgattaaaattacatgtccatccacccaaaacacaagtaattaataggtcgattatgagagaagaagaagaagaagaagaagtctagatgtcgaagacgttcttgccggtgaacttgacctcgatggggctgacgttcttgccgatgctgcggaagttctggccgacgccctgcctgccggcgttgaggtactcctcctgcgatatcttggcggacgcgtgg

SEQ ID NO: 399944 - DNA, 386 bp, Oryza sativa nipponbare
  unsure (1)..(386): unsure at all n locations
aatgtaatgctcctgtgatgaatctattaagtttagaacgttgatttgaactacaggagaaaggagagaatgttgagcaacatcccgagcctgactatatatctcatacgaatcctatcaattactatatctcacatgtattctgtagagacgatctacgagtctggcaatatcttgccgttgtacatcttgtcgagcagcttcttggcgtctggtcgccggagaagccccttgttgtttggcagtcctgttcctagacaaactggacacaccaatttccctcggccgtagcagtttgggcactctgtgaatagatagacatcttttgctctctttcggttgagggcctttcattttccagtgccgncggacatgttacataatac

SEQ ID NO: 399945 - DNA, 444 bp, Oryza sativa nipponbare
tttctaaaagagtatcagcgggttttttacatcggttacatcatagtacaggtacacaatcaacaaggcatgcagtgctccatccacaattacatcccaatacaccaccaccattcacagcctactccgatcccaaaaaagagaggtaagtcgcgtcgacgaacagtcttttcatcttcctccattggcagccattgctaacactccaacacctgaagaactcctcatttgggggtgaaggcctggaagatggtggcgtggccggggtcggcgagatgggcgaagaggttgtcgatggggccggtgccggtgtactctgcctggaaccaagctcccatgacggcgagcatggcgagccgcccgttcttgatctccttggtgcgcagctccttgatcttctccggcgagccggtgccccagccgagcgggtcaaaccacaaacca

SEQ ID NO: 399946 - DNA, 440 bp, Oryza sativa nipponbare
tttttggtaccaagggacatgctgaaattatataccagaacctgacaaccggtgtgcggtagtatatacggtattacacatgagcattacacagcattgcgatttccaattgccggaagtcgataataatccgtgccggacagagaaaagtcagatgaggtggggaagaaaagcaaagaacgaaacatgaaactgtgttgggcgctcgaaacttctaaattctgattacaaaggatcgataggaagaaggaagaactttgtggaaaattactggagcgaggtggaggtacaaaggcagcaacagcagcaggttatacgttctcacttccactggttggcgacgatgtcgggcaggtccacgaccctctgcgagtatccccaactcttgtcgtaccaagcgatgaccttgaccatgtcgtcatccatgaccatgctgagcg

SEQ ID NO: 399947 - DNA, 498 bp, Oryza sativa nipponbare
ggaggatgatagacctttttactaggcaaaccacacgaatacacgattgattaatttcactgagaatagcacgggtacatcacatcacacaaattcatacgttgatacacgcatagtcgccgaagcgaccagctgcttaattaatcgataacacacgggtttaattcagcaataatcagcacacacacaaaccacactcatatgggtggtttttattgtggactaattaaggtaggtgactcgccggcggcgagtgttcggttgcttcgtgacttcacttgccgcacttgcagtcggtgcaggagcagctggtgccgcacttgcagccgccgttctcctcgccggcggcgacctcctcgaagtggctcttctcggcttcaactatgacgacgccatagctggtacctttcttcacgcactggctcttgtcagcacagtcgcagtttgcgcacttgtccgacatggtcgaagatttaattagctaagtgagtgatgagt

SEQ ID NO: 399948 - DNA, 338 bp, Oryza sativa nipponbare
tcgaactcttttttttctccgtgtggtctatttcatttcattccgatagatagcaacaagcagttcaaacaccataaccaaagcgaactcaattcatggtaacatcacggacgaagaacacctaacactggatggatggatagagggcttctcgactcgagagagccactggacacgataacgactcgactcgatgataagatgattctgacacggatagctaaggataactggccacgatgggccccaccaatcaattcctccagttcccgccggagtcgccgccgtaaccgccgccacggctgccaccgtaaccgacgccgtcgtcgacacggccg

SEQ ID NO: 399949 - DNA, 391 bp, Oryza sativa nipponbare
tttttagcaaatggcattgatgtgatgtagggaccaaattaatacagcataatgatgtatttcagtaatgggaattttgtttgccttgaagccctttaggggggtgtcgtagtgtgtcgggtgggcaacacgctccttgattatgttgcggaggtgctgcgcataggcgctcatcaagtcgacgcgcatcaccaccggcggcatgcctcgcccgccgccaaggcccatcttcctggccacgtacttccgcgccgcacggtcgcagaccccttccacctcgccggacgtgagaccaccgcgcttcatgaagaacttgaggccgttgcgagtgtatgggagatgtgatgcagtcatcatgatggaggcgtcatagctgaaccgtgggagcttg

SEQ ID NO: 399950 - DNA, 456 bp, Oryza sativa nipponbare
aattcgatcatcccttggatgcgggctgcggcttacattaaatctcgatccaaagaagcaaagatgatgacagacagaaattaattaagctagaaatctcctcgatcgatcacacacacacacacaattaaggtacatacatacatgcactgctgcaactgcaactgcagggtcggtgcgtggctactacaagtgtacacatggtacgttggttggcaccatctcgatcgtgtcgttgtgctcacttgccggggacgaagttggtggcgtatgcccaggcgttgttggcgacggggtcggcgacgtggtcgaagaggttctcgatggggcccttgccggtgacgatggcctggacgaaaaagccgaacatggagaacatggcgaggcggccgttcttgagctccttcaccttgagctcggcgaaggtgtcagggtcgtcggcgaggccgagcgggt

SEQ ID NO: 399951 - DNA, 359 bp, Oryza sativa nipponbare
ttgatcataacccaaagaccgggaaactatttattatcatattcgggttcggatcatcctaataaatctaatgcatgtatctaatacaattaaagaacatgagagtggaggattcacaaaagttataatttaatgaagaaggggtcatagttaattgcctacatacatgcatgccttatattatggcacatctaaaaaaaagtggttgtgccttatattatggaatggcgggagtattagagattatattgagactatttgattttatgaaactttactaaatatttaaaaagatcaggtgcctgagtgttttgcaagcatttactttcgctcggtcatcgaaggttaacagttcaaaa

SEQ ID NO: 399952 - DNA, 386 bp, Oryza sativa nipponbare
  unsure (1)..(386): unsure at all n locations
ggaaggaaaaacatcatctctctgtttcctgattgccttggtcataacacaggcatagagattttgatcatgcatctccctaatgtcacaaaatgtacacgtataattactttcatgtgagtggcagtacgccttttgaaggatgtaccctatgttttctgagtatatacaaccgctgtgtttgtggatctgactcaaacaaaaagcccctcaactcaataatcctcaagcaatgcctccaaatttttcctcctcgcagcatgcttcagcttctccattgcgatgagtcctacttgcctnaccctntccctcgacaacccgaattggctgctaatatcctcccatgtatggcattgttttcctatgccatgatataaccggataat

SEQ ID NO: 399953 - DNA, 417 bp, Oryza sativa nipponbare
taaagctaatttcacgggtgggcgggaatggggaagcaatggagtagagaattacaggagaaggtggcagctgaggagagaatcaggagctgtcacaaagctatatacaagttgggaagctgaacgagaagagagcatatgcttccctcctacaggaagcattatgacttgttggtgctgttttacaaatctgggtgattatcggaagatcgtcatgcggtagcagctgcagcttcttctgcgacttgggatccctgttgcagagtgcagatgaggttgcgatccccgtacacattgtccacgcgacatgttgttggccagaacttggcgccccgaagccacgctgcagggaacgcagcatactccctggagtacggcttagtccatgagtcgctcatcaaaagttggggcgggtga

SEQ ID NO: 399954 - DNA, 524 bp, Oryza sativa nipponbare
gtataaatatatataggcggagcttccatatatttcattcacatatgcctcacccaacaacatatagtcgtagcagataccactcttacatcaagtcagagagagatcaggtgaaacaaaaacaaaagcagagcacggccggtaaaatcaaaagacgatgaacaaactgggaacacacgaaacaaggtgggagacatcatcgaatcagagatgaacaattaaacaaggctatatatgacgatgacggcttagttgccaccagactcctcgcagcccgggggcttgtaggcgatgaagctgatgagctgcacctgcctgacgttgtcgaagccgatgatacggacgaatgcatcagggtacgccttcttggcctcctcgagctccttgagcacctgggtggcgtcagtgcacccgaacatgggcagcttccacatggtccagtacctgccatcgtagtatccgggggatctgtggttctcacggtagacgaatccgaccttgctgaactcgaggcagggcaccca

SEQ ID NO: 399955 - DNA, 417 bp, Oryza sativa nipponbare
gtctaaatatataggcgcggaggtgtcatataggacattcacatatgccttacccaacaacatatagtcgtagcagataccactcttacatcaagtcagagagagatcaggtgaaacaaaaacaaaagcagagcacggccggtaaaatcaaaagacgatgaacaaactgggaacacacgaaacatggtgggagacatcatcgaatcagagatgaacaattaaacaaggctatatatgacgatgacggcttagttgccaccagactcctcgcaggccgggggcttgtaggcgatgaagctgatgagctgcacctgcctgacgttgtcgaagccgatgatacggacgaatgcattagggtacgccttcttggccttctcgagctccttgagcacctgggggggcttagtgcacccgaac

SEQ ID NO: 399956 - DNA, 205 bp, Oryza sativa nipponbare
gtgtataaatatatagggggggagcttccataaatatcattcacatatgcctaacccaacagcagctagactaaccggctcccacaacaaggagatacacacagagatcaggtgaaacaaaaacaaaagcagagcacgcccggttaaatcaaaagacgatgaacaaactgggaacacacaaaacacggtgtcacacatcatggaa

SEQ ID NO: 399957 - DNA, 432 bp, Oryza sativa nipponbare
aacacttcgcagcgttactgaattcactttaatagcacttctcatcatgaactagtacaacaacataactgtccagtggaaatgtgaaatgcatacaccaagtaatggtccataacatgaactatatggatacaacaacgttcttatttcgctcatatatacatgaaataagtcttgcacgtcttggttacttaataggtgcgataatcgccgtaggcttttagaagaagaaaaaaaagtgagcctgcaaagttcctggggacagttgaagatcatcgggcactcattgctgcaacaacttcagggtggtagtggagcatctcgtgccacatcatttccctgatcatatctgcactgatgttctcgtctatgtccagatcgataggcacttgcgcgggaggatttgcacttggatcatacagaggggacatg

SEQ ID NO: 399958 - DNA, 362 bp, Oryza sativa nipponbare
  unsure (1)..(362): unsure at all n locations
tttactaggattacttaacacacggatcacagaaaatcaatccttgcatgcaggggaaatcgatggatcgacctctctccttaacttgttcttaattctcatgtacaatcaaagaaacacacacgcacacacacatgcgtgcactgcatctctctgagcaacgaactcgattgatttgattntgattcgctagggattaaagagaagctgagatagagatttcgacgatcatgcgacgctgaaggagctggctgcgctctcgacgaacttcctggcgcccttgaaccacctcttgtcgccggcctgcgccttgcagatgtacagcttgccgtcgttgacggtggccgtgatcagctggtgct

SEQ ID NO: 399959 - DNA, 354 bp, Oryza sativa nipponbare
tctgtttttttttttttttctgatctgaaactcacatgatgagcactcacgacaaaaggagctaaacattattggtatggtagtatgttcagtggtgtgcattattagcattgctcaagctgcaggtagcttcagggaagtgaaggggaggaaaaagagtagctgctccagcacaaaactactagcattacataagcacagaaaaaggtatgatcctcttcagacatcttcccacgccgaaggtgaatggggtgaagatcttaggcggacttcacggtggcggagttgatgatgtcgatgaattcaggcttcaatgaagcaccaccgacgagaaaaccatcaacatcaggcttt

SEQ ID NO: 399960 - DNA, 435 bp, Oryza sativa nipponbare
atgacaccaaaatgtgatatggatatgattaagcaggtgcagcaaaacgtacattaattaaacaacaacaattaaccctcgggcacgcctgtgttttgttatctcgctcaacatatacgtacgtaatactttgcttgcatagcatagggacgacgacattatattcttaattgataaactcaagaacgcatggagatggatcgagagatttataaatatggagcttgcttgattgattagatgaggtcgtcctccttgtgggtctcgatgacgacgtcggacttggggtaggcgtggcaagtgaggacccagccggcggcaacctggtcgtcgtcgaggaagctctggtcggactggtcgatctcgccggagaccaccttgccggcgcaggaggagcaggagcccgcgcggcaggagtaaggcaggtcgatccct

SEQ ID NO: 399961 - DNA, 413 bp, Oryza sativa nipponbare
tattgttcgatggagtaagtgtattatatgtatgtaaatattatattattgtaaatcattttgaggagctagactagcgtgccttattaacaaggagatatgtaccattacatgatgattaacatataaatctgtagctacatggaattaaggtagtggagcagaggaggaaggatgatagaagactccaattctccatggatgggaatgggatcaggtggccttgcagaactctccgcccagatcgtcgcacgcctcctcggggaacaccgtggtgggctcgtcgtaggataggtagtccctgtcgacttcctccgccgccgcacgagaaacagcaacagcagccgatgatgagagcttggcctctgggtacatctgcacgttgcacgcctcgccgccgatgaggtcgcacg

SEQ ID NO: 399962 - DNA, 393 bp, Oryza sativa nipponbare
tttttacagaaaatcaatccttgcatgcaggggaaatcgatggatcgacctctctccttaacttgttcttaattctcatgtacaatcaaagaaacacacacgcacacacacatgcgtgcactgcatctctctgagcaacgaactcgattgatttgattttgattcgctagggattaaagagaagctgagatagagatttcgacgatcatgcgacgctgaaggagctggctgcgctctcgacgaacttcctggcgcccttgaaccacctcttgtcgccggcctgcgccttgcagatgtacagcttgccgtcgttgacggtggccgtgatcagctggtgcttgccgccctcgtcgccgtccgccgtcctcgtcagcaccgttacgcttgagtact

SEQ ID NO: 399963 - DNA, 182 bp, Oryza sativa nipponbare
ccgttgccgttgttgaagaaaaccccccttcctcctttctaacaaccaactcgccacccaataaggccataaccttccaaaattctccaatccaatggcgctacccctttccgtttcttctcgaacggcccggtttcttcgccggccatttcacatgccgcccggccgctgcggcgcttccc

SEQ ID NO: 399964 - DNA, 437 bp, Oryza sativa nipponbare
ccacgcgtccgcaagaacctgggtcaaacccgcagattaagcagtttgcttgtacaaggtttaaagctgaatttcctatttttgacaaggttgatgtcaacgggcctaacacagcccctatttataagtttcttaagtcgagtgctggaggatttttgggtgatcttgtgaaatggaattttgagaagttcttggtggacaaaactggaaaagttgttgagagatacccacctacaacttcaccattccagattgagaaggacatccagaaactccttgcggcataagtactagaggtcacacttcagctaagctcttctgtacatatgccttgcctcataattagagttttacttgattatatatcatttttttcttgtgtaaaattaactcaccgggtatttatatgtgcacgtatatagttgtaacatgagact

SEQ ID NO: 399965 - DNA, 200 bp, Oryza sativa nipponbare
ccacgcgtccggttggcttctcctccccctctttaccttttcctcctcggttcggttccgtggttcgtctagggtttagtgggttgagatggcggcgcccgatgtcgagtaccgctgcttcgtcggcggtcttaactggggcaccgacggccgtttatttgaggccgtcttatgcacttacgaggagatcttcgtctcca

SEQ ID NO: 399966 - DNA, 416 bp, Oryza sativa nipponbare
  unsure (1)..(416): unsure at all n locations
ccacgcgtccgaagaagctcagctcctcctcctctcgcatggcagccatggccaccaccgcgtccagcctcctcaagacctccttcgctggcgcgcgcctccccgccgncgtccgcaaccccaccgtctccgtcgcgccgcgcaccggcggcgccatctgcaactccatctcgtcgtcgtcgtccactcccccctacgacctcaacgccatcaggttcagccccatcaaggagtccatcgtgtctcgcgagatgacccggcggtacatgaccgacatgatcacctacgccgacaccgacgtcgttgtcgtcggcgccggctccgcggggctctcctgcgcgtacgagctctccaaggaccccttcgtcagcgtcgccgtcatcgagcagtcggtgttgcccggcggcagcgcgtgg

SEQ ID NO: 399967 - DNA, 436 bp, Oryza sativa nipponbare
ccacgcgtccgattctcgaagaaggagaagaaggagaggagcagccatggcgtcgtcggtggcagcggcggcgagcacgttcctggggacgaggctggcggacccggcgccgcagagcgggaggatcgtggcgaggttcgggttcggcggcgggaagaaagcggcggcgaagaaagcggcgaggccgtcggcgccgacgacggacaggccgcttgggttccccggcgcggtggcgccggactacctggacgggtcgctcgtcggcgactacggctttcgacccgttcgggcttgggaagccggcggagtacctgcagttcgagctggactcgctggaccagaacctggccaagaacaacgccggcgagatcatcggcacccggttcgagaccggcgaggtgaagtccaccccgttccagccctacaccgggtgttc

SEQ ID NO: 399968 - DNA, 456 bp, Oryza sativa nipponbare
ccacgcgtccgcccacgcgtccgaacgcctgctcgaagcctccatagcctatgctgccggcaaccccatcatgtctgacgctgaattcgaccaactcaaactcagattgaagaaagacggaagtgacattgtcaccgaaggtcccaggtgcagtctacgcagccgaaaggtgtacagtgatttgaccgttgactacctaaagatgttcctgctaaatgttccagcaactactcttgctctaggactgttcttcttcatcgatgagttgactgggcttgagatcaacatattccagctgccagagcctttcggtttcattttcacatggtttgctgctttgcctctaatattgttcatagcacagtcgataactaatgccatagtgaacgacttcttaatcctcaaggggccatgtccgaattgtggcgctgaaaacctttccttcttcgggactat

SEQ ID NO: 399969 - DNA, 472 bp, Oryza sativa nipponbare
ccacgcgtccgacgtggcctccaactccaaggatgaccctgccaaggaggctgccagcttcacctcccaggtgatcatcatgaaccaccctgggcagatcggtaacggctatgctccagtgctggactgccacacctcccacattgctgtcaagtttgctgagctggtgaccaagattgacagacgatctggcaaggagctggagaaggagcccaagttcttgaagaacggtgatgctggtatggtcaagatgattcctaccaagcccatggttgtggagaccttctctgagtaccctcctcttggtcgttttgcggtgcgtgacatgaggcaaacggtggctgttggcgtcatcaagaacgtggagaagaaggacccaaccggtgccaaggtgaccaaggctgccgccaagaagaagtgagcctcgttcaaatggtggtttgcatgtctgcagttgagatatctagttcta

SEQ ID NO: 399970 - DNA, 476 bp, Oryza sativa nipponbare
ccacgcgtccgggccgtcgcagatcaccttcacccagcctccctacggcgagacctacttcggctcccctacctgccgctgctgcgacggccgcgtcgtcgtcgacttcctcgcgagtaagttcgggctgccgttcctgccgccgtcgaagtcgacgagcgccgacttcaagaagggagcgaacatggcgatcaccggagccaccgccatggacgccaacttcttccgctccctcggcctctccgacaagatctggaacaacggccccatcagctttcaaatccagtggttccagcaaatctcctcctccgtctgcggccagaattgcaagagctacctggcgaactcgctgttcgtgttcggggagttcggcggcaacgactacaatgcgatgctgttcggagggtacagcgcggaccaggcgagcacgtacacgtcgcagatcgtggacaccatctccaacggcgtcgagaagc

SEQ ID NO: 399971 - DNA, 455 bp, Oryza sativa nipponbare
ccacgcgtccgcccacgcgtccgatctgaagtgaaacagcaaaaaaaatcaaacaaaaagaaaaaatattccccatctgtgaaattcgcaaaaccctagcgcggcggcgatgtcgaacacgagggtgttcttcgacatgaccgtcggcggagctccggcggggcggatcgtgatggagctgtacgcgaaggacgtgccgcggacggcggagaacttccgcgcgctctgcaccggcgagaagggcgtgggcaagagcggcaagccgctgcactacaaggggagcaccttccaccgcgtgatcccggagttcatgtgccagggcggcgacttcacccgcggcaacggcacgggaggggagtcgatctacggcgagaagttcgccgacgaggtggtcaagttcaagcacgacagccccggcatcctgtccatggcgaacgccgggccccacactaacg

SEQ ID NO: 399972 - DNA, 453 bp, Oryza sativa nipponbare
ccacgcgtccggtactcgagcaaagaaggagagagcttggtgagctgcagagatggccccctccgtgatggcgtcgtcggccaccaccgtcgctcccttccaggggctcaagtccaccgccggcatgcccgtcgcccgccgctccggcaactccagcttcggcaacgtcagcaatggcggcaggatcaggtgcatgcaggtgtggccgattgagggcatcaagaagttcgagaccctcttctacctgccaccggtcaccgtggaggacctccttgagcagatcgagtacctgcgtccgtccaagtgggtgccctgcctcgagttcagcaaggtcggattcgtctaccgtgagaaccacagaaccaccggatactacgatggcaggtactggaccatgtggaagctgcccatgttcgggtgcactgacgccacccaggtgctcatggagctcga

SEQ ID NO: 399973 - DNA, 366 bp, Oryza sativa nipponbare
  unsure (1)..(366): unsure at all n locations
ccacgcgtccgcccacgcgtccgcccacgcgtccgcccacgcgtccgcaacagtatagctgagattggtcatctgacatgcttatctccctctccctccaagtgcctaacccaactcttcccgagcctttttctgatcattggacaaatggccgtctcttcagccgttctcgttgggctactcgtcgtgagttgcgccgcggtggccgcagccacgaggtacaccgtcggcgacggcgagggctggacgaccggcgtcaactacaacaactgggccaacggcaagtttttcagacaaggagacgaactcgtgntcaactaccaggcgagggcgcacacggtgaccgaggtgagccagaccaacttc

SEQ ID NO: 399974 - DNA, 297 bp, Oryza sativa nipponbare
  unsure (1)..(297): unsure at all n locations
ccacgcgtccgcccacgcgtccgcccacgcgtccggcgtgctctacctcggcccgctctccggcgagccgccgagctacctgaccggcgagttccccggcgactacgggtgggacaccgcggggctctccgccgacccggagacgttcgccaagaaccgggagctggaggtgatccactccaggtgggcgatgctcggcgcgctgggctgcgtgttcccggagctcctcgcccgcaacggcgtcaagttcggcgaggcggtgtggttcaaggcggngtcgcagatcttcagcgaggg

SEQ ID NO: 399975 - DNA, 443 bp, Oryza sativa nipponbare
  unsure (1)..(443): unsure at all n locations
ccacgcgtccgcccacgcgtncgcgcacgtattacgtgcgaaaaaaaaaatcatcagcacaagatcgaggaggctttatctgaacaagggagatggcggactacgtgtatgggccggggcggaaccacctgttcgtgcctgggccggtgaacatcccggaccaagtgatccgcgccatgagccgtcagaacgaggactaccgctcgccggcggtgcccgccctcaccaagacccttctcgaggacgtcaagcagatcttcaagaccaccaccggcacccccttcctcttccccaccaccgggactggggcgtgggagagcgcgctgacgaacacgctgtcgccgggggacaagatcgtgtcgttcctgatcgggcagttcagcctgctgtggatcgaccagcagcaacgcctcaacttcaacgtggacgtggtggagagcgac

SEQ ID NO: 399976 - DNA, 475 bp, Oryza sativa nipponbare
ccacgcgtccgctgaactgaaaccggtgccttgcacaacctacgccgatgcttttgctctaagagaaaagtgtgctacccctatcctcaatcaggtcaggagtgatgttacacgttacagatacggtgatgagcagcacctggatgaagcactgaagaggatctttcaatatggtttgggtggtggaattccaaggcgtagtgcacctattttacaaaacattcgggaagaagtaactgatgatgggaagtaccagttagtacttgtatttgaagccaaagcattggagatatccgattttgagaagagacaggccaaattcacatccttttttggtcctgggattaaggcagaaattggaaaaggtggtgatgatctatatgaagttcgtcttatctcagaaactacttaggaaacacacaggactcgcagtttcttttcttgctatataccagaaaaatgtttttttccttgt

SEQ ID NO: 399977 - DNA, 457 bp, Oryza sativa nipponbare
ccacgcgtccgcggacgcgtgggcggacgcgtgggctagccagtaagctagctaactaactacgtggctatggcccccaccgtgatggcctcctcggccacctccgtggctccattccaagggctcaagtccaccgccgggctccccgtcagccgccgctccaccaactcgggcttcggcaacgtcagcaatggcggaaggatcaagtgcatgcaggtgtggccaattgagggcatcaagaagttcgagaccctatcgtacctgccaccactcaccgtggaggatcttttgaagcagatcgagtacctgcttcgatccaagtgggtgccttgcctcgagttcagcaaggttggattcgtctaccgtgagaaccacaggtctcccgggtactccgatggcaggtattggaccatgtggaagctgcccatgttcggctgcaccgatgccacccaggtgc

SEQ ID NO: 399978 - DNA, 374 bp, Oryza sativa nipponbare
ccacgcgtccggttcaatgagctagttccctttaggctgacacgcaatatgcaagctttcttctcaaatttcggtgttgaaggtctcattgtgtctgccatgtgttctgctgcccagtctgtggtttcaccaaaacaaagccagcatatatggcaccatttggctatgtttttccgtgatgaactgttatcttggtcatggaggaggccacttggcattccttctgttccagttgctgctggaatgattaacccgttggatttccagcaaaaggtgataaacaatgtggagcatgttattacccgtatcaaattaatatcaccacattatcttgctgatgaggaggagaattcatctgatccacctcattcggt

SEQ ID NO: 399979 - DNA, 428 bp, Oryza sativa nipponbare
ccacgcgtccgcccacgcgtccggatgcatcatttaatttgtttcgggatgtagaagatctgcctgatgagtacaattacgattatgatgactacgttgatgaaaccatgtggggagacgaggactggaaagaacaacaacatgaaaaggcagaagattatgtgagcatagatgctcacatcttgtccaccccagtgattgcagatattgacagagatggcatacaagaaatggtgatttctgtatcttacttctttgaccacgagtattatgataaaccagaacatctaaaggagttaggagggattgacattggcaaatatattgcaagcagtatagttgtttttaaccttgacacaagacaagtcaaatggactgcagaacttgatttgagtacagatagtggaaattttactgcccatgcatat

SEQ ID NO: 399980 - DNA, 321 bp, Oryza sativa nipponbare
  unsure (1)..(321): unsure at all n locations
cactggaggacttctgcaaggacaacccggagaccgacgagtgcaaagtgtacgaaaactaagaccactgtccaagtacgggctcgcgtaggtgcagaaatatatactcctataatgtaacgaagcacacacattgactgtccccgggcagaactgctatactatatatactgggctcggattggctgcccgtacgttgttccccttcgacagaagaacgcatgactgtcgaagaagaaacacagctgcagacacgggccattttctgtgaggtgtaatactgaactttggtacagacttcaggattnttttcttttcgag

SEQ ID NO: 399981 - DNA, 475 bp, Oryza sativa nipponbare
ccacgcgtccgtccacttccctcctgattatcccttcaaaccacccaaggtggcgtttcgcaccaaggttttgcatccaaacatcaacagcaacgggagcatttgccttgacatccttaaggaccaatggagcccagcactaaccatttccaaggtgttgctgtcaatctgttccctgctgactgatccgaaccctgatgatcctctggtccctgagatcgcccacatgtacaagacagataggcacaagtacgagaacacagcaaggacctggactcagaggtacgccatgtagcacctcagatatcgatggacatgtcgatgttgtaacaacattatcaacgggtgtgtctccctctcgccttgtgtggtgtaaggatcaaaaccggctttgcagtgcactcttggtgttgctccattgtgtcactcactcattgcagtgatttcgaatagtataaaactggtggtttttttc

SEQ ID NO: 399982 - DNA, 477 bp, Oryza sativa nipponbare
ccacgcgtccgggacggaatcgactacgccgccgtcaccgtgcagctgccgggaggcgagcgcgtgccgttcctcttcaccatcaagaatctggtcgccaccggcaagccggagagcttcggcgggcccttcctcgtgcccagctaccgtggttcgtccttcctcgacccaaagggccgcggtggctctaccggctacgacaacgctgtggcgctccccgccggaggcagaggagacgaggaggagctcgctaaggagaacgtcaagaacgcctcgtcgtcgacgggcaacatcacgttgagcgtcaccaagagcaagccagagaccggcgaggtgattggcgtcttcgagagcgtgcagccgtcggacacagacctcggcgccaaggtgcccaaggatggcaagatcccaagggtgtggtacgcgcagctcgagtagggaatgaacaaatgttttgtgcgtggccgggttgatata

SEQ ID NO: 399983 - DNA, 451 bp, Oryza sativa nipponbare
ccacgcgtccgcggacgcgtgggcggacgcgtggggaagtactcgagcaaagaaggagagagcttggtgagctgcacagatggccccctccgtgatggcgtcagcggccaccaccgtcgctcccttccaggggctcaagtccaccgccggcatgcccgtcgcccgccgctccggcaactccagcttcggcaacgtcagcaatggcggcaggatcaggtgcatgcaggtgtggccgattgagggcatcaagaagttcgagaccctctcctacctgccaccgctcaccgtggaggacctcctgaagcagatcgagtacctgctccgttccaagtgggtgccctgcctcgagttcagcaaggtcggattcgtctaccgcgagaaccacagatcccccggatactacgatggcaggtactggaccatgtggaagcttgccatgttcgggtgcact

SEQ ID NO: 399984 - DNA, 455 bp, Oryza sativa nipponbare
ccacgcgtccgaagtactcgagcaaagaaggagagagcttggtgagctgcagagatggccccctccgtgatggcgtcgtcggccaccaccgtcgctcccttccaggggctcaagtccaccgccggcatgcccgtcgcccgccgctccggcaactccagcttcggcaacgtcagcaatggcggcaggatcaggtgcatgcaggtgtggccgattgagggcatcaagaagttcgagaccctctcctacctgccaccgctcaccgtggaggacctcctgaagcagatcgagtacctgctccgttccaagtgggtgccctgcctcgagttcagcaaggtcggattcgtctaccgtgagaaccacagatcccccggatactacgatggcaggtactggaccatgtggaagctgcccatgttcgggtgcactgacgccacccaggtgctcaaggagctcga

SEQ ID NO: 399985 - DNA, 472 bp, Oryza sativa nipponbare
ccacgcgtccgcggacgcgtgggctcgtcgcaacagctacaaacgcccacatcacacgcagaaatccgcatcaacagccagccatggcgtccacgctgaccaacgtcggcctgtctaccccggcggcggcggcgtcgtccctcgttaggccggtcgccggagctggacgcgtggtgtttccccgtgttggccgcggcgggttcgcggcggtgagggcgagcgggccggcgacgccgccggacatctcggacaagatgtcggagagcatcgacaaggcgaaggaggcgtgcgcggaggacacggcgagcggcgagtgcgcggcggcgtgggacgaggtggaggagctgagcgcggcggctagccacgcgcgcgacaagctcaaggagacctcgatccgctcgaggcctactgcaaggacaacccggagaccgacgagtgccgcacctacgacaactgattcttaccattatat

SEQ ID NO: 399986 - DNA, 354 bp, Oryza sativa nipponbare
ccacgcgtccgatactctactactactagccagtaagctagctaactaactacgtggctatggcccccaccgtgatggcctcctcggccacctccgtggctccattccaagggctcaagtccaccgccgggctccccgtcagccgccgctccaccaactcgggcttcggcaacgtcagcaatggcggaaggatcaagtgcatgcaggtgtggccaattgagggcatcaagaagttcgagaccctatcgtacctgccaccactcaccgtggaggatcttttgaagcagatcgagtacctgcctcgatccaagtgggtgccctgcctcgagttcagcaaggttggattcgtctacc

SEQ ID NO: 399987 - DNA, 451 bp, Oryza sativa nipponbare
  unsure (1)..(451): unsure at all n locations
ccacgcgtccgcccacgcgtncgcagaaaaaaactacagtggagaaacaactgtcaaattcaaaggctaaaaaggttgccaaaaaagatttagataaaagtaaagagcggagtggatcagaagaagataattcaaattcatcagctgaagaagataataagaaaaaacgacaagtagctccagcttacgggaaacgggtggaacggctgaagtcaataatcaaatcttgtggaatgagtatcgcacctactgtgtatcggaaggcaaagatggctcctgagagcaagcgtgaagcctgtttgataaaggagttggaggatatacttgaaaaaagaggattgtcaacaaacccctctgaaaaagaaattaaagcagtcaagaaaagaaaggaaagagcaaatggactcgaggcatagatatgagcaacatatcacagttctcgtcgagagta

SEQ ID NO: 399988 - DNA, 414 bp, Oryza sativa nipponbare
ccacgcgtccgctccctcctctcctcgtccctcctccccgccgccgccgcagcagatttaatcctcaatggcggccttcaacaagctcggtagcttcctcaggcacagtggcttgacaagcagtgcctcggccggctctttccctgccatgttcaatgctgctcgtctgatgtccaccaagcttttcgttggtggtctttcttggaatactaatgacgattcgctgaaagaggcattcaccagcttctgggatgtgactgaagctcgggtgatcaatgacagagaatctggaaggtcaagagggtttggctctgttagctttgccaatggcgatgatgccaagagtgccatggatgccatggactgtaaggaacttgagggacggagtattcgcgtgaacttcgcgaatgagag

SEQ ID NO: 399989 - DNA, 458 bp, Oryza sativa nipponbare
ccacgcgtccgacgacacgcagtcgtgcatggaccccaacgtgatggagtccagggtggtggtgagctcctgcggccacgacgggccgttcggggccacgggcgtcaagcggctgcaggacatcggcatgatcgacgccgtgcccggcatgcgcgccctcgacatgaacaccgccgaggacgagatcgtccgcctcacccgcgaggtcgtccccggcatgatcgtcaccggcatggaggtcgccgagatcgacggcgccccgagaatgggcccgacgttcggagccatgatgatctccggccagaaggcggcgcacctggcgctgaaggcgctcggccggccgaacgccatcgacggcacgatcaagaaggcggcggcggcggcggcgcacccggagttgatcctggcgtctaaagacgacggcgagatcgtggacgcctgaccgaatagaacagggt

SEQ ID NO: 399990 - DNA, 364 bp, Oryza sativa nipponbare
ccacgcgtccgcccacgcgtccggacacgacgcaccaatggcgctcgtctccgcctcctcctccaccaccgccgtcgcggcgctccccggcgccgccagggcctcctccttcctcggcggcgccggcaggagcggcaggctgctgctgaggcaggccgagtcgtcgtccgcgcgggcgtcgttcgccgtgcgcgccgcggcgcccgacaggccaatctggttccccggcagcaccccgccgccgtggctagacgagagcctacccggcgacttcggcttcgaccccctgggtctcggatcggacccggtgagcttgctttggaacgtgcatgctgatctatttcacatacgttgggcgatgctt

SEQ ID NO: 399991 - DNA, 472 bp, Oryza sativa nipponbare
  unsure (1)..(472): unsure at all n locations
ccacgcgtccgcctgagtacttccgacggcagcagcttaccgagaaatctgatgtctactccttcggagttgtgctgttcgaggtcctgtgcgcccgcaacgccctgagcccatcacttccgaaggagcaagtgagccttgcagactgggctctgcgttgccagaagaaaggtgttcttggcgagatcattgacccactcctcaaagggaagatcgctccccagtgcttcttgaagttcgccgagaccgcggagaaatgtgtggccgatcgcagcgtcgacaggccgtccatgggtgatgtgctctggaacctcgagtttgcgctccagctgcaggagagcacggaggacagtagcagcctgaccgaggggacgtcagcgagcacgtcgccgctggttgtggccaggctgcattcagatgagccgtcgaccgacgtgactactaccactacaacgacaacttntttgagcat

SEQ ID NO: 399992 - DNA, 483 bp, Oryza sativa nipponbare
ccacgcgtccgatgtatgacagggcgatctccttttggaaagaacagttgaggttaggttggccaccatatgagatgacaagcaccttgcttgttgatcttgtttgcaagaattgtggccctcagaaggccttggaagtcttggatgaactttctttggaaggatgtcaaccagatgtcgtcacctataatgctctcatcagtgcatcatgcaaggctggcaggctgaatgatgcaaagttcatcttaactcgtcttgctgctgaagggcttgaaccaaaatggtacaacctactgcatcttactccatgccctctgcaacatgagaaggtgggatgaagtatgcgatttgcttgaagacatgaaccaggtgaatcgtgatcctgatgttacaacctacaatatttttatcaattacttttgtaagtatgggcatctggatcaggcaattgatgtgttggagaggatggttatcaacaattgt

SEQ ID NO: 399993 - DNA, 484 bp, Oryza sativa nipponbare
ccacgcgtccggcagaaatccgcatcaacagccagccatggcgtccacgctgaccaacgtcggcctgtctaccccggcggcggcggcgtcgtccctcgttaggccggtcgccggagctggacgcgtggtgtttccccgtgttggccgcggcgggttcgcggcggtgagggcgagcgggccggcgacgccgccggacatctcggacaagatgtcggagagcatcgacaaggcgaaggaggcgtgcgcggaggacacggcgagcggcgagtgcgcggcggcgtgggacgaggtggaggagctgagcgcggcggcgagccacgcgcgcgacaagctcaaggagacctccgacccgctcgaggcctactgcaaggacaacccggagaccgacgagtgccgcacctacgacaactgattcttaccattatatgtttgctaatctctctgtaattaattataagttactgggttgaaaagattatttgtc

SEQ ID NO: 399994 - DNA, 268 bp, Oryza sativa nipponbare
ccacgcgtccgccacgcgtccgcgctaccatggcgctgagcagctccttcgccgccgtcgcagccgccgctggtggcgcgccatggctcgccgcggtacgctttccgactagacgacgtgttgcgctcatcggcagggcccacatcgagccggaggtggagtctacgaaggaggagacggttgacccctgccaccgactccgtgggtttctgtaggcagactcattgtgaaggaggggcatagcactggattgtggtgaactgctgac

SEQ ID NO: 399995 - DNA, 397 bp, Oryza sativa nipponbare
ccacgcgtccggcgagtcacaggcacacagacatggccgccgtgaacacagtgtcgtcgctgccctgtagcaaagctggcgccgccgtagccgggggagctccgaggccgtcgacctgctccgtattctaccctcctcgttgctggtccaagcgaagcagcggtaatggcgtgcgggcgcaggcgtcgacgacggagacgaccgcagcgccggctgcggaggtgactactaaggtggagaaggtgtcgaagaagcaggtggatggcgtggtgacgaacaagtacaggcccaaggagccgtacacggtgcggtgccttctgaacacgaggatcaccggcgacgacgcccccggtgagacgtggcacatggtgttcagcaccgacggcgagatccccta

SEQ ID NO: 399996 - DNA, 426 bp, Oryza sativa nipponbare
  unsure (1)..(426): unsure at all n locations
ccacgcgtccgggcggcggagcccgcggccaggccacgtacctcggcaacccggtgccatggggcacgctgccgacgatcctggtcatcgagttcgtcgccatcgccttcgccgagcaccagcgcaccatggagaaagaccccgagaagaagaagtaccccggcggcgccttcgaccccctcggcttctccaaggaccccgtcaagttcgaggagtacaagctcaaggagatcaagaacgggcgattggccatgctggcttttgtgggtttctgcgtccaacagtcggcgtacccgggcaccggcccactggagaacctggccagccacctctcggacccgtggcacaacaacatcggcgacatcatcatcccgagaaccatctacccttgagcttggcacaaaccggtgcgtgcgtncgggcgta

SEQ ID NO: 399997 - DNA, 393 bp, Oryza sativa nipponbare
ccacgcgtccggtcttagcgaatccagcagcagaagcagcagcagcagctcagccgccgccgatggcgtccacgatcatggccccaacctcccgcgtcctcgccgccaagacccccttcctcggccatccccgcccctccaatgcccccgtccgcgacatcgccgccgccgccaccggccgcatcaccatgagcaaggagctgtggtacgggccggatagggtgaagtacctggggccattctcggcgcagacgccgtcgtacctgaggggcgagttcccgggcgactacgggtgggacacggcggggctctccgcggacccggaggcgttcgcgaggaacagggcgctggaggtgatccaccggccggtgggcgatgctcggcgcgctgggc

SEQ ID NO: 399998 - DNA, 441 bp, Oryza sativa nipponbare
ccacgcgtccgcccacgcgtccgcccacgcgtccggaggaggaggccgcggcgccgccgccgccgccgccgcccgcggcggaggagaagccggcggaggccgaggcggccgtggcgaccaaggagcccgccgccgccaagccgcctcccattggccccaagagaggcaccaaggtgaagatcctgaggagggagtcctactggtacaacggcactggctccgtcgtcaccgttgatcaggatcccaacactcgctacccggtggtggttcggttcgccaaggtgaactacgccggcgtgtcgaccaacaactacgccctggacgagatccaggaggtcaaatgattttaattcggatggatcgtcgtcgagctggagctgcaaagaatcatcttaaattgatcacggagtgaggagaggatgcatgtcgtacatgtggaag

SEQ ID NO: 399999 - DNA, 456 bp, Oryza sativa nipponbare
ccacgcgtccgggcagcaacagcctccctgaagagcagcctcctgctaccatctcctatctctgacttcagtagtgcagcactctccatctcaacccaggctaggaggaggtcatggcagccaaggggggcaaggatgcaggtagcagcagctgcagactccaagaacattcttgtgatggggggaaccaggttcattggtgtcttcttgtccaggctccttgtcaaggaggggcaccaggtcacattgttcactagaggaaaggcccccattacccagcagttgccaggagagtcagatgcagagtatgcagagttctcttcaaaggtgttgcacttgaaaggtgacaggcaagactttgatttcgttaagacaagccttgcggcaaagggcttcgatgttgtttacgacataaacgggagagaagctgttgaggtagccccaatcctagacgca

SEQ ID NO: 400000 - DNA, 438 bp, Oryza sativa nipponbare
ccacgcgtccgcggacgcgtgggcgagctcatccacggccgctgggccatgctcgccaccctcggcgccctctccgtcgagtggctcaccggcgtcacctggcaagacgccggcaaggtggagctggtggatgggtcgtcgtacctggggcagccgctgccgttctcgatctcgacgctgatctggatcgaggtgctcgtcatcggctacatcgagttccagcgcaacgcggagctggacccggagaagaggctgtacccgggggggtcctacttcgacccgctcgggttggcgtcggacccggagaagaaggagcggctgcagctggcggagatcaagcacgcccgcctcgccatggtcgccttcctcggcttcgccgtgcaggccgccgccacctgcaaggggcccctcaacaactgggccacccacctcagcgac

SEQ ID NO: 400001 - DNA, 479 bp, Oryza sativa nipponbare
  unsure (1)..(479): unsure at all n locations
ccacgcgtccgatctcctgccttctctctaggatcgccgccatccaccacatcccacgctttttactgccgcacacataagagcacaggaggaggaggaagaagaagagtagagagagaaagatagagagaggagcaggagaagcattcgttcatccaggagagagagaggcttcaagttcttggtctcctgctctgccatgtccatggatgaagggtatggccctacctgggacagcgacgacgagtacgacaacttcatacgcaagatgaacccgccaaggatcgagatcgataatgattcatgcaacgacgccacgattgtcagggtagacagtgcaaatgagtatgggattctccttgaagtaatccaagttctgattgatctgaatcttgtgataagtaaggcgtacataacctcagatggtggatgggtcatggatgtctttaatataactgacaaagaanggcagaagctta

SEQ ID NO: 400002 - DNA, 330 bp, Oryza sativa nipponbare
ccacgcgtccggctaattaagcataagatgaagaagatggaagtagaagaagaagatgcaaaccgctgctagcagagtcgttggattgtcggccgtgttgcccgctgctgtgaacgggcgcagcctgcagattcaggctcctcagcgtgttgcgtatgcgcgttcgtgcggcacgcggccgacgtggcagtggaggctgaggacgtggactacagctctaacatcatggtgtttcccatggaggccatcgacctcatcagccgcaaggcgtgcaacgtgcagatgtacccacaggccaagctctcatgataggctgctaggtgctgttct

SEQ ID NO: 400003 - DNA, 476 bp, Oryza sativa nipponbare
ccacgcgtccggccatctgggcggtgcaggtggtgctcatgggcgccgtcgaggggtaccgcatcgccggcgggccgctcggcgaggtcgtcgacccgctctaccccggcggcgccttcgacccgctcggcctcgccgatgaccccgaggcgttcgcggagctcaaggtgaaggagatcaagaacggccgcctcgccatgttctccatgttcggcttcttcgtccaggccatcgtcaccggcaagggccccctcgagaacctcgccgaccacctcgccgaccccgtcaacaacaacgcctgggcgtacgccaccaacttcgtcctcggcaagtgaagtgggggaccgtagcttagcagtggttaattgtggttggatggattttgggccagcgagttggttgtctttgggttggggaagatgggtttagtgcgacgagatgatgatcgagttggtgttgtgtacactaagaggatg

SEQ ID NO: 400004 - DNA, 495 bp, Oryza sativa nipponbare
  unsure (1)..(495): unsure at all n locations
ccacgcgtccgcggacgcgtgggcggacgcgtgggcggacgcgtggggtcgcctcgtcgcctgcgttggagcagaaattgttttggatgtgcgaaacctactccaataatagccgttgatgagccttcaaaaggtttaagaattcaagggcgctcaataaagcagcggagtttgtcggaggactnttggagttcaagcccgccgggaatggagaatagtgccatgcaatctcagcgtagcatgtcttcaatcagtacggcagcacaatcgagcgatcagcatggagctggaagtagcaccaacccaaatgagtttgtaaatcaaggacttctcctgtggaaccagactaggcaacagtgggttgtaaacagaaagcacaattctcagcgtcaacaacctcgagaggcaaaaataagttggaatgctacatatgagagccttctaggaagcacanaaccatttccacaagcgatccctcttggtgaaatggtagat

SEQ ID NO: 400005 - DNA, 426 bp, Oryza sativa nipponbare
  unsure (1)..(426): unsure at all n locations
ccacgcgtccgcgatcgcaaatactctctctcgccgatagcagcagcagcagcaatggccgccctcgccgccgcatccaccgccttcgccgccaagccgcgcctggcgcgcgcgccgtcgtccccggccgcgcggttctccgtgtcgtgctccgcgtcgggcaacaacggcggcgccggcgagatggcgcagtcgctggcggcgtcggccaagacgttctccgcggcgctggcgctgtcctcggtgcgtgctctcctcggcggggacgtngncgccccccgccgncgncgacatcgcctggctgacgccgtgcaaggagttcaaggcgttcgcgaagcgggagaagcagtccatcaagaagctccagtcgtcgctcaagaagtacgcgccggtctccgcgccggcgctcgtcattaacgccaccat

SEQ ID NO: 400006 - DNA, 467 bp, Oryza sativa nipponbare
ccacgcgtccgctacgggattggaggtggcatgtcagtcgatattgatgcatctggcaagaagagcacggggaagggtgtgtaccaattcgttgacaagtacggcgcaaacgtcgacggctacagcccaatctactcgccggaggaatggtctcccaccggtgacacctacgttggtggaaccaccgggcttctgatctgggccgtgaccctcgccgggctcctcggcggcggcgccctcctcgtctacaacaccagcgccctcgccggctaaatttcacccaaatccagtctatgtatgtaacaccaagctgggtgtctgcatattcatctgtaatctaagatagccttcctctgaatgcgatgtgatgatgcccactgcttaatcaaactgcattgtgattaatctatgtaacactgtacttgcatgatgatgatatactacacttgatacttgaatttgagatt

SEQ ID NO: 400007 - DNA, 436 bp, Oryza sativa nipponbare
ccacgcgtccgcggacgcgtgggtaaattgagctttgtgtgcggttttgaggggagtacatcggcatgaggatccagtgcgacgcgtgcgaggccgcggcggccacggtggtgtgctgcgcggacgaggcggcgctgtgcgcgcgctgcgacgtcgagatccacgccgccaacaagctcgccagcaagcaccagcgccttccgctcgacgccgcgctccccgccgcccttccgcgctgcgacgtctgccaggagaaggcggcgttcatcttctgcgtggaggacagggcgctcttctgccgggactgcgacgagcccatccacgttccggggacgctcttcggcaaccaccagcgctacctcaccaccggcattcgcgtcgggttcagcttcgtctgtagcgccaacgccgaccaccttccgccggcagcgcccaa

SEQ ID NO: 400008 - DNA, 445 bp, Oryza sativa nipponbare
  unsure (1)..(445): unsure at all n locations
ccacgcgttcgcccacgcgtncgcccacgcgtccgctttctaaaacaaaccactgtatactgtggacatgattactcgttcataaggcccgccaagcttgaatacagccatcatgtgggccaacttgctgcttctactatgaaatcatctgacggaagcagcgctgtcttcatatagccagtctctggagcgtgggcgtgaagaactagctgtgtctatgcgatgacaaaaggtgccatgaaccagatggccgagaacctgtcatgtgagtgggcgaaagacaatatacgaaccaattgtgtggcaccatggtacatgaagacttcacttgaggaagatgaattggcaacgaaggacttcgctgacagcatcgtgcgtcgaacagcgctgaagcccggggagaaccagaagagggtcatcgctggtcgagtcctgtgcatgcccg

SEQ ID NO: 400009 - DNA, 308 bp, Oryza sativa nipponbare
ccacgcgtccgctctgatttatacaaacatttcatctcctttgttcccccctctcacaagagagagagcgccagactctccccaggtgaggattcagccatgaagggggccaaatccaagggcgccgccaagcccgacgccaagttggctgtgaagagtaagggcgcggagaagcccgccgccaagggcaggaaggggaaggccggcaaggaccccaacaagcccaagagggctccctccgctttcttcgtttttatggaggagttccgtaaggagttcaaggagaagaaccccaagaataaatctgt

SEQ ID NO: 400010 - DNA, 381 bp, Oryza sativa nipponbare
ccacgcgtccgaaaaaccaacccaaccgccgccgcatcgccctcgttagaacgatggccgcgtcggcgctgcaccagaccaccagcttcctcggcaccgcccctcgccgggatgagctcgtccgccgcgtcggcgactccggtggccgcatcaccatgcgccgcaccgtcaagagcgcgccccagagcatctggtatggacctgaccgtcccaagtacctgggcccgttctcggagcagacgccatcgtacctgaccggagagttcccgggagactacgggtgggacacggcggggctatcggccgacccggagacgttcgcgaggaacagggagctggaggtgatccactcgcggtgggcgatgctgggggcgcttggct

SEQ ID NO: 400011 - DNA, 442 bp, Oryza sativa nipponbare
  unsure (1)..(442): unsure at all n locations
ccacgcgtccgggccgccacggcgtgctccacggcgcctcttctcggtggagctcgcctccccgccgtcggcgccgccttgccgccgccctccgttctcctcctcccccagcgcaacttcccctctcctctccgcctccatgacgcaccgaggctatctctgctccgggcgagggcgtcgtccgacgacacctngtnctccgccgcgaccggcgacgagctcatcgaagacctgaaagctaagtgggacgccggtgagaacaagtccaccgtcctcacgtacgccggcggcgccatcatcgccctctggctgtcggccgtcatcgtcggcgccgtcaactccgtgcctctgcttcccaagttcatggagcttgtccggcctcgggtacaacaagctgggtgtgtgtaccgctacctcctcttcaaggaaagcaggaaggaat

SEQ ID NO: 400012 - DNA, 475 bp, Oryza sativa nipponbare
  unsure (1)..(475): unsure at all n locations
ccacgcgtncgcccacgcgttcgnccacgcgtncgnccacgcgtncgtccacgcgtncggaagtactcgagcaaagaaggagagagcttggtgagctgcagagatggccccctccgtgatggcgtcgtcggccaccaccgtcgctcccttccaggggctcaagtccaccgccggcatgcccgtcgcccgccgctccggcaactccagcttcggcaacgtcagcaatggcggcaggatcaggtgcatgcaggtgtggccgattgagggcatcaagaagttcgagaccctcttctacctggcaccggtcaccgtggaggacctcctgaagcagatcgagtacctgctccgttccaagtgggtgccctgcctcgagttcagcaaggtcggattcgtctaccgggagaaccacagantccccggatactacgatggcaggtactggaccatgtggaagctgcccatgttcgggtgcact

SEQ ID NO: 400013 - DNA, 297 bp, Oryza sativa nipponbare
  unsure (1)..(297): unsure at all n locations
ccacgcgtccgccgncgncaaccactcctcaccaagtcaaagtttcttcctcgcgaaccggcgcgaacggcggcggcggcgatgtctgggagaggcaagggcggcaaggggctcgggaagggcggcccgaagaggcacaagaaggtgctgcgcgacaacatccaggggatcacgaagccggggatccggagctggcaggaggcggcgtgaacgcattcggctgatctacaggaccgcggtctagacttctggacgatcggcgcgcccaccgccccgcagacacgctgcggtccctac

SEQ ID NO: 400014 - DNA, 440 bp, Oryza sativa nipponbare
  unsure (1)..(440): unsure at all n locations
ccacgcgtccgctntggctctgaggaaagcccaagggttctaaaggctgttcgtgcaactggcgaacctcttgttgatgactggagttgtctcaagtctatggtacgcactttcgaagcacaatgcggctcgctagcgcagtatggaatgaagcatatgcgttccttngcaaacatctgcaatgctggcatctctgctgaagcgatggcaaaggttgctgcgcaggcttgcaccagcattccctccaacccctggagttccacccataggggttttagtgcttaaatcataggtgaagaaaacttagcaaatattctcagctcctgcaatatacccaagttatctttttctcttgcccctgtagtttgatgatcgattgggggcagtagtgcttgaaccgtatgtgaaagctgaagaactgtgcattatttcagatgctc

SEQ ID NO: 400015 - DNA, 384 bp, Oryza sativa nipponbare
ggggacaggggccagataagcttacagatttgatatcctataagtctcatgttacaactatatacgtgcacatatatataaccggtgagtaattttacacaagaaaaaaatgatatataatcaagtaaaactctaattatgaggcaaggcatatgtacagaagagcttagctgaagtgtgacctctagtacttatgccgcaaggagtttctggatgtccttctcaatctggaatggtgaagttgtaggtgggtatctctcaacaacttttccagttttgtccaccaagaacttctcaaaattccatttcacaagatcacccaaaaatcctccagcactcgacttaagaaacttataaataggggctgtgttaggcccgttgaca

SEQ ID NO: 400016 - DNA, 340 bp, Oryza sativa nipponbare
aaggatggaactagtgcactatttatccgagaagatgcctcgttacaactcatcacacctccatgttcatgaatactgatgcactaattacaagtaatatgtcctaattgcttattcttctccttcaacagccggtaggccttccttgaaccatgtgtagagtcctccatccagatggaacacattcttgtaaccattcaggaccaacaagtaagctgctatcaaggacctcgattgcttcccatcaggaaaggtctggggtgggttcaatgttcctcctggcgaacatgccacaataatctttggatttttaccaaggttctcattaacactttggatg

SEQ ID NO: 400017 - DNA, 382 bp, Oryza sativa nipponbare
cgagatggaataggggtatggattcacacagattaattaattaattagccaataaaaataaaacgtactgatatatacttaattagtagaaacaggcacagtagaggtagaggtagaggtagagaattaggaagagggggtgactggttcattggaggaagtagccggagaggaagaagaggaagccgacgaggaggctgccgtagatgagcagcgctttttggtcgccggtgagggagttgccgcctaggccgaactggtggttctgggcgaacccggcgatctcgacgctcttgctctcgaagaaggactgggcccggccgcacgttgggcaccggcagtcggcggggaggttggtctaacgggaggccccgggggaccg

SEQ ID NO: 400018 - DNA, 375 bp, Oryza sativa nipponbare
ataccagaacctggcggccggtgtccggtagtatatacggtattacacatgaacattacacagcattgcgatttccaattgccggaagtcgataataatccgtgccggacagtgaaaagtcagatgaggtggggaagaaaagcaaagaaagaaacaagaaactgtgttgggcgctcgaaacttcgaaattctcattacaaaggatcgagaggaagaaggaagaagtctggggaaaatttttggagcgaggtggagttacaaaggcagcagcagcagcagcttctacgttctcacttccactggttggcgacgatgtcggcgaggtcgacgaccctctgcgagtatccccactcgttgtcgtaccaggcgatgacc

SEQ ID NO: 400019 - DNA, 353 bp, Oryza sativa nipponbare
gatcgatcgatgtagaagtggatgcattaattcatcatcttgggtcttcttatcttacaaatcaccaccatgcaagacgccattaaccaccaacctaactttcctaatttaagtagtagtcaacaaaagggtgaccgatcctctctgcataccctccgagctcgctcggcatgacaaaactaaacagcgcgcgcgaacgcacaccaacgcatcgatcccgtttgaattgcgcgcgaaagagcttaaattaagaggatgaggagaaggtgtcgaagatggtggtgcggagcggctcgctgaggtgggtggcccagttgttgaggggccccttgcctgtggcggatgcctgcacg

SEQ ID NO: 400020 - DNA, 200 bp, Oryza sativa nipponbare
tcctttttttttttttttaatccagcaattggggaccgggtgcatttattcattaccttaattcaccttatcttacaaatcaccaccattctatacttaattaaccaccaccccaacttttctaattcaagtataaatcaacaaaaggatgacctatattctttccataccctacctactcgcttcttatcacaaaactt

SEQ ID NO: 400021 - DNA, 387 bp, Oryza sativa nipponbare
tttcagttgagtcagatatcagtaaacatgtatgtactacattttatatactgtacacaacagcgcttaatagttagtagtatagaagtcgatctacatttcttactgtagtatatatacactctgcatgcaatttgtgaacacccatccgttacaataattccattttatttgttgtttcctacctgatcaccttcttgtttgcatctctccatctggcatcgtaccttgaagaattcaccattcatttcattgcgatggttctggaagggtgatgagccgagatttcgagtcatataccatctccgtgctacaatctgcacattttactttgtttgtttcaccgccactagacactgacaggatagtcccgaagaaggaaagggt

SEQ ID NO: 400022 - DNA, 345 bp, Oryza sativa nipponbare
agcaagggaaatactcgcattccaaaacagccgatggacaataatcggactcagagcatcagttttaaccgaacagaaataaacgagtattaaacgactgacatagtgcacattgcgagcagatattaacggtccatgaaacgagagccatggccgtgggcaaaacttaacaaatactagaactagatatctcaactgcagacatgcaaaccaccatttgaacgaggctcacttcttcttggcggcagccttggtcaccttggcaccggttgggtccttcttctccacgttcttgatgacgccaacagccaccggttgcctcatgtcacgccacccaaaaacgac

SEQ ID NO: 400023 - DNA, 384 bp, Oryza sativa nipponbare
gtctagtataggatttttattgcatgagcaggaaaaaaaggtttagtgcacctaacgggtcattagcatttcacgggcgttttacagaagtgattatacatgtatatgagcccggcgaacattttacatgtatatgagcactatatataggacactctttacatgtatgcataactgtgtcccttcatacacctcacttgttcatgaaatcgatgcccttctgaatgctctgcatcagctctttctttgccatctccaagccagctctctcaaaatcattcaacggccccaggagggagaccttttcggctccagcacgacctaacctcacttttgttgcaaagacggcaactcggtcaccggagatgcaacatatgaacattc

SEQ ID NO: 400024 - DNA, 369 bp, Oryza sativa nipponbare
  unsure (1)..(369): unsure at all n locations
ttcccaaatgttctcattgggggatggcgatatcatagaagcagcgacacgaattaagatttaaaaccaaccccaagaaggatcgcagatccaactccaccgaatcgatccaagaactccgcctaatccaaccaaaccatgggcgatctcatctcaccaacacgacacgaactcataaaaagactaacaccaccaccacctnctacttatttagggactcgacgactcaagacgactgatactggcgaaaggcgaaggggaacagcacagatctaggagagctggccgcaatcggcgatgacgaccggcttggcggtgctcccgccgcgggatcccaccttcttcgatgggcttgacgacgtccatgcc

SEQ ID NO: 400025 - DNA, 255 bp, Oryza sativa nipponbare
ttcccaaatgttcacgatgggggttcgtgtcatacccggtgcataaatatatatagccggagcttccatatctttaattggcatatgcctcacccaacaacatatagtcgcagcacataccactcttacatcaagccagggggagatcaggtgaaacaaaaacaaaagcacagctcggccggctaaatcaaaagacgatgaacacactgggaacacaccaaacacggtgggagacatcatctggtcagaggtgaa

SEQ ID NO: 400026 - DNA, 393 bp, Oryza sativa nipponbare
gtctccttcgcctgttcgtccggtagccgcgccgcctgggctgcctgctgtgctagcgcctcggtggccccggcggcggaggcggaggcggtggtggaagagcccgaggggccgaggacgcggctcatcgcgcagaacatcccctgggactgcacggcggacgacatgcgcgcgctcttcgggaagcacggctctgtcgtcgatgtcgagctctcgatgtacaattcgaccagaaacagaggattggcgtttgtaaccatgggttcagaagaggaggctctttcagcactcaaccatctaaattcgactactctaaatgatagaacaattaaggtagactttactagatcgagaaagaagcaatatgttgggccatcaggctccatgccgaag

SEQ ID NO: 400027 - DNA, 322 bp, Oryza sativa nipponbare
ttaattcacaacacggtattggattgatcaggttcagaacccgcacagaaatacacactaccggtgcagatctcaccctatctccaatactcgtacatccatccacgcggtccacacgaatacgtacatctatacggtacacgtgcgtacatctactgcaccgcgtacacacacgcacactctaatgcagagacgcgcgtagtggccaacctagctagcttcgctgaaagcgatgcagtggcatggcagcacggcggcggctgcactcactcaccaattacgaaaggggtggaggaggcccaagcgttggtgttgcccgggt

SEQ ID NO: 400028 - DNA, 324 bp, Oryza sativa nipponbare
ttattgttaatattaatttgcagggggggaaacgaataaaatcattattgcaaaaacatcatcttcttcttcatcttcttagtgagacacaacaccaactcgatcatcatctcgtcccactaaacccatcttttccaacccaaagacaacgaacttgctggccacaaattcatctcaaccacacttaaccactgctaagctgcggacccccacttcacttgccggggacaaagttggtggcgtacccccagtccttgtaattgacggggtcccctaggtggttcggctggttatcctgggggcccttagcggtgacgattgcct

SEQ ID NO: 400029 - DNA, 284 bp, Oryza sativa nipponbare
gcagaggcggaacacgaggtatgtatatcaaacgctctagaaaagattcatgtgatgaaatacatgatgaaccacgtatgttctcaaggtaaaattaattaatgcagtatagttttaactttgtccatcgatctcaacctgtaactgtgacgacacactggctacagtgccctagaggtactagcagtatagcagtagctgtagtacgtagcagcagcagcagcaggttcactgtcttgattggattggatcggattagtagacgtagttcttgacgaacatgc

SEQ ID NO: 400030 - DNA, 254 bp, Oryza sativa nipponbare
  unsure (1)..(254): unsure at all n locations
ggcanaggcggaacagggggtatgtatatcaaacgctctaaaaaagattcatgtgatgaaatacatgatgaaccacgtatgttctcaaggtaaaattaattaatgcagtatagttttaactttgtccatcgatctcaacctgtaactgtgacgacacactggctacagtgccctcgaggttctagcagtatagcaggagcttgaatccgtagcagcagcatcagcgggttcacttgcttgattggattggatcg

SEQ ID NO: 400031 - DNA, 392 bp, Oryza sativa nipponbare
acgtgataccatccattttttttattgtcgacgaatttatcagatatgctctagatacatatcttgtgtgtatatagccggagctttgttttcacatatcctcacccaacgataattgtagtactcttacaataaaaccggccggagagggagggaagagattattacatatgtgttaagagcagaggccattgagatggtacataaccaaactgtaaaacaaaaatatatagcatattatatattgatatatcatcaacatagcccaaaacaaagctgcatactattattataggcaggaatccaccagcgcgatgcttgatcttagcttaattgccaacagactcctcgaaacctgggggcttggaggcgatgaagctaatcaactgcac

SEQ ID NO: 400032 - DNA, 296 bp, Oryza sativa nipponbare
  unsure (1)..(296): unsure at all n locations
gagtttaactaanaccagttgcatttggttttaaatacaaaaattaatatggacggattcacaagagagcaccctctacttaagctttacattacaaggccaaccagcagctgactgccacacgaccactgactgcgcacactcgcgcaatattcaacacaatcacacacagtacgcacgcacataaaaaccacccatagccttcacgtacgcccggacgcacgcaccggttcgtgccaagctcaagggtagatggttctcgggatgatgatgtcgccgatgtttttgtgccacgg

SEQ ID NO: 400033 - DNA, 329 bp, Oryza sativa nipponbare
gagactcgaaaagaaaaaaatcctgaagtctggaccaaagtttagttttacccctcacaaaaaatggcccgtgtttgcagctgtgttttttttttgacaggcatgcgttcctttgtcgaaggggaacaacgtacgggcggccaatccgggcacagtttttttagtttagcagttttgcccggggacaggcaatgggggggcttcgttacattatgggggtatatatttttgcacctacgcgagcccggacttgggcagggggtttagttttcgtacactttgcacttggggggctccgggttggccttggagaaatccttccggggggg

SEQ ID NO: 400034 - DNA, 398 bp, Oryza sativa nipponbare
tgaccgaaaaaaaccaccagtttgatgctattcgaaatcactgcaatgagtgagtgacacaatggagcaacaccaagagtgcactgcaaagccggttttgatccttacaccacacaaggcgagagggagacacacccgttgataatgttgttacaacatcgacatgtccatcgatatctgaggtgctacatggcgtacctctgagtccaggtccttgctgtgttctcgtacttgtgcctatctgtcttgtacatgtgggcgatctcagggaccagaggatcatcagggttcggatcagtcagcagggaacagattgacagcaacaccttggaaatggttagtgctgggctccattggtccttaaagatgtcaaggcaaatgctcccgttgctgttgat

SEQ ID NO: 400035 - DNA, 371 bp, Oryza sativa nipponbare
atgtatcgaacaatgtcctggccgctggtcgaaatgcaaataacatcatcgggggatatgatcatcagttcacgagaacagaggaagaaacaaaagctaaaaattaaaaccatcaacagcccgatcgagtttgcattactagatacacacattgcagccttccttccctctctccatgtatcgatatatcaacccggccacgcacaaaacatttgttcattccctactcgagctgcgcgtaccacaccccttggatcttgacatccttgggcaccttggcgccgaggtctgtgtccgacggctgcacgctctcgaagacgccaatcacctcgccggtctctgggttgctcttggtgacgctcaacgtgatg

SEQ ID NO: 400036 - DNA, 273 bp, Oryza sativa nipponbare
agatacaaaaatgaaacatgagtaattactaggattacttaacacacggatcacagaaaatcaatccttgcatgcaggggaaatcgatggatcgacctctctccttaacttgttcttaattctcatgtacaatcaaagaaacacacacgcacacacacatgcgtgcactgcatctctctgagcaacgaactcgattgatttgattttgattcgctagggattaaagagaagctgagatagagatttcgacgatcatgcgacgctgaaggagct

SEQ ID NO: 400037 - DNA, 368 bp, Oryza sativa nipponbare
tttgccacagcaaattagcggtaatcaaacactaggtctcgtatggatcattacaaagtacacaaatgtacaaattaaaacatcaaaagagttaactaagcttaaagcagcagctgacacataagttgcaaaccccaacttttttcagtttctgaattctggatggatcatatcagattcatcacagcatcgtacaatctgtgcaagcattggtacatcgagcgatggagagagagagtagtctacaatggcggctgggccattcacgagcccggcgtgaacttggtggcgtagacccaagcgttgttggccacggggtcggcgaggtggtcgagccggttctccaaggggcccttgccggtgacgat

SEQ ID NO: 400038 - DNA, 356 bp, Oryza sativa nipponbare
ttaaatatatataggcggagcttccatatatttaattcacatatgcctcacccaacaacatatagtcgtagcatataccactcttacatcaagtcagagagagatcaggtgaaacaaaagcagaagccgagcacggtcggtaaaattaaaagacgatgaacaatactgggaacacacgaaacaaggtgggcgacatcatcgaatcagcgatgaacaattaaacaaggctatatatgacgatgacggcttagttgccaccagactcctcgcagtccgggggcttgtacgcgatgaagctgatgagctggacctgcctgacgttgtctaagccgatgatacggacgaatgcattaagg

SEQ ID NO: 400039 - DNA, 356 bp, Oryza sativa nipponbare
ttaattatatatggggcatgcgagtaacaaggccttgttgacgctttcaatcatttacagctcaaagcactaccagcatcccgttcctgcttgccaggcgcagttctagtttgatttctttcttctttttgggaggagttcaaagttttcccataactaacatactaagtccagtggtatatagtaacatcctattatgtagcaactaactaggaggcctatagctagttgattgggtggtactgcactgacacccgcttaggagggagcttccggcggattaaaaggacaagagctgaacgcagtatctctgtcaacatatagaacaataaatcaagaattgggtggtccaaaac

SEQ ID NO: 400040 - DNA, 343 bp, Oryza sativa nipponbare
atatatagccggagcttccggatatttcattcacatatgcctcacccaacaacatatagtcgtagcagataccactcttacatcaagtcagagagagatcaggtgaaacaaaaacaaaagcagagcacggccggtaaaatcaaaagacgatgaacaaactgggaacacacgaaacaaggtgggagacatcatcgaatcagagatgaacaattaaacaaggctatatatgacgatgacggcttaattgccaccagactcctcgcagcccgggggcttgtaggcgatgaagctgatgagctgcacctgcctgacgttgtccaagcccatgatacggacgaatgca

SEQ ID NO: 400041 - DNA, 374 bp, Oryza sativa nipponbare
tatcataaacagagaaatatgttaacggaaagaacaaagttactgcacttttgcgcagtctaatttacaacagagagaaatatatacatgtgaaaattcttttctattttggcatccaaataaacaacggattttgcgctattttcagctggtaagggatggcttgaagtacatgcacattggtgggtcaatcctcatgatggacaatatcgcagatggaacactccagatcccatcacccgagatcaaaccagatgcaatcgcgcctgcaaagtcctcagattccttgcggatcaccctctgccagaccaacaggataactcggccaacgaacatgtcgatcgcaaagtacgccccaatgtagaatgggacag

SEQ ID NO: 400042 - DNA, 292 bp, Oryza sativa nipponbare
tgttctcaaggtaaaattaattaatgcagtatagttttaactttgtccatcgatctcaacctgtaactgtgacgacacactggctacagtgccctcgaggtactagcagtatagcagtagctgtagtacgtagcagcagcagcagcaggttcactgtcttgattggattggatcggattagtagacgtagttcttgacgaacatgccctccttggcctcggcggcctcgccgtcgctggtgtacttgccgagctgcgccagcgagttggccttggcgcggaggagcagcgcg

SEQ ID NO: 400043 - DNA, 251 bp, Oryza sativa nipponbare
tgtgggaaacgaataaaatgggtatggcgaaaacatcatactctgctcaatcttcttagcgtgcacatgacccactcgatcgtcatctgggcgcactaagccctagttgcccaacccaaagacgacgaactcgctggccacaaatccatgcaaccacaattgaccgactggaagctactgtgccccacttcacttggccgagactaagttggtggcgcacgcccaggcgttggtgttgacggtgcttgcca

SEQ ID NO: 400044 - DNA, 378 bp, Oryza sativa nipponbare
tgcgaaaatctgaggggatgtattttagagtaaattacatcagaggtacatgaacttgtttgaacttgttaggtgggtgcaatgtgaacagccccccttattttacatataccgttggatcgctggaaatcatggtggcaagagattatgagacttacaaggatattgagtttgccgtcgaagagctcgcgcaccctgctgactagctcctctctgtcagtgcgcaccgacacgtctcagacagagaaggagacggcgaggcccttggccgtcaatttcttctggcatctgctcagctccgcctcgctacgggcgcaggtgtgcacccgtcagccgaacccaacgagctccttcacgatggcgcggccgatgcctttg

SEQ ID NO: 400045 - DNA, 399 bp, Oryza sativa nipponbare
tgacaggaagcaacgcggaggatacacatgacgttgatcaaatgttcacggacgctgctcaggcgatttgtcttgtgaacgaatgctcgatgcagatcaaatatgaaataataagacttgctgacacactcgagtaatgaccctctacacattgcaatagatatgaagacatgcatgtgttctcagttctcactcacaaaaaagcaccattcgcatcctaggccttcacgccaagcatataaagtgcaatatgaagatttaatcttcacctagaatttcaacgacgacggatactaaacggtacaaaagtaaacaataataaggcttcacataagccacatcaggtcctaagctcattatttaagcaagtcagggcccactttagtactggccttcata

SEQ ID NO: 400046 - DNA, 349 bp, Oryza sativa nipponbare
ttgaagagaacttgacttctgaaagagtatcaacttgttttttacatcggttacatcatagtacaggtacacaatcaacaaggcatgcagtgctccatccacaattacattccaatacaccaccaccattgacaggctactccgatcccaaaaaagagaggtaagtcgtgtccaccaacagtcttttcatcttcctgcattggcagccattgctaacactgcaacacctgaagaactcctcaatggggggtgaaggcctggaagactgcggcgtggccggcgtcggtgagatgggcgaagaggttgtcgatggggcccgtgcccgtgtactctgcctggaaccaagctt

SEQ ID NO: 400047 - DNA, 361 bp, Oryza sativa nipponbare
tgtcaaaatacagcagaaagtgggaaaccactttatagtcgacgaatcgtcagtataatatctacatgcatctcatcagatgagatcagatcgagtacaacaagatggcgtatgcaggttgcgcatgcatgcatgaaaatcgagataaaaagggattaattaattattaacatatatatatccatcagtagacttccacattccattgctccgacttcttcagctgcttcttgtagtcaagccagtcgatgccgtcttttgcagcgaggtcgatcatgatgtcgtcgatgcctttctccatgcccttgaggccgcacatgtagacgtaggtgttgtccttcttgagcagcttccacagctc

SEQ ID NO: 400048 - DNA, 333 bp, Oryza sativa nipponbare
tttcgagtttaactaagaccgggttgatttcgtgtttgatacaaaaattaagatggacggattcacaagagagcaccctctacttaagctttacattacaaggccaaccagcagctgcctgccggccgaccactgcgtgcgcacgcgcgcgcaataatcaaccaatcacacacagtacgcacgcacataaaaaccacccatagccttcacgtacgcccggacgcacgcaccggttcgtgccaagctcaagggtagatggttctcgggatgatgatgtcgccgatggtgttgggccacgggtcccagaggtggctggccaggttctccaagggg

SEQ ID NO: 400049 - DNA, 384 bp, Oryza sativa nipponbare
agcaataatcaaacactaggtctcgtatggatcattacaaagtacacaaatgtacaaattaaaacatcaaaagagttaactaagcttaaagcagcagctgacacataagttgcaaaccccaacttttttcagtttctgaattctggatggatcatatcagattcatcacagcatcgtacaatctgtgcaagcattggtacatcgagcgatggagagagagagtagtctacaatggcggctgggccattcacgagcccggcgtgaacttggtggcgtagacccaggcgttgttggcgacggggtcggcgaggtggtcgagcaagttctccaaggggcccttgccggtgacgatgggctggaccaaaaagccgaacatggggaaca

SEQ ID NO: 400050 - DNA, 301 bp, Oryza sativa nipponbare
ttttcggcaggcagagtacatagtattatacggattataaagaagaaaccaccaccattacactaatacacacaaagctcgatcaagcagcttaattaatttcttccacatgtacgacatgcatcctctcctcactccgcgatcaatttaagatgattctttgcagctccagctcgacgacgatccatccgaattaaaatcatttgaccctctggatctcgttcagggcgtagttgttggtcgacacgccggcgtaggtcaccttggcgaacccaaccagcaccgggtagcgagtggtggg

SEQ ID NO: 400051 - DNA, 384 bp, Oryza sativa nipponbare
gctagttatatcatggatattagatgaagtttagtctcccttgtatcacatcttacagtttcccaatcccaatacattgcagcttacgcctgtacgcgtgtatccaactatccatattgtaccaaaccagcgttgataacaaaactgaaaccgtctccgcttgctcctgcccaccggccatggcggcccggccggtcagccgctcgcgtcgcgcagcaagcaatccgtccgctgtccggaaaggacggcggcgagctcagacgctgacgagcttcttgccgaggatcatgtcgtcggtggtgaagtcggccgcctttctgaacgtgccgcggccgaagtcgaggttgtacgagtcggtgaggccctccaccaggtggtactgcg

SEQ ID NO: 400052 - DNA, 414 bp, Oryza sativa nipponbare
agcaaatcgatccatgcgacgatgcgtgcaaatcagttggagcacaaatttacatgttacacccacaccctacacccatgcataataatacatcgtatatacgtacgtacatacatacccctctcgatcacacgcaccatcgatcgtacaaagttgcgtacatacatacgtacacacatatacgcatacgcacgtacatacatacataattaaaaactcgtaattaattaaatacgtagttgatggcatctctaatggaacttgaggctggtgaggatgttgttgtggacgggatcagcgaggtgatcaagcaggttctgcacggggccaaccccggtgaagagcgcctggacggagaagccgaggaaggcgagcatggcgagcctgccattcttgatctccttgagcttgagc

SEQ ID NO: 400053 - DNA, 296 bp, Oryza sativa nipponbare
gtgaacctaacggagctcaggtagcagggcattcttatttataactaattattttttttcagtgataaacaatatacctattgatagcgagacacctgttataactttattaatatcaatacatgtcaggtaaagtctatgcagtgtgcatatgtgcattcacagtcacactcacttagtcaaataccaagatcgatcgatcgatgtacaagtggatgcattaattcatcatcttgggtgttcttatattacaaatcaccaccatgcaaggtcgcattaaccaccaacccaacttt

SEQ ID NO: 400054 - DNA, 345 bp, Oryza sativa nipponbare
gtatgtaaatattacattatggtaaaccatgttgaggagctagactagcatgccttattaacacggagatacgcaccatatcatgaggattaacatataaatctgaagctacatgcaattaaggcagtggagcaaaggaggaaggatgatagaagactccaactctccagggatggaaatgacatcaggtcgccttgcataactctgcagccagatggatgcacgcctgctcggagaacaccgtgcggggctcgtcgtacgatcagtagtacctgtcgagtacctccgacgccgtacgagaaacagcatcacgagccgatgatgagagcttggcctctgggtaca

SEQ ID NO: 400055 - DNA, 383 bp, Oryza sativa nipponbare
gggaaacgaataaaatcattagtgcgggaacatcatctacttcttcatcttcttagtgtacacaacaccaactcgatcatcatctcgtcgcactaaacccatcttccccaacccaaagacaacgaactcgctggccacaaatccatccaaccacaattaaccactgctaagctacggtcccccacttcacttgccggggacgaagttggtggcgtacgcccaggcgttgttgttgacggggtcggcgaggtggtcggcgaggttctcgagggggcccttgccggtgacgatggcctggacgaagaagccgaacatggagaacatggcgaggcggccgttcttgatctccttcaccttgagctccgggaacgcctcggggtcat

SEQ ID NO: 400056 - DNA, 253 bp, Oryza sativa nipponbare
tagaccaacaaatagtcgcagatccggggactatgatagacctccttactaggcaaaccacacgaatacacgatagattaatcacactgagaatagcacgggtacatcacatcacacaaattcatacgttgatacacacatagtcgccgaaccgaccagctgctaaatcaatcgacaacacacggatgtaattcagcagtaatcaggacacacacagaccacactcatatgggtggtttttattgtggactaa

SEQ ID NO: 400057 - DNA, 427 bp, Oryza sativa nipponbare
agcagtaaagaatatgttacgtttacttaagatagggatgccatcctgtctccaggaataccgcagttatcacccacaagctttgaaaggctgaagtttttctgagtacattctcggtgattcataatttgaccccacaaacaacacccttcatcactcatttaacccactaatcatataggccttcctgctcccagccgtccacgaggaaatctaccatttcaccaagagggatcgcttgtggaaatggttttgtgcttcctagaaggctctcatatgtagcattccaacttatttttggctctcgaggttgttgacgctgagaattgtgccttctgtttccaacccactgttgcctagtctggttccacaagagaagtccttgatttacaaactcatttggggtggtgctactttcagcttcatg

SEQ ID NO: 400058 - DNA, 374 bp, Oryza sativa nipponbare
gttctcaagaatctgaggaggggaaatacacacaagagagaggttcggtatacaagacttagtttttcttaagtacaacagatcttccattcctacatgatcctatcagcttctacacccaaaccacacaaataaccatgcacgagccctcttacttcactgccaaatcaactcacctggggcttgagtagccaagcatccatgtggtgatcagtagccgatgtcagcgtcgtcgacgacgaggttgccggtgatgagctcacggtaggcggcgacgggccagatgaaccccctcgggaggagcttgacggctagctcgacgtagatgatgatctccgtcatggccggctttttctcgccgatgatggccatga

SEQ ID NO: 400059 - DNA, 394 bp, Oryza sativa nipponbare
tttaatctccaaattcaagtggcaagtgtagtatatcatcatcatgcaagtacagtgttacatagattaatcacaatgcagtttgattaagcagtgggcatcatcacatcgcattcagaggaaggctatcttagattacagatgaatatgcagacacccagcttggtgttacatacatagactggatttgggtgaaatttagccggcgagggcgctggtgttgtagacgaggagggcgccgccgccgaggagcccggcgagggtcacggcccagatcagaagcccggtggttccaccaacgtaggtgtcaccggtgggagaccattcctccggcgagtagattgggctgtagccgtcgacgtttgcgccgtacttgtcaacgaattggtacaca

SEQ ID NO: 400060 - DNA, 310 bp, Oryza sativa nipponbare
ttttcgtcatgtcatagtacagcatagttcatgcccaacaccatgctgataagtatcgggcccaaattgtcttacagttacatacgcccacagtaagatgtacttagcacacttagtacaaccgagatggcagggttctttgcatacatacaaaattacatcacttgcatagcattactgctacatagcaacatctcatccaagatcaggaacgatgaagaagtcctcgtcgtcatcgggtatgtccacccgcggcttcttgctttggcgtgcaccgctcgccttggagagccccatgttgctcgctggc

SEQ ID NO: 400061 - DNA, 221 bp, Oryza sativa nipponbare
gggggacagacagaaattaattaagctagaaatctcctcgatcgatcacacacacacacacaattaaggtacatacatacatgcactgctgcaactgcaactgcagggtcggtgcgtggctactacaagtgtacacatggtacgttggttggcaccatctcgatcgtgtcgttgtgctcacttgccggggacgaagttggtggcgtatgcccaagcgttgt

SEQ ID NO: 400062 - DNA, 373 bp, Oryza sativa nipponbare
aattagtcgagacgcaattcggaattattattaattcgatctacacgtgaagacactgttattgcccatcaaggaaaggaacaaaacaaagcttcgcggtaccaaacactagtactctaaacaacgggttttggtctctgcaatgtgcgatccaaagaatcgttccaaaaaattggtgcagacgacggcattttttactctgtcccagcaatcctcttcttcaaagaatcgacgtcgtcggccaattcctttctgctttccttgaaaaggaggtagcggtacacaaaccaagctgggtaccccagcccgacgagctccatgaacttgggaaggaaaagcacggaattgacggcgccgaccatgacggacgaca

SEQ ID NO: 400063 - DNA, 361 bp, Oryza sativa nipponbare
tttaccctttgtataaatatggatagccggagcttccatatatttcattcacatatgcctcacccaacaacatatagtcgtagcagataccactcttacatcaagtcagagagagatcaggtgaaacaaaaacaaaagcagagcacggccggtaaaatcaaaagacgatgaacaaactgggaacacacgaaacaaggtgggagacatcatcgaatcagagatgaacaattaaacaaggctatatatgacgatgacggcttagttgccaccagactcctcgcagcccgggggcttgtaggcgatgaagctgatgagctgcacctgcctgacgttgtcgaagccgatgatacggacgaatgca

SEQ ID NO: 400064 - DNA, 370 bp, Oryza sativa nipponbare
ttagaacaatgcaggttgcaaaacgttcacatagcacggcaagagattgcaactgaatttagagggtaaatcactgcagatttcctattccattcgaacgaacgaaccagtagttcatacatccctaattaatgaaggaacaggagacgagatgaaacaacagctacaggagaagaggctaggctactacgacgaactgaagaacatggcactaatcgaatccctatccaatcgcgtggcctcgcatcgcctcgcctagccgccgaatccgtagagggtgcggccctggcgcttgagcgcgtagacgacgtccatggcggtgacggtcttgcggcgggcgtgctccgtgtaggtgacggcgtcgcggatg

SEQ ID NO: 400065 - DNA, 173 bp, Oryza sativa nipponbare
ttgccacaatataaacaattgagactacatatttacactatacatagccagaaatggttatattgtgggatcgagggagtatttgtttccgatctaatagagatgagaaatccgctaatcataataacaccacggataagcacctacaccattagtcgggaaacgaataaaat

SEQ ID NO: 400066 - DNA, 393 bp, Oryza sativa nipponbare
taaaatagcagcaaggcattgatcatattatatatgtagctacaaactacatatagcaagctataagtatgtacagcaatgatggcaggtaatattgccatatcaattttcctgctatggtatgtacaccagagaacgagaacaatttagatgatttgggatggtggagcatctgaaataatgcacagttcttcagacttcacctacggttcaagcactactgcccccaatcgatcatcaaactacaggggcaagagaaaaagataacttgggtatattgcaggagctgagaatatttgctaagttttcttcacctatgatttaagcactaaaacccctatgggtggaacttcaagggttggagggaatgctggtgcaagcctgcgcagcaac

SEQ ID NO: 400067 - DNA, 302 bp, Oryza sativa nipponbare
aagcaataaaaatatgttacggttacttaagatagggatgccatcctgtcttcaggaataccgcagttatcacccacaagctttgaaaggctgaagtttttctgagtacattctcggggattcataagttgaccccacaaacaacacccttcatcactcatttaacccactaatcatataggccttcctgctcccagccgtccacgaggaaatctaccatttcaccaagagggatcgtttggggaaatggttttgagcttcctagaagggctctcatattgtagcaattccaacttattttt

SEQ ID NO: 400068 - DNA, 416 bp, Oryza sativa nipponbare
ccacgcgtccggaagaagaaagcgaaggtggactggacgcctgagcttcaccggaggttcgtgcaggttgtggagcagctcggcatcgacaaggccgtgccgtcgaggatacttgagatcatggggatcgactctctcacccggcacaacatagccagccatcttcagaagtaccggtcacacagaaaacacatgattgcgagagaggcggaggcagcgagttggacccaacggccgcagatttacgccggcggtggaggtgctgttgcgaagaggccggagtccaacgcgtggaccgtgccaaccattggcttcccttctactccgacaccaccaccatcaccggatccgattcaacattttgctcgcccgttgcatgtttggggccacccgacgatggacccgtaccgagttca

SEQ ID NO: 400069 - DNA, 185 bp, Oryza sativa nipponbare
tccgggtcgacccacgcgtccgcccacgcgtccgcatatggatttcggcctctagtcgcgtatcatgctattacgtgggtgtgtatatgaaagcttcatgttgcccagaaacctatgtatatcttttatgccatattcattgcatatcttaataatgggtacatattccgagtccttgacttggg

SEQ ID NO: 400070 - DNA, 429 bp, Oryza sativa nipponbare
ccacgcgtccgccacgcgtccgcccacgcgtccgaagatgaagaaggcgctcaggctgaggtcgttgtgtgtcgttcaagggtggaagccctaggagcggcggctgcggtggggcgaagtcggcgccgccgcggtggccggcgaccgtcggggagttgacgcgtgtgcagatgcggatttcggagcccgccgccacctcaagccgccgtccccgagcccgacacattgctcaaggacgagcggctcgtgcagcaccagccgacgcagtacccgacgtcgtagagctgagcgtcgccaagaacaagttcaaggccttcgacctcggcggccaccagatcgcccgcctctgttctaattctaccggtctttcttttttttccccctctcttggtgcagctttttgtgctacttgttgatggatttatgatt

SEQ ID NO: 400071 - DNA, 318 bp, Oryza sativa nipponbare
  unsure (1)..(318): unsure at all n locations
acttcgccgactccaagacgngtatcgctgtcgtgatgaggctggtgtacaccaacgatcagggagagatcgtcaaaggagtctgctccaacttcctctgtgacctgaagcctggttcggacgtgaagatcacggtgccagtggggaaggagatgctgatgcccaaggaccccaacgccaccatcatcatgctgggcaccggcaccggcattgcgcccttcaggtccttcctgtggaagatgtttttcgaggagcacgacgactacaagtntaactgcctggcgtggctctttcttggggtgcccaccaggagcacgc

SEQ ID NO: 400072 - DNA, 276 bp, Oryza sativa nipponbare
  unsure (1)..(276): unsure at all n locations
cgaccacgcgtccgcccacgcgtccgantcgctaattagcatatctatcagctctcacagctgactggactgcacttagcagccaggtccggttgccgatgtgcgtgcgggtggcgacggcgccggcgccggcgcgcgtgtcggtgctgccggcgagcaacaagctgggagacaggctgcggatgcaggcgacgtacaacgtgaagctgatcacaccggacggcgaggcggcgctgtacgttacgtacgaccggtacattctggacccgcgagcta

SEQ ID NO: 400073 - DNA, 469 bp, Oryza sativa nipponbare
ccacgcgtccgcaagaagttcgagaccctatcgtacctgccaccactcaccgtggaggatcttttgtagcagatcgagtacctgcttcgatccaagtgggtgccttgcctcgagttcagcaaggttggattcgtctaccgtgagaaccacaggtctcccgggtactacgatggcaggtattggaccatgtggaagctgcccatgttcggctgcaccgatgccacccaggtgctcaaggagctcgaggaggccaagaaggcctaccccgatgcctttgtccgtatcatcggcttcgacaacgtcaggcaggtgcagttgattagcttcatcgcctacaagcccccaggttgcgaggagtctggtggcaactaagctaagatcaagcatcgcgctggtggattgctgcctataataatagtatgcaagctttgtttggggctatggtgatgatatatcaatatataatatg

SEQ ID NO: 400074 - DNA, 132 bp, Oryza sativa nipponbare
ccacgcgtccgcggacgcgtggccggacgcgtgggcacggtcgaggaccttttgaagcagatcgagtttctgctccggtccaaatgggtgccttgcctcgagtttagtaaggtcgggtcgtctaccgtgaga

SEQ ID NO: 400075 - DNA, 523 bp, Oryza sativa nipponbare
  unsure (1)..(523): unsure at all n locations
ccacgcgtccgagggagcatatcgctcctccgctgctgtctcgcgcgagcgtccgccgcctcgtctcggtgatagaatcgccgcctcccaccctctgcgagcgccgccgccctccccaactgcggcgacgactattcccaagggtgcagtggaagtgtaaacagtttctgtggaaggacagaaaaggcattcatttgctaaatggcatcaaagcttcaaagcctttggaaccatcctgctggccctaaaactattcatttctgggcctccaacattaaatggggtatcagtattgccaatgttgcggactntgctaagcctnctgaaaagatatcctatcctcagcaagtcgctgtggcttgcactgggagtcattggtctcgctacagtatggttatcacaccgaaaaactggaatcttttcagcgttaatgttgcaatggctggtacaggcttgtatcagctttctcgaaaataaggaaaagatacttttctgatgagaaggatgctgctgcatcactgga

SEQ ID NO: 400076 - DNA, 127 bp, Oryza sativa nipponbare
ccacgcgtccgccacgcgtccgcccacgcgtccgagcataagcaacacaagggattaactcatcactcacttatctaattaaatcttcgaccatgtcggacaagggcggcaactgcgactgtgctga

SEQ ID NO: 400077 - DNA, 257 bp, Oryza sativa nipponbare
ccacgcgtccgcgtcgcggaatccggatgctcccggcggcgctgctcgccgtcggcgcatgagcttcctccgttcgctcgcggactccctgtcgtcgctgctgtactcggcggctgcgaaggggggagacatggacggggccgcggcggcgccgtcgccggcggcggtggtgggggagcgcgtggcggtgaagctcaggggatacttcgagctggccaaggaggagatcgacaaggccgtgcgcccccaggtagggg

SEQ ID NO: 400078 - DNA, 428 bp, Oryza sativa nipponbare
ccacgcgtccggaagtactcgagcaaagaaggagagagcttggtgagctgcagagatggccccctttgtgatggcgtcgtcggccaccaccgtcgctcccttccaggggctcaagtccaccgccggcatgcccgtcgcccgccgctccggcaactccagcttcggcaacgtcagcaatggcggcaggatcaggtgcatgcaggtgtggccgattgagggcatcaagaagttcgagaccctctcctacctgccaccgctcaccgtggaggacctcctgaagcagatcgagtacctgctccggtccaagtgggtgccctgcctcgagttcagcaaggtcggattcgtctaccgtgagaaccacagatcccccggatactacgatggcaggtactggaccatgtggaagctgcccatgttcggtgcactga

SEQ ID NO: 400079 - DNA, 392 bp, Oryza sativa nipponbare
ccacgcgtccgcctcgccgccggcgcgcgagcttcaccagccatggccgccaccgccgccgtctccgtagccgcgatttcgcctctccccggggcatccctcccgcgccccgtctccgcgagggttcctcttctccctagggcttcccctcccacatggcgcctcagcgtcggctcggcgcgcgcgcggtcgacgcggtgccttgcggcggcggggggtggcgggctggcgccggagatgagggcgacgctggacaaggtggtggggtcgcacaaggtggtgctgttcatgaaggggaccaaggacttcccgcagtgcggattctcccacacgggggtgcaaatactccggtcgctggacgtgccctttgagacgctcgacgtgctcgccaa

SEQ ID NO: 400080 - DNA, 443 bp, Oryza sativa nipponbare
  unsure (1)..(443): unsure at all n locations
ccacgcgcccgcggcactggctccgtcgtcaccgttgatcaggatcccaacactcgctaccttgtgtgttgttcggttcgccaaggtgaactacgccggcgtgtcgaccaacaactacgccctggacgagatccaggaggtcaaatgattttaattcggatggatcgtcgtcgagctggagctgcaaagaatcatcttaaattgatcacggagtgaggagaggatgcatgtcgtacatgtggaagaaattaattaagctgcttgatcgagctttgtgtgtattagtgtaatggtggtggtttcttctttataatccgtataatactatgtaatttgcctggctttgcttctttctcgtggacttgataatcccttggttataaccgntggattcttttttctacgggcaaattgtacatgcacataaatttccatcattctac

SEQ ID NO: 400081 - DNA, 234 bp, Oryza sativa nipponbare
gtcgacccacgcgtccgcggacgcgtgggctcgagatcgagtgcgaggggaaggagaagtacaagtgcggatccaacgttttctggaaatggtgatgatctgatgatgatcatcgatcgattggccagccatgaaaacattcctgtacctagaaccttgggatatgacacaactgatgcatattgacgctgtcggctcactggattgatcacgaggggattgagcgatttcttg

SEQ ID NO: 400082 - DNA, 405 bp, Oryza sativa nipponbare
ccacgcgtccgcccacgcgtgcgcccacgcgtccgaccaaattcttgcacacgcgcagctcgagccattgtcttagtgagcaccagcgtcgtcggcctcaagcccgccgcggcggtgccgtaggcgggcgtctctctcttgcctaagcgcgtgcacgtcgatggcgcctcagcgtcggctcggcgcgcgcgcggtcgacgcggtgccttgcggctgcggggggtggccggctggcgccggagatgagggcgacgctggacaaggtggtggggtcgcacaaggtggtgctgttcatgaaggggaccaaggacttcccgcagtgcggattctcccacacggtggtgcaaatactccggtcgctggacgtgcccttcgagacgctcgacgtgctcgccaacgaggcgc

SEQ ID NO: 400083 - DNA, 450 bp, Oryza sativa nipponbare
tcgtcccacgcgtccgcccacgcgtccgcccacgcgtccggagccgcctcctggcgcgccccaacgtgaagctgttcaacgccgtcgccgtcgaggacctcatcgtcaaggagggccgcgtcggcggcgtggtcaccaactgggcgctggtgtcgatgaaccacgacacgcagtcgtgcatggaccccaacgtgatggagtccagggtggtggtgagctcctgcggccacgacgggccgttcggcgccacgggcgtcaagcggctgcaggacatcggcatgatcgacgccgtgcccggcatgcgcgccctcgacatgaacaccgccgaggacgagatcgtccgcctcacccgcgaggtcgtccccggcatgatcgtcaccggcattggggtcgtcgagatcgacggctccccgagaatgggcccgacgttcggagccatgatgatctccg

SEQ ID NO: 400084 - DNA, 316 bp, Oryza sativa nipponbare
  unsure (1)..(316): unsure at all n locations
ccacgcgtgcgcacggnnggagagatgctgcactaccacagctccgaccccgaggagccgttttttttttcgatcaaggggcacatctatggcgtgtggcggagcagattgttctatggacctggtggaccatatgctttgtttgctggtaacgatgccagtagggcgttggcgaagatgtcctttgagccacaagatctgactgatgatatatctggcctaagtttacttgaactcattgcccttcaggactgggagtactaggtcagcacccagttcgtgcaggttggaaccataaataaggtgcttgtagaac

SEQ ID NO: 400085 - DNA, 455 bp, Oryza sativa nipponbare
acttaaggcacaaggagtgtatgcacaactggttccaacattgtctctttatggcatatcggtatattacgctgcatactcagttggaatgggacctgttccttgggttatcatgtctgagatattctccattgaaataaaagcaatagctggaagcttggtgacgctggttagctggattggttccttcgcaatttcctactcattcaatttcctcatggattggaactctgcaggtaccttctttctgttctctgcggcgagcttggtcacggtgttgttcgtggcaaggttagtgccagaaactaaagggaaggcactcgaagagatccaagaatcgttcacatgacagctcgaggaggatttgtatgtagaacgctcgttatcctctcaaattatttgtatcagggtgttcatattactatatatatactaaacttctggtttctggtggc

SEQ ID NO: 400086 - DNA, 295 bp, Oryza sativa nipponbare
  unsure (1)..(295): unsure at all n locations
ccacgcgtccggagaggagcggagcgccatcagccgtccgatcgagtgatccgatggctctcgctctctccacctctgctgctgctgccgctgccgccgcggcgcgggcgctcgcggcgagggtgacgacgacgaggggttacgccgcgtcggcggcgtcgtcggcgatgaggcgggcggcggccgcggtggaagggaagggcgctgcggggatgacgcangcgaaggacgggtcgtcgtcttcngcggcgagggaggtgtcgtgggtgcccgaccccgtgacgggccactaccg

SEQ ID NO: 400087 - DNA, 428 bp, Oryza sativa nipponbare
ccacgcgtgcgaaagaaccaacccaaccgccgccgcatcgccctcgttagaacgatggccgtgtcggttctgcaccagaccaccagcttcctcggcaccggccctcgccgggatgagctcgtccgccgcgtcggcgactccggtggccgcatcaccatgcgccgcaccgtcaagagcgcgccccagagcatctggtatggacctgaccgtcccaagtacctgggcccgttctcggagcagacgccatcgtacctgaccggagagttcccgggagactacgggtgggacacggcggggctatcggccgacccggagacgttcgcgaggaacagggagctggaggtgatccactcgcggtgggcgatgctgggggcgctgggctgcgtcttccccgagatcctgtccaagaacggggtgaagttcgggga

SEQ ID NO: 400088 - DNA, 500 bp, Oryza sativa nipponbare
ccacgcgtccggtttcctcaggtccttccaaatgcttctgcaaatgctggtggtggaaatcttgatgttctgcgaaacaattcacagttccgtggcttgctttctttggtgcaggctaaccctcaaattctgcagcctttgcttcaagagttggggaaacaaaatccacagattttgcaactgattcaggaaaaccaggctgagttcctgcgcttaatcaacgaacctgcagagggagctgaagggaacttgctagaccagtttgctgcgggaatgcctcaaacagtggctgtcacacctgaggagaacgaagccatacaacgtctggaacaaatggggtttgatcgcgatctggtcctggaggtattcttcgcgtgcaacaaggatgagctgtttgccgcatactatctcttggccacatgaacgagttcgacgacgacgcccctgaaccaccgcaataagatgactgacccgtttttaatgatacatgccagtcacac

SEQ ID NO: 400089 - DNA, 437 bp, Oryza sativa nipponbare
ccacgcgtccgggcacggtaatattgattttgagaaagaaccaattggcatctcgaaagatgggattgaggtttacttcagggacatctggccttccactgaagagattgctgaggttgttaaatcaagtgtgctacctgacatgtttaagagcacatacgaggcaataaccaaaggaaatcctatgtggaatgagctgtctgtatcagcaagcactctctacccatgggacccgacatctacttacatccatgagcctccttatttcaaggatatgacaatgtcccctcctggcccacggcctgtgaaggatgcttactgtctcctgaactttggtgacagtatcacaactgatcacatctcacctgccggaagtattcaccctgacagccctgctgctagatatttgaaggagcgtggtgttgaaaggaaggact

SEQ ID NO: 400090 - DNA, 156 bp, Oryza sativa nipponbare
ccacgcgtccgcaagagtactcgagcaaagaaggagagagcttggtgagctgcagagatggccccctccgtgttggcgtcgtcggccaccaccgtcgctcccttccaggggctcaagtccaccgccggcatgcccgtcgcccgccgctccggcaac

SEQ ID NO: 400091 - DNA, 442 bp, Oryza sativa nipponbare
cgcgtccgcccacgcgtgcgggaggacctcctgaagcagatcgagtacctgctccgttccaagttggtgctctgcctcgagttcagcaaggtcggattcgtctaccgtgagaaccacagatcccccggatactacgatggcaggtactggaccatgtggaagctgcccatgttcgggtgcactgacgccacccaggtgctcaaggagctcgaggaggccaagaaggcgtaccctgatgcattcgtccgtatcatcggcttcgacaacgtcaggcaggtgcagctcatcagcttcatcgcctacaagcccccgggctgcgaggagtctggtggcaactaagccgtcatcgtcatatatagccttgtttaattgttcatctctgattcgatgatgtctcccaccttgtttcgtgtgttcccaaggttgtcatcggcttttgatt

SEQ ID NO: 400092 - DNA, 576 bp, Oryza sativa nipponbare
ccacgcgtccgctcgccgccgcagccagcgtcgagggctcggcgaccggaggaggagaggccggaactcgccttcgccgccgccgcctccgcctgtagcgagatcgctcgatccggttcgcctcccgcgcgccagtccgccagcccagttcgatccgttgagggggaggggacgctctagtgtggggattgggggaatcgatggcggcgccgccggcgagggctcgggccgactacgattacctcatcaagctgctcctcatcggcgacagcggtgttgggaaaagttgtctcctcctacggttctctgatggttccttcaccaccagttttattaccaccatcgggattgatttcaaaataagaacaatcgaactggatggtaaacggattaaacttcaaatctgggatacagctggtcaagaacgtttccgaactattacaactgcctactacaggggagcaatgggtatttggcttgttatgatgtcaccgacgagtcatcatttaataatataagaaactggattaggaacatagagcatcatgcttccataatgtgaacaagattttggta

SEQ ID NO: 400093 - DNA, 71 bp, Oryza sativa nipponbare
ccacgcgtccgcccacgcgtccgcggacgcgtgggaaaaaaaaaaaaaaaaaaaaaaaaaatttatttttt

SEQ ID NO: 400094 - DNA, 495 bp, Oryza sativa nipponbare
  unsure (1)..(495): unsure at all n locations
ccacgcgtccgatcgtaagtctctgtctcgtcgtcctcgcatctccactcgccatgggcattattattatcggaatcaacggtttcggaaggatcgggaggctcgtggccagggtggccctccagagcgaggatgtcnagctcgtcgccgtcaacgaccccttcatcaccaccgactacatgacctacatgttcaagtacgataccgtgcacggccaatggaagcacagcgacatcaagatcaaggactccaagactctgctcttgggcgagaagccggtcaccgttttcggcatcaggaaccctgacgagattccgtgggctgaggctggtgctgagtatgtcgtggagtccaccggtgtcttcactgacaaggagaaggctgctgctcacttgaagggtggtgccaagaaggttgtcatctcttgcccgagcaaagatgcttcgatgtttgtctgcggtgtcaacgaggacaagtacacttcagatattgata

SEQ ID NO: 400095 - DNA, 385 bp, Oryza sativa nipponbare
ccacccgggccattcaagccctttgatgagcttgttgttgacagcaaggattttgatgttatctctttggagaagttcattgatgctagcagcgcccctaaagttgttacttatggcaggagccctgacaaccatccttaccttctgaaatttttccaaagctcagctgccaaggctatgctatttttgaacttctccactggaccgtttgagtctttcaagtcagtttattatggtgctgctgaggagttcaaggacaaggaaattaagttcctcattggtgacattgaggccagtcaaggtgccttccagtactttgggctgagggaggatcacggtccactcatcatcatccaggatgtgttagttcatgaaattttgtagg

SEQ ID NO: 400096 - DNA, 179 bp, Oryza sativa nipponbare
  unsure (1)..(179): unsure at all n locations
acagaggagagagatggccactgcttatgctcccatggcgagccagctgatgaagagcagcttggtgtgctccaagccgagggggctgtctggtgcttcgctgacaaggaggccccgcttcacagtcaaggccatccagtctgagaagccaacgtaccangtggtgcagcccatcaatg

SEQ ID NO: 400097 - DNA, 542 bp, Oryza sativa nipponbare
  unsure (1)..(542): unsure at all n locations
ccacgcgtccggtcagcaatggcggaaggatcagatgcatgcaggtgtggccgattgagggcattaatatagttctagactctgtcgtacttgccgccattgacagtggaggaccttttgaagcagatcgagtacctgctccgatctaagtgggtgccttgcttggagttcagcaaggtcggattcgtctaccgtgagaatcacagatcacccggatactatgacggtaggtactggaccatgtggaaactgcccatgtttggatgcaccgatgccacccaagtgctcaaggagctcgaggaggcaaagaaggcataccctgatgccttcgttcgcatcattggctttgacaacgttaggcaggtgcagttaatcagcttcatcgcgtataagccacccggttgcgaggagtcaggcgggaactaagcgctttcgttccttcgggcatgttctttctttntctttttttttggggtgtccggttaagctgcactaatgttttttgcgcttcgacctgcgtgttgcagagactactacaacta

SEQ ID NO: 400098 - DNA, 548 bp, Oryza sativa nipponbare
  unsure (1)..(548): unsure at all n locations
ccacgcgtccgaagtactcgagcaaagaaggagagagcttggtgagctgcagagatggccccctcctgatggtgtcgtcggccaccaccgtcgctcccttccaggggctcaagtccaccgccggcatgcccgtcgcccgccgctccggcaactccagcttcggcaacgtcagcaatggcggcaggatcaggtgcatgcaggtgtggccgattgagggcatcaagaagttcgagaccctctcctacctgccaccgctcaccgtggaggacctcctgaagcagatcgagtacctgctccgttccaagtgggtgccctgcctcgagttcagcaaggtcggattcgtctaccgtgagaaccacagatcccccggatactacgatggcaggtactggaccatgtggaagctgcccatgttcgggtgcactgacgccacccaggtgctcaaggagctcgaggaggccaagaaggcgtaccctgatgcattcgtccgtattatcggcttcgacaacgncaggcaggtgcagctcattaagcttatcgtctacaag

SEQ ID NO: 400099 - DNA, 498 bp, Oryza sativa nipponbare
ccacgcgtccgcgacgggccaatgtcgacgctcgtcctcgacgccgaccagtcgctggcggttcattattaacgcgctccgcctccacgccatcctggactacttcgacccgaagaagatccgtggcctccccgacgccgacacgatgaccgacacgctctaccaggccggtggggacgccgccggcaagatgggcaacgtcaagatctccaccctggacaccggcaagatcgccttcgcgtccgccaacccggggggaaagtacgaggccaccatggtcaaggccatcaagcagatgccgtacaagctctccatcatggagatctcggcgcccatcgagttcgacggcctgttcgacacgccgtcggcgaccaacctgacgaggctgctggagaaggccgggtgcaagcggttcgcgttgctcatcaccagcaccggcgtgctcaagacgttcgaggatgccatggacaaggggcttacccttgttgcgcccaacga

SEQ ID NO: 400100 - DNA, 454 bp, Oryza sativa nipponbare
ccacgcgtccggtggaaacaatgatgcacctgacatgcaccaatatgccagttgagaagattgatgtttccttaacaacaataaagtctaatgggattcaaaatgttctggctcttaggggtgatcctccacatggtcaggacaaatttgttcaagttgctggtggattcgcttgtgctcttgatttggtacaacacattagagccaagtatggtgattattttggtattactgttgctggttatccagaggcccacccggatgcaatacaaagtacggaaggggctacaccagaagcatacagcaatgatcttgcttatttgaagcaaaaggttgatgctggtgctgaccttatcattacacagcttttctatgacactgatatctttctcaagtttgtgaatgacttgccgcaaattggcataacttgccccattgttcctggcataatgcc

SEQ ID NO: 400101 - DNA, 279 bp, Oryza sativa nipponbare
cgacccacgcgtccgctagatcagcaacccatagaactcaaccgtaccgatagcgaggagaggatttatatgatagtttgaacttatacatcctacacacggtcttgcgttctcctcgcgcggtggcagtagcagcctctccttttcccatgtgtggctagaaattgaccaaaaagatgtcaatgctccagttgttggtgggcatgctggagtgactatattaccaatcctgttccatgtccactccacatgctcatttaccccagatgaaatcagcta

SEQ ID NO: 400102 - DNA, 439 bp, Oryza sativa nipponbare
ccacgcgtccgcccacgcgtccgcagtaaagaatcgtcaacaagggcgttctaaatatggggtcaaaaagcctattataataagtgattcgtttttagcccttataaaaagaaaacggattcttgaacctctttcacgctcatgtcacgtcgaggtactgcagaaaaaagaactgcaaaatccgatccaatttttcgtaatcgattagttaacatggtggttaaccgtattatgaaagacggaaaaaaatcattggcttatcaaattctctatcgagccgtgaaaaagattcaacaaaagacagaaacaaatccactattggttttacgtcaagcaatacgtagagtaactcccaatataggagtaaaaacaagacgtaataaaaaaggatcgacgcggaaagttccgattgaaataggatctaaacaaggaagagcac

SEQ ID NO: 400103 - DNA, 474 bp, Oryza sativa nipponbare
  unsure (1)..(474): unsure at all n locations
ccacgcgtccgatcaggtgcatgcaggtgtggccgattgagggcatcaagaagttcgagactttcttctacctgccaccgctcaccgtggaggacctcctgaagcagatcgagtacctgctccgttccaagtgggtgccctgcctcgagttcagcaaggtcggattcgtctaccgtgagaaccacagatcccccggatactacgatggcaggtactggaccatgtggaagctgcccatgttcgggtgcactgacgccacccaggtgctcaaggagctcgaggaggccaagaaggcgtaccctgatgcattcgtccgtatcatcggcttcgacaacgtcaggcaggtgcagctcatcagcttcatcgcctacaagcccccgggctgcgaggagtctggtggcaactaagccgtcatcgtcatatataagcctngttaattgttcatctctgattcgatgatgtctcccaccttgt

SEQ ID NO: 400104 - DNA, 429 bp, Oryza sativa nipponbare
ccacgcgtccgaaagcattcgcatccacgagaccactcgaacccgacccgcctcgccgccttcgctttctaagtaatcccttaatgggtcaaaatgtctcgggaggagaatgtctacatgggcaagctgtccgagcaggctgaaaggtatgaggagatggttgtgtacatggagaaggttgctaagactgttgatgtggaagagctcactgttgaggagcgcaaccttttgtctgttgcttacaagaatgtgattggtgcccgccgtgccttctggcgtattggctcattcattgaacagaaggaggagggtcgtggctattgggatcatggtacttttatcaaggagtaccgtggtatgattgaagctgttcttagcaagatttgcgatggtatcctggagttggttgggtgacacttttggccctta

SEQ ID NO: 400105 - DNA, 91 bp, Oryza sativa nipponbare
gggcaatcctccacccgactagcccgcgcaccgactacgaggcgtaatgtccgggcggaggccaagggagaggggcttcccggcctccctt

SEQ ID NO: 400106 - DNA, 444 bp, Oryza sativa nipponbare
  unsure (1)..(444): unsure at all n locations
gtccgccagaacctgttccagaaggacatcttcaccagcatcaactggatccccaaggcctttaccttgtcggcgctggaggaggtgttccgcatcgcgcgcgcccagacgctcatcgccctgtgcggcaccgtcccgggctactggttcaccgtcttcctcatcgacatcgtcggccgcttcgccatccagctgctagggtttttcatgatgaccgtgttcatgctcggcctcgccgtgccgtaccaccactggacgacgaaggggaaccacatcggcttcgtcgtcatgtacgccttcaccttcttcttcgccaacttcggccccaactccaccaccttcatcgtgccggcggagatcttcccggcgaggctgcgttccacctgccacggcatctcggcggcggcggggaaggccggcnccatcatcggatctgttcgggtt

SEQ ID NO: 400107 - DNA, 554 bp, Oryza sativa nipponbare
ccacgcgtccgaatggaccctaggacagagaacaatccttatcttggattcatctacacctccttttatagcgtgcgaccttcatctcacatgggaacactgctcgccatgccaaagactttggcgacctaaaacttgcacagatctgtggcatcatcgcctcagatgagaagcgtcatgagactgcatacaccaagattgttgagaagctgtttgagattgaccctgatggcactgtgcttgcttttgctgacatgatgaagaagaagatctcgatgcctgcccacctgatgttcgatggggaggatgataagctctttgagcacttctccatggttgcacagaggcttggtgtttacaccgccaaggactacgccgacatccttgagttcctcgttagcaggtggaagatatctgacctgactggcctatctagcgagggaaacaaggcgcaagactacctttgcacccttgctgctaggatcagaaggctggatgagagggcacaatcgagagccaagaaagctggtacattgcctttcagctgggtatat

SEQ ID NO: 400108 - DNA, 364 bp, Oryza sativa nipponbare
gattccggtcgaccacgcgtccgcgtagcaaggaagagagagcgttgaagatgctgctgaccaccccgttcgtgtcgttctctgtgagggtccagggcaatgggggcagcggcgcctcgccgtgggcgggcgcggcgacggcgctgaggatccaggcggcgaagcagctgacggggcgtgtggtgacgacgaaggcggacaagacggtgggggtggaggtggtgcggctggctcctcacccaaagtacaagcggcgggagcgcatcaagaagaagtaccaggcgcacgacccggacaaccaggtcaaggtcggcgacgtcgtctagctccgccgttcccgcctcatcttcaagaccaagcactt

SEQ ID NO: 400109 - DNA, 470 bp, Oryza sativa nipponbare
ccacgcgtccggtacccttgtgactacacccgcttcgcttcctcccctctctaagccggggaagctatgccatggcgtccgtcaccgcccgcaccccggacgcagccctccgctcggcggcgtcgctcaagtctaccttcctagggcaatcctccacccgcctcgcccgcgcaccgactacgaggcgtaatgttcgggcggaggccaagggagagtggctccccggcctcccttctcccacctacctcaacggcaggtgagcacacacataaaaaaaatatatttctactaccagtagagagcatcataaaaaaactactaacacgatagttaaacgggtgtgtacagcttgccaggcgataacgggttcgacccgttgggtctggcggaggacccggagaacctgcggtggttcgtgcaggcggagctggtgaacgggcggtgggcgatgctgggggtggccgggatgc

SEQ ID NO: 400110 - DNA, 300 bp, Oryza sativa nipponbare
ccacgcgtacgcccacgcgtctcgtgtgatgcatatataacatgctgctgccagataaaacaatggtgtcgcattagggttgaaaggcagtgataccagagggcagattgttccgaggttccaagaggtgagtcctgaacagcttgagaaggctggaatagtcagagagaaatcatttggaacaacaaaagatcgcatgctttacatagaacagcgcgccaactccagagctgtaactatctgcatacgtcgtgacaacaaaatgatgattgaggagaccaagcgaagacttcatgatgc

SEQ ID NO: 400111 - DNA, 162 bp, Oryza sativa nipponbare
cgcacaaccctagccatgtctctcagctctaacacctgactgcactaatggttcgcttcaccatgggcctctcctccccggtgagggcccgcgcggcaccgtagagctgctccgcgctcttaagcgagcgccgatcaccatgccaagaccgcggacccaacc

SEQ ID NO: 400112 - DNA, 405 bp, Oryza sativa nipponbare
ccggaattccggtcgaccacgcgtccggagagtggacaaccctagcgcggcggcgatgtcgaacacgagggtgttcttcgacatgactttcggcggagctcctgctgagcggatcgtgatggagctgtacgcgaaggacgtgccgcggactgcagaaaacttccgcgcgctctgcaccggcgagaagggcgtgggcaagagcggcaagccgctgcactacaaggggagcaccttccaccgcgtgatcccggagttcatgtgccagggcggcgacttcacccgcggcaacggcacgggaggggagtccatctacggcgagaagttcggcgacgaggtgttcaagttcaagcacgacagacccggcatcctgttcatggctaacgccgggcccaacactaacgggtc

SEQ ID NO: 400113 - DNA, 464 bp, Oryza sativa nipponbare
ccacgcgtccgagttgcttgacattttgctctcagaaggttgatgctactggttcattttttctgcttgttagcatatctgctcaagaggctggtgcaaaagacatgtccgagtctccttatagtgtttattcatataatgatgtgccaccttcgtcattgacacatattataaggttgagatctggcaatgtgctttttaactacaaatactacaataatactatgcaaaaaaccgaagtcactgaagatttttcttgcccattttgcttggtaccatgtggcagctttaagggtctaggatgtcacctaaacgcatcgcatgaccttttccattatgagttttggatatctgaagagtgccaggctgttaatgttagtctgaagactgattcttggagaacagagcttttggctgagggagttgatccaagacatcaaacattttcgtaccggtcaagatta

SEQ ID NO: 400114 - DNA, 505 bp, Oryza sativa nipponbare
ccacgcgtccgggcgggaggaagccgctggactacgaggagctgaacgagaacgtgaagaaggtgctttacgcggtgcggggggagctgtacctgcgcgcctccgagctccagaaggagggcaagaagatcatcttcaccaacgtcggcaacccacacgcgctcggccagaagccgctcaccttcccccgccaggttgtggcgctgtgccaggcccccttcctgctcgatgatcccaacgtcggccttatcttccccgccgacgccatcgcgcgggccaagcattacctcgccatggcacccggtggactaggtgcttacagtgattcccgaggtatccctggtattaggaaggaagtcgccgagttcatcgagaggcgtgatggttatccaagtgatccagaacttatttacctcacagatggtgccagcaaaggtgtgatgcaaatgctgaataccattatcagaaatgagagagatgggattctggtcctgttccacaatac

SEQ ID NO: 400115 - DNA, 487 bp, Oryza sativa nipponbare
ccacgcgtccgctccgaggaacaagatcctggtcctcgacgaggcgacggcgtccatcgactcgtctactcgtctccgtcctgcagagagtcatcaagcaggagttctcagggtgcactgtgatcaccatagctcacagggttcccactgtcactgacagtgacatggtcatggttctttcatacgggaaactcatagagtatgataggccatcaaggctgatggagaatgaggactctgccttctgtaagcttgtagctgagtactggtccaactatagctgaatctgccaagaaaaacggtcaggaacatcaaatgcagaagaccttcactgctttattcttcagtgaataagtggaactggaaactgggacattgcattgctggccaatgatcatccagatggacatatatgatgcactaatgatctggaaagtatgtatgaggggagcttattcaaaaccaggggttcatgcattgaaattgc

SEQ ID NO: 400116 - DNA, 233 bp, Oryza sativa nipponbare
ccacgcgtccggagcaaagaaggagagagcttggtgagctgcaaagatggccccctccgtgatggctgttttcggccaccaccgtcgctcccttcgaggggctcaagtccaccgtcgggatgcccgtcgtccgcccctccagcaactacaggttcgggaacatcagcaatggcgggaggatcaggtgcatgcaggtgggccgattgagggcattaagaagttgagaccctttc

SEQ ID NO: 400117 - DNA, 406 bp, Oryza sativa nipponbare
ccacgcgtccgcccacgcgtccggctgtacatctgcaaggcgcaggccggcgacaagaggtggttcaagggcgccaggaagttcgtcgagagcgcagccagctccttcagcgtcgcatgatcgtcgaaatctctatctcagcttctctttaatccctagcgaatcaaaatcaaatcaatcgagttcgttgctcagagagatgcagtgcacgcatgtgtgtgtgcgtgtgtgtttctttgattgtacatgagaattaagaacaagttaaggagagaggtcgatccatcgatttcccctgcatgcaaggattgattttctgtgatccgtgtgttaagtaatcctagtaattaatcatgtttcatttttggatctatggtaatttaatccatgcttgacatgacactca

SEQ ID NO: 400118 - DNA, 280 bp, Oryza sativa nipponbare
ccacgcgtccggcaaagaaaaggcctgtgtcaaggagagggtagtagcaccttgctctcctttgccttcagagaaaccggaagcaatggcgtctgctactctcctcaagtcatctttccttcccaagaagtctgaatggggtgccacccgccaggctgccgcccccaagccggtgactgtctccatggttgtccgcgctggtgcctacgacgatgagcttgtcaagaccgcgaaaaccattgcatcaccaggaaggggtatccttgccatggatgagtcg

SEQ ID NO: 400119 - DNA, 388 bp, Oryza sativa nipponbare
ccacgcgtccgcccacgcgttcggcgtcaagttcggcgaggcggtgtggttcaaggcggggtcgcagatctttttctagggcgggctcgactacctcgggagcccgagcctgatccacgcgcagaggatggtcgccatctgggcggtccaggtggcgctcatgggcgccgtcgaggggtaccgcatcgtcggcgggccgctcggcgaggtctacgacccgctctaccccggcggcagcttcgacccgctcggcctcgccgactacccggaggcctttggggagctcaaggtgaaggagatcaagaacgggcgcctcaccatgttcttcatgttcgggttcttcgtccaggccattggcaccggcaagggcctttttgagaaccttggc

SEQ ID NO: 400120 - DNA, 382 bp, Oryza sativa nipponbare
  unsure (1)..(382): unsure at all n locations
ccacgcgtccggaagaagaagaagaaagaagaagaagaagatgcagaccgctgctagcagtgtcgtttgtattgtttgccgtgttgcccgctgctgtgaaggggcgcagcctgcanattcaggctcctcgccgtgttgcgttgcgcgttcgtgcggcggcggcggcggtggcagtggaggctgcggaggtggactacagctctaacatctcggtgtttccgatggaggcgtgcgacctcatcggcggcgaggcgtgcaacgtgcagatgtacccagaggccaagctctcatcatcggctgctgttgctgtttctcgtgcggcggcggaggaagtctacagggactacctatcctacgacgagcccaccacggggtttcccga

SEQ ID NO: 400121 - DNA, 572 bp, Oryza sativa nipponbare
ccacgcgtccgcccacgcgtccgtggctctcgaaaagcttgtaaatgagaagttgcacaacctgcactgtgtgtcatcaaggtgcaatgatccacagctgaccgacttcgttgagagtgaattccttgaggagcaggttgaagccatcaagaagatctctgagtatgtcgcccagctgagaagagtgggaaaggggcatggggtgtggcactttgatcagaagctgcttgaggaagaagcttgaatggaggagacggtgtgaagggcagtagtaggtttcgtttcttccatccatgggatcatgcagctaaagaaagaaaataagtcgagtctgtgtattcatcaaattaagcacgcagtagcaatggagtgaatgaaccaaccaatttggtcatgaacttccccctgtgtctaggtcagtagagcttcagaatcatgtgtatgtcgcgcgtcctcgcagaaaaggaacatggcgcggctggctgtagcgatacttgtgatattgtggctatgcatggagtcatggtgatggtgtattttgggagcattacacgtttgtgctagagagattt

SEQ ID NO: 400122 - DNA, 197 bp, Oryza sativa nipponbare
ccgactacaccccgctccactctcaggcaggcaatcagcggcgaggcaccagcccaccgtccggcattggcgtccacctcctgcttcctccaccagtccacggcccgcgtcgccgcgcgcgtcgcctccccgtccccggcgacacggacccacctcctcgtctgccgcgcccagaagcaggacgacgccgacgtctc

SEQ ID NO: 400123 - DNA, 427 bp, Oryza sativa nipponbare
ccacgcgtgcgctctgctctagcacctcaccaagcagaaagctagagagctagcaatggcgctcactcttatggcctcgtcggccacctacgttgctcccttccaggggctcaaatgcaccgccgggctccccgtcagccgtcgattcaacagcgccggcctcggcagcgtcagcaacggtggaaggatcagctgtatgcaggcgcggccgattgaagggcataagaatgttgggaccctcgtgaacctggcaaccattacgggcggagacctcttgaaacagatcgagtacctgctccgggacaaatgggttccttgcctcgagtttagtaagggtaggttcgtataccgtgagaaccacaggtctactgggttctatgatgggcgggacttgaccctgttgtagctgcctatggtcggatgcact

SEQ ID NO: 400124 - DNA, 321 bp, Oryza sativa nipponbare
ttcccgtttcgacccacgcgtccgcggacgcgtgcgaaccaacccaaccgccgtcgcatccgcctcggtagaacgatggtcgtttttttgctgcaccagaccatcagcttgcgcggcagggtccctcgcagggaggagcgcggccgtcgcgtctgccactccggaggccacatcaccatgcgccttaccgtaaagagcgcggcccaagagcattttgtatggacctgaccgtcccaagtacctggccccgttcttggagcagacgccatcgcacctgacatgagagctcacgggagactacaggtgggacacggtggggct

SEQ ID NO: 400125 - DNA, 350 bp, Oryza sativa nipponbare
aaaggactcacgacaaaaggagctaaacattattggtatggtagtatgttcagtggtgtgcattattagcattgctcaagctgcaggtagcttcagggaagtgaaggggaggaaaaagagtagctgctccagcacaaaactactagcattacataagcacagaaaaaggtatgatccttttcagacatcttcccacgccgaaggtgaatggggtgaagatcttaggcggacttcacggtggcggagttgatgatgtcgatagaattcaggcttaaatgaagcaccaccgacaggaaaaccatcaacattaggctttgttgcaagttctttgaagttgggaccatttacgg

SEQ ID NO: 400126 - DNA, 431 bp, Oryza sativa nipponbare
agttgggaaacgaataaaatcattattgcaaaaacatcatcttcttcttcatcttcttagtgtacacaacaccaactcgatcatcatctcgtcgcactaaacccatcttccccaacccaaagacaacgaactcgctggccacaaatccatccaaccacaattaaccactgctaagctacggtcccccacttcacttgccggggacgaagttggtggcgtacgcccaggcgttgttgttgacggggtcggcgaggtggtcggcgaggttctcgagggggcccttgccggtgacgatggcctggacgaagaagccgaacatggagaacatggcgaggcggccgttcttgatctccttcaccttgagctccgcgaacgcctcggggtcatcggcgaggccgagcgggtcgaaggcgcccccggggtagagcggg

SEQ ID NO: 400127 - DNA, 465 bp, Oryza sativa nipponbare
agatcctataataacgatacaggatgagattcgatcatcccttggatgcggcctgcggcttacattaaatctcgatccaaagaagcaaagatgatgacagacagaaattaattaagctagaaatctcctcgatcgatcacacacacacacacaattaaggtacatacatacatgcactgctgcaactgcaactgcagggtcggtgcgtggctactacaagtgtacacatggtacgttggttggcaccatctcgatcgtgtcgttgtgctcacttgccggggacgaagttggtggcgtatgcccaggcgttgttggcgacggggtcggcgacgtggtcgaagaggttctcgatggggcccttgccggtgacgatggcctggacgaagaagccgaacatggagaacatggcgaggcggccgttcttgagctccttcaccttgagctcggcgaaggtgtcagggtcgt

SEQ ID NO: 400128 - DNA, 473 bp, Oryza sativa nipponbare
tgaatgaaagcactgattattgatttgcatgattcgagtaagatgcccgattcttcattaacccaggtgcatgtctaatccccaatactccccatgcctaaaccctagtttgttccaatcaaacaagagctgcttctgacccaaatcaccccatccgtcccccatgcctaaacctagtttgttccaatcaaacaagagctgcttctgacccaaatcatcccatccgtcccccatgcctaaaccctagtttgttccaatcaaacaagagctgcttccgacccaaatcaccccatccgtccctcaaggaataaaatcataaatccatcaacaagtagcacaaaagctgcagcaggagagggggaaaaaaagaaagagcggtagaattagaacagaggcgggcgatctggtggccgccgaggtcgaaggccttgaacttgttcttggcgacgctcagctctacgacgtcgggtact

SEQ ID NO: 400129 - DNA, 397 bp, Oryza sativa nipponbare
  unsure (1)..(397): unsure at all n locations
acagcaaaaaatgggaaaccattttatagtcgacgaatcggcagtataatatttacatgcatttcatcagatgggatcagatcgggtccaacaagatggcgtttgcaggttgcgcatgcatgcatgaaaatcgagataaaagggggttaattaattattaacatatttttttccatcagtggacttccacattccattggtccgactttttaaggtgttttttgtagtcaagccagtcgatgccgttttttgcagggggggcgatcatgatgtcgncgatgcctttctccatgcccttgaggccgcacatgtagacgtaggtgttgtcctttttgagcaggtcccacaggtgggccttgtactccgccatccgggtttggatgtacattttttcccc

SEQ ID NO: 400130 - DNA, 400 bp, Oryza sativa nipponbare
aggatatatagcttatgaatgaactgttctttcaaatacatggagtacgtatttgacagtagtatatatgacacagtaatgcatgcatatatgacaccaaaatgtgatatggatatgattaagcaggtgcagcaaaacgtacattaattaaacaacaacaattaaccctcgggcacgcctgtgttttgttatctcgctcaacatatacgtacgtaatactttgcttgcatagcatagggacgacgacattatattcttaattgataaactcaagaacgcatggagatggatcgagagatttataaatatggagcttgcttgattgattagatgaggtcgtcctccttgtgggtctcgatgacgacgtcggacttggggtaggcgtggcaggtgaggaccc

SEQ ID NO: 400131 - DNA, 456 bp, Oryza sativa nipponbare
  unsure (1)..(456): unsure at all n locations
agccggagcttccatatatttcattcacatatgcctcacccaacaacatatagtcgtagcagataccactcttacatcaagtcagagagagatcaggtgaaacaaaaacaaaagcagagcacggccggtaaaatcaaaagacgatgaacaaactgggaacacacgaaacaaggtgggagacatcatcgaatcagagatgaacaattaaacaaggctatatatgacgatgacggcttagttgccaccagactcctcgcagcccgggggcttgtaggcgatgaagctgatgagctgcacctgcctgacgttgtcgaagccgatgatacggacgaatgcatcagggtacgcctttttggcctcctcgagctccttgagcacctgngtggcgtcagtgcacccgaacatgggcagctttcacatggtccagtacctgccatcgtagtatccgggggatct

SEQ ID NO: 400132 - DNA, 523 bp, Oryza sativa nipponbare
  unsure (1)..(523): unsure at all n locations
gtgtatatagccggagctttggtttcacatatcctcacccaacgataattgtagtactcttacaataaaaccggccggagagggagggaagagattattacatatgtgttaagagcagaggccattgagatggtacataaccaaactgtaaaataaaaatatatagcatattatatattgatatatcatcaacatagcccaaaacaaagctgcatactattattataggcagcaatccaccagcgcgatgcttgatcttagcttagttgccaccagactcctcgcaacctgggggcttgtaggcgatgaagctaatcaactgcacctgcctgacgttgtcgaagccgatgatacggacaaaggcatcggggtaggccttcttggcctcctcgagctccttgagcacctgggtggcatcggtgcagccgaacatgggcagcttncacatggtccaatacctgccatcgtagtacccgggagacctgtggttctcacggtagacgaatccaaccttgctgaactc

SEQ ID NO: 400133 - DNA, 470 bp, Oryza sativa nipponbare
caagtaatgcgcagtgctttaatttggcgaagcttcgttttattcaaatttcaaagaacacataatgtacaacacacaattgcacgaataactacgtacaaacccgcatatcacaaacttccagcctatcttctcattcttcccctccctaagttgctggtgcacgttgtaacaacatgttcttacttctcctcaaactccacatcaataacatcaggccctgagcttcttgaactgctggctcgtccagaggacctattgtttggctgccacactatgttttggcaattcatgcaccgaatcacttggttgcggtaacccacaaacctccgtttgcacgctgggcatgtcccctcaatggcgacccgattaccaaatgtcccaaggagaagtggcgcagcaaaaggcaggacaaatgtaccaaaaatgaaaactctgaatagccatcctgacagtgcaaaaccaaatga

SEQ ID NO: 400134 - DNA, 449 bp, Oryza sativa nipponbare
ttacacgaatacacgattgattaatttcactgagaatagcacgggtacatcacatcacacaaattcatacgttgatacacgcatagtcgccgaagcgaccagctgcttaattaatcgataacacacgggtttaattcagcaataatcagcacacacacaaaccacactcatatgggtggtttttattgtggactaattaaggtaggtgactcgccggcggcgagtgttcggttgcttcgtgacttcacttgccgcacttgcagtcggtgcaggagcagctggtgccgcacttgcagccgccgttctcctcgccggcggcgacctcctcgaagtggctcttctcggcttcaactatgacgacgccatagctggtacctttcttcacgcactggctcttgtcagcacagtcgcagttgccgcacttgtccgacatggtcgaaggattaata

SEQ ID NO: 400135 - DNA, 498 bp, Oryza sativa nipponbare
ttaacggaacagtggtatatgtaaatttttagcagtgtttgtttacatgactgttttggtacgggttgaagctatgggcgtttatttacaccgtgagttcatctttagcttcccctctcaaatggctcatgaaatatagggttttcttgtacatgtacatgttacagatggcaagggatatcaatgcctgaatgggcgcgcgaccacttgcaaaccaatagttatgttgaggagatggtaatactggccaaattaaaactgctgatgcatagggcgcaccattgtctagtgtcaacttgaaccaaattcttcgttccatttctctagctcgtcccacttgctcttctgcaggcttggcctaatcacagtcatggctttcttgaaatcttcgtatttcaggggccgcaactgatttgcttttatagtgagaatattttgtggaccaagctctctgattggcatcatggcagcttcctcacacaatgctctcagatcact

SEQ ID NO: 400136 - DNA, 481 bp, Oryza sativa nipponbare
taaaaaggtaaactcttcatagtaatattattaagacattatagctgatgtcttttgatcacactgcgatcaaattatgcatcataggcagtacaactccgcgtcaggaaaaagtagaggagatatatttcttgttattacttaatacagcattcacatatatcgaaccatccggtacgtacgtagtagtactccacgcgttcacatcgatgatcggggacgatatcctcaggtagtacttatgcaaaagcgttggcgtaaactgacgaactgaacggacggacggtcggatttagggctcccataagtccaagttgccggagacgaagtcgtagtggccgccgacgagcttgagggtgccgttggcgatcccctccttgacgaacgggtaggtcttgaggttctccagggattggttcacggcctccttctccaagatggcgcattggtcatcgaaaggcagcgaggcgtgctcggtctg

SEQ ID NO: 400137 - DNA, 502 bp, Oryza sativa nipponbare
  unsure (1)..(502): unsure at all n locations
ggagcggaaactgaaaacatatttcattattgttgaattaaaataggtacatgagcagctcatcagcaataatagtattttgtctgctttgagccaggggataagatggaaataatggagggaccagtctcaaaacgttagcaacctcctcttcactggcatggctgccgacagatgcagtcctgctgctctctgatttacagaaatcttctcgaaaatggtatgaaattagctgctgctcccggtgatttcattgtaggtgctcttgattttgctcaccagagcttccctgtctggctggaagatgaggttccggtatgtaaaccaccctgtatacccgattccaacgagctcaagcacgccgggcaaaagtggaagcctgtcgatggccttgatggcgcctatggcagtccagaggccgacgagcgcggcgacgccgatggcggtgacggcgtacttgtcctcaactttgcccacgcgtnctgggctgccttgacgacct

SEQ ID NO: 400138 - DNA, 445 bp, Oryza sativa nipponbare
tcacatccatctcgtacccttggtataaatatatatagccggagcttccatatatttcattcacatatgcctcacccaacaacatatagtcgtagcagataccactcttacatcaagtcagagagagatcaggtgaaacaaaaacaaaagcagagcacggccggtaaaatcaaaagacgatgaacaaactgggaacacacgaaacaaggtgggagacatcatcgaatcagagatgaacaattaaacaaggctatatatgacgatgacggcctagttgccaccagactcctcgcagcccgggggcttgtaggcgatgaagctgatgagctgcacctgcctgacgttgtcgaagccgatgatacggacgaatgcatcagggtacgccttcttgcctcctcgagctccttgagcacctgggtggcgtcagtgcacccgaacatgggca

SEQ ID NO: 400139 - DNA, 395 bp, Oryza sativa nipponbare
  unsure (1)..(395): unsure at all n locations
gcgctgcctgagcgcctggccgccctcggactgcatcagccacctgaccttcgcctccacctcctccgccaccaccacctcctcgtcgtagcccctcatctccacgccaagcttcatctcctccacgacgaacaccttgttcagcctctgctccgcgtacagcggccagcacagcagcggcagccccgccgtgatcccctcaagcgtcgagttccacccgcaatgcgtcacgaacgcgccggtcgccctgtggcggagcacctccacctgcggcgcccataagctcaccacgagccctctccccctggtcgcctncatgaacccggcccgcaggagcgcgtcgaggtctgctncgcagcggctcgacacgttctttcgcgatgccggctcgacga

SEQ ID NO: 400140 - DNA, 385 bp, Oryza sativa nipponbare
aactaagaccagtttgatttcgtgtttgatacaaaaattaagatggacggattcacaagagagcaccctctacttaagctttacattacaaggccaaccagcagctgcctgccggccgaccactgcgtgcgcacgcgcgcgcaataatcaaccaatcacacacagtacgcacgcacataaaaaccacccatagccttcacgtacgcccggacgcacgcaccggttcgtgccaagctcaagggtagatggttctcgggatgatgatgtcgccgatgttgttgtgccacgggtccgagaggtggctggccaggttctccagtgggccggtgcccgggtacgccgactgttggacgcagaaacccacaaaagccagcatggccaccca

SEQ ID NO: 400141 - DNA, 423 bp, Oryza sativa nipponbare
gcgaagaaattgttttgaatttcgaagaaacaactgatagtaggtttgatacagtttttgcactacgctgttactgcacatgggagcagaacatattctcgtagagatatacaaacatcacacagaggaagcagcagcaagcactctagagagtcaccccccaaaacttccccggacaaatgcagctgcttaattactccgttccagcgatcttcttcttcaaggtctcgatgtcggtcgccaactctttcctgctctccttgaagaggaggtagcggtagacgaaccagccggtgtagccgaggccgacgagctccaggatcttggggagcagcggcacggagttgatggcgccgacgacgacggtggtgagccagaaggcgacgacggcgccgccgctgtagaggaagaacgtcggcttgt

SEQ ID NO: 400142 - DNA, 248 bp, Oryza sativa nipponbare
cgagagaaaattcggtacaaatctccactcagatgatacaaatacacagtgagcacgacaagcgttcaattatgcatgcagttgtgtcatatcacaaaggttctaggtacaggaatgttttcatggctggccaatcgatcgatgatcatcatcagatcatcaccatttccagaagacgttggatccgcacttgtacttctccttcccctcgcactcgatctcgagcccacgcgtccgcggacgcgtgg

SEQ ID NO: 400143 - DNA, 463 bp, Oryza sativa nipponbare
gaaccaatataagatgcatgattagaaatcaaagtgagatcgacgaatcgagagaaaattcgctacaaatctccactcagatgatacaaatacacagtgagcacgacaagcgttcaattatgcatgcagttgtgtcatatcacaaaggttctaggtacaggaatgttttcatggctggccaatcgatcgatgatcatcatcagatcatcaccatttccagaagacgttggatccgcacttgtacttctccttcccctcgcactcgatctcgagatcatctgagatgaatgggactttcttctgcttggcgaggtcctggcagccggtgaagttgtaggggaactggcagctgccgaactcgacggtgtacgccctcgcgaagttggcgccgctcgtcgccagcctcttcttgtcgttcagctccttgttggccttgctcttctcgaggtactcgtcgaacacg

SEQ ID NO: 400144 - DNA, 422 bp, Oryza sativa nipponbare
  unsure (1)..(422): unsure at all n locations
cctcatccttttgattcattcctcccagagagacggatccatggaagttttcttgccctcatcaggcaagcagagcacacacacacggtggcagtggaagtgctatgaacaagacgctaatcaacatccagagctaaaacaaacaaggggatcaatgcaaatcccgaaaaaaaacacaggggaaagtccacatcttcttctcgtccccaactcctccgtgtcaccaccacgtcttgcggatttttttttaccctgttctattcgctcaggcgtccacgatctcgccgtcgtccttcgacgccaggatcagcttcgggtgcgccgccgncgncgncgnctttttgatcgtgccgtcgatggcgttcggccggccgagcgccttcagcgccaggtgcgccgccttctggccggagatcatcatg

SEQ ID NO: 400145 - DNA, 479 bp, Oryza sativa nipponbare
gccaacaggggacagaagttagtatatatatagtaatatgaacacactgatacaaataatttgagaggataacgagcgttctacatacaaatcctcctcgagctgtcatgtgaacgattcttggatctcttcgagtgccttccctttagtttctggcactaaccttgccacgaacaacaccgtgaccaagctcgccgcagagaacagaaagaaggtacctgcagagttccaatccatgaggaaattgaatgagtaggaaattgcgaaggaaccaatccagctaaccagcgtcaccaagcttccagctattgcttttatttcaatggagaatatctcagacatgataacccaaggaacaggtcccattccaactgagtatgcagcgtaatataccgatatgccataaagagccaatgttggaaccagttgtgcatacactccttgtgccttgaagtagaacgataatcccggacgcgtgg

SEQ ID NO: 400146 - DNA, 382 bp, Oryza sativa nipponbare
tgaaaggaaattaaacggatttattacttgttccattaaaaccatcacactcgggtacgtggtgaaaccgtgaaagttaaaaaacaaaaacagtagtagtagagtgaggccctgctcgctgttacatgagaggtgcacgaagaaccagcacacgagcagagcatccagcccacacgcagcaaggaaacggtagggatgccgccgccgccgccggccgatccgccgcccggcgatgatgcgtcgtcgtcgtcgttcaggtgcacgcggaggcggagcggcgtgcggcgcggcgcggtcgagaggtgatgagtagttgacgcggagcagatatatatggatggatggcgtcgtcgtcggtcggacgacggcgaggtcgcgcgca

SEQ ID NO: 400147 - DNA, 410 bp, Oryza sativa nipponbare
ggcaggcaaattacatagtattatacggattataaagaagaaaccaccaccattacactaatacacacaaagctcgatcaagcagcttaattaatttcttccacatgtacgacatgcatcctctcctcactccgtgatcaatttaagatgattctttgcagctccagctcgacgacgatccatccgaattaaaatcatttgacctcctggatctcgtccagggcgtagttgttggtcgacacgccggcgtagttcaccttggcgaaccgaaccaccaccgggtagcgagtgttgggatcctgatcaacggtgacgacggagccagtgccgttgtaccagtaggactccctcctcaggatcttcaccttggtgcctctcttggggccaatgggaggcggcttggcggcggc

SEQ ID NO: 400148 - DNA, 530 bp, Oryza sativa nipponbare
  unsure (1)..(530): unsure at all n locations
ttaagctagaaatctcctcgatcgatcacacacacacacacaattaaggtacatacatacatgcactgctgcaactgcaactgcagggtcggtgcgtggctactacaagtgtacacatggtacgttggttggcaccatctcgatcgtgtcgttgtgctcacttgccggggacgaagttggtggcgtatgcccaggcgttgttggcgacggggtcggcgacgtggtcgaagaggttctcgatggggcccttgccggtgacgatggcctggacgaagaagccgaacatggagaacatggcgaggcggccgttcttgagctccttcaccttgagctcggcgaaggtgtcagggtcgtcggcgaggccgagcgggtcgaaggcgccgcctgggtacaccttgtcgaggccctcgccgagcgggccgncgccgacgcggtagccctcgacgaatcccatgagcaccacctggaccgnccagatggcgaggatgctctgcgcgtgcaccaggttggggttccccaggtagtcgagc

SEQ ID NO: 400149 - DNA, 457 bp, Oryza sativa nipponbare
tttgaaacatttggttatatgtagtctgtaaatgtcatctagagtatgtactaatcatcataaaaatcccaaagcagaaaaaagaatgatgatgagagaagctcaaaaacatttttctcacgcctggatggatgggtggatttggatgttctaaaacggggataatcaccagtcttggtgaccactgtttgcaacccaatgtctcttgtgtgactggcatgtatcattaaaaacgggtcagtcatcttattgcggtggttcaggggcgtcgtcgtcgaactcgttcatgtggtccaagagatagtttgcggccaacagctcatccttgttgcacgcgaagaatacctccaggaccagatcgcgatcaaaccccatttgttccagacgttgtatggcttcgttctcctcaggtgtgacagccactgtttgaggcattcccgcagcaaactggtctagc

SEQ ID NO: 400150 - DNA, 453 bp, Oryza sativa nipponbare
ctagcaaaaggatcattgattgtatacttatcacgagaagttcactgaaattacattcttaggagaagcagcgtatacacacggataaaacacggagaaaatctttacgagagatggttggtgtttgggaggcaagaacggccggcggcggggcggccattacgcggatgggagcaccttcttgacgatctcgtcgctgagggaggcgatctgggcgtcgagcgccttgacggcctcctccttctgcgcctcgaggttggcgagcgcctccacgagctcggcctcgacgcggcggcgcccctcgtccagcttcgcctccagctcctgggtggtctccttcttcatcttgttgagcgccgcggcgatctcggcgcgtgccgccttcagcacggcggcggcctgctcctccagctgccgcacctcctcggacgcgtccttgacgccgccgagctc

SEQ ID NO: 400151 - DNA, 309 bp, Oryza sativa nipponbare
tgttcaagggaagagaggattaggagcaggattaattaaggcataagtacaccacattccacgtcactaccactccactccactccaccaccctcaaaacacaccacgtacacacatgtacggatgcaatcttcaagctcaagctctcagtctgaccgcatgcggtttagctggttcaacgccggctgcaggatgttgtagagaacccaggcgatcgccggcgccaccacgaacagcagcagcaggccgcggttgtcgccgccctccgccgacgccgacttcgccgccagcctcttcaccttctgcgcc

SEQ ID NO: 400152 - DNA, 491 bp, Oryza sativa nipponbare
cacatccatctgggacggtttgtataaatatatatagccggagcttccatatatttcattcacatatgcctcacccaacaacatatagtcgtagcagataccactcttacatcaagtcagagagagatcaggtgaaacaaaaacaaaagcagagcacggccggtaaaatcaaaagacgatgaacaaactgggaacacacgaaacagggtgggagacatcatcgaatcagagatgaacaattaaacaaggctatatatgacgatgacggcttagttgccaccagactcctcgcagcccgggggcttgtaggcgatgaagctgatgagctgcacctgcctgacgttgtcgaagccgatgatacggacgaatgcatcagggtacgccttcttggcctcctcgagctccttgagcacctgggtggcgtcagtgcacccgaacatgggcagcttccacatggtccagtacctgccatcgaagtatcccggggatct

SEQ ID NO: 400153 - DNA, 422 bp, Oryza sativa nipponbare
ggaaagatatatagccggagcttccatatatttcattcacatatgcctcacccaacaacatatagtcgtagcagataccactcttacatcaagtcagagagagatcaggtgaaacaaaaacaaaagcagagcacggccggtaaaatcaaaagacgatgaacaaactgggaacacacgaaacaaggggggagacatcatcgaatcagagatgaacaattaaacaaggctatatatgacgatgacggcttagttgccaccagactcctcgcagcccgggggcttgtaggcgatgaagctgatgagctgcacctgcctgacgttgtcgaagccgatgatacggacgaatgcatcagggtacgccttcttggcctcctcgagctccttgagcacctgggtggcgtcagtgcacccgaacatgggca

SEQ ID NO: 400154 - DNA, 510 bp, Oryza sativa nipponbare
accagcaattgcaattttaacgtaaaggaggcacgaggataggtcacaagaaaggcaaaggataaaagttacaagcgttgtatgatactatgatcactattttatcttccatccgacaacataacactcacgatccacagcatgcagatttctgcaaagttgtggcctcagcatcaccctctggtttgttgatcttgatcgtgcgatcctcagtcttggaatcagtctccgcaagtctttgcttaatatcccttgctattgaaaagaaaacctgctcgacattcaggtttgtctttgcactcgtttcaaagaacttgatgccatattcatcagcaagtgcttgcccctttgaagttggtacggcccttttgctttcatccatgtcagctttgttgcctaccaaaatcttgttcacattatcggaagcatgttgctctatgttcctaatccaggttcttatataattaaatgatgactcgtcggtgacattataaacaagcaaaataccca

SEQ ID NO: 400155 - DNA, 442 bp, Oryza sativa nipponbare
ataggatagcccatatctttatattatattattattaacaaaaacttgtcatgcccagctatggcttgggcgcgatctgatacacagaacaaagagaaaacataaaaaggagaaataattaatagcaagcgtcaagccggcctgcttaaaaggtgtaaaggcagctgccgtcgtcgctcctcgccgttgggtcgaagttcttggcaacagggtcggtgcaaccttccggcacaggcaggttacctgcttgctgtgctccttgccctcctcctcctatgcaggccgcctacgatgcatcgatgggatgcgaatagctagagatcttttattcagctggatggcgcagaaccgtagaaggaaccagtcttcatggcgtcggagttagcgtcaccaagagcagcctcgctcaagtactgctcagccagctgcacacgcttgacgt

SEQ ID NO: 400156 - DNA, 419 bp, Oryza sativa nipponbare
attagcaacgtgtgtttaagtgaaaatgttaatgttcacatagcgtcatttagcgccgcatttcccgtggcagcgtacaactgcaagtgtagtagctcacaaaatttctgagttcttcgcggatatctcagaaggttatttgaaaggtattcctaaaaaatggggttgcgctaatcaagctgtttacaacaattacgattcgcctcatcgcaatcttcttgagcgttcatcctactgctcggcgatctttctgatgacatacggtaaaatgccaccattgtcgtagtatgcaagctccacctcagtgtcaaatcgaagtgtgcaagtgaaggacttcccattatcagtcgtcacagtaacatcttgcccaggcttgatctcacttacattggccgggaggtgaaccgtgaaacgctcat

SEQ ID NO: 400157 - DNA, 516 bp, Oryza sativa nipponbare
aaaccccagagagcatgaaatctttcaaatatcttccttcgtaatttgacagccgttccagttacaccacaaattttgctatagtgaccctgtttatttcacttcccatgggaacaaatcaaattgtctcgaaactactcaaatctcaccaaaattcagattcaagcctactacccaaaaattgacggccagtgaccttcccggagaacaagtaactgtaacttagtcatcagtacccgtagccggagttgtccatcgggttggtgacgggcgcaggctcaggctccttgatctcgacgacgacgacatccgatgtgaggaatgtcttggccaccgacgcagcatgctcaagacaacatctcaccaccttagtggggtcaatgataccagcagccatcaaatcctcgtactgtccagttgcagcattgtaaccaaacttgaagttatcgttagagagaaccttctcggtaacaacgcttccattaacaccagcattcttagcaatcaatttaagcg

SEQ ID NO: 400158 - DNA, 525 bp, Oryza sativa nipponbare
  unsure (1)..(525): unsure at all n locations
tttttgtgatgcgaccgaggcagctttattcaacttgtccagaaccacttctctaccgactatcacttttgcatgggtaaaattaactaggtaccacgggttgattgtacagtatttctcaatgggacagacatgccgaaacatcaactatttcccccactctcactactctccatctcaccgtctttcagaaccttggcaaaatctggcgttggagctgtcaaacatgttagccgtcaggtcccgtctcctccatgtctacagccacaagcatccatgccctctcctactcacttgtttagagctcatccttgagaggctcggctggggccgactctgccttctccttcgcctgaccagcggtttccttgttcttcttaatgaagtcgacgatctcgtcggctgtcctgccgctttcatagggaaccatctttccactgggggtgacgaagtacanggtggggtaaaccctgcacatcgaactcgcttggcacatcngtcgcaggtgcatccatcttagcgatg

SEQ ID NO: 400159 - DNA, 447 bp, Oryza sativa nipponbare
ttttatccatgcaggcagcctgtttgtgcccttgtgcagatgcatttcatttatacaagtagaaggcactcaaatcagccaccacatgaacacacacatgttccatcatcgatcgatctacacatgcatcacccggtcatgcacttacaaacaaaagatctacttgaagaagtacgggaggtcgagcacgtagaggaggaagtaggcccagaggacgccggagatgccgccgaagaagaagccgccggtgaacttggcccagccgtcggcggtctgcagcttgtcggcctccttcttgcggccggtgagcgtcagcgtcggcgccgtggacggctcgccctcgccgaaggaggcgacgccgtacatggtgaggcagacgctgaagatggcgacgaggcctgcggcgccgagggcgccggcctggccgtgcaccggcgtgttgcggaa

SEQ ID NO: 400160 - DNA, 421 bp, Oryza sativa nipponbare
ggttggggtgtttttttttttgtggtttttttttttttttttttttttggcaaaaccaaaatttcattggcgacggattcagatttgctttgggcattatattacatgggtccgggggtatagccggagattttgcattcacgggccctgtttaaccgtcaccgaacgatagaccgataggtgtaggagtacttttgcaacaacggcaggtcggagcgcgagaaaacaatttcgggcagtttaacccggccccccaaaaaaaaactggaaagggagggccctgcccgaaggaacgaaagcccttagttgccgcctgactccttgaaaccggggggtttatacccgaggaagctgattaactgcccctgcctaacgttggcaaagccaatgttgccaacgaaggcatcagggtatgcctttt

SEQ ID NO: 400161 - DNA, 529 bp, Oryza sativa nipponbare
aaatatatatagccggagcttccatatatttcattcacatatgcctcacccaacaacatatagtcgtagcagataccactcttacatcaagtcagagagagatcaggtgaaacaaaaacaaaagcagagcacggccggtaaaatcaaaagacgatgaacaaactgggaacacacgaaacaaggtgggagacatcatcgaatcagagatgaacaattaaacaaggctatatatgacgatgacggcttagttgccaccagactcctcgcagcccgggggcttgtaggcgatgaagctgatgagctgcacctgcctgacgttgtcgaagccgatgatacggacgaatgcatcagggtacgccttcttggcctcctcgagctccttgagcacctgggtggcgtcagtgcacccgaacatgggcagcttccacatggtccagtacctgccatcgtagtatcccggggatctgtgtttcttacggtagacgaatccgaccttgctgaactcgaggcagggcacccacttggaacg

SEQ ID NO: 400162 - DNA, 523 bp, Oryza sativa nipponbare
tgaaacacaactcattttttatggatatatgttggatgaatccaataaaaccgatacaagtcacgaaaaatcagactagatgaatccttcgagatcacatgagcaaaagctttcgacgaaagctgtcctatagtcgtggaagcaataacacttgataaagataggaattcagacacgagaggttgcagactataagatgtcatcaaatctccttgaacgccgcgaagagatcaccgttgatgtagtcgttgtccacaagactaaccaagaagtagctcttctggaccttgtctagtatctccctagatgagtcgccctcagggaacaggcaagcccaaccctttgaccaaatttcgaaagcttcgtctttccaaaccataaagctggctgagtcaacgacagttggctggactatttccttgccagggaaaacaccccatgtgaccgcattcacagcgtttgtgggaatgtttgagaatgactctccgtccttgttcacggcaatgtatgtaagagaagggaa

SEQ ID NO: 400163 - DNA, 446 bp, Oryza sativa nipponbare
tgtctagtataggatttttattccatgatcaggaaaaaaaggtttagtgcaactaaagggtaattagcatttcacggtcgttttacagaagtgattttacatgtatatgagcccggcgaaaattttacatgtatatgagcactatatataggacactctttacatgtatgcataactttgtcccttcatacacctcacttgttcatgaaatcgatgcccttctgaatgctctccatcagctctttctttgccatctccaagccagctctctcaaaatcattcaacggccccagagggagaacctcttcggctccagcacgacctaacctcacttttgttgcaaagaacggcaactcggtcaccgcagatgcaacatatgaacattccacaacgccagcatcaccacgcattgctcgcaagcatgcatcaccaaattttgctgcagc

SEQ ID NO: 400164 - DNA, 515 bp, Oryza sativa nipponbare
gtttgtttcgagaaagatatcgtccgattctccttctattgattcttttccgatcgagatgtatggatccatgtgtctacatacctagattctgttcatggattaacgaaaatgtgcaagagctctatttgcctctgccattctatgagtcgcttcctttttgcgtatggcacccccaccccctttggcagcatctactaattcggaacttaatttgaaagccatatttcgacccggacgcttttgggatgcttctaataaccaacgaatggcaagtgctcttccttgtttagatcctatttcaatcggaactttccgcgtcgatccttttttattacgtcttgtttttactcctatattgggagttactctacgtattgcttgacgtaaaaccaatagtggatttggttctgtcttttgttgaatctttttcacggctcgatagagaatttgataagccaatgatttttttccgtctttcataatacggttaaccaccatgttaactaatcgat

SEQ ID NO: 400165 - DNA, 530 bp, Oryza sativa nipponbare
ttttaaatatatatagccggagcttccatatatttcattcacatatgcctcacccaacaacatatagtcgtagcagataccactcttacatcaagtcagagagagatcaggtgaaacaaaaacaaaagcagagcacggccggtaaaatcaaaagacgatgaacaaactgggaacacacgaaacaaggtgggagacatcatcgaatcagagatgaacaattaaacaaggctatatatgacgatgacggcttagttgccaccagactcctcgcagcccgggggcttgtaggcgatgaagctgatgagctgcacctgcctgacgttgtcgaagccgatgatacggacgaatgcatcagggtacgccttcttggcctcctcgagctccttgagcacctgggtggcgtcagtgcacccgaacatgggcagcttccacatggtccagtacctgccatcgtagtatcccgggggatctgtggttctcacggtagacgaatccgaccttgctgaactcgaggcagggcacccacttgg

SEQ ID NO: 400166 - DNA, 452 bp, Oryza sativa nipponbare
tggacgacaactttaaatattgctcaataaaacactatctggagacaacacacacgagagtcatatccagaggaaaacaatcagcccagacggaccactagcaccaaatgcaaagcaatgggaagaactaattcgaccgctaccaccctagtaaaaaccagagaagagagaggaaggggggacaggaagaaaaacattctagtagaacaggagaagaatccatccatcatggtgacagcagcatgaggcatctaaatcgatggtctccaataacatgcggagccatcgatcgatcgatcttcccattttactggccctcgcaggcgtcgcccttggaggcttctttcacctcatcaccaccgtcctccgtgaggtcagaggtccagagggtcaagttgtccctcaggagctgcatgatcaaagtgctgtccttgtaagactcctccccgagg

SEQ ID NO: 400167 - DNA, 493 bp, Oryza sativa nipponbare
ggctcaaaatgatcattaagaaaagtagagtacatgcggacgatgcagaacacaatacgatactaccacagcgcgcaacctatatagcatctacgaatctgagcagcacaagagcaaatggtagctactcaaacttctaggccagcttcaaagggattgtgctattgtctcaagctatacaaagtgcgggcgcgaaaaacaaagtaccaaaagttaagttcacacaaacagatagctcatcaaatagcacaagcaagcaaacccatggcgtaaatgttaatcaaaaaccgatcgacagaaaatgtagagcctactggaagtgcttgtcgccaaggccctagcacaataaactccatagtcttcaaaagcatcatcaatagtcagaaggcgagataacatcatcgatcttgagaatcatcttcaccacctgggttgccagtaagatctgctgctgcttgcctatcagtgtttcaaaaacattttgttccttcat

SEQ ID NO: 400168 - DNA, 552 bp, Oryza sativa nipponbare
acggcggcgccaccgccggcggcggccacctcgtcgtcgtcgtcctccgcctcgccggacatctcctccagcgacttccccttcgactccggcacgaggaacgtgcagatgaacccgagcaggttgcatccggcgagcacgaacagcgagttcctcaccccgatcccgggtttgtacccggcgtcgggcttgtgcgggtcctgcgccgcgtacaggaacccgaacgatccgatgatggcgccggccttccccgccgccgccgagatgccgtggcaggtggaacgcagcctcgccgggaagatctccgccggcacgatgaaggtggtggagttggggccgaagttggcgaagaagaaggtgaaggcgtacatgacgacgaagccgatgtggttccccttcgtcgtccagtggtggtacggcacggcgaggccgagcatgaacacggtcatcatgaaaaaccctaacagctggattggcgaagcggccgacgatgtcgatgaggaagacggtgaaccagtagcccgggacggtgccgcacagggcgatgagcgt

SEQ ID NO: 400169 - DNA, 437 bp, Oryza sativa nipponbare
aaacacacgagcagattgacacggccaacgacagactcacgttcagtacatgtccaatccacacggccagaagttgtacatgaaaaggcagaaaagaaaaaaagagctaaaacacagacgcaaatctctctatcactctaagcaaagataccacgaacatatgccctcagttcatttggtcaacctgaagaactatgtagcaagacacacctggtattgttctcaaaatgtgtctcgacaagcacggacagtagtaacactggagctcgaagaagtcgcaatggcgtctgatgctcagagttgaacttccctaccatatacccagctgaaaggcaatgtaccagctttcttggctctcgattgtgccctctcatccagccttctgatcctagcagcaagggtgcaaaggtagtcttgcgccttgtttccctcgctag

SEQ ID NO: 400170 - DNA, 448 bp, Oryza sativa nipponbare
  unsure (1)..(448): unsure at all n locations
aaatgaaaagggaacatagcattgctgctggggaagttcgaaatccagagcaaataaaaatcaatggagtacatagtacagcacagattattacattacgaatttacgattacgggagaagaaaaatccatcaatcggaggaaggaggaggcgtgggtggctggtcctggtcttgggactgggactgggactggagaggcgggaggagctgggacttgcggcgggtgtcgcgcggggggagggggacggcgaggaagtgcttggtcttggagatggggcgggagcggcggagctcgacgacgtcgccgaccttgaactggttgtccgggtcgtgcgcctggtacttcttcttgatgcgctcccgccgcttgtactttgggtgaggagccagccgnaccaccttcacccccaccgtcttgtccgccttcgtcgtcaccacacgccccgt

SEQ ID NO: 400171 - DNA, 482 bp, Oryza sativa nipponbare
ttagctagaacactggtgctaccatgagatagtttatccccctgtagtactgtacatcagaaattcaccactcaactcaccccctcacccatgcatccagatccatgcatgcaggaaacaattaccacaacacacacagtaagtctgaatctcatcacatccatctctctctctctcctccccccaattcattaacatcttatacatgcatactccacaaaaaaaaaaagaagaaacaagaagagaacatcttccatcgcccaatcatcggtttcaccagcctgaactcatcaagctccttgagatgccctggccctgatgaaatcgatcacacgctcagcctgacagcgtctggatgatggtgttgtgccacgggtcagacaggtgctgcagcaggttgtcgaagggccccttctgcgtcacgttgtgctgcaccaggaaccccaagaacgccagcatcggcagcctccctgcaacaacaa

SEQ ID NO: 400172 - DNA, 471 bp, Oryza sativa nipponbare
cattattgcaaaaacatgatcttcttcttcatcttcttagtgtacacaacaccaactcgatcatcatctcgtcgcactaaacccatcttccccaacccaaagacaacgaactcgctggccacaaatccatccaaccacaattaaccactgctaagctacggtcccccacttcacttgccggggacgaagttggtggcgtacgcccaggcgttgttgttgacggggtcggcgaggtggtcggcgaggttctcgagggggcccttgccggtgacgatggcctggacgaagaagccgaacatggagaacatggcgaggcggccgttcttgatctccttcaccttgagctccgcgaacgcctcggggtcatcggcgaggccgagcgggtcgaaggcgccgccggggtagagcgggtcgacgacctcgccgagcggcccgccggcgatgcggtacccctcgacggcgcccatgagc

SEQ ID NO: 400173 - DNA, 497 bp, Oryza sativa nipponbare
cacggatcccaaatgttctcattgattgatagcgatatcatagaagcagcgacacgaattaagatttaaaaccaaccccaagaaggatcgcagatccaactccaccgaatcgatccaagaactccgcctaatccaaccaaaccatgggcgatctcatctcaccaacacgacacgaactcataaaaagactaacaccaccaccacctcctccttatttagggactcgacgactcaagacgactgatactggcgaaaggcgaaggggaacagcacagatctaggagagctggccgcagtcagcgatgacgaccggcttggcggtgctcccgccgcgggatcccaccttctcgatggccttgacgacgtccatgccctcgacgacgcggccgaacacgacgtgcttcccgtccagccagctgcagggcacggtgcaaatgaagaactgggacccgttagtgttgggcccggcgttcgccatggacaggatgccggggctg

SEQ ID NO: 400174 - DNA, 531 bp, Oryza sativa nipponbare
aaacaaaataaacttttatgtaaatattgctaaccatatcattacagtttggtcttgatactgctctacagttatgagtaacatcaattacaataaatagaatcgagaagagttctaaatgaaacaatgaccgccccagccttcaattttcttccctccaaaacacatgttagctttcaattcttcagacatctttttttccaaaaacaaaacaaactattggaatggccagaaccagtacaagtgcattttactctacaggttggccaatgatttgtatgcgtcaatttttctttggatccgagcttccgttcaggtagccttcaagaattgtgttgcaggcattcatggctcgcgcatccagtagactgtggttccagagtttgaccataaaaaacctccaacaccatagtagagctggattttgtacaagttcttgtccatgaaactgcgagaatgcttcgcatgcccagggaatatggccatccgctagtaccctttgtttccgaacaaatgaattccacatatgca

SEQ ID NO: 400175 - DNA, 418 bp, Oryza sativa nipponbare
ggatcaacgttgataaaatcctcgagggcaaaaagaaaataataattatacagcccttacaggcctacaagctgcacaagcattttattactacctggcaatatatgcattctgcaaatgaaaccatctaaagagaccagactactaaaaggaattatctagcagaggctcatgggtcctcttgaccaagaacaatgactcatagaccagcccagcgagaggcccgccaatcagcggcccgagccagtagatccagtggtgggtccacactccagtggccagcgccggcccaaatgaccgggccgggttcattgacgcgccggagaagttgccaccagcgatggtgttggcaccgacgatgaggcccgtgagcagcgggccgaagcccgggaccgagctccgcgggtcaaggatggtc

SEQ ID NO: 400176 - DNA, 442 bp, Oryza sativa nipponbare
ttagactgtaaccggtgggtgcgcccgtattattcaattcccaaagagcagaaataattttatctatacatcatgcatatcaaggacaagaagttttttttttccttcagtagatcgagttacagattgttgcagcaaataattagcctttcgattgattgattaattaattaattaacagtgccttttaattataactgctcgatcagccacgctgaggcagattctttctctcttctcctggggtagtgctcatcttgttttcatttcacatcctggagtagccatcgtactgatccatgaaagtgtcgttgaacttcttgaagctggtcatgatggcaggcatgtcctcctcagctggcaggatggtcgtcctcaggtggaacaccccttctttttgtccgaaacctgaccctggaacagtggatattccagttgcttc

SEQ ID NO: 400177 - DNA, 530 bp, Oryza sativa nipponbare
  unsure (1)..(530): unsure at all n locations
taccctttgtataaatatatatagccggagcttccatatatttcattcacatatgcctcacccaacaacatatagtcgtagcagataccactcttacatcaagtcagagagagatcaggtgaaacaaaaacaaaagcagagcacggccggtaaaatcaaaagacgatgaacaaactgggaacacacgaaacaaggtgggagacatcatcgaatcagagatgaacaattaaacaaggctatatatgacgatgacggcttagttgccaccagactcctcgcagcccgggggcttgtaggcgatgaagctgatgagctgcacctgcctgacgttgtcgaagccgatgatacggacgaatgcatcagggtacgccttcttggcctcctcgagctccttgagcacctgggtggcgtcagtgcacccgaacatgggcagcttccacatggtccagtacctgccatcgtagtatccggnggatctgtggttctcacggtagacgaatccgaccttgctgaactcgaggcagggcacc

SEQ ID NO: 400178 - DNA, 419 bp, Oryza sativa nipponbare
  unsure (1)..(419): unsure at all n locations
aataagagggtcatgtcaagcatggattaaattaacatagatacaaaaatgaaacatgattaattactaggattacttaacacacggatcacagaaaatcaatccttgcatgcaggggaaatcgatggatcgacctctctccttaacttgntcttaattctcatgtacaatcaaagaaacacacacgcacacacacatgcgtgcactgcatctctctgagcaacgaactcgattgatttgattttgattcgctagggattaaagagaagctgagatagagatttcgacgatcatgcgacgcttaaggagctggctgcgctctcgacgaacttcctggcgcccttgaaccacactttgtcgccggcctgcgcctttgaaatgtacagccggacgcgtgggcggacccgtgggtcgacccg

SEQ ID NO: 400179 - DNA, 347 bp, Oryza sativa nipponbare
gcgaacaaaactttcgaactgttttttttctccttgttttctatttcatttcattccgatagatagcaacaagcagttcaaacaccataaccaaagcgaactcaattcatggtaacatcacggacgaagaacacctaacactggatggatggatagagggcttctcgactcgagagagccactggacacgataacgactcgactcgatgataagatgattctgacacggatagctaaggataactggccacgatgggccccaccaatcagttcctccagttcccgccggagtcgccgccgtagccgccgccacggctgccaccgtagccggcggcgccgccgtcacg

SEQ ID NO: 400180 - DNA, 530 bp, Oryza sativa nipponbare
  unsure (1)..(530): unsure at all n locations
aattaattcacaacaccatatttcattgatcaggttcagaacctgcacagaaatacacactaccggtacagatctcaccctctctccaatactcgtacatccatccacgcggtccacacgaatacgtacatctatacggtacacgtacgtacatctactgcaccgcgtacacacacgcacactctcctgcagagacgcgcatcgtcgtcaacctagctagcttagctgaaggcgatgcgtcgccatggcagcacggcggcggcggcgctcacttgccggggacgaagttggtggcgtaggcccaggcgttgttgttgacggggtcggcgaggtggtcggcgaggttctcgagggggcccttgccggtgacgatggcctggacgaagaagccgaacatggagaacatggcgaggcggccgttcttgatctccttcaccttgagctccgcgaaggcctncgggtcgtcggcgaggccgagcgggtcgaagctgccgccggggtagagcgggtcgacgacctcgccgagcggc

SEQ ID NO: 400181 - DNA, 448 bp, Oryza sativa nipponbare
attgttcgatggagtaagtgtattatatgtatgtaaatattatattattgtaaatcattttgaggagctagactagcgtgccttattaacaaggagatatgtaccattacatgatgattaacatataaatctgtagctacatggaattaaggtagtggagcagaggaggaaggatgatagaagactccaattctccatggatgggaatgggatcaggtggccttgcagaactctccgcccagatcgtcgcacgcctcctcggggaacaccgtggtgggctcgtcgtaggataggtagtccctgtcgacttcctccgccgccgcacgagaaacagcaacagcagccgatgatgagagcttggcctctgggtacatctgcacgttgcacgcctcgccgccgatgaggtcgcacgccttcatcggaaacaccgagatgttagagctgtagt

SEQ ID NO: 400182 - DNA, 410 bp, Oryza sativa nipponbare
gaaaatcaatccttgcatgcaggggaaatcgatggatcgacctctctccttaacttgttcttaattctcatgtacaatcaaagaaacacacacgcacacacacatgcgtgcactgcatctctctgagcaacgaactcgattgatttgattttgattcgctagggattaaagagaagctgagatagagatttcgacgatcatgcgacgctgaaggagctggctgcgctctcgacgaacttcctggcgcccttgaaccacctcttgtcgccggcctgcgccttgcagatgtacagcttgccgtcgttgacggtggccgtgatcagctggtgcttgccgccctcgtcgccgtccgccgtcctggtctgcaccgatacgctgtagtactgattccctgccaccaccggcgccga

SEQ ID NO: 400183 - DNA, 431 bp, Oryza sativa nipponbare
agcgcatatctatatattatattattattaacaaaaacttgacatgcccagctatggcttgggcgcgatctgatacacagaacaaagagaaaacatagacaggagaaataattaatagcaagcgttaagccggcctgcttaaaaggtgtaaaggcagctgccgacttcactcgtcgccgacgagtctaaggtcttggcaacaggggcggtgcaaccttgcggcacaggcagggtacctgcttgctgtgctgcttgccctgctcgtgatatgcaggccgactacgatgcatcgatgggatgcgaatagctagagatcttttattgagctggatggcgcagaaccgtagaacgaactagtcttcatggcgtgggagttagcgtcaccaagagcagcctcgctcaagtactgctcagacagctgcacacgcttg

SEQ ID NO: 400184 - DNA, 360 bp, Oryza sativa nipponbare
aagaagaagagctggactgaatttttgttcaagggaagagaggattaggaacaggattaattaaggcataagtacaccacattccacgtcactaccactccactccactccaccaccctcaaaacacaccacgtacacacatgtacggatgcaatcttcaagctcaagctctcagtctgaccgcatgcggtttagctggttcaacgccggctgcaggatgttgtagagaacccaggcgatcgccggcgccaccacgaacagcagcagtaggccgcggttgtagccgtccttcgtcgccggcgccttcggcgacagccttgccacctcctgcgccgacaacgccttgggggggaactcgag

SEQ ID NO: 400185 - DNA, 384 bp, Oryza sativa nipponbare
ccacgcgtccgatccattccgatccatcaaatttctcttgagaccgtaaagagagagagaggcgccaaccatggccggtattatccacaagatcgaggaaaagctccacatgggcgggggcgagcacaaaagggaagacgagcacaagagggggggggagccccacaaaagggacggggagcacagggaaggcgtggtggaaaatatcagggacaagatcaccggcaaccacggaaacgggggagagcccagggagaaaaggcgcacagaagaagaagggggagaaaaaccgcgtggaggggcgccaccaccacggcggccacagcagcagcagcagcaacagattgtgagccgtcgcgcccacacacgggcgctgtgcgtgcg

SEQ ID NO: 400186 - DNA, 426 bp, Oryza sativa nipponbare
ccacgcgtccggcataagcaacacaagggattaactcatcactcacttagctaattaaatcttcgaccatgtcggacaagtgcggcaactgcgactgtgctgacaagagccagtgcgtgaagaaaggtaccagctatggcgtcgtcatagttgaagccgagaagagccacttcgaggaggtcgccgccggcgaggagaacggcggctgcaagtgcggcaccagctgctcctgcaccgactgcaagtgcggcaagtgaagtcacgaagcaaccgaacactcgccgccggcgagtcacctaccttaattagtccacaataaaaaccacccatatgagtgtggtttgtgtgtgtgctgattattgctgaattaaacccgtgtgttatcgattaattaagcagctggtcgcttcggcgactatgcgtgta

SEQ ID NO: 400187 - DNA, 433 bp, Oryza sativa nipponbare
  unsure (1)..(433): unsure at all n locations
acgacccacgcgtccggcaggagtcgcctcgcctcctccttaagacgctcctgatgcgccgcgggggtcgcctgagataactttacaagttgcaaacttattatcatgtgcttggtagcagtgagattgttaagggcactatccactgcgtgcacgcgggtcacggcctcacctctgcgactggaagtgcttatggactaaaccctgatgtccatggattccatattcatgcacttggtgacaccaccaatggttgcatgtcaactgggccacaatntantnntaacaaaaaggaacgttgacaccaagatgatcagaccggtcaatccatacatcttttgcttggccatggaaaagctgatgatgtagttctttacaagcatggtgagaaatctgctgacgcactgaagacaactggattttcaggcagagc

SEQ ID NO: 400188 - DNA, 419 bp, Oryza sativa nipponbare
ccacgcgtccgcccacgcgtccgcggacgcgtgggcaaattcttgcacacgcgcagctcgagccatggccggagtgagcaccagcgtcgtcggcctcaagcccgccgcggcggtgccgcagtcggcctgtctggcggtgccgaatcgcgtgctcgttgcttgacgtgctttatcttgatgcacgacggttgttgtgttcttttttcgtgactggttggatgttgttgctttgttggcttttatctatgctcgacggcttttgttgtttctctgtggttgaggtgatttccttctgttgctgtctattctcgattgctgtgatgtatcttatagtttggtttctttcttatttttttttaatttttttgtttttatattatattttttattttttttttttacctttttttctttttttt

SEQ ID NO: 400189 - DNA, 411 bp, Oryza sativa nipponbare
ccacgcgtccgcccagcgtacgcccacgcgtccgcccacgcgtccgagctaattaagcaaaagaagaagaagaagaaagaagaagaagaagatgcagaccgctgctagcagtgtcgttggattgtcggccgtgttgcccgatgctgtgaaggggcgcagcctgcagattcaggctcctcgccgtgttgcgttgcgcgttcgggcggcggcggcggcggtggcagtggaggctgcggaggtggactacagctctaacatctcggtgtttccgatggaggcgtgcgacctcatcggcggcgaggcgtgcaacgtgcagatgtacccagaggccaagctctcatcatcggctgctgttgctgtttctcgtgcggcggcggaggaagtcgacagggactacctatcctacgacga

SEQ ID NO: 400190 - DNA, 430 bp, Oryza sativa nipponbare
ccacgcgtccggctactggacatactctactactactagccagtaagctagctaactaactacgtggctatggcccccaccgtgatggcctcctcggccacctccgtggctccattccaagggctcaagtccaccgccgggctccccgtcagccgccgctccaccaactcgggcttcggcaacgtcagcaatggcggaaggatcaagtgcatgcaggtgtggccaattgagggcatcaagaagttcgagaccctatcgtacctgccaccactcaccgtggaggatcttttgaagcagatcgagtacctgcttcgatccaagtgggtgccttgcctcgagttcagcaaggttggattcgtctaccgtgagaaccacaggtctcccgggtactacgatggcaggtattggaccatgtggaagctgcccatgt

SEQ ID NO: 400191 - DNA, 429 bp, Oryza sativa nipponbare
ccacgcgtccgaaccgtgcgggtttgggatgctgacaatacaagttattcactccgtactttcacgggtcattcagcatctgttatgtcacttgacttccatccgaacaaagaagatatgatttgctcctgtgatggtgatggtgaagtccgcagctggagcataaataatggtagctgcctgacctttgttaaggtctttaagggaggtgctactcagatgcgatttcaacctcaaaagggaaaatatcttgcagctgcctcagagaaggccatctacatacttgatggagagacacaacttgcttgtagaaaccctctgcaggggcacacaaagaatattcactcactttgttgggattctaccggtgacaatctggcttctgtcagtgaagatagtgtcagaatatggtcgtttgctcctggacat

SEQ ID NO: 400192 - DNA, 431 bp, Oryza sativa nipponbare
ccacgcgtccggcaggagtcgcctcgcctcctccttcatcctcctcgtcgtcgccgcgggggtcgcctgagatcacattaacaatggtgaaggctgttgttgtgcttggtagcagtgagattgttaagggcactatccactttgtccaagagggagatggtcccaccactgtgactggaagtgtctctggcctcaagcctggtctccatgggttccatattcatgcacttggtgacaccaccaatggttgcatgtcaactgggccacactacaatcctgccggaaaggagcatggagcaccagaagatgagacccgccatgctggtgatcttggaaatgtcaccgctggagaagatggtgttgctaatatccatgttgttgacagtcagattccacttactggaccaaattcaatcattggcagagccgtc

SEQ ID NO: 400193 - DNA, 432 bp, Oryza sativa nipponbare
ccacgcgtccgcccacgcgtccgcccacgcgtccggaagacgctcctgatgatgttgaggggttggatgcctcagctgcacatgttgcaaacttattatcaactgagccagctgacatcaaacttggtgttggtggctttagcatgggcgcagctaccgccctttactctgcaacctgctatgctcatggaaaatacggaaatggcaatccatatcctgtgaacttaagtgtgtctgttggtctcagtggctggcttccttgtgccaggtctttgaagaacaaaattgaaagctcacaggaggctgcacaaaaggcttcatccatacctcttttgctttgtcatggaaaagctgatgatgtagttctctacaagcatggtgagaaatctgctgacgcactgaagacaactggattttcaaatgtggtgttca

SEQ ID NO: 400194 - DNA, 437 bp, Oryza sativa nipponbare
  unsure (1)..(437): unsure at all n locations
ccacgcgtccgcggacgcgtgggcggacgcgtgggaaagaatccgtcgaggccacagattgttccagagtttttgttttcctcttctccccttcgcgttagcgagcatgtgtcccggaggcagatacgcgggcctcgacgtccccgcctgcgcggcggcgggagacctgaggccggcgttcgacgtgctggacgcggaccgcgacggtcgcatcagccgggaggacctcaagtcgttctacgccagcggcgcggccaccagcgagcggttcgacgacgaggacatcgccgccatgatcgccgcagccgacgtggacaacgacgggttcgtgcagtacgacgagttcgagcgcctgctggggcgcgccgccgcgggggcggngtgccggcccgcgatggaggacgtgctccgggtgatggaccgcgacggggacggct

SEQ ID NO: 400195 - DNA, 207 bp, Oryza sativa nipponbare
ccacgcgtccgcggacgcgtgggctcgactacctcggcaacccgagcctgatccacgcgcagagcatgctcgccatctgggcggtgcaggtggtgctcatgggcgccgtctaggggtaccgcatcgccggcgggccgctcggcgaggtcttcgtcccgttttaccccggcggtgcctttgacccgttcggcctcgctcatgaccctg

SEQ ID NO: 400196 - DNA, 384 bp, Oryza sativa nipponbare
ccacgcgtccggttcaggatcggccacctcggccacctcaacgagctgcaattgatgggtgccctgagtggagtggagatggtgctcaaggacatcggctacccggtgaagctcggctccggcgtggcggcggcggcggcgtacctgtcgaattcgacgccgctcattccgtccaggatctgaagcacaaccaacgaagggagggaagccattcttatccacgatgggtcttgccccattttgggggaaccgaacaccggcaaataaaaccattgggtataatttgggctctgcctgtaaagaaaaaaatttttacgctccatccatcagctctatgctaatgagtaaggagtgtaatcttgtgaagggacctgagctttttac

SEQ ID NO: 400197 - DNA, 384 bp, Oryza sativa nipponbare
tcgacccacgcgtccgcggacgcgtgggcggtacgcgtgggaaaaattttctcctcctctttctcttctctgtgtgtcactgtgtgtgaggagcgtatcttatagtgagaaaataatggcgttggagacgtgcttcagagcctgggcgactctgcacgccccacagtcaccgtccttcggcggcagtagggacagactcctcctctccggcgccggtagcagtcagtccatgccaaggttgtccgtcgccttgtcgttaccgttccgacctgtcttccgctttgcctgtcagtgcatcaactgtcttctactaaatggtggtggcggacgataagatctggtacagtatggtgatggggagtgaggcgccggtgctggtggagt

SEQ ID NO: 400198 - DNA, 438 bp, Oryza sativa nipponbare
ccaggatcttgtttcgtccccgcatcctgatcgatgtctcaaagatcgacatgtccgcaactgttcttgggttcaagatatcaatgcccataatgattgctcccagtgccatgcagaagatggctcaccctgacggagagtatgcaacagccagggcagcttcagcagcaggaactataatgacactgtcatcttgggctacttcaagtgttgaggaggtcgcctcaactggaccaggaatccgtttcttccagctatacgtgtacaaggacaggaatgtggttgagcagcttgtcagaagagccgagagagctgggttcaaggcgatcgcactgaccgtggacactccgcgactgggacgcagggaagctgacatcaagaacaggttcgttctgccaccatacttgacactgaagaatttcgaaggcctggacctcg

SEQ ID NO: 400199 - DNA, 428 bp, Oryza sativa nipponbare
ccacgcgtccgctcgagcaaagaaggagagagcttggtgagctgcagagatggccccctccgtgatggcgtcgtcggccaccaccgtcgctcccttccaggggctcaagtccaccgccggcatgcccgtcgcccgccgctccggcaactccagcttcggcaacgtcagcaatggcggcaggatcaggtgcatgcaggtgtggccgattgagggcatcaagaagttcgagaccctctcctacctgccaccgctcaccgtggaggacctcctgaagcagatcgagtacctgctccgttccaagtgggtgccctgcctcgagttcagcaaggtcggattcgtctaccgtgagaaccacagatcccccggatactacgatggcaggtactggaccatgtggaagctgcccatgttcgggtgcactgacgcca

SEQ ID NO: 400200 - DNA, 433 bp, Oryza sativa nipponbare
ccacgcgtccgcccacgcgtccgctcagctctcacagctcactgcatcaatggccgcggccaccatggcgctctcctccccggtgatggcccgcgcggcgccgtcgacctcctccgcgctcttcggcgaggcgcggatcaccatgcgcaagaccgccgcgaagcccaagccggcggcgtcgtcggggagcccgtggtacggcgccgaccgcgtcctctacctcggcccgctctccggcgagccgccgagctacctcaccggcgagttcccgggcgactacgggtgggacaccgcggggctctccgccgacccggagacgttcgccaagaaccgggagctggaggtgatccactcccggtgggcgatgctgggcgcgctcggctgcgtcttcccggagctcctcgcccggaacggcgtcaagttcggcgaggcc

SEQ ID NO: 400201 - DNA, 437 bp, Oryza sativa nipponbare
ccacgcgtccgattaaatcttcgaccatgtcggacaagtgcggcaactgcgactgtgctgacaagagccagtgcgtgaagaaaggtaccagctatggcgtcgtcatagttgaagccgagaagagccacttcgaggaggtcgccgccggcgaggagaacggcggctgcaagtgcggcaccagctgctcctgcaccgactgcaagtgcggcaagtgaagtcacgaagcaaccgaacactcgccgccggcgagtcacctaccttaattagtccacaataaaaaccacccatatgagtgtggtttgtgtgtgtgctgattattgctgaattaaacccgtgtgttatcgattaattaagcagctggtcgcttcggcgactatgcgtgtatcaacgtatgaatttgtgtgatgtgatgtacccgtgctattctcagtgaaatt

SEQ ID NO: 400202 - DNA, 431 bp, Oryza sativa nipponbare
ccacgcgtccgcccacgcgtccgaaagaaggagagagcttggtgagctgcagagatggccccctccgcgatggcgtcgtcggccaccaccgtcgctcccttccaggggctcaagtccaccgccggcatgcccgtcgcccgccgctccggcaactccagcttcggcaacgtcagcaatggcggcaggatcaggtgcatgcaggtgtggccgattgagggcatcaagaagttcgagaccctctcctacctgccaccgctcaccgtggaggacctactgaagcagatcgagtacctgctccgttccaagtgggtgccctgcctcgagttcagcaaggtcggattcgtctaccgtgagaaccacagatcccccggatactacgatggcaggtactggaccatgtggaagctgcccatgttcgggtgcactgacgc

SEQ ID NO: 400203 - DNA, 113 bp, Oryza sativa nipponbare
ccacgcgtccgcaagcagctctagctagctacaggcatcagtggtcagtagagtgatcagttgcaactagctagctagttagattatatcttcagtgatggctccggcctgcg

SEQ ID NO: 400204 - DNA, 428 bp, Oryza sativa nipponbare
ccacgcgtccgcggacgcgtgggcggacgcgtgggaactgttctgcaagtctgattgcacactgctcgagattaatcctcttgctgagacagctgacaacaagctggtcgctgctgatgcaaagttgaactttgatgacaatgctgcctttaggcagaaagagatatttgccatgcgtgacacaacacaggaagatcccagagaggtggctgctgccaaagctgacttgaactacattgggcttgatggagaaattggctgcatggtgaacggtgcaggattggcaatggctacaatggacatcattaagttgcatgggggtacgcctgccaattttcttgatgttggtggaagtgcatcagagggacaggttgtggaagcatttaagattttgacttccgatgatagagtgaaggctattctagtga

SEQ ID NO: 400205 - DNA, 174 bp, Oryza sativa nipponbare
ccacgcgtccggtgtatgcctaggcatgtgatcacaacgacacgatcgagatggtgccaaccaacgtgccatgtgttcacttgtatttaccactcacattccctttatttgcagttgtagcagtttcatgtatgtatgttccttatattgtgtgtgtgtgatggatcgatcgag

SEQ ID NO: 400206 - DNA, 426 bp, Oryza sativa nipponbare
ccacgcgtccgcccacgcgtccgcaactacagcctcgccgtcagagatggcaaggtctgcctcgtccgctccgatcgcgacgaccacacgcagcactgggtgaaggacatgaagtacagcacgagagtgaaagacgaggaagggtaccctgccatggcgctcgtcaacaaggccaccggcgacgccctcaagcactccatcggccaatcccaccctgtccgtttggtgcgctacaatccagagtacatggacgagtctgtgctgtggacggagagcagggacgttgggagtgggtttcggtgcatcaggatggtgaacaacatctacctcaacttcgacgcgctccatggagacaaggaccacggcggcgtgcgcgacggaaccaccctggtgctctgggagtggtgcgagggtgacaaccagcgc

SEQ ID NO: 400207 - DNA, 427 bp, Oryza sativa nipponbare
ccacgcgtccggggagagaaaggaagagacgagaggagagagatggccactgcttatgctcccatggcgagccagctgatgaagagcagcttggtgtgctccaagccgagggggctgtctggtgcttcgctgacaaggaggccccgcttcacagtcaaggccatccagtctgagaagccaacgtaccaggtggtgcagcccatcaatggcgaccccttcatcggcagcctggagatgccggtgacctccagcccgctggtcgcctggtacctctccaacctcccggcgtaccgcaccgccgtcagcccgctgctccgcggcatcgaggtcggcctcgcccacggctacctcctcgtcgggcccttcgcgctcaccggcccgctccgcaacacgccggtgcacggccaggccggcgccctcggcgccg

SEQ ID NO: 400208 - DNA, 427 bp, Oryza sativa nipponbare
ccacgcgtccgggcaaggtctgcctcgtccgctccgatcgcgacgaccacacgcagcactgggtgaaggacatgaagtacagcacgagagtgaaagacgaggaagggtaccctgccatggcgctcgtcaacaaggccaccggcgacgccctcaagcactccatcggccaatcccaccctgtccgtttggtgcgctacaatccagagtacatggacgagtctgtgctgtggacggagagcagggacgttgggagtgggtttcggtgcatcaggatggtgaacaacatctacctcaacttcgacgcgctccatggagacaaggaccacggcggcgtgcgcgacggaaccaccctggtgctctgggagtggtgcgagggtgacaaccagcgctggaagattgttccctggtgatcaaatcaaatctatct

SEQ ID NO: 400209 - DNA, 426 bp, Oryza sativa nipponbare
ccacgcgtccgcatacacgatcatgtacgcagagatgaaattagagaataggctagaaaaaattcccgaagaagttctgcaggaagggagaaatgttgatcaagaggcaagccagccggcagacaaggtcctaagaagacttgtacaaaacatagaggctgcacggaaaagccgactgcggaaaaaggcttatatacaacatctggtgacacgccggttgacactagcgcagatagagcaagagcttgagcgggccattcagcaggctgtgtatgcaaatgggagccttaaagaaccaaatcttggatttacaggaccaatcactccacgtgccttaggatttgagattaagttcaggcattggttggacgagcagattcacaacactggtgagatgaggaatgcgctgatgcatgcgcagacgac

SEQ ID NO: 400210 - DNA, 420 bp, Oryza sativa nipponbare
ccacgcgtccgcgccgcatcgccctcgttagaacgatggccgcgtcggcgctgcaccagaccaccagcttcctcggcaccgcccctcgccgggatgagctcgtccgccgcgtcggcgactccggtggccgcatcaccatgcgccgcaccgtcaagagcgcgccccagagcatctggtatggacctgaccgtcccaagtacctgggcccgttctcggagcagacgccatcgtacctgaccggagagttcccgggagactacgggtgggacacggcggggctatcggccgacccggagacgttcgcgaggaacagggagctggaggtgatccactcgcggtgggcgatgctgggggcgctgggctgcgtcttcccggagatcctgtccaagaacggggtgaagttcggtgaggcggtgtggt

SEQ ID NO: 400211 - DNA, 422 bp, Oryza sativa nipponbare
ccacgcgtccggctaattaagcaaaagaagaagaagaagaaagaagaagaagaagatgcagaccgctgctagcagtgtcgttggattgtcggccgtgttgcccgctgctgtgaaggggcgcagcctgcagattcaggctcctcgccgtgttgcgttgcgcgttcgtgcggcggcggcggcggtggcagtggaggctgcggaggtggactacagctctaacatctcggtgtttccgatggaggcgtgcgacctcatcggcggcgaggcgtgcaacgtgcagatgtacccagaggccaagctctcatcatcggctgctgttgctgtttctcgtgcggcggcggaggaagtcgacagggactacctatcctacgacgagcccaccacggtgttccccgaggaggcgtgcgactatctgggctgag

SEQ ID NO: 400212 - DNA, 411 bp, Oryza sativa nipponbare
ccacgcgtccggcggcgccaacttcgcgagggcgtacaccgtgcgagttcggcaagctgccagctgccgtacaacttcaccggctgccatgacctcgccaagcagaagaaagtcccattcatctcagatgatctcgagatcgagtgcgaggggaaggagaagtacaagtgcggatccaacgtcttctggaaatggtgatgatctgatgatgatcatcgatcgattggccagccatgaaaacattcctgtacctagaacctttgtgatatgacacaactgcatgcataattgaacgcttgtcgtgctcactgtgtatttgtatcatctgagtggagatttgtagcgaattttctctcgattcgtcgatctcactatgatttctaatcatgcatcttatattggttcaccaag

SEQ ID NO: 400213 - DNA, 431 bp, Oryza sativa nipponbare
ccacgcgtccgaaaaggcctgtgtcaaggagagggtagtagcaccttgctctcctttgccttcagagaaaccggaagcaatggcgtctgctactctcctcaagtcatctttccttcccaagaagtctgaatggggtgccacccgccaggctgccgcccccaagccggtgactgtctccatggttgtccgcgctggtgcctacgacgatgagcttgtcaagaccgcgaaaaccattgcatcaccaggaaggggtatccttgccatggatgagtcgaacgcgacctgcggtaagaggcttgcgtcaattggccttgagaacaccgaggccaaccgccaggcttaccggaccctccttgtcaccgcaccgggcttgggacagtacatctccggtgctatcctcttcgaggagactctgtaccagtcaactgtag

SEQ ID NO: 400214 - DNA, 335 bp, Oryza sativa nipponbare
ccacgcgtccggcgagaagcctcttttggatctatccattcgggtcaccgtggcagttcggtaattgtggcggagaggaggaggaggactactactactacgacgtgatgggtctcctcgacaagctgtgggacgacaccgtcgcggggccccgtcccgacaccggcctcggccgccttcgcatgcacgccgccgtccgccccgccgccgtcaagatcaacgacccgacaggggacgcggcgatggtggccgtcccgccgtcgacgccggtcggggcggtggaggcgctggttaaggtgactcgcagtatcatgatcaagcgcctcgctgggcac

SEQ ID NO: 400215 - DNA, 400 bp, Oryza sativa nipponbare
ccacgcgtccgcggacgcgtgggcggacgcgtgggtggaaactggtcgcacggctcgtaaacgaagtgctggaggcttttcctcgtctcaaagtaaccaatggacgaatggttttagaggttcgtccggtgatcgactgggacaagggaaaggctgtggagtttctgctccagtcactcgggctaaatgactctgaaaatgtgatccccatctacattggaaacgacagaactgaccaagacgcttgtaaggttccttcacagcgaaattgccgttatgggattctaatttcacagggtcccaaggaaactgaagccctctacttgctgagagatccattttaagggatgggggttctcaatttcttggtgaggtggaagaagcgcttcagttgtaaaaa

SEQ ID NO: 400216 - DNA, 426 bp, Oryza sativa nipponbare
ccacgcgtccgaagtactcgagcaaagaaggagagagcttggtgagctgcagagatggccccctccgtgatggcgtcgtcggccaccaccgtcgctcccttccaggggctcaagtccaccgccggcatgcccgtcgcccgccgctccggcaactccagcttcggcaacgtcagcaatggcggcaggatcaggtgcatgcaggtgtggccgattgagggcatcaagaagttcgagaccctctcctacctgccaccgctcaccgtggaggacctcctgaagcagatcgagtacctgctccgttccaagtgggtgccctgcctcgagttcagcaaggtcggattcgtctaccgtgagaaccacagatcccccggatactacgatggcaggtactggaccatgtggaagctggccatgttcgggtgcact

SEQ ID NO: 400217 - DNA, 383 bp, Oryza sativa nipponbare
ccacgcgtccgcccacgcgtccgaaccctcgaagcggaggttcttgctgctaagaagttggccctgaaggtatgaagaacttggacgatgaatcgtcgcaaataaatcccagcaaaatttgtttgctgcccaccagtcttgatcttgtatttcttctgtctggggattggtctgtacaaatctgcagtttctagaaaaccacgccaccttccattcgccagttaacattttggttgaacaccacacttgatctgggtctgtattttgagtccatttgtgagtgacagaacggatgatgaaacacatcagggacacttttaagtttcttcagtcctgcgttctttcctcgaaataaaaatgtttccttgttttttaaaatatat

SEQ ID NO: 400218 - DNA, 252 bp, Oryza sativa nipponbare
ccacgcgtccgctgagcttgaagcagcagatcgaggtagacatggccgccgtcaccatggacctctcgtgcggcggcgcttgccattaaggccttctctaatgttttcagccagggtcgcatcaccatgcgcaagttagcggcaaatcctaagcccgacgcgtctgagatcccttgttacggcgccaaccgcttgctctacctcggtccgctctcaggcgagctcgcgatctacctgaccggtgagttccct

SEQ ID NO: 400219 - DNA, 425 bp, Oryza sativa nipponbare
ccacgcgtccgccacgcgtccggagttggcaaatctaccaatcttgcaaaggttgcttattggcttcttcagcataacctcagtgtaagcctggcagcatgtgacacctttagatctggtgctgttgagcaactgcgtactcatgctcgcaggcttcagatacctatatttgagaagggatatgaaaaagatccagcggttgtcgcaaaggaggctattcaggaagctactcgtaataagtcagatgttgttcttgtcgacactgctggacgtatgcaggataatgagccactcatgagagcactctccaagctcatcaatctcaatagcccagatctagttttatttgttggggaagcattggttggtaatgatgctgttgatcaactcactaaatttaaccagaaattagcagacctttccgc

SEQ ID NO: 400220 - DNA, 367 bp, Oryza sativa nipponbare
ccacgcgtccgcccacgcgtccgggaggagctagagcttggagagagacaacaatggcggctcaggctcttctctctgggaggcatctgctggggaggccattgcaatcttcagtctccaggtcttcttcctccaggaaggcacccttcatggtcagggcagatgccactccctctgccaagcaaggtgctgtcaggcagctttggttcgcatccaatcagtccctgagctacctggatggcacgcttccgggagacttcgggttcgacccgttggggctatcggacccggaggggaccggtgggttcatcgagccacggtggctgtcctacggcgaggggttcaacggccggactgccattatggg

SEQ ID NO: 400221 - DNA, 426 bp, Oryza sativa nipponbare
ccacgcgtccgaaggagagagcttggtgagctgcagagatggccccctccgtgatggcgtcgtcggccaccaccgtcgctcccttccaggggctcaagtccaccgccggcatgcccgtcgcccgccgctccggcaactccagcttcggcaacgtcagcaatggcggcaggatcaggtgcatgcaggtgtggccgattgagggcatcaagaagttcgagaccctctcctacctgccaccgctcaccgtggaggacctcctgaagcagatcgagtacctgctccgttccaagtgggtgccctgcctcgagttcagcaaggtcggattcgtctaccgtgagaaccacagatcccccggatactacgatggcaggtactggaccatgtggaagctgcccatgttcgggtgcactgacgccacccaggtgc

SEQ ID NO: 400222 - DNA, 432 bp, Oryza sativa nipponbare
ccacgcgtccgcggatacaaaattattttattccacaataattgatgtaaataggagaaaagacactgtgcttagctatatttagcttgtcatccattctagttatattcctaattggaattcaatcctaaaaaagagttcaatctttgcagtgtggagtacaatgcatcgtacgcgtaccactcccttttcgcctactttgatcgtgacaacgttgctcttaagggattcgccaaattcttcaaagaatccagcgatgaggagagggatcacgcagagaaactcatcaagtaccagatcatgcgtggaggcagggtgcggctccagtccatcgtcacacctttgacagagttcgaccatcctgagaaaggggatgcctagtatgctatggactgggccatgtctcacgtagagcttgttaaggagcactga

SEQ ID NO: 400223 - DNA, 438 bp, Oryza sativa nipponbare
ccacgcgtccggcagagcgaggtagacatggccgccgccaccatggccctctcgtccccggcgctggccggcaaggccgccgcgaaggtgttcggcgaggggcgcatcaccatgcgcaagtcggcggcgaagcccaagcccgccgcgtcggggagcccgtggtacggcgccgaccgcgtgctctacctcggcccgctctccggcgagccgccgagctacctgaccggcgagttccccggcgactacgggtgggacaccgcggggctctccgccgacccggagacgttcgccaagaaccgggagctggaggtgatccactccaggtgggcgatgctcggcgcgctgggctgcgtgttcccggagctcctcgcccgcaacggcgtcaagttcggcgaggcggtgtggttcaaggcggggtcgcagatcttcagcgagggc

SEQ ID NO: 400224 - DNA, 367 bp, Oryza sativa nipponbare
ttttctcttgcatgttccgggccggaatttccttgtcgccccacgcgtccgcgattcaagactggcttcttacgtcgccgggcaaatcgatcgcaccctgagctggaaggatgtgaagtggctgcataccatcaccactctgccgatcctgttgaatggagttatctctgtataagacactaggctcgtcgtggtgaacggctcggtcgttattatcgtttccaaccactgcgcccgtcagctggactacgttccggccaccatcagcgccctcgatgaggttgtgaaggcggctctcggtcagctccccgtcttcctagacggcggcgtccgccgctgcaccgactttttcaaggcgctcgtcctc

SEQ ID NO: 400225 - DNA, 440 bp, Oryza sativa nipponbare
tcgctacaaatctccactcagatgatggaaatacacagtgagcacgacaagcgttcaattatgcatgcagttgtgtcatatcacaaaggttctaggtacaggaatgttttcatggctggccaatcgatcgatgatcatcatcagatcatcaccatttccagaagacgttggatccgcacttgtacttctccttcccctcgcactcgatctcgagatcatctgagatgaatgggactttcttctgcttggcgaggtcctggcagccggtgaagttgtaggggaactggcagctgccgaactcgacggtgtacgccctcgcgaagttggcgccgctcgtcgccagcctcttcttgtcgttcagctccttgttggccttgctcttctcgaggtactcgtcgaacacgccggccttggcctgcccggcggcgggggcggtgaac

SEQ ID NO: 400226 - DNA, 579 bp, Oryza sativa nipponbare
  unsure (1)..(579): unsure at all n locations
gtatgtaaatattatattattgtaaatcattttgaggagctagactagcgtgccttattaacaaggagatatgtaccattacatgatgattaacatataaatctgtagctacatggaattaaggtagtggagcagaggaggaaggatgatagaagactccaattctccatggatgggaatgggatcaggtggccttgcagaactctccgcccagatcgtcgcacgcctcctcggggaacaccgtggtgggctcgtcgtaggataggtagtccctgtcgacttcctccgccgccgcacgagaaacagcaacagcagccgatgatgagagcttggcctctgggtacatctgcacgttgcacgcctcgccgccgatgaggtcgcacgcctccatcggaaacaccgagatgttagagctgtagtccaccttcgcagnctncactgncaacgncggcggcgncggacggacgcgcaacgaaacacggcgaggagcctgaatctgaggctgcgccccttacagcagcggcaacacggcgacatccacgacactgtagcagggctgatctcttctctctttctctc

SEQ ID NO: 400227 - DNA, 551 bp, Oryza sativa nipponbare
tacgtgataccatccatttttgttattgtcgacgaatttatcagatatgctctagatacatatcttgtgtgtatatagccggagctttgttttcacatatcctcacccaacgataattgtagtactcttacaataaaaccggccggagagggagggaagagattattacatatgtgttaagagcagaggccattgagatggtacataaccaaactgtaaaataaaaatatatagcatattatatattgatatatcatcaacatagcccaaaacaaagctgcatactattattataggcagcaatccaccagcgcgatgcttgatcttagcttagttgccaccagactcctcgcaacctgggggcttgtaggcgatgaagctaatcaactgcacctgcctgacgttgtcgaagccgatgatacggacaaaggcatcggggtaggccttcttggccttctcgagctcctgagcacctggtgcatcgggcaccgacatggcagtcaatggcaatctgcatgagcccgagaccggttacgaacaatcactgtgac

SEQ ID NO: 400228 - DNA, 584 bp, Oryza sativa nipponbare
aagactaacagactttgtaagggatgatcagtacaaatcagagacatgttgagagttacagcacgccaacaaacatttctacagagttacaaacttcagaagctaatagagcagcatacacggtacaactgaagacaaccacaaaacacaaaccaggttagttcttgcacccaaagcggttcaagattttttttttttgttagctaccctcttttgtcatgtggtcacctggagcaagtcatttccagagcttgacaaacctatcatggcttactgaggcaaccttgcctgttgcgctcgatgctgctagcgctgcaactaaaccatcatgagcactgtggaccgtcatggcgttcttctccctaatgtcccagagttccaaagactcgtagcatccaattactagcaaatatgggtaagaggggtgaaaaacgcatgactggaacttgtttccgcttgaactcaaactcattaacaaattcaccgtcatgtccaggagcaaacgaccatattctgacactatcttcactgacagaagccagattgtcaccggtagaatcccaacaaagtgagtgaatattctt

SEQ ID NO: 400229 - DNA, 451 bp, Oryza sativa nipponbare
acggacgaagcgagcgaacagatgtaacgacattccgaggaagagagcaacatcgagtctacaaatggtacccttcagcttaaggtttaacacaaaacacatagttcattgggcgccaacgatgcgggcgacagaatggtacaccaaaaaccatgcgcagagatcaggtgcttattgtagaatctagagtagccactcaggtaaagacgaaacggctaagagctcgtagagtttcaggcttctggtgctgggagatggaaggtgagttcacacctccaggtttcagccttgaagtccgatgatcccgcaagcaacacggccaccagcgtttccggtggtcttgctcagctcgtgcccaccctttccaagatcatcaggatcggcatgcacaacgacggctctgccaatgattgaatttggtccagtaagtggaatctgacttgtaacaaca

SEQ ID NO: 400230 - DNA, 561 bp, Oryza sativa nipponbare
attgcaaaaacatcatcttcttcttcatcttcttagtgtacacaacaccaactcgatcatcatctcgtcgcactaaacccatcttccccaacccaaagacaacgaactcgctggccacaaatccatccaaccacaattaaccactgctaagctacggtcccccacttcacttgccggggacgaagttggtggcgtacgcccaggcgttgttgttgacggggtcggcgaggtggtcggcgaggttctcgagggggcccttgccggtgacgatggcctggacgaagaagccgaacatggagaacatggcgaggcggccgttcttgatctccttcaccttgagctccgcgaacgcctcggggtcatcggcgaggccgagcgggtcgaaggcgccgccggggtagagcgggtcgacgacctcgccgagcggcccgccggcgatgcggtacccctcgacggcgcccatgagcaccacttggaccgcccagatggcgaggatgctctgcgcgtggatcaggctcgggttgccgaggtagtcgagcccacgcgtccgcggacgcgtgg

SEQ ID NO: 400231 - DNA, 169 bp, Oryza sativa nipponbare
attgcaaaaacatcatcgtctccttcataatattagcgtacacaacaccaactctatcattatctcatcccactaaacccattttccccaacccacatacaacaaactctttcgccacaaatccatccaactcacaattaaccactgctaaactaccatcccccactta

SEQ ID NO: 400232 - DNA, 167 bp, Oryza sativa nipponbare
ggcagacggacgctcaacaagggcaaataagttaagaaaaaccgttttgtcaatatgggactatgacagccatcggtagaatctccaaatgcacacatttgacaaacagaaacagttcatcgactagaaaatcccacgcgtccgcccacgcgtccggggacgcgtgg

SEQ ID NO: 400233 - DNA, 401 bp, Oryza sativa nipponbare
agcggggctataatcgtaagcaccaactgtttacttgatcaatgtcagtatttgccattctttacaatgaactatacaagtatatgcaaaaacatctcgcctaaattgatgtgcttcctacaaattcgccttctccatttcacccaaggggatgaacatacaacgcaattaagcgacaaacaactttgcctgaccgtcgatgaacaggctcatgaactcttccccgtccaccgtctccttctccatcaaaagctgagcaagcttgtggaggatgtcgatgtgtgtcgtgatgatctgcgttgctcttgagtaggccttcttcacgagctccctcaccttagcattcacaacatccgcggtggccatcgagtagtccttctggctcgacatctgctggccca

SEQ ID NO: 400234 - DNA, 451 bp, Oryza sativa nipponbare
tttttcaatcaataatggttacagtattgattccatggagtagtaggattacaacaattaaggacgatgaagagaaaggggtggctggcgatacacatagagaggcaaagcagggggtagcttagttacaacttacaaacgaagctctgatcgatcaagtctgatttgattgatgcagctgaagaagaagaggaagaagacgacgatgatgatgcaatcagctgctgacgtacttgtcgatgatggtggcgagggtggtcttggggacggcgccgatgacgctctccttcttctcgccgttcttgaacatgaggacggtggggatgctccggatgccgtagttggtggcgatgtttggtgagtcgtccgtgttcaccttgcagcacttgatcttgccgacgtactccttggccagctcgtcgatcaccggcgcgatcatcctgcacggtcc

SEQ ID NO: 400235 - DNA, 422 bp, Oryza sativa nipponbare
tatcttaaggcgagatatacagatgccaaataggtgtacagtactcgaaattacaaagattataccagtataattaatcgttgggattaagagcatgaacgacccagttacgaggggtgcacggagtacgtgtgttgcttgcgcgcgtgtggatcgacgagattcttttgcaaaaattacctaattaattaatcggcgtgctctctggcgtcgtcgatattgtttattgtttggctagagttcgccggcggcggcggcggcgaggtcctcacaacctggggaaggggcgggcgaggcggtcggcgtcggtgtagatgtgggcgcgggtgatgtcggcgagcgaggtgcatccgctgagcgccatggtgagctcgaactcctcccgcatcatccgcagcacgttcctcaccccggccttcccc

SEQ ID NO: 400236 - DNA, 585 bp, Oryza sativa nipponbare
ttgaatatgaatatgtgtgtgatgaggaggatatatatatatatatatatatatgtatgtatgacaagtaaagtgagagaaatacagtactagctagtacaccaacagaaacactaggccatctttgccatgacctcctggaggatgatcttggtgtcggcataggaggagccgatctgggtgtcgtccttggtgccgcaggccttctggaggcgctcgaagctgtcgaagaggcgggtggcgaggtcgagcagcggggggcgctggtcgtcggaggcggcggagatgagcttgtcgaagtcgaagtacatgaaggtggacttgaggcggaggtacttggtgacgtagttggccctgtcggcgttgttgcccagcaggtcctccagcgccagcaggtcgaacgccgtgctccgcagcctgtacgcgtgcgccgcgtagctcggcccgatgtcggctatgtaaatgccgtcctcacgaacgtccggctccccgtctcgccattgttcagctccttgttgacaatctttggcaccggcaaagggaactcggggagccaccacccattgtttgcctacattgtccatg

SEQ ID NO: 400237 - DNA, 400 bp, Oryza sativa nipponbare
ttataaatatatatagccggagcttccatatatttcattcacatatgcctcacccaacaacatatagtcgtagcagataccactcttacatcaagtcagagagagatcaggtgaaacaaaaacaaaagcagagcacggccggtaaaatcaaaagacgatgaacaaactgggaacacacgaaacaaggtgggagacatcatcgaatcagagatgaacaattaaacaaggctatatatgacgatgacggcttagttgccaccagactcctcgcagcccgggggcttggaggcgatgaaactgatgagctggacctggctgaccttgtccaaaccgatgataccggccaatgccttaaggtaccccttcttgggcttcttgagcttcttgagcacctgggtgg

SEQ ID NO: 400238 - DNA, 445 bp, Oryza sativa nipponbare
gggaaacgaataaaatcattattgcaaaaacatcatcttcttcttcatcttcttagtgtacacaacaccaactcgatcatcatctcgtcgcactaaacccatcttccccaacccaaagacaacgaactcgctggccacaaatccatccaaccacaattaaccactgctaagctacggtcccccacttcacttgccggggacgaagttggtggcgtacgcccaggcgttgttgttgacggggtcggcgaggtggtcggcgaggttctcgagggggcccttgccggtgacgatggcctggacgaagaagccgaacatggagaacatggcgaggcggccgttcttgatctccttcaccttgagctccgcgaacgcctcggggtcatcggcgaggccgagcgggtcgaaggcgccgccggggtagagcgggtcgacgacctcgccgagc

SEQ ID NO: 400239 - DNA, 434 bp, Oryza sativa nipponbare
gttgaagttcgattgagtatgatagacctttttactaggcaaaccacacgaatacacgattgattaatttcactgagaatagcacgggtacatcacatcacacaaattcatacgttgatacacgcatagtcgccgaagcgaccagctgcttaattaatcgataacacacgggtttaattcagcaataatcagcacacacacaaaccacactcatatgggtggtttttattgtggactaattaaggtaggtgactcgccggcggcgagtgttcggttgcttcgtgacttcacttgccgcacttgcagtcggtgcaggagcagctggtgccgcacttgcagccgccgttctcctcgccggcggcgacctcctcgaagtggctcttctcggcttcaactatgacgacgccatagctggtacctttcttcacgcactg

SEQ ID NO: 400240 - DNA, 627 bp, Oryza sativa nipponbare
  unsure (1)..(627): unsure at all n locations
aaatatatatagccggagcttccatatatttcattcacatatgcctcacccaacaacatatagtcgtagcagataccactcttacatcaagtcagagagagatcaggtgaaacaaaaacaaaagcagagcacggccggtaaaatcaaaagacgatgaacaaactgggaacacacgaaacaaggtgggagacatcatcgaatcagagatgaacaattaaacaaggctatatatgacgatgacggcttagttgccaccagactcctcgcagcccgggggcttgtaggcgatgaagctgatgagctgcacctgcctgacgttgtcgaagccgatgatacggacgaatgcatcagggtacgccttcttggcctcctcgagctccttgagcacctgggtggcgtcagtgcacccgaacatgggcagcttccacatggtccagtacctgccatcgtagtatccgggggatcttgtgttcttacggtagacgaatccgaccttgctgaactcgaggcagggcacccacttggaacggagcaggtactcgatctgcttcaggaggtcctncacggtgagcggtggcaggtaggagagggtctcgaacttcttgatgccctcaatcggcacacctg

SEQ ID NO: 400241 - DNA, 469 bp, Oryza sativa nipponbare
ttaaatatatatagccggagcttccatatatttcattcacatatgcctcacccaacaacatatagtcgtagcagataccactcttacatcaagtcagagagagatcaggtgaaacaaaaacaaaagcagagcacggccggtaaaatcaaaagacgatgaacaaactgggaacacacgaaacaaggtgggagacatcatcgaatcagagatgaacaattaaacaaggctatatatgacgatgacggcttagttgccaccagactcctcgcagcccgggggcttgtaggcgatgaagctgatgagctgcacctgcctgacgttgtcgaagccgatgatacggacgaatgcatcagggtacgccttcttggcctcctcgagctccttgagcacctgggtggcgtcagtgcacccgaacatgggcagcttccacatggtccagtacctgccatcgtagtaatccgggggatct

SEQ ID NO: 400242 - DNA, 427 bp, Oryza sativa nipponbare
gattttcaatcttccatgttagcctccaaaccatagcagaacacattcagacttgcctctctttattcacccattgatgaagcaaaatgataactttaacactgaatacgaccatagaaaggcacataaacacaaccacaaacttaaagcacgaaattactctcacggactcaaacgccacgagaatttggacatttctgcggctctcattatttaattatcactcactctaggtgggatatactggatagaggcagtattcctcttcatcttaggcgtattcggcagggtgagcgacgaggtagtcctcgatcatcttgagcatgccatagtagccatccacgatgtccttctccttctccggcgacagtgagctgccgtcctcgagctcgtactccaccttgagcttggccacacaggagccatc

SEQ ID NO: 400243 - DNA, 208 bp, Oryza sativa nipponbare
tgatgacagacagaaattaattaagctagaaatctcctcgatcgatcacacacacacacacaattaaggtacatacatacatgcactgctgcaactgcaactgcagggtcggtgcgtggctactacaagtgtacacatggtacgttggttggcaccatctcgatcgtgtcgttgtgctcacttgcctgggcatacgccggacgcgtgg

SEQ ID NO: 400244 - DNA, 385 bp, Oryza sativa nipponbare
cggaccgggaccaaattttatggatcaacaacaaacattccaaacaatgagatggctggattattacagagctggaccaaacaaaacaaaacacttagctggggccagtcgagcgaccacacctgccggcccctccatcgatcagaggcgccttttattattccataaacctccctcactcatatgtagagatagacagatagatttgatttgatcaccagggaacaatcttccagcgctggttgtcaccctggcaccactcccagagcaccagggtggttccgtcgcgcacgccgccgtggtccttgtctccatggagcgcgtcaaagttgaggtagatgttgttcaccatcctgatgcaccgaaacccactcccaacgtccct

SEQ ID NO: 400245 - DNA, 426 bp, Oryza sativa nipponbare
aacgcaaaactttgcagtaaccaaatcgattcacaggccacacatacaggtagtatacagattcgtctacacacaaggttattgcagaggcaaaacacgaggtatgtatatcaaacgctctagaaaagattcatgtgatgaaatacatgatgaaccacgtatgttctcaaggtaaaattaattaatgcagtatagttttaactttgtccatcgatctcaacctgtaactgtgacgacacactggctacagtgccctcgaggtactagcagtatagcagtagctgtagtacgtagcagcagcagcagcaggttcactgtcttgattggattggatcggattagtagacgtagttcttgacgaacatgccctccttggcctcggcggcctcgccgtcgctggtgtacttgccgagctgcgccagcgag

SEQ ID NO: 400246 - DNA, 442 bp, Oryza sativa nipponbare
tttaattcacaacaccatattggattgatcaggttcagaacctgcacagaaatacacactaccggtacagatctcaccctctctccaatactcgtacatccatccacgcggtccacacgaatacgtacatctatacggtacacgtacgtacatctactgcaccgcgtacacacacgcacactctcctgcagagacgcgcatcgtcgtcaacctagctagcttagctgaaggcgatgcgtcgccatggcagcacggcggcggcggcgctcacttgccggggacgaagttggtggcgtaggcccaggcgttgttgttgacggggtcggcgaggtggtcggcgaggttctcgagggggcccttgccggtgacgatggcctggacgaagaagccgaacatggagaacatggcgaggcggccgttcttgatctccttcaccttgagc

SEQ ID NO: 400247 - DNA, 420 bp, Oryza sativa nipponbare
aattatcattgttaaaactttgtctttccattttaaattatctgcaaagtaagaaagtaacactcccaagttacaacagcacaccatccatatatccatgcaggcagcctgtttgtgcccttgtgcagatgcatttcatttatacaagtagaaggcactcaaatcagccaccacatgaacacacacatgttccatcatcgatcgatctacacatgcatcacccggtcatgcacttacaaacaaaagatctacttgaagaagtacgggaggtcgagcacgtagaggaggaagtaggcccagaggacgccggagatgccgccgaagaagaagccgccggtgaacttggcccagccgtcggcggtctgcagcttgtcggcctccttcttgcggccggtgagcgtcagcgtcggcgccgtggac

SEQ ID NO: 400248 - DNA, 429 bp, Oryza sativa nipponbare
taatctaacatacgcaaactgatattatcacaatgttagccgatgacaatggaaagagtaatctaggtacaagcggatcattgacggtggagacaagacattggctgcaccacaacacccaccagtggcgccaacaaggagcgctatccgttataggacgagagaaaaagtaaaacatcacgatgtgaagtgaaactgaataattctagtagacgatgatgatgatggataggctccttaggacgcccgccgcccttagcgtcttgctgctcccatcttgtccactggaaggctcactcgtcatcgtcttcatcctcttcgctgccctcgtcgtcatcctcatcattgacctcggacttggacttgtcagattcctcctcgtcgtcctcctcttcctccttggccggtgccttcttggcagtgctctcg

SEQ ID NO: 400249 - DNA, 567 bp, Oryza sativa nipponbare
acccaaaacatgtatatatttacatattatattacatcttctcttgtgcccacatcagaaagaccaaagttaattttggttatttcttcatctcagcaggcgaacatacaccattccttggattgcagttgcagcggcgctgcagaaagtcgatcacgagttgttcttcttcgacgaagcacaggtagaaagatctcttcatccttcactggccattgacctgacactgaagtagcgaactaacacgacgaattgctactgatatctgtagcttctaccgtgaccatattacggtgtttagcttatccctgaatcgcgcgggcgagctgcccatagcgagctcagcgctcggaagcgctggaagtagtcccccagcgcgaggagccccctcgccgcctgccgcgtcgtcaggatcctgtgcatctcctgcagcgtctgctgccggagatgatctgggtaacgaacttggacgagggatctgagctgctccacggcgttggccatgtgcaccatgtaggcctcgggggagtcgaacgggtcggccgccgtcagggagtccgcgatcgt

SEQ ID NO: 400250 - DNA, 394 bp, Oryza sativa nipponbare
gaggaaaacagattctgctatttcataatctgagcatgaacactctattaagctttcagaaataaaggtacaatcggctaggctattacaaaactgacaaggtataacggatccatcccttgcacatgaattacgactgggcataggttctgcactaattcaacttctcaattaattcattgattttatcttcgcgggtccctgagtcaccaccatccttgaagggtttcttcttcatctgcaacctcctctctggacacttgagcttgaagggcatgaggaaatttgaagcttctctgaagtgtgggccaactgatgcgatttcatgcacaagatcttccaaacatatgatgccatattctcccagagccttctcaatgagatcattgctggt

SEQ ID NO: 400251 - DNA, 583 bp, Oryza sativa nipponbare
tgacagacagaaattaattaagctagaaatctcctcgatcgatcacacacacacacacaattaaggtacatacatacatgcactgctgcaactgcaactgcagggtcggtgcgtggctactacaagtgtacacatggtacgttggttggcaccatctcgatcgtgtcgttgtgctcacttgccggggacgaagttggtggcgtatgcccaggcgttgttggcgacggggtcggcgacgtggtcgaagaggttctcgatggggcccttgccggtgacgatggcctggacgaagaagccgaacatggagaacatggcgaggcggccgttcttgagctccttcaccttgagctcggcgaaggtgtcagggtcgtcggcgaggccgagcgggtcgaaggcgccgcctgggtacaccttgtcgaggccctcgccgagcgggccgtcgccgacgcggtagccctcgacgaatccatgagcaccacctgaaccgcccagatggcgaggatgctctgcgcgtgcaccaggttggggttccccaggtagtcgagccccccctcggagaagatctgcgcgccggccttgaacc

SEQ ID NO: 400252 - DNA, 422 bp, Oryza sativa nipponbare
ggaaagggaaaccagaggtatcaagtttggtctgagtatagtattacatataagtatcgtttttgacgatttgtacaatatatttattacgatgtgtatgtgcatatgattagcctggtgctagcattcacatatgcatgctcttcaacctatgttgatacatacatatgtacatacatacacagctgatgttgacacaaacaagatgaaaaaaaaaaactgaagcaacaaactgggaaaggggaaaccaatgcaagggggcccgattcgaacgttcaaagctgccaaaaccgaatagatcaatcgagtctcctttgtatagagctcacgagtgagcttgctggcttgccaactagcttagtttccgccggactcctcgcaacccgggggcttgtaggcgatgaagctaatcaactgcacct

SEQ ID NO: 400253 - DNA, 444 bp, Oryza sativa nipponbare
ttttgttcgatggagtaagtggattatatgtatgtaaatattatattattgtaaatcattttgaggagctagactagcgtgccttattaacaaggagatatgtaccattacatgatgattaacatataaatctgtagctacatggaattaaggtagtggagcagaggaggaaggatgatagaagactccaattctccatggatgggaatgggatcaggtggccttgcagaactctccgcccagatcgtcgcacgcctcctcggggaacaccgtggtgggctcgtcgtaggataggtagtccctgtcgacttcctccgccgccgcacgagaaacagcaacagcagccgatgatgagagcttggcctctgggtacatctgcacgttgcacgcctcgccgccgatgaggtcgcacgcctccatcggaaacaccgagatgttagagct

SEQ ID NO: 400254 - DNA, 410 bp, Oryza sativa nipponbare
tcttggtgaaccaatataagatgcatgattagaaatcaaagtgagatcgacgaatcgagagaaaattcgctacaaatctccactcagatgatacaaatacacagtgagcacgacaagcgttcaattatgcatgcagttgtgtcatatcacaaaggttctaggtacaggaatgttttcatggctggccaatcgatcgatgatcatcatcagatcatcaccatttccagaagacgttggatccgcacttgtacttctccttcccctcgcactcgatctcgagatcatctgagatgaatgggactttcttctgcttggcgaggtcctggcagccggtgaagttgtaggggaactggcagctgccgaactcgacggtgtacgccctcgcgaagttggcgccgccggacgcgtgg

SEQ ID NO: 400255 - DNA, 454 bp, Oryza sativa nipponbare
atacgcaaaactttgcagtaaccaaatcgattcacaggccacacatacaggtagtatacagattcgtctacacacaaggttattgcagaggcaaaacacgaggtatgtatatcaaacgctctagaaaagattcatgtgatgaaatacatgatgaaccacgtatgttctcaaggtaaaattaattaatgcagtatagttttaactttgtccatcgatctcaacctgtaactgtgacgacacactggctacagtgccctcgaggtactagcagtatagcagtagctgtagtacgtagcagcagcagcagcaggttcactgtcttgattggattggatcggattagtagacgtagttcttgacgaacatgccctccttggcctcggcggcctcgccgtcgctggtgtacttgccgagctgcgccagcgagttggccttggcgcggaggagcagcgcg

SEQ ID NO: 400256 - DNA, 548 bp, Oryza sativa nipponbare
taatatatatagccggagcttccatatatttcattcacatatgcctcacccaacaacatatagtcgtagcagataccactcttacatcaagtcagagagagatcaggtgaaacaaaaacaaaagcagagcacggccggtaaaatcaaaagacgatgaacaaactgggaacacacgaaacaaggtgggagacatcatcgaatcagagatgaacaattaaacaaggctatatatgacgatgacggcttagttgccaccagactcctcgcagcccgggggcttgtaggcgatgaagctgatgagctgcacctgcctgacgttgtcgaagccgatgatacggacgaatgcatcagggtacgccttcttggcctcctcgagctccttgagcacctgggtggcgtcagtgcacccgaacatgggcagcttccacatggtccagtacctgccatcgtagtatcccgggggatctgtggggtctcacggtagacgaatccgaccttgctgaactcgaggcagggcacccacttggaacggagcaggtactcgatct

SEQ ID NO: 400257 - DNA, 462 bp, Oryza sativa nipponbare
tgggaaacgaataaaatcattattgcaaaaacatcatcttcttcttcatcttcttagtgtacacaacaccaactcgatcatcatctcgtcgcactaaacccatcttccccaacccaaagacaacgaactcgctggccacaaatccatccaaccacaattaaccactgctaagctacggtcccccacttcacttgccggggacgaagttggtggcgtacgcccaggcgttgttgttgacggggtcggcgaggtggtcggcgaggttctcgagggggcccttgccggtgacgatggcctggacgaagaagccgaacatggagaacatggcgaggcggccgttcttgatctccttcaccttgagctccgcgaacgcctcggggtcatcggcgaggccgagcgggtcgaaggcgccgccggggtagagcgggtcgacgacctcgccgagcgggccgccggcgatgc

SEQ ID NO: 400258 - DNA, 445 bp, Oryza sativa nipponbare
ataattaattcacaacaccatatttcattgatcaggttcagaacctgcacagaaatacacactaccggtacagatctcaccctctctccaatactcgtacatccatccacgcggtccacacgaatacgtacatctatacggtacacgtacgtacatctactgcaccgcgtacacacacgcacactctcctgcagagacgcgcatcgtcgtcaacctagctagcttagctgaaggcgatgcgtcgccatggcagcacggcggcggcggcgctcacttgccggggacgaagttggtggcgtaggcccaggcgttgttgttgacggggtcggcgaggtggtcggcgaggttctcgagggggcccttgccggtgacgatggcctggacgaagaagccgaacatggagaacatggcgaggcggccgttcttgatctccttcaccttgagc

SEQ ID NO: 400259 - DNA, 402 bp, Oryza sativa nipponbare
ggggggagagaatatcagcccatgttaaccactagtaagtatatattccagggtaaaacaggtaaaacctgtgatacaaagcagtcacataactgaaaaagcgcacgatagtttgtgctactacaacagtaaaccaggacagaacacatccaacacgatgacgacgaggtcatgggggtttcgacgatagcaatactggcagtacgaattcgaggtgccgcacaacggcgcaccacattcactttagcagggttttaacgatggatttgacattgagcttcttgaggtcagtgtaagactgaccacagccaacgaacatgactggagctccagatatataaaccattgaaagtgcagctccaaccttgtcgtcgatggtgtcaaacttggtgagcaggatgc

SEQ ID NO: 400260 - DNA, 493 bp, Oryza sativa nipponbare
agcaaatcgatccatgcgaccatgcgtgcaaatcagttggagcacaaatttacatgttacacccacaccctacacccatgcataataatacatcgtatatacgtacgtacatacatacccctctcgatcacacgcaccatcgatcgtacaaagttgcgtacatacatacgtacacacatatacgcatacgcacgtacatacatacataattaaaaactcgtaattaattaaatacgtagttgatggcatctctaatggaacttgaggctggtgaggatgttgttgtggacgggatcagcgaggtgatcaagcaggttctgcacggggccaaccccggtgaagagcgcctggacggagaagccgaggaaggcgagcatggcgagcctgccattcttgatctccttgagcttgagctccttcatctccgcctcgctcttggtcccgaaagccagcgggttgaagagcgggccgccggggtaggccggctcgccgg

SEQ ID NO: 400261 - DNA, 444 bp, Oryza sativa nipponbare
aaaaaggtaaactcttcataataatattattaagacattatagctgatgtcttttgatcacactgcgatcaaattatgcatcataggcagtacaactccgcgtcaggaaaaagtagaggagatatatttcttgttattacttaatacagcattcacatatatcgaaccatccggtacgtacgtagtagtactccacgcgttcacatcgatgatcggggacgatatcctcaggtagtacttatgcaaaagcgttggcgtaaactgacgaactgaacggacggacggtcggatttagggctcccataagtccaagttgccggagacgaagtcgtagtggccgccgacgagcttgagggtgccgttggcgatcccctccttgacgaacgggtaggtcttgaggttctccagggattggttcacggcctccttctccaagatggcgca

SEQ ID NO: 400262 - DNA, 546 bp, Oryza sativa nipponbare
tcacatccatctcgtaccctttgtataaatatatatagccggagcttccatatatttcattcacatatgcctcacccaacaacatatagtcgtagcagataccactcttacatcaagtcagagagagatcaggtgaaacaaaaacaaaagcagagcacggccggtaaaatcaaaagacgatgaacaaactgggaacacacgaaacaaggtgggagacatcatcgaatcagagatgaacaattaaacaaggctatatatgacgatgacggcttagttgccaccagactcctcgcagcccgggggcttgtaggcgatgaagctgatgagctgcacctgcctgacgttgtcgaagccgatgatacggacgaatgcatcagggtacgccttcttggcctcctcgagctccttgagcacctgggtggcgtcagtgcacccgaacatgggcagcttccacatggtccagtacctgccatcgtagtatccgggggatctgtggttctcacggtagacgaatccgaccttgctgaactcgaggcagggcaccca

SEQ ID NO: 400263 - DNA, 376 bp, Oryza sativa nipponbare
ctctctagcaacaaacgtgtaaatgcccccaaaatacaccatcaccatgactccatgcttagccacaatttcacaggttttgttccagccaggggcccctttttttttttttgggaggacccccgacatacacatgattttgaagctttactgacctaaacacagggggaagttcatgaccaaatgggtgggttaattcactccattgctactgggggcttaatttgatgaatacacagactcgacttattttttttttttagctgcatgaccccatgggtggaagaaacgaaacctattactgcccttaacacagtttcctccattaaagctttttcctaaagcagtttttgataaaagggccacaccccatgcc

SEQ ID NO: 400264 - DNA, 447 bp, Oryza sativa nipponbare
  unsure (1)..(447): unsure at all n locations
ttataattaattcacaacaccgtatttcattgatcaggttcagaacctgcacagaaatacacactaccggtacagatctcaccctctctccaatactcgtacatccatccacgcggtccacacgaatacgtacatctatacggtacacgtacgtacatctactgcaccgngtacacacacgcacactctcctgcagagacgcgcatcgtcgtcaacctagctagcttagctgaaggcgatgcgtcgccatggcagcacggcggcggcggcgctcacttgccggggacgaagttggtggcgtaggcccaggcgttgttgttgacggggtcggcgaggtggtcggcgaggttctcgagggggcccttgccggtgacgatggcctggacgaagaagccgaacatggagaacatggcgaggcggccgttcttgatctccttcaccttgagc

SEQ ID NO: 400265 - DNA, 422 bp, Oryza sativa nipponbare
gtataaatatatatagccggagcttccatatatttcattcacatatgcctcacccaacaacatatagtcgtagcagataccactcttacatcaagtcagagagagatcaggtgaaacaaaaacaaaagcagagcacggccggtaaaatcaaaagacgatgaacaaactgggaacacacgaaacaaggtgggagacatcatcgaatcagagatgaacaattaaacaaggctatatatgacgatgacggcttagttgccaccagactcctcgcagcccgggggcttgtaggcgatgaagctgatgagctgcacctgcctgacgttgtcgaagccgatgatacggacgaatgcatcagggtacgccttcttggcctcctcgagctccttgagcacctgggtggcgtcagtgcacccgaacatggg

SEQ ID NO: 400266 - DNA, 432 bp, Oryza sativa nipponbare
attataagaagagattatatcccaccatcgatcgattacaccatcatcaataactgaagagcagcctgacagatgattaaaattacatgtccatccacccaaaacacaagtaattaataggtcgattatgagagaagaagaagaagaagaagaagtctagatgtcgaagacgttcttgccggtgaacttgacctcgatggggctgacgttcttgccgatgctgcggaagttctggccgacgccctgcctgccggcgttgaccttctccgggtagacgccgtccttggggtggaggtactgcacctcgccattggggaagacgcggtagaactggtagttgatcttgtacttggagcggagcctggtgcccagggccaggcactgctccttcctggccagcttcagcaggttggggccctcgcgcatgatggc

SEQ ID NO: 400267 - DNA, 413 bp, Oryza sativa nipponbare
ccacgcgtccgatcaatctctatattacttaaaatacatactttttttctaaggaaacagaacaaggcaagacgtctggtcttccataacatcaatcctccttaccgcccctctattaccacctacatttacagtctttgcggtagctgccacatcaagtgcggttgtagcagcttcttcttctgcaatgacatgtccagcatgaatccccaatatgattatttattcaagttacttctgattgactacttataggttgtaaagtcttgcctccttcttaggttagcagatgatacatatacagaaagctacatcaatacaattgatttgtattacaaaataataactatagagttagatcgtaaaacaatcaatctttaaatatagtacacaccatgccaataaatatttca

SEQ ID NO: 400268 - DNA, 385 bp, Oryza sativa nipponbare
aaaagggcaaaccagtaatcaacattcaacaccgttttgttctcatggtacttggtagtcgggttaaactgataacagtttgtaagcccaaaatttaccaaaaaatgatccaaagaacaataaatggggggatcatttggtgtcaatggctcaaagccccaaggaagcttttgggctaaagattttgtttatcaaaagcaattgctcgactatgtacacctggactgttgttatgttttaggtaaggacagcttgaccgaaccaaccagtttttaaaggcctaaacgcttttcgagcttttggatctcatttaggaatatccaagtcatcatggcatgtggggcaatcctgacacagtacacaggaaagccagtgtagaacttaa

SEQ ID NO: 400269 - DNA, 423 bp, Oryza sativa nipponbare
gcaatcacgaagagaccgtatggtattaatttgttcgtttagtataaaccgccaataatccaataaaccatttaattaggtacaggtgatcaatcactcgacaattaacaaaagtacatgacgcagcatcatccaaaattatagaactttgcatcttccaatcttttcttcggcagctactaccttcttcttcattcccggccgatcatccgtcggccggcaaagcgtgtcgcggcggccggccggtgatcgatcgacggcgacaagttcgccgtcgttgttgtttacaagcgagacggcatgacgccgagcttgtcggcctcggtgatgacgtggttgcgggtgatgtcggcgagggaggtgcagccgctgagcgccatggtgagctcgaactcgtcgcggagcatctgcagcacgttccgg

SEQ ID NO: 400270 - DNA, 437 bp, Oryza sativa nipponbare
agatcagaatgaacaggttttcaaatgcatctcccaactcgacgataatttacacgtacatttaacacattcttccacccttctcaaactcctcccttcttcttcccgggtaagattaaaattaacttgaggccagccagcgtcgccggcggcgagatgtttacaggctgggcgtcctctcggcggcgccggagatgacggtgagcaggttgttgccgaaggggtcgctgaggtgcttggagaggttctcgacggggccctcgccggtgacgtaggcctggatgaagaaccccagcatggagaacatggccagccgcccgttcttgatctccttcaccttcagcagcgccgcctggtccgggtcgctcgccagccccagcgggtcgaatgggccacctgggtggagcttgtcctccagatccaggcccgtgatgatc

SEQ ID NO: 400271 - DNA, 438 bp, Oryza sativa nipponbare
ggagcacagaatcaaacggatcaataccaatctgcagaaacacattatatacactagtcagtgcaatcatacagatataagtatcatggtcagacgacacatcaagcgacacaagcagtcaacctcaggtcgcacacatatataacattgctcaaacacctacatatatgttttaattacaagaacctgaatactaccccatccttggattccatattggaaccttgatctaacagacgaagccagaggccacggcaactcttttgtgtacatgcgatcaatgaacgggagaaactggcaggaaacacagcatgcacgataatctcttgattgtataaactgtttaattggcgaggtgcatgcactggcaaacttatgcacaggacacctgcgctttctgctcatgcacttccttcctgctgaacagtagagccactg

SEQ ID NO: 400272 - DNA, 448 bp, Oryza sativa nipponbare
agattctgctacagcctcctctccacaaatcctgggagaagctggaactaccttggaaaagattatacactgtttttacttttacacattgcagcctcctgggtcaagctaacagactccaggcagcagaacagactccccccagcttacagaacttggtgggggtgttgttccggtttctgcggctgcgaagaattagggttgtatttacaatgaattgaattaggttggacaacattgtacaatgatgcggtggggctgttaagattgtcgaagtactgtcaccgcctcgagctgccaccccgggtggcgagggcgaatccgccacggtcgtacatgcgctgaatctcctcccggtaattggggagcgactcgtgaggaagggccggtgtcagctccaccacatcccccatgctgagcttccggttcagatcgcttatgggctcgt

SEQ ID NO: 400273 - DNA, 447 bp, Oryza sativa nipponbare
ccacgcgtccgccacgcgtccgccacgcgtccgccgaggagcgggcgatgtcggactccgaggagcaccacttcgagtcgaaggccgacgccggcgcctccaagacctacccgcagcaggctgggaccatccgcaaaaatggctacatagtcatcaagaaccgcccctgcaaggttgttgaggtttcaacctctaaaactgggaagcacggtcacgccaagtgccactttgttgcaattgacatctttactgccaagaagctcgaagatattgtgccatcttctcacaactgtgatgtcccgcatgtgaaccgtacggagtaccagctcattgatatatctgaggatggatttgtgagtctgttaactgaaaatggcaacaccaaggatgacctcaggctccctactgatgataacctgcttagtcagatcaaggatggatttggag

SEQ ID NO: 400274 - DNA, 386 bp, Oryza sativa nipponbare
ccacgcgtccgcccacgcgtccgcaccccaccagcagcagcagcagtagctgagcttgaagcagcagagcgaggtagacatgggcgccgccaccatggccctctcgtccccggcgctggccggcaaggccgccgcgaaggtgttcggcgaggggcgcatcaccatgcgcaagtcggcggcgaagcccaagcccgccgcgtcggggagcccgtggtacggcgccgaccgtgtgctctacctcggcccgctctccggcgagccgtcgagctacctgaccggcgagttccccggcgactacgggtgggacaccgtggggctcttcgtcgacccggagacgtttgccaagaaccgtgagcttgtggtgatccactccaggtgggctattt

SEQ ID NO: 400275 - DNA, 366 bp, Oryza sativa nipponbare
ccacgcgtccgcacacggtaccctcctctctcctcctccgaccaccatggccatggccacgcaggcctccgccgccaagtgccagctgctcgccgcctgggcaccggcgaagccgcgctcatccaccctctccatgcccacctcgagggcacccaccttcctcatagcggctgtggaggatcagcccgccgcggcggcgacggaggagaagaagccagcccccgcggggttcgtgccgccgcagctggaccccaacacgctctccctgatctttggcgggagcacggtgggactccttctgaaggcgcatgtggaggagttctactatatcacatggacgttgtccaaggtgcatgtgtttgagat

SEQ ID NO: 400276 - DNA, 447 bp, Oryza sativa nipponbare
ccacgcgtccgcaccgacaccaccaccctcttcatcatcgagctcatcctcatcggctgggccgagggccgccggtgggctgacatcatcaagcccggctgcgtcaacaccgaccccatcttccccaacaacaagctcaccggcaccgacgtcgggtaccctggtggtctgtggtttgacccgctcggctggggcaccggctcgccggagaagatcaaggagctgcgcaccaaggagatcaagaacgggcggctcgccatgctcgccgtcatgggagcttggttccaggcagagtacaccggcaccggcctcattgacaaccttttcgcccatctcgccgaccccggccacgccaccatctttcaagccttcacccccaaatgaggagttcttcaggtgttggagtggtagcaatggctgccaatggaggaagatgaaaagactgtt

SEQ ID NO: 400277 - DNA, 428 bp, Oryza sativa nipponbare
gccacgcgtccggaaaaacttaatgtccaagttactgatgtgaagaatgcgatcatctggggcaaccactcagtccacccagtaccctgatgttaaccacgccactgtgaagactcccagtggagagaagcctgtcagggaactcgttgctgatgatgagtggttaaatacggaattcatctctaccgtccagcagcgtggtgccgccatcatcaaggcgaggaagcaatccagtgccctatctgctgccagctctgcatgcgatcacattcgtgactgggttcttggcactcctgagggaacttttgtctccatgggtgtgtactctgatggttcgtatggtgtgcctgctggtctgatctactcgttcccagtaacatgcagtggtggcgaatggactattgttcatggtctcccgatcgacgagt

SEQ ID NO: 400278 - DNA, 403 bp, Oryza sativa nipponbare
cgtccgggacggaggacttgcgggacgacgccctctagcccgccgacctctacagccgcaagctcagggtcgtcgacgtcggcggcgggacggggttcaccacgctcgggatcgtcaagcgcgtcgacccggagaacgtcacgctgctcgaccagtccccgcaccagctcgagaaggcccgggagaaggaggcccttaagggcgtcaccatcatggagggcgacgccgtggaccttctcttccccaccgacaccttcgaccgctacgtctccgccggcagcatcgagtattggcccgatccgcagtgagggatcaaggaagcttacagtgttttgaggcttggtggagtggcttgcatgattggcctcgtgcacccaaccttctggctgtctcgctttttcgc

SEQ ID NO: 400279 - DNA, 432 bp, Oryza sativa nipponbare
ccacgcgtccgctctaatctcaatcagggaagaaattgcagagatagaaagtggcaaagcggatgtgaacaacaacgtcctgaagagtgctcctcacccgccccaacttctgatgagcgactcatggactaagccgtactccagggagtatgctgcgttccctgcagcgtggcttcggggcgccaagttctggccaacaacatgtcgcgtggacaatgtgtacggggatcgcaacctcatctgcactctgcaacagggatcccaagtcgcagaagaagctgcagctgctaccgcatgacgatcttccgataatcacccagatttgttgaacagtaccaagatggcataatgcttcctgtaggagggaagcatatgctctcttctcgttcagcttcccaacttgtatatagctttgtgacagctcctgattct

SEQ ID NO: 400280 - DNA, 442 bp, Oryza sativa nipponbare
ccacgcgtccgtggaaaaattggcagtgtggctttagcggacttgctgaaaaagaagcttttggaagaaggccgaaaaccatatgttattcctgttggtggatcaaactctctaggaacttggggatatatagaagcaataagggagattgaacatcaaattcagatatcaggtgatgttcagtttgacgacattgttgttgcatgtggcagcggtggaaccattgctggtcttgctttaggatcaaaattgagtagcttaaaggcaaaagtccatgctttctctgtttgtgatgatcctggatatttccattcctatgttcaagacctgattgatggacttcattctgatttgcgttcacatgatttagtcaacattgaaaatgctaagggcttaggttatgccatgaacacagctgaggagcttaagtttggtaaagata

SEQ ID NO: 400281 - DNA, 297 bp, Oryza sativa nipponbare
ccacgcgtccgcccacgcgtccggtggcaactaagccgtcatcgtcatatatagccttgtttaattgttcatctctgattcgatgatgtctcccaccttgtttcgtgtgttcccagtttgttcatcgtcttttgattttaccggccgtgctctgcttttgtttttgtttcacctgatctctctctgacttgatgtaagagtggtatctgctacgactatatgttgttgggtgaggcatatgtgaatgaaatatatggaagctccggctttaaaaaaaaaataataaatatataatgg

SEQ ID NO: 400282 - DNA, 409 bp, Oryza sativa nipponbare
tggaactgagaaccaccttgttctctgggatcttcgccctcttggcttgactggcaacaaggttgagaagatgtgtgacctttgcagcattacacttaacaagaatgctgtctttggtgacagcagtgcattggctcctggcggtgtccgcattggtactcctgcgatgacatccaggggtcttgtcgagaaggactttgagcagatcggcgagttcctccaccaggccgtgaccatctgcctcaacatccagaaggagcacggcaagctcctcaaggacctttccaagggcctggtgaacaacaaggacatcgagaacctcaagctggaggtcgagaagttcgccacctccttcgacatgcccggcttcaccctcgacagcatgaagtacaaggagtaggaaaacaaa

SEQ ID NO: 400283 - DNA, 447 bp, Oryza sativa nipponbare
ccacgcgtccgctttaaccagggacaatgttgctgtgctgggtctcgtacatttgtgcatgagcggatctatgatgagttcgtggaggaggccaaggctcgtgctctcaagcgtgtggttggtgatccattcaagaatggtgttgaacagggccctcagattgatgacgagcaattcaacaagatcttgcgctacatcaagtatggtgttgacagtggagccaaccttgtgactggtggctacagattaggtgacaaaggttactacatccagtcaacaattttcttggatgtacaggataacatgaggattgctcaagaagagatatttggccctgtgcagtccatttctgaaggtcaatgttctgaacgaggtcatcaagagggcaaatgcaagccattacgggctggctgctggggtatttaccaacaacctgaacacgggcaa

SEQ ID NO: 400284 - DNA, 452 bp, Oryza sativa nipponbare
cagggatataaacctagcaacaacagaacacttgatgagatttattaccaaggaccctgagggatatgtgccaataacagtaattgccggcttcaataaaataaaagctttagtgcataataattcaatgcttgccgccgctcttcgaacctcatcaaaacttgttgtaagtgatgatggaaaaagagtaaagaggctgcagtcatttactgtatctgatatgcaggacctgcagtcccgaatagttgttgcagaaaatcttcctggtgatccctgttatcagaatcttatgaagatcttttcaactgttggcagtgtgaagaccattcgaacctgttatcctcaatcttcaaatggcaatagtcctgctactaatagatctgccaagctagatatgctgtttgccaacaagctgcatgcttttgtggagtatgagacccttgaagatgctg

SEQ ID NO: 400285 - DNA, 435 bp, Oryza sativa nipponbare
ccacgcgtccgcccacgcgtccgcccacgcgtccgggtaatcgtttcttgaagcgattcgttgttgctgagcctgaggtccaggaacaagaaatagatgatgatttggagtttctgattttggctagtgatgggctgtgggatgtggtgtccaatgagcatgccgttgcatttgtaaaggcggaggagggccctgaggccgcagcccggaagctggcagagattgcttttgcccgtggaagcaccgacaatataacatgcatcgttgtaaaatttctccatgctaagatggccgtagatgctgcctcgtctagtgagcgaagttgatttcttctgttctatttctcttgttcattttatcatcttaatctggagtgctggcatcaatcacggtgcaaccttaactatttggcgtttatatatttgttgttcaatg

SEQ ID NO: 400286 - DNA, 313 bp, Oryza sativa nipponbare
ccacgcgtccggaaggtagtagctactagctcctcgcaataccatggaggacaagctgctgctgctgctggctctggccgtgtcggtgctcgtcgccgtcgtcatctccaagctggtatcatatgccaccaagccaaggctcaacctgccgccggggccatggacgctgccggtgatcggcagcatccaccacctcgtggggagccaccccatccaccgctcgatgcgcgcgctcgccgagaagcacgggcgcgacctcatgcaggtctggctcggcgagcttcccgcggaggtcgtgttgtcgccggaggct

SEQ ID NO: 400287 - DNA, 439 bp, Oryza sativa nipponbare
ccacgcgtccgcccacgcgtccgcagcagttgagctctttttccactacgcactagtagtagcactctggtattctcccatggcgactgcgaccgaggaggttgccgctgcggctgctgccgccggcgaggcgccgccgccgccgccgccagcggtggtagaggaggcgaaggaggctttggaggcaccgaagccggaggaggcgccgaaggctgaggagggggaggagaagaaggcggagggtgagaaggagaaggagaaggcgaagaaggagaggaaaccgagggcgaggaagccccgatcggcggggccacaccacccgccctacttcgagatgatcaaggaggcgatcatggcgctggacgggaacggcaaggcgggatcgagcccgtacgcgatcgccaagtacatgggggagcagcacatgggggttctcccg

SEQ ID NO: 400288 - DNA, 452 bp, Oryza sativa nipponbare
ccacgcgtccgaacaagcctgacttcattgtgatgagcactggctctgaactagagattgtcgccaaggctgctgatgagttgaggaaggaggggaagactgtccgtgtcgtgtcatttgtttgctgggagcttttcgatgaacagtcggctgagtacaaggagagtgttctccctgaggctgttactgcaagagtcagccttgaagcagggtctactcttggatggcagaagtacgtcggaagcaaaggcaaggctattggcatcgacaaattcggtgcaagtgctcctgctggaaagatctaccaggagtatggcatcaccgcggagaacgtcatcgcaacagcaaagagcctgtaagattcaaaccgcgcgttttgagtttttgtcatcgttgatgccaaggaacagtatacatgaagccatgaaggtcttgtgcccaaagcttggaat

SEQ ID NO: 400289 - DNA, 448 bp, Oryza sativa nipponbare
ccacgcgtccgcccacgcgtccgggatcggacccggagagcttgcggtggaacgtgcaggcggagctggtgcactgccggtgggcgatgctgggcgcggcgggcatcttcatcccggagttcctgaccaagatcggcatcctcaacacgccgtcgtggtacaccgccggcgagcagcaatacttcaccgacaccaccaccctcttcatcatcgagctcatcctcatcggctgggccgagggccgccggtgggctgacatcatcaagcccggctgcgtcaacaccgaccccatcttccccaacaacaagctcaccggcaccgacgtcgggtaccctggtggtctgtggtttgacccgctcggctggggcaccggctcgccggagaagatcaaggagctgcgcaccaaggagatcaagagaaccgggctcgccatgctcgccgtcatggg

SEQ ID NO: 400290 - DNA, 425 bp, Oryza sativa nipponbare
ccacgcgtccgcccacgcgtccgcccacgcgtccggtggttaggtggtagaaaaggacaatgttgtcgatagaaaaagctagcacgccgggggccagggggtgtttggtagccatgcactactactagtctactactgctcgcgagtagtacgcattcgatcgatcgatcgatcgatcgagactgcatgtgaaaggggacctggcaacggcacaaatcttgttcacgtaccactacgccaagtagtcgcggataccaaactctaacaaggacggggtaccagccggccaacgagcgaacaggccttgtcaaaaaaaaaaaaaatgttgttcggtttcactctctggagatcgatcgatcgtgtgaggggtgaggctgctgcttctacgcgagcgagacagcgggcattcgggtcggtctcctttt

SEQ ID NO: 400291 - DNA, 417 bp, Oryza sativa nipponbare
ccacgcgtccgcccacacggacacggccacaccacccaccaactgagagctgagcaggcgagcgagcggacatggcagcatcgctccaagccgcggccaccctgatgcagccggccaagctcggcggccgggcctcctccgccgcgctgccatcgcgcccgtcttcgcacgtcgccagggcgttcggcgtcgacaccggtgccgccggcaggatcacgtgctccctgcagtccgacatccgggaggtcgccaacaagtgcgccgatgccgccaagctcgccggcttcgccctcgccacctcagctctgctcgtctcgggcgccagcgcggagggcgtgccgaggaggcttaccttcgacgagattcagagtaagacgtacatggaggtgaagggaaccggcacggcgaaccaatgcc

SEQ ID NO: 400292 - DNA, 421 bp, Oryza sativa nipponbare
ccacgcgtccgccacgcgtccgggacacggccacaccacccaccaactgagagctgagcaggcgagcgagcggacatggcagcatcgctccaagccgcggccaccctgatgcagccggccaagctcggcggccgggcctcctccgccgcgctgccatcgcgcccgtcttcgcacgtcgccagggcgttcggcgtcgacaccggtgccgccggcaggatcacgtgctccctgcagtccgacatccgggaggtcgccaacaagtgcgccgatgccgccaagctcgccggcttcgccctcgccacctcagctctgctcgtctcgggcgccagcgcggagggcgtgccgaggaggcttaccttcgacgagattcagagtaagacgtacaatggggggaagggaaccggcacggcgaaccagtgcc

SEQ ID NO: 400293 - DNA, 447 bp, Oryza sativa nipponbare
ccacgcgtccgcggacgcgtgggtgcgtctttggctgctggtgcttttgatgctgttgtctgcactcaccatgcgcatggtggtaaaggagcggttgatcttggactcgcggttcaacgggcatgtgagagccaggcagaccctctgaaatttttgtatcctttagaatctggcataaaggagaagattgagtcaatagctaagttctatggtgctagcggcgttgaatactctgaacaggcggagaagcagattgaaatgtataccaagcaaggcttctcaaacctcccaatatgcatggcgaaaactcagtactcgttttcgcatgttccatccatgaagggcgcgccgtctggcttcgtgcttcctatcaaggatgtgagggccagcattggagccggtttcatctacccactggttggcaccatgagcacaatgcctggtctt

SEQ ID NO: 400294 - DNA, 327 bp, Oryza sativa nipponbare
ccacgcgtccggagaacctggccagccacctctcggacccgtggcacaacaacatcggcgacatcatcatcccgagaaccatctacccttgagcttggcacgaaccggtgcgtgcgtccgggcgtacgtgaaggctatgggtggtttttatgtgcgtgcgtactgtgtgtgattggttgattattgcgcgcgcgtgcgcacgcagtggtcggccggcaggcagctgctggttggccttgtaatgtaaagcttaagtagagggtgctctcttgtgaatccgtccatcttaatttttgtatcaaacacgaaatcaaactggtcttagtt

SEQ ID NO: 400295 - DNA, 416 bp, Oryza sativa nipponbare
ccacgcgtccgcggacgcgtgggctcgctaggagagctgagcactacttctctgagatgaagcgagtggtcaagggaagagatgcgtgggctcctggagatcttcgtgagtttggccagctgatctctgcatctggtcgcagctccatactgaactatgaatgcgggagcaaggagatgatccagctgtacgagatcctcctgaaggcacccggcgttctcggtgcgcgggtcatcggcgccggcttcagaggctgctgcctcgccgtcgtggagagcggccacgcggaggccgcggcggctttcgtccgggccgagtacgagaaggcgcaaccggagctggtgagcaagatcccgccgggccgccacgtgctggtctgcgagcccggtgaccgcgcccgtgtcatatagctcacc

SEQ ID NO: 400296 - DNA, 436 bp, Oryza sativa nipponbare
ccacgcgtccgctcttctcttctctggtggtgtgggtgtgtccctgtctcccctctccttcctccgctcctttcccctcctctcttcccccctctcacaagagagagagcgccagactctccccaggtgaggattcagccatgaagggggccaaatccaagggcgccgccaagcccgacgccaagttggctgtgaagagtaagggcgcggagaagcccgccgccaagggcaggaaggggaaggccggcaaggaccccaacaagcccaagagggctccctccgctttcttcgtttttatggaggagttccgtaaggagttcaaggagaagaaccccaagaataaatctgtcgctgctgtaagaaaagcagccggtgataggtggaaatccctgaccgaagcggacaaggctccctatgtagcccaggcccacaagct

SEQ ID NO: 400297 - DNA, 447 bp, Oryza sativa nipponbare
ccacgcgtccgactggacatactctactactactagccagtaagctagctaactaactacgtggctatggcccccaccgtgatggcctcctcggccacctccgtggctccattccaagggctcaagtccaccgccgggctccccgtcagccgccgctccaccaactcgggcttcggcaacgtcagcaatggcggaaggatcaagtgcatgcaggtgtggccaattgagggcatcaagaagttcgagaccctatcgtacctgccaccactcaccgtggaggatcttttgaagcagatcgagtacctgcttcgatccaagtgggtgccttgcctcgagttcagcaaggttggattcgtctaccgtgagaaccacaggtctcccgggtactacgatggcaggtattggaccatgtggaagcttgccatgttcggctgcaccgatgccacc

SEQ ID NO: 400298 - DNA, 258 bp, Oryza sativa nipponbare
ccacgcgtccgcggacgcgtgggcggacgcgtgggcgtgcgacgatctgggcggagagttctgcaaggccacctgatcccattcccatccatggagaattggagtcttctatcatccttcctcctctgctccactaccttaattccatgtagctacagatttatatgttaatcatcatgtaatggtacatatctccttgttaataaggcacgctagtctagctcctcaaaatgatttacaataatataatatttacat

SEQ ID NO: 400299 - DNA, 412 bp, Oryza sativa nipponbare
ccacgcgtccgcccacgcgtccgcccacgcgtccgccacgcgtccggattgatctggggacaggaaacaacaacaagatcaactgggccttgaaggacaagcaggagttcatcgacattgtggagaccgtctacagaggtgctcgcaaagggcgtggtttggtgattgctcccaaggactactccactaaataccgttactaagctatattttgccccacgctgccgttgagtggcccttagtacaagagctgtaagcttatggagttgtggtggggtgtgttgactaaaaactgtaatattgttcgaaactcgagtgtcggaacataatttacatgtcaattggtacatcaatgacaagttgattggtgtggataccaatcatccattaattatcaatactctttccagtc

SEQ ID NO: 400300 - DNA, 449 bp, Oryza sativa nipponbare
ccacgcgtccggccagcaacccgtttacttgaaaggggaaattgtgagcaatcatgacgaattgatgtccaatttctttgctcagcctgatgcacttgcttatggaaagacccctgaacaactgcacagcgagaaagtacctgaacatcttatctctcataagacttttcagggcaaccgaccatcacttagtttattgctgccctcattatctgcttatgagattggacagcttttatccatctacgagcaccggattgcagttcagggtttcctatggggaataaactcatttgaccagtggggagtggaactgggaaagtctctggcttctcaagtgagaaaatctctgcatgcatcccgcatggaaggaaagcctgtccaggggttcaacagcagcactgcaagtttgctgacacgatatctcgctgttgagccatccactcctt

SEQ ID NO: 400301 - DNA, 447 bp, Oryza sativa nipponbare
ccacgcgtccgcccacgcgtccgcccgtcttcgccgcccccgtcgcccccgccgtgatggacgccgccgtcgaccgcctaaaggatgggttcgccaagttcaagaccgagttctatgacaagaagccggagctcttcgagccgctcaaggccggccaggcacccaagtacatggtgttctcgtgcgccgactctcgcgtgtgcccgtcggtgaccatgggcctggagcccggcgaggccttcaccgtccgcaacatcgccaacatggtcccagcttactgcaagatcaagcacgctggcgtcgggtcggccatcgagtacgccgtctgcgccctcaaggtcgaactcatcgtggtgattggccacagccgctgcggtggaatcaaggccctcctctcactcaaggatggagcaccagactccttccacttcgtcgaggactgggtca

SEQ ID NO: 400302 - DNA, 377 bp, Oryza sativa nipponbare
ccacgcgtccgcttgtatccgtgcctgcagctctgaagatgatggatccgatgcttcgtcgtcgcttggcggagacaaacgccagcaggaggtccttgcgaagatcgcaatgcttcaggcgcagaaggtgcgcatcacaagcttcttggacgagcgctctgcttacctgaccaagtttgcgaaggatgcggacaccgagttcgatctgattggccagaacgccatgaaagagcttgatgaagttggggaccagataatggagaggctggacagcaagatgcaggcctttgaggagactgctgaagttcaaaggcaggagatagaaatgaacgagagggtgcttgaagacttcgaagattggattgagaaggagaaaa

SEQ ID NO: 400303 - DNA, 431 bp, Oryza sativa nipponbare
ccacgcgtccgggtgctcgatgcggaagaaggggctgcacccggagatctacgaggacgcgaaggtgtactgcaacggggagctggtgctggtgacggggggaaccaagccggagtacacggtggacgtgtggtcggggaaccacccctactacgtcggcgacacgtcggcgatggtcgtcatggacagccagatcgagaagttccgcaagaagtggggccacatcaaggagtactggcccgaggaccagtggagggagatgcaccccgacggcgacccggagttcgacccggaggaggagggatccgccggcgccagctgagcccccgcttcgcctctcgcctccgccgccggccttgccggtgcggtttcttttggttgattttgggaattgcgtaaaatggattagcttcttttggttgggccttttg

SEQ ID NO: 400304 - DNA, 451 bp, Oryza sativa nipponbare
ccacgcgtccgtgaaaggacccaaattatcagtaaattggctgggcaggttgttaccatgagtcaaaacaaattcgcatcaaatgtgatagagaagtgctttcaacatggggatatgacagagcgagatcttctgatccgggagattgtgaagcagactgagggcaatgataacttgctggcgatgatgaaggaccagtatgcaaactatgtagttcagaagatacttgaaacatgcaacgagcaacagagagagctcctgctcagccgtgtgaagggccatctgcaagcattaaggaagtacacctatggcaagcatattgtgagccgagttgagcaactttgtggtgaaggagacaccgagtcagattcttgaaaaattagcatatttcttcactggaggtgtatgcctggagccctcaagatgaacaacctccagtgcttccagaagg

SEQ ID NO: 400305 - DNA, 285 bp, Oryza sativa nipponbare
ccacgcgtccgcggacgcgtgggctccgatcgcaaatactctctctcgccgatagcagcaggagcagcaatggccgccctcgccgccgcatccaccgccttcgccgccaagccgcgcctggcgcgcgcgccgtcgtccccggccgcgcggttctccgtgtcgtgctccgcgtcgggcaacaacggcggcgccggcgagatggcgcagtcgctggcggcgtcggccaagacgttctccgcggcgctggcgctgtcctcggtgctgctctccctcggggggacgttt

SEQ ID NO: 400306 - DNA, 445 bp, Oryza sativa nipponbare
ccacgcgtccgcccacgcgtccgccgtggaggatcttttgaagcagatcgagtacctgcttcgatccaagtgggtgccttgcctcgagttcagcaaggttggattcgtctaccgtgagaaccacaggtctcccgggtactacgatggcaggtattggaccatgtggaagctgcccatgttcggctgcaccgatgccacccaggtgctcaaggagctcgaggaggccaagaaggcctaccccgatgcctttgtccgtatcatcggcttcgacaacgtcaggcaggtgcagttgattagcttcatcgcctacaagcccccaggttgcgaggagtctggtggcaactaagctaagatcaagcatcgcgctggtggattgctgcctataataatagtatgcagctttgttttgggctatgttgatgatatatcaatatataatatgctt

SEQ ID NO: 400307 - DNA, 437 bp, Oryza sativa nipponbare
ccacgcgtccgaccactgctagcttgggaagaggaggaggagcttgagcttggagagagacaacaatggcggctcaggctcttctctctgggaggcagctgctggggaggccattgcaatcttcagtctccaggtcttcttcctccaggaaggcacccttcatggtcagggcagaggccactccccctgccaagcaaggtgctgacaggcagctgtggttcgcatccaagcagtccctgagctacctggatggcacgcttccgggagacttcgggttcgacccgctggggctatcggacccggaggggaccggtgggttcatcgagccacggtggctggcctacggcgaggtgttcaacggccggacggcgatgatgggcgtcgtcggcatggtcgccccggagctcctcggcaagctgggcctcgtccccgccgag

SEQ ID NO: 400308 - DNA, 418 bp, Oryza sativa nipponbare
ccacgcgtccgcagcaacctcccggcccccttccgcccccgcctcatccgcaacacccccgtcttcgccgcccccgtcgcccccgccgcgatggacgccgccgtcgaccgcctcaaggatgggttcgccaagttcaagaccgagttctatgacaagaagccggagctcttcgagccgctcaaggccggccaggcacccaagtacatggtgttctcgtgcgccgactctcgcgtgtgcccgtcggtgaccatgggcctggagcccggcgaggccttcaccgtccgcaacatcgccaacatggtcccagcttactgcaagatcaagcacgctggcgtcgggtcggccatcgagtacgccgtctgcgccctcaaggtcgaactcatcgtggtgattggccacagccgctgcggtggaatca

SEQ ID NO: 400309 - DNA, 449 bp, Oryza sativa nipponbare
  unsure (1)..(449): unsure at all n locations
ccacgcgtccgagctaattaagcaaaagaagaagaagaagaaagaagaagaagaagatgcagaccggtgctagcagtgtcgttggattgtcggccgtgttgcccgctgctgtgaaggggcgcagcctgcagattcaggctcctcgccgtgttgcgttgcgcgttcgtgcggcggcggcggcggtggcagtggaggctgcggaggtggactacagctctaacatctcggtgtttccgatggaggcgtgcgacctcatcggcggcgaggcgtgcaacgtgcagatgtacccagaggccaagctctcatcatcggctgctgttgctgtttctcgtgcggcggcggaggaagtcgacagggactacctatcctacgacgagcccaccacggtgttccccgaggaggcgtgcgacgatctgggcngggagttctgcaaggccacctgatcccat

SEQ ID NO: 400310 - DNA, 446 bp, Oryza sativa nipponbare
ccacgcgtccgacccgctcggcctcgccgacgacccggaggccttcgcggagctcaaggtgaaggagatcaagaacggccgcctcgccatgttctccatgttcggcttcttcgtccaggccatcgtcaccggcaagggccccctcgagaacctcgccgaccacctcgccgaccccgtcaacaacaacgcctgggcctacgccaccaacttcgtccccggcaagtgagcgccgccgccgccgtgctgccatggcgacgcatcgccttcagctaagctagctaggttgacgacgatgcgcgtctctgcaggagagtgtgcgtgtgtgtacgcggtgcagtagatgtacgtacgtgtaccgtatagatgtacgtattcgtgtggaccgcgtggatggatgtacgagtattggagagagggtgagatctgtaccggtagtgtgtaattct

SEQ ID NO: 400311 - DNA, 421 bp, Oryza sativa nipponbare
  unsure (1)..(421): unsure at all n locations
ccacgcgtccggcagcagcagcagtagctgagcttgaagcagcagagcgaggtagacatggccgccgccaccatggccctctcgtccccggcgctggccggcaaggccgccgcgaaggtgttcggcgaggggcgcatcaccatgcgcaagtcggcggcgaagcccaagcccgccgcgtcggggagcccgtggtacggcgccgaccgcgtgctctacctcggcccgctctccggcgagccgccgagctacctgaccggcgagttccccggcgactacgggtgggacaccgcggngctctccgccgacccggagacgttcgccaagaaccgggagcctggagggatccactccaggtgggcgatgctcggcgcgctgggcttggtgttcccggagctcctcgcccgcaacggcgtcaagttcg

SEQ ID NO: 400312 - DNA, 427 bp, Oryza sativa nipponbare
ccacgcgtccgaaaaaccaacccaaccgccgccgcatcgccctcgttagaacgatggccgcgtcggcgctgcaccagaccaccagcttcctcggcaccgcccctcgccgggatgagctcgtccgccgcgtcggcgactccggtggccgcatcaccatgcgccgcaccgtcaagagcgcgccccagagcatctggtatggacctgaccgtcccaagtacctgggcccgttctcggagcagacgccatcgtacctgaccggagagttcccgggagactacgggtgggacacggcggggctatcggccgacccggagacgttcgcgaggaacagggagctggaggtgatccactcgcggtgggcgatgctgggggcgctgggctgcgtcttctccgggatcctgtccaagaacggggtgagttcggggag

SEQ ID NO: 400313 - DNA, 438 bp, Oryza sativa nipponbare
ccacgcgtccgcgtgagaaccacagatcccccggatactacgatggcaggtactggaccatgtggaagctgcccatgttcgggtgcactgacgccacccaggtgctcaaggagctcgaggaggccaagaaggcgtaccctgatgcattcgtccgtatcatcggcttcgacaacgtcaggcaggtgcagctcatcagcttcatcgcctacaagcccccgggctgcgaggagtctggtggcaactaagccgtcatcgtcatatatagccttgtttaattgttcatctctgattcgatgatgtctcccaccttgtttcgtgtgttcccagtttgttcatcgtcttttgattttaccggccgtgctctgcttttggttttgtttcacctgatctctctctgacttgatgtaagagtggtatctgctacgactatatgttggt

SEQ ID NO: 400314 - DNA, 448 bp, Oryza sativa nipponbare
ccacgcgtccgcccacgcgtccggcacaagaaagcataagcaacacaagggattaactcatcactcacttagctaattaaatcttcgaccatgtcggacaagtgcggcaactgcgactgtgctgacaagagccagtgcgtgaagaaaggtaccagctatggcgtcgtcatagttgaagccgagaagagccacttcgaggaggtcgccgccggcgaggagaacggcggctgcaagtgcggcaccagctgctcctgcaccgactgcaagtgcggcaagtgaagtcacgaagcaaccgaacactcgccgccggcgagtcacctaccttaattagtccacaataaaaaccacccatatgagtggggtttgtgtgtgtgctgattattgctgaattaaacccgtgtgttatcgattaattaagcagctggtcgcttcggcgactatgcgtgta

SEQ ID NO: 400315 - DNA, 451 bp, Oryza sativa nipponbare
ccacgcgtccgaccgaaacaactgatgggtcctccatagagccaaaggaaagtgctctagtatggcattatttggatgcagaccatgacttcggttcctgccaagcaaaggaactactgggtcatcttgaaagggtgctatcaaatgaacctgttgttgtgaagtgtggtcattacattgttgaagtcaaaccacagggagttagcaagggacttgttgtggacaaggtaattcacagattgatgaacaacgggaagacgcctgatttcgtagtgtgcattggtaacgatcgatctgatgaggacatgttcaaaagcatcgacagcatgacctccagctccgcattccctgcagttccagaagtctttgcctgttcagttggtcagaaacccagctaaggcaaagtactatgtcgacgatgctggtgaagtagtaagaatgctcaagaatg

SEQ ID NO: 400316 - DNA, 445 bp, Oryza sativa nipponbare
ccacgcgtccgcccacgcgtccggcgtgactctgctctagcacctcaccaagcagaaagctagagagctagcaatggcgcccaccgtgatggcctcgtcggccacctccgttgctcccttccaggggctcaaatccaccgccgggctccccgtcagccgccgctccaacagcgccggcctcggcagcgtcagcaacggtggaaggatcagctgtatgcaggtgtggccgattgaaggcatcaagaagtttgagaccctgtcgtacctgccaccgctcacggtcgaggacctcttgaagcagatcgagtacctgctccggtccaaatgggtgccttgcctcgagtttagtaaggtcgggttcgtctaccgtgagaaccacaggtctcctgggtactatgatggcaggtactggaccatgtggaagctgcctatgttcggatgcact

SEQ ID NO: 400317 - DNA, 317 bp, Oryza sativa nipponbare
ccacgcgtccgctcgaccagatgatcgccttcaggcaactgaccaagctggaggtcaaggagatcggcgagatcatgctcaaggaggtctttcacaggctcaaggccaaggacattgacctccaggtcaccgagaagttcaaggagcgtatcgctgacgaacgcttaaacccgagctatggtgcgaggccgctaaggagggccatcatgaggctactggaggacagactaccagagaagatgctagctcatgaggtgaaggacggtgattcatgcattgtcggatgtgattccgaggggaatgtgattcgactgaat

SEQ ID NO: 400318 - DNA, 366 bp, Oryza sativa nipponbare
  unsure (1)..(366): unsure at all n locations
ccacgcgtncgggacgcgtncgccacgcgtncgncacgcgtncgaaaaggacttcgatataaagagagaggcttgtggaaaatctttcactgctgtttacaagagttacaccgcaactgtgtcgaaaaacttcctcgaaatccatctgttctgggctggaaagggcacttggtgcattcctattcaagggtactaccggccattgatcttaacattaagcattacttcaaattttacttctactgggcgaaacggggtacccaaaagggaaaggtaaggtggggccattggtgggatattgattggtgccttaagtggagggatagccaccctatttggaatatttatggtcattaaggaaaggag

SEQ ID NO: 400319 - DNA, 447 bp, Oryza sativa nipponbare
ccacgcgtccgctagctatagatttgtagccagctgtagcacagaatctaagacacaatgtgtgtataacaagtgagactaggtattaatagtatagtatgtaactattgtataaataagttattagattgactacagatgaattgaagccaaataatattaattaaacttgctctgagagagacgtagtccagctagctaaggcaaagccaagcaggtcgagggcggttggttgggtggtatatttggtggtgggtggagcggtcagcaccgcatttgcgttcttggatccaaaccaaccaaaagccaagccatatagagagagagaagaggcaaaggccaaatcttgagcttcttcttattcctcctcctccatcttctctcctccgatgcttcacctcgtcgccctaaatttatcacccagaggcgacttggcaagaggaggcc

SEQ ID NO: 400320 - DNA, 442 bp, Oryza sativa nipponbare
ccacgcgtccgcccacgcgtacgttcggacaagatgtcggatagcatctacaaggcgaacgaggcgtgcgcggaggacacggctagcggcgagtgcgcggaggcgtgggacgaggtggaggagctgagcgcggctgcgagccacgcgcgcgacaagctcaaggagacctgcgacccgctcgaggcctactgcatggacaacccggagaccgacgagtgccgcacctacgacaactgattcttaccattatatgtgtgctaatatctctgtaattaattataagttactggcttgaaaagattatttgtcgtacaagacagcgggtggtctcggtggaatggtggtatttactgataggtcaagggggaaatgggaaaaaaaaggttttttacacttggttggttggatgaaattggaatggaccttttttgttggatatttt

SEQ ID NO: 400321 - DNA, 382 bp, Oryza sativa nipponbare
ccacgcgtccgagctcactgcatcaatggccgcggccaccatggcgctctcctccccggtgatggcccgcgcggcgccgtcgacctcctccgcgctcttcggcgaggcgcggatcaccatgcgcaagaccgccgcgaagcccaagccggcggcgtcgtcggggagcccgtggtacggcgccgaccgcgtcctctacctcggcccgctctccggcgagccgccgagctacctcaccggcgagttcccgggcgactacgggtgggacaccgcggggctctccgccgacccggagacgttcgccaagaaccgggagctggagggatccactcccggtgggcgatgctgggcgcgctcggctgcgtcttcccggagctcctcgccc

SEQ ID NO: 400322 - DNA, 449 bp, Oryza sativa nipponbare
ccacgcgtccggaagtactcgagcaaagaaggagagagcttggtgagctgcagagatggccccctgcgtgatggcgtcgtcggccaccaccgtcgctcccttccaggggctcaagtccaccgccggcatgcccgtcgcccgccgctccggcaactccagcttcggcaacgtcagcaatggcggcaggatcaggtgcatgcaggtgtggccgattgagggcatcaagaagttcgagaccctctcctacctgccaccgctcaccgtggaggacctcctgaagcagatcgagtacctgctccgttccaagtgggtgccctgcctcgagttcagcaaggtcggattcgtctaccgtgagaaccacagatcccccggatactacgatggcaggtactggaccatgtggaagctgcccatgttcgggtgcactgacgccacccaggtgctcaagg

SEQ ID NO: 400323 - DNA, 425 bp, Oryza sativa nipponbare
ccacgcgtccgggatcttctgggtgggccccctgatcggcgccgccatcgccgccgcctaccaccagtacgtgctgagggccagcgccgccaagctcgggtcctaccggagcaacgcctgagatcggcggcggcggcgcgcgcgaggtggcgctgaagtgtagatacgcgtacaagatggccgcctctgtccagcactagatcaacgaattcagccttcgcatcctgcatttcgcctcgtggatagattctactgcactattatgtactatgtatccatgcatatggtctccattcctttgaactatgtccgccatatgttgcttcccgctggtgcttccaagtttggttaattttccttcacattctgcatgtatgtaatattcatatggagaatttgtgaatttgaagatcatagttactatt

SEQ ID NO: 400324 - DNA, 414 bp, Oryza sativa nipponbare
ccacgcgtccgcccacgcgtccgcccacgcgtccgcccacgcgtccgcggacgcgtgggctgttgtcttggtgcttgtttgctgctgggcctcaggagtcagaacccaaccgaatcctcttagttactattcaccacatgatgtatcctataactgtggaggttctacatcaagttttcaaagcttatggatatgtggagaagattgtcacatttcagaagtcagctggttttcaagcccttatccagtatcagtcactccaagaagctatggatgcatttggtgctttgcatggaaggaacatatatgacggttgctgccagctagacattcaatattcaaatctaagcgaactgcaagtccattacaacaatgatcgttctagggatttcacaaacccatcattgcctacag

SEQ ID NO: 400325 - DNA, 414 bp, Oryza sativa nipponbare
  unsure (1)..(414): unsure at all n locations
ccacgcgtccgcggacgcgtgggcggacgcgtgggcggcgaagaaggcggcgaggccgtcggcgccgacgacggacaggccgctgtggttccccggcgcggtggcgccggactacctggacgggtcgctcgtcggcgactacggcttcgacccgttcggcctcgggaagccggcggagtacctgcagttcgagctggactcgctggaccagaacctggccaagaacaacgccggcgagatcatcggcacccggttcgagaccggcgaggtgaagtccaccccgttccagccctacaccgaggtgttcggcctcgagcgcttccgcgagtgcgagctcatccacggtcggtgggccatgctcgccaccctnggcgcccttttcgtcgaggggctcaacggcgttaactggcaaga

SEQ ID NO: 400326 - DNA, 442 bp, Oryza sativa nipponbare
ccacgcgtccgacccaagtgatgaaaactccagatgatgtactacagtctcaaggtgtgactgcagagaacatcgaagatatgttggatgagttacaggagcatgttgaatccattgacatggcaaatgatctgcactctattggtggattagatcccctacttggttacttgaaaaattcacatgctggcatcagagcaaaggctgcagaggttgtgagcacgattgtgcaaaataaccccaagagccagcaacttgtcatggaatctaatggcctggagccactgttgacaaacttcagttccgatgcaagcacgaattcacgcacaaaagctcttggagcaatatcatctctaattcgtcataaccagccaggagttgctgcattccgcctgggaaatggctactctgcactgagagacgctcttggttctgatgatgc

SEQ ID NO: 400327 - DNA, 412 bp, Oryza sativa nipponbare
ccacgcgtccgactacaccccgctccactctcaggcaggcaatcagcggcgaggcaccagcccaccggccgggaatggcgtccacctcctgcttcctccaccagtccacggcccgcgtcgccgcgcgcgtcgcctccccgtccccggcgacacggacccacctcctcgtctgccgcgcccagaagcaggacgacgccgacgtctcccgccgcgcggcgctcgcgctgctggccggagcgacggcggcggtgggggtgaaggtggcgcccgccgtcgcggcctacggcgaggcggcgaacgtgttcgggaagcccaagacgaacacggtgttcatcgcctacaggggcgaggggttcaagctgctgatcccgtccaaggggaacctcatcatggagcgcgaggttcccggaca

SEQ ID NO: 400328 - DNA, 449 bp, Oryza sativa nipponbare
ccacgcgtccgacacgacgcaccaatggcgctcgtctccgcctcctcctccaccaccgccgtcgcggcgctccccggcgccgccagggcctcctccttcctcggcggcgccggcaggagcggcaggctgctgctgaggcaggccgagtcgtcgtccgcgcgggcgtcgttcgccgtgcgcgccgcggcgcccgacaggccaatctggttccccggcagcaccccgccgccgtggctcgacggcagcctccccggcgacttcggcttcgaccccctgggtctcggatcggacccggagagcttgcggtggaacgtgcaggcggagctggtgcactgccggtgggcgatgctgggcgcggcgggcatcttcatcccggagttcctgaccaagatcggcatcctcaacacgccgtcgtggtacaccgccggcgagcagcaatacttcaccga

SEQ ID NO: 400329 - DNA, 441 bp, Oryza sativa nipponbare
ccacgcgtccggtcaaggctaacgcactgctgcaagctcatttttcaaggcacactatcttagggaacctggcagccgaccagcgggagatactcctttctgctcatagattgctccaggcaatggttgatgttatctccagcaatggatggcttacgcttgctcttaatgcaatggagctgagtcaaatggtgacacaaggcatgtgggatcgtgattctgttcttttacaacttccacatttcaccaaggagttggcacggagatgtcaggagaatgaagggaggcccattgagagcatctttgatctggctgagatgagcatcgatgaagatgcgggatctgttgcagcaatcaaaccctcagctgcaggatatcattgaattcttccagcgtttccccaatgtcgatatggcttacaagttcgccgaggggatgata

SEQ ID NO: 400330 - DNA, 446 bp, Oryza sativa nipponbare
ccacgcgtccgcggacgcgtgggcggacgcgtgggcggacgcgtgggggtttcctcgcgccgccggcgccgccatgccgtcgcacaagacgttccagatcaagaagaagctggcgaagaagatgcgccagaaccgccccatcccgtactggatccgcatgcgcaccgacaacaccatcaggtacaacgcgaagcgcaggcactggcgccgcaccaagctcgggttctgagcttggggaggagaggaggacgaggcgccggacgccgctgccctgggaagaagaagaagaaggagaagctagggcttatgggttgcgtcgtgttcgttttcgggttttgcctgtcctgaagagactatcagtagctgtgtgtatcttggagcatcataattttgctgattaaagaaccactttcttatcctgcctaaagttgtctgaattttatctc

SEQ ID NO: 400331 - DNA, 408 bp, Oryza sativa nipponbare
ccacgcgtccggtctccccctttctgaacacagcaccaccccttctgctgcatctcccacctccctctgaattgtgggcctgaggcgatggcggcgctcgccccgtccaagatgctcggcacccggctcaacttcgccggctcctcccgctacgccaccgcggcaccgaccaccggagcgcagaagatcgtctccctcttcagcaagaagcccgccccgaagcccaagcccgccgccgtcacctcctcgagccccgacatcggcgatgagctcgccaagtggtacggccctgacaggaggatcttcttgccggagggtctcctggaccgctcagaggtgccggactacctcaacggagaggtccccggagactacggctacgacccttttggcctcagcaagaagcca

SEQ ID NO: 400332 - DNA, 442 bp, Oryza sativa nipponbare
ccacgcgtccgaggagatggcgatcctggacgaggaagggcggcgggtggaggccgggaagagcggcgaggtgtgcgtgcgcggcgccaacgtgacgagcgggtacaaggggaacccggaggcgaacgaggcggcgttccggttcgggtggttccacaccggcgacatcggcgtcgtggacgaggaggggtacctgcggctggtggggcggatcaaggagctgatcaaccgcggcggcgagaagatatcgccgatcgaggtggactcggtgctgctcgggcacccggccatcgcgcaggccgtggcgttcggggtgcccgacgccaagtacgggggagagatcaacttcgcggtgatcccccgggagggcgtgtcgctcggggaagaggaggtgctggcctactgccggaggaacctggccgcgttcaaggtgcccaagaag

SEQ ID NO: 400333 - DNA, 449 bp, Oryza sativa nipponbare
  unsure (1)..(449): unsure at all n locations
ccacgcgtccgcccacgcgtccgccttgataaggatggtttaccagctattcataaagcaattctttccaagaagcatgccattatcaactatctcctaaggaattcagcaaatccattcatccacgataaagatggtgcaaccctaatgcattatgcagtccaaacagcatgcagtcagaccataaagactctcttgctgtacaatgttgacattaatcggccagatgattatggatggacacctttgcatctagctgtgcaaacacagagaactgatatcgttaagctactcttaataaagggtgctgatagaactttgaaaactcaagatggatttacccctttggagttatgcctccggttgggtcatcatgcaaggacgtatgaacttatcaaattactcaagagccntcgtctaccaaagcaacatgacccagttcagcactt

SEQ ID NO: 400334 - DNA, 439 bp, Oryza sativa nipponbare
ccacgcgtccgcccacgcgtccgcaaacgcccacatcacacgcagaaatccgcatcaacagccagccatggcgtccacgctgaccaacgtcggcctgtctaccccggcggcggcggcgtcgtccctcgttaggccggtcgccggagctggacgcgtggtgtttccccgtgttggccgcggcgggttcgcggcggtgagggcgagcgggccggcgacgccgccggacatctcggacaagatgtcggagagcatcgacaaggcgaaggaggcgtgcgcggaggacacggcgagcggcgagtgcgcggcggcgtgggacgaggtggaggagctgagcgcggcggcgagccacgcgcgcgacaagctcaaggagaccttcgaccccctcgaggcctactgcaaggacaacccggagaccgacgagggccgcacctacgacaac

SEQ ID NO: 400335 - DNA, 398 bp, Oryza sativa nipponbare
ccacgcgtccgctcgatccaagataatttcactccagcgtgcgtcggccatgtcgagcttgatggacaaggcgaaagggttcgtggcggagaagatcgcgcacatcccaaagccggaggcgtcgctggacagcttgtcgttcaaggggatgagccgcgagtgcatcaccgtgcacagcaacgtcaacgtctccaacccctacgaccaccgcctccccatctgcgagctcacctacaccctcaagtgcgccggcaacgttgtggcgtccggcacgatgcccgatccggggtggatcgcggcgagcgacacgacgaagctggagataccggccaagatcccctacgacttcctcatctcgctggtgaaagacgtgggcccggactgggacatcgactacc

SEQ ID NO: 400336 - DNA, 384 bp, Oryza sativa nipponbare
ccacgcgtccgagcagaagcagcagcagcagctcagccgccgccgatggcgtccacgatcatggccccaacctcccgcgtcctcgccgccaagacccccttcctcggccatccccgcccctccaatgcccccgtccgcgacatcgccgccgccgccaccggccgcatcaccatgagcaaggagctgtggtacgggccggatagggtgaagtacctggggccattctcggcgcagacgccgtcgtacctgaggggcgagttcccgggcgactacgggtgggacacggcggggctctccgcggacccggaggcgttcgcgaggaacagggcgctggaggtgatccacggccggtgggcgatgctcggcgcgcctggctgcatcacg

SEQ ID NO: 400337 - DNA, 249 bp, Oryza sativa nipponbare
ctgcaagtgcggcaagtgaagtcacgaaacaaccgaacactcgcctgcggcgagtcacctaccttaaatagtccacaataaaaaccacccatatgagtggggtttgagtgtgtgctgattaatggtgaattaaaccccggtgccatcgattaaataagcagctggtcgcttctgcgactatgcgggtatcaacgtatgaatttgagtgatgggatgtacccgggctattctcagggaaattaatcaatc

SEQ ID NO: 400338 - DNA, 442 bp, Oryza sativa nipponbare
ccacgcgtccgctcaagaagtactcgagcaaagaaggagagagcttggtgagctgcagagatggccccctccgtgatggcgtcgtcggccaccaccgtcgctcccttccaggggctcaagtccaccgccggcatgcccgtcgcccgccgctccggcaactccagcttcggcaacgtcagcaatggcggcaggatcaggtgcatgcaggtgtggccgattgagggcatcaagaagttcgagaccctctcctacctgccaccgctcaccgtggaggacctcctgaagcagatcgagtacctgctccgttccaagtgggtgccctgcctcgagttcagcaaggtcggattcgtctaccgtgagaaccacagatcccccggatactacgatggcaggtactggaccatgtggaagctgcccatgttcgggtgcactgacgccaccc

SEQ ID NO: 400339 - DNA, 432 bp, Oryza sativa nipponbare
ccacgcgtccgcggacgcgtgggcggacgcgtgggcggacgcgtgggcttggccgcgcactgcctgctgctgcccacccacagccgctgctcgccgccgagagccgccgcagcagcgccgtgtccgtgcggatgtcgtgggacgggcccctctcctcggtccgcctcattatgcagggccgcaacgtcaagctgaatgagaaggtgaaggagcacatcgaggagaaggcggggagagcagtggcgaagcacagccagcttgtgaaggaggtggacgtgcgcctctccgcccgcggtggcgagctcagccgaggtcccaagatttgcaggtgcgagatcactctcttcaccaagcgccacggcgtcatccgcgccgaggaggacgccgagtccacctacgccagcatcgaccttgccttcttcatcatcaaga

SEQ ID NO: 400340 - DNA, 355 bp, Oryza sativa nipponbare
accaaatacccaaagggttaacaaaacgtctagggatggtggtttaggggtacaggaactcaggaaatttaggacagtgaatcgacgacgagacccagataaataagagcctgactggcggggacgagttttgtgatacaattccttaatggttgtgactctgtatgttttaagagaatccttgttcctacatacccaaaccgatcataactgaaagttcagtagtaatcacatggaacaggtgaggtttacttcgggccgatgtccttcagcgcgcagatctgctcctctcccatggcagacataacagtcaccaccaggtccttcccttctccaaatccatccttgatctgac

SEQ ID NO: 400341 - DNA, 353 bp, Oryza sativa nipponbare
  unsure (1)..(353): unsure at all n locations
ataattaattcacaacaccatatttcattgatcaggttcagaacctgcacagaaatacacactaccggtacagatctcaccctctctccaatactcgtacatccatccacgcggtccacacgaatacgtacatctatacggtacacgtacgtacatctactgcaccgngtacacacacgcacactctcctgcagagacgcgcatcgtcgtcaacctagctagcttagctgaaggcgatgcgtcgccatggcagcacggcggcggcggcgctcacttgccggggacgaagttggtggcgtaggcccaggcgttgttgttgacggggtctgcgaggtggtctgcgaggttctcga

SEQ ID NO: 400342 - DNA, 342 bp, Oryza sativa nipponbare
ttttataagaagagattatatcccaccatcgatcgattacaccatcatcaataactgaagagcagcctgacagatgattaaaattacatgtccatccacccaaaacacaagtaattaataggtcgattatgagagaagaagaagaagaagaagaagtctagatgtcgaagacgttcttgccggtgaacttgacctcgatggggctgacgttcttgccgatgctgcggaagttctggccgacgccctgcctgccggcgttgaccttctccgggtagacgccgtccttggggtggaggtactgcacctcgccattggggaagacgcggtaagactggtagttga

SEQ ID NO: 400343 - DNA, 292 bp, Oryza sativa nipponbare
tcagtgatgaagagaacttcacttctaaaagagtatcaacttgttttttacatcggttacatcatagtacaggtacacaatcaacaaggcatgcagtgctccatccacaattacatcccaatacaccaccaccattcacagcctactccgatcccaaaaaagagaggtaagtcgcgtcgacgaacagtcttttcatcttcctccattggcagccattgctaacactccaacacctgaagaactcctcatttgggggtgaaggcctggaagatggtggcgtggcccggggtcg

SEQ ID NO: 400344 - DNA, 361 bp, Oryza sativa nipponbare
caccagccaaaaaaaggggagctggtacaaagcctcaatacacactggagtaaaaccagcaacggcatctgcgctccacatctcgcgatgtgcagcggtctgagataaacagtttctatgtgatggaacttaaaagtctcttttattcaaaaacacgggagcgggcaatcgctcactatctgtccctctgggtattgcttagttttagttgaggcatgagtaagcgagcgtcttctcctccgacagctcctgggcagtcgcgtccatcttcttccttgagaactcgtcgatcgggagaccctgaacaatcgtccattcgccaccactgcatgttactgggaacgagtagatcagaccagca

SEQ ID NO: 400345 - DNA, 250 bp, Oryza sativa nipponbare
ggttgatgttgaacttcgtttattaaaaattaaaggagtatataaaccggtttcgtaaatatctaaggcgagatatacagatgccaaataggtgtacaggactggaaattacaaagattataccagaataattaatcgttgggattaagagcatgaacgacccaggagcgggggtgcacggagtacgtgtgttgcaagaacgcgggagaatcgacgagattcttttgaaaaaattacctaattaattaaa

SEQ ID NO: 400346 - DNA, 392 bp, Oryza sativa nipponbare
gtttgtctaccattcagaatacttggaatgcagaaatgtcacatgtccattctaattatgctacacacgatccattccatgctcaggagttcggatgagcttaatcaaggtctcataatattatttccccacaaacaagaaccacagtaaaagaagtacataacaacagggacaacagaagtaaatacagaactgacagaaagtgcctaatatagagaagcctaattcagatattggctatcctctcttgcagctcagttcatctcccttagatcggcatgcctttgggcacaatctggtcctttatccacatgtagataggcaccagaacatagtatgcagcacatattgttctcatgaggaagcgtaagaggaggtgataggatcacagg

SEQ ID NO: 400347 - DNA, 373 bp, Oryza sativa nipponbare
tttaaagctaatttcacctttgaacgggaatggggaagcaatggagtagagaattacaggagaaggtggcagctgaggagagaatcaggagctgtcacaaagctatatacaagttgggaagctgaacgagaagagagcatatgcttccctcctacaggaagcattatgacttgttggtgctgttttacaaatctgggtgattatcggaagatcgtcatgcggtagcagctgcagcttcttctgcgacttgggatccctgttgcagagtgcagatgaggttgcgatccccgtacacattgtccacgcgacatgttgttggccagaacttggcgccccgaagccacgcttgaaggaacgcaacatacttcctgga

SEQ ID NO: 400348 - DNA, 265 bp, Oryza sativa nipponbare
ggcagaaatatatgctttattctttaaatataacaaacagtgttttacattaaccatctgctttgaattttgtcgtacaaattgaggcgaatactctttttagacaatgagatgtctgaaacctctaacaacaatggaagcaattttggagcatagcaatcagaacatcttaccagttccatctttgcgtggaacagattcttcaagatccattctgcgccaactcccactcaaagatgataactcatcaaccttatcatacaaa

SEQ ID NO: 400349 - DNA, 284 bp, Oryza sativa nipponbare
atatagccggagcttccatatatttcattcacatatgcctcacccaacaacatatagtcgtagcagataccactcttacatcaagtcagagagagatcaggtgaaacaaaaacaaaagcagagcacggccggtaaaatcaaaagacgatgaacaaactgggaacacacgaaacaaggtgggagacatcatcgaatcagagatgaacaattaaacaaggctatatatgacgatgacggcttagttgccaccggacgcgtgggcggacgcgtgggtcgacccggga

SEQ ID NO: 400350 - DNA, 323 bp, Oryza sativa nipponbare
tttaaacaatttagactacatatttacactatacatagccagaaatggttatattttgggatcgagggagtatttgtttccgatctaatagagatgagaaatccgctaatcagaataacaccacggataagtacctagaccattagttgggaaacgaataaaatcattattgcaaaaacatcatcttcttcttcatcttcttagtgtacacaacaccaactcgatcatcatctcgtcgcactaaacccatcttccccaacccaaagacaacgaactcgctggccacaaatccatccaaccacaaataaccactgctaagctac

SEQ ID NO: 400351 - DNA, 403 bp, Oryza sativa nipponbare
aattatcccaaacaagcgatatatatttcataatgaacataaatctgcttctacaatatactccatcagtaacatgagcaccaaccacaaggtttattagagacaatgccagccccatgctaggacaagcttatttcagctgttcttcctcctcctcttcttcttcttcatcatcatcatcataatcttatcgccataatttatcgccattttcgcatccgtccataagattatacctatttcttccccagttctgaaatgtccaaacatctatgtgtttacaaccacgcggcgttcttgatcggcgtgacgacggccttgacctgcaggtagttcttcaggctgtcgatgcccttctccctcccgatgccgctctgcttgtatccgccgaacgggatcgcgg

SEQ ID NO: 400352 - DNA, 340 bp, Oryza sativa nipponbare
caatgaacaagcaaatatataaacgcccaatagttaaggttgcaccgtgattgatgccagcactccagattaagatgataaaatgaacaagagaaatagaacagaagaaatcaacttcgttcactagacgaggcagcatctacggccatcttagcatggagaaattttacaacgatgcatgttatattgtcggtgcttccacgggcaaaagcaatctctgccagcttccgggctgcggcctcagggccctcctccgcctttacaaatgcaacggcatgctcattggacaccacatcccacagcccatcactagccaaaatcagaaactccaaatcatcat

SEQ ID NO: 400353 - DNA, 365 bp, Oryza sativa nipponbare
gatcataaggcaaagctgcgagcgccagatcatcttattactacagcttcttggcgatatgctacagtagcttcttcctcccttgcaaaaagaaacccaaaccttatctacaacgcaacacacacaccggacacagagcgctcgatcgatcgaagcagacgagacgacgatggcgaactactactaggtaagcgacaacacctaggctatacagggatacagcgcgcggcggcgacgggcggcgagacggcggcgatgatcaggcgctggccttgttggccttcttggagatggcggagcggatggatttgggcggctgcatcggcttcgcgggggcggccttcctcgccctcttggcgcgggct

SEQ ID NO: 400354 - DNA, 374 bp, Oryza sativa nipponbare
  unsure (1)..(374): unsure at all n locations
tcagtgatgaagagaacttcacttctaaaagagtatcaacttgttttttacatcggttacatcatagtacaggtacacaatcaacaaggcatgcagtgctccatccacaattacatcccaatacaccaccaccattcacagcctactccgatcccaaaaaagagaggtaagtcgcgtcgacgaacagtcttttcatcttcctccattggcagccattgctaacactccaacacctgaagaactcctcatttgggggtgaaggcctggaagatggtggcgtggccggngtcggcgagatgggcgaagaggttgtcgatggggcccgtgccggtgtactctgcctggaaccaagctcccatgacggcgagcatggc

SEQ ID NO: 400355 - DNA, 229 bp, Oryza sativa nipponbare
caaaactcgaaacaataggttgattgttatcttttaaatatacacatcaccaacacattcataatttaggcacacttaacctaacagccataccccaaaaacatctaactcgttagccacaaatgcatccaaccacaattaactactgctaagctacagtcccccacttcatttgccggggactaagttggtggcgtacgcccagtcggttgacgttgactaatacttc

SEQ ID NO: 400356 - DNA, 216 bp, Oryza sativa nipponbare
ggggggagcacgtatttacacgtgggggcctgtgtgcataggatatgttgcctttttatttaagaaagaaaactgttggattcatgtgtctttttttttttgagaattaataaactgtaggaccaacttttggggctaccatttaaacaatatgctacttataagcaccagactcctttttatttcctctttttttcggtttgcttgcagcattta

SEQ ID NO: 400357 - DNA, 365 bp, Oryza sativa nipponbare
tttttggaaggcaaatgttcgtgaagataggcacatatatgtatcgtacaatgtcctctccgcttgtcgaaatgcaaataacatcatcgggggatatgatcatcagttcacgagaacagaggaagaaacaaaagctaaaaattaaaaccatcaacagcccgatcgagtttgcattactagatacacacattgcagccttccttccctctctccatgtatcgatatatcaacccggccacgcacaaaacatttgttcattccctactcgagctgcgcgtaccacaccccttggatcttgacatccttgggcaccttggcgccgaggtctgtgtccgacggctgcacgctctcgaagacgccaatca

SEQ ID NO: 400358 - DNA, 412 bp, Oryza sativa nipponbare
atcgtacaatgtcctctccgcttgtcgaaatgcaaataacatcatcgggggatatgatcatcagttcacgagaacagaggaagaaacaaaagctaaaaattaaaaccatcaacagcccgatcgagtttgcattactagatacacacattgcagccttccttccctctctccatgtatcgatatatcaacccggccacgcacaaaacatttgttcattccctactcgagctgcgcgtaccacaccccttggatcttgacatccttgggcaccttggcgccgaggtctgtgtccgacggctgcacgctctcgaagacgccaatcacctcgccggtctctggcttgctcttggtgacgctcaacgtgatgttgcccgtcgacgacgaggcgttcttgacgttctccttagcgagc

SEQ ID NO: 400359 - DNA, 327 bp, Oryza sativa nipponbare
aactaagaccagtttgatttcgtgtttgatacaaaaattaagatggacggattcacaagagagcaccctctacttaagctttacattacaaggccaaccagcagctgcctgccggccgaccactgcgtgcgcacgcgcgcgcaataatcaaccaatcacacacagtacgcacgcacataaaaaccacccatagccttcacgtacgcccggacgcacgcaccggttcgtgccaagctcaagggtagatggttctcgggatgatgatgtcgccgatgttgttgtgccacgggtccgagaggtggctggccaggttctccggacgcgtgg

SEQ ID NO: 400360 - DNA, 309 bp, Oryza sativa nipponbare
cgacggaattagaaacaatttaatctaacatacgcaaactgatattatcacaatgttagccgatgacaatggaaagagtaatctaggtacaagcggatcattgacggtggagacaagacattggctgcaccacaacacccaccagtggcgccaacaaggagcgctatccgttataggacgagagaaaaagtaaaacatcacgatgtgaagtgaaactgaataattctagtagacgatgatgatgatggataggctccttaggacgcccgccgcccttagcgtcttgctgctcccatcttggccactgga

SEQ ID NO: 400361 - DNA, 323 bp, Oryza sativa nipponbare
gtgtgtatatagccggagctttgttttcacatatcctcacccaacgataattgtagtactcttacaataaaaccggccggagagggagggaagagattattacatatgtgttaagagcagaggccattgagatggtacataaccaaactgtaaaataaaaatatatagcatattatatattgatatatcatcaacatagcccaaaacaaagctgcatactattattataggcagcaatccaccagcgcgatgcttgatcttagcttagttgccaccagactcctcgcaacctgggggcttgtaggcgatgaagctaatcaact

SEQ ID NO: 400362 - DNA, 270 bp, Oryza sativa nipponbare
agggaaatattatattattggaaatcattttgaggagctagactagcgtgccttattaacaaggggatatgtaccattacatgatgattaacatataaatctgtagctacatggaattaaagtagtggagccaaagaggaaggattatagaagacttcaattcttcatggatgggaatgggatcaggtggccttgcaaaacttttcgcccagattggtgcacgcccacccgttcgcccacgcgttcggggacccctgggtcgaccccgga

SEQ ID NO: 400363 - DNA, 311 bp, Oryza sativa nipponbare
gactggaaagagtattgataattaatggatgattggtatccacaccaatcaacttgtcattgatgtaccaattgacatgtaaattatgttccgacactcgagtttcgaacaatattacagtttttagtcaacaacaccccaccacaactccataagcttacagctcttgtactaagggccactcaacggcagcgtggggcaaaatatagcttagtaacggtatttagtggagtagtccttgggagcaatcaccaaaccacgccctttgcgagcacctctgtagacggtctccacaatgtcgatgaactcct

SEQ ID NO: 400364 - DNA, 370 bp, Oryza sativa nipponbare
gacacgaattaatttatttattgcaaaatagtttcctttcctttttcttttccattttgttctcctggaagtcggagtaaataaaaagaaaaaaacaacaaaactatggtactgtaaaacgggctgtaagcctgtaacaacttcaaaaggaacataaataaacttattacagaatatgccggctcaaccttgtttaactcaaagaaaatagcgtgccaaacacatcatattaaactttcggcattgttgtagtgttgtaaggagtggatggctcaacagcgagatatcgtgtcagcaaacttgcagtgctgctgttgaacccctggacaggctttccttccatgcgggatgcatgcagagattttctcac

SEQ ID NO: 400365 - DNA, 299 bp, Oryza sativa nipponbare
aaaggtagtaaaaaggtaaactcttcataataatattattaagacattatagctgatgtcttttgatcacactgcgatcaaattatgcatcataggcagtacaactccgcgtcaggaaaaagtagaggagatatatttcttgttattacttaatacagcattcacatatatcgaaccatccggtacgtacgtagtagtactccacgcgttcacatcgatgatcggggacgatatcctcaggtagtacttatgcaaaagcgttggcgtaaactgacgaactgaacggacggactgtcgga

SEQ ID NO: 400366 - DNA, 371 bp, Oryza sativa nipponbare
ttttgcaaaagactatatattcatatgaactttatacactttacatttcttgtgaaaatgttgattaaaatctactgctactttttcatgcttatctctcaagtctttcattcattcttcttttcctcccttcttttcagcttctggtgatgagatatcctgctcgtagatgacctgagcaaccaaaccaatgaatattagacccagagctgcaaccttcctccactccacctcaggtgttgcgaagacggcatttgcaattgtaagcccgagtattgccatgagcccaaggtaaatgttcatcctagtttttgatcctgcactttcttttgcaatatctttgaccttttgtgcttctagcttgggtattg

SEQ ID NO: 400367 - DNA, 367 bp, Oryza sativa nipponbare
tgttctcaagaatcttaagatggtaaatacacacaagagagaggtacggtatacaagacttagtttttcttaagtacaacagatcttccattcctccatgatcctatcagcttctacacccaaaccacacaaatcaccatgcacgagccctcttcctccactgccaaatcaactcacctggggcttgagtagccaagcatccatgtggtgatcagtagccgatgtcagcgtcgtcgacgacgaggttgccggtgatgagctcacggtaggcggcgacgggccagatgaaccccctcgggaggagcttgacggcgagctcgacgtcgatgatgatctccctcatggccggcttcttctcgccgctgat

SEQ ID NO: 400368 - DNA, 372 bp, Oryza sativa nipponbare
gtgtatatagccggagctttgttttcacatatcctcacccaacgataattgtagtactcttacaataaaaccggccggagagggagggaagagattattacatatgtgttaagagcagaggccattgagatggtacataaccaaactgtaaaataaaaatatatagcatattatatattgatatatcatcaacatagcccaaaacaaagctgcatactattattataggcagcaatccaccagcgcgatgcttgatcttagcttagttgccaccagactcctcgcaacctgggggcttgtaggcgatgaagctaatcaactgcacctgcctgacgttgtcgaagccgatgatacggacaaaggcatcggggt

SEQ ID NO: 400369 - DNA, 378 bp, Oryza sativa nipponbare
agcaaatcgatccatgcgaccatgcgtgcaaatcagttggagcacaaatttacatgttacacccacaccctacacccatgcataataatacatcgtatatacgtacgtacatacatacccctctcgatcacacgcaccatcgatcgtacaaagttgcgtacatacatacgtacacacatatacgcatacgcacgtacatacatacataattaaaaactcgtaattaattaaatacgtagttgatggcatctctaatggaacttgaggctggtgaggatgttgttgtggacgggatcagcgaggtgatcaagcaggttctgcacggggccaaccccggtgaagagcgcctggactgagaagccgaggaaggcgagcatg

SEQ ID NO: 400370 - DNA, 388 bp, Oryza sativa nipponbare
aaactcttcataataatattattaagacattatagctgatgtcttttgatcacactgcgatcaaattatgcatcataggcagtacaactccgcgtcaggaaaaagtagaggagatatatttcttgttattacttaatacagcattcacatatatcgaaccatccggtacgtacgtagtagtactccacgcgttcacatcgatgatcggggacgatatcctcaggtagtacttatgcaaaagcgttggcgtaaactgacgaactgaacggacggacggtcggatttagggctcccataagtccaagttgccggagacgaagtcgtagtggccgccgacgagcttgagggtgccggtggcgatcccctccttgacgaacgggtaggtctt

SEQ ID NO: 400371 - DNA, 290 bp, Oryza sativa nipponbare
tattaacaaggagatatgtaccattacatgatgattaacatataaatctgtagctacatggaattaaggtagtggagcagaggaggaaggatgatagaagactccaattctccatggatgggaatgggatcaggtggccttgcagaactctccgcccagatcgtcgcacgcctcctcggggaacaccgtggtgggctcgtcgtaggataggtagtccctgtcgacttcctccgccgccgcacgagaaacagcaacagcagccgatgatgagaggctggcctctgggtaca

SEQ ID NO: 400372 - DNA, 361 bp, Oryza sativa nipponbare
ataattaattcacaacaccatatttcattgatcaggttcagaacctgcacagaaatacacactaccggtacagatctcaccctctctccaatactcgtacatccatccacgcggtccacacgaatacgtacatctatacggtacacgtacgtacatctactgcaccgcgtacacacacgcacactctcctgcagagacgcgcatcgtcgtcaacctagctagcttagctgaaggcgatgcgtcgccatggcagcacggcggcggcggcgctcacttgccggggacgaagttggtggcgtaagcccaggcgttgttgttgacggggtcggcgaggtggtcggcgagggtctcgagggggccc

SEQ ID NO: 400373 - DNA, 337 bp, Oryza sativa nipponbare
aattcacaacaccatatttcattgatcaggttcagaacctgcacagaaatacacactaccggtacagatctcaccctctctccaatactcgtacatccatccacgcggtccacacgaatacgtacatctatacggtacacgtacgtacatctactgcaccgcgtacacacacgcacactctcctgcagagacgcgcatcgtcgtcaacctagctagcttagctgaaggcgatgcgtcgccatggcagcacggcggcggcggcgctcacttgccggggacgaagttggtggcgtaggcccaggcgttgttgttgacggggtcggcgaggtggtcggcg

SEQ ID NO: 400374 - DNA, 299 bp, Oryza sativa nipponbare
  unsure (1)..(299): unsure at all n locations
ttttaattcgatcatccgttggatgcggcctgcggcttacattaaatctcgatccaaagaagcaaagatgatgacagacagaaattaattaagctagaaatctcctcgatcgatcacacacacacacacaattaaggtacatacatacatgcactgctgcaactgcaactgcagggtcggtgcgtggctactacaagtgtacacatggtacgttggttggcaccatctcgatcgtgtcgatgngctcactagccggagacgaaagtggtggcgtatgcccaagctgttgtggccaacgg

SEQ ID NO: 400375 - DNA, 240 bp, Oryza sativa nipponbare
aaatatatatagccggagcttccatatatttcattcacatatgcctgacccaacaacatatagtcgaagcagataccactcttacatcaagtcagagagagatcaggtgaaacaaaaacaaaagcagagcacggtcggtaaaatcaaaagacgatgaacaaactgggaacacacgaaacatggtgggagacatcatcgaatcagagtggacaatttaacaaggctttatatgacgatgac

SEQ ID NO: 400376 - DNA, 243 bp, Oryza sativa nipponbare
agaccaagaaattgttgaagttcgattgagtatgatagacctttttactaggcaaaccacacgaatacacgattggttaatttcactgagaatagcacgggtacattacattacacaaattcatacgttgatacacgcataggcgccgaagcgaccagctgcttaattaatcgataacacacgggtttaattcagcaataattagcacacacacaaaccacacttatatgggtgggttttatt

SEQ ID NO: 400377 - DNA, 386 bp, Oryza sativa nipponbare
atcaaggttggtctgagtatagtattacatataagtatcgtttttgacgatttgtacaatatatttattacgatgtgtatgtgcatatgattagcctggtgctagcattcacatatgcatgctcttcaacctatgttgatacatacatatgtacatacatacacagctgatgttgacacaaacaagatgaaaaaaaaaaaaactgaagcaacaaactgggaaaggggaaaccaatgcaaggtggcccgattcgaacgttcaaagctgccaaaaccgaatagatcaatcgagtctcctctgtatagagctcacgagtgagcttgctggcttgccaactagcttagtttccgccggactcctcgcaacccgggggcttgtaggcgatg

SEQ ID NO: 400378 - DNA, 365 bp, Oryza sativa nipponbare
gggatcgagggagtatttgtttccgatctaatagagatgagaaatccgctaatcagaataacaccacggataagtacctagaccattagttgggaaacgaataaaatcattattgcaaaaacatcatcttcttcttcatcttcttagtgtacacaacaccaactcgatcatcatctcgtcgcactaaacccatcttccccaacccaaagacaacgaactcgctggccacaaatccatccaaccacaattaaccactgctaagctacggtcccccacttcacttgccggggacgaagttggtggcgtacgcccaggcgttgttgttgacggggtcggcgaggtggtcggcgaggttctcgaggggg

SEQ ID NO: 400379 - DNA, 422 bp, Oryza sativa nipponbare
gtataaatatatatagccggagcttccatatatttcattcacatatgcctcacccaacaacatatagtcgtagcagataccactcttacatcaagtcagagagagatcaggtgaaacaaaaacaaaagcagagcacggccggtaaaatcaaaagacgatgaacaaactgggaacacacgaaacaaggtgggagacatcatcgaatcagagatgaacaattaaacaaggctatatatgacgatgacggcttagttgccaccagactcctcgcagcccgggggcttgtaggcgatgaagctgatgagctgcacctgcctgacgttgtcgaagccgatgatacggacgaatgcatcagggtacgccttcttggcctcctcgagctccttgagcacctgggtggcgtcagtgcaccccgacatggg

SEQ ID NO: 400380 - DNA, 371 bp, Oryza sativa nipponbare
  unsure (1)..(371): unsure at all n locations
aatagtaactatgatcttcaaattcacaaattctccatatgaatattacatacatgcagaatgtgaaggaaaattaaccaaacttggaagcaccagcgggaagcaacatatggcggacatagttcaaaggaatggagaccatatgcatggatacatagtacataatagtgcagtagaatctatccacgaggcgaaatgcaggatgcgaaggctgaattcgttgatctagtgctggacagaggcggccatcttgtacgcgtatctacacttnagcgccacctcgcgcgcgccgccgncgncgatctcaggcgttgctccggtaggacccgagcttggcggcgctggccctcagcacgtactggtggtaggcg

SEQ ID NO: 400381 - DNA, 390 bp, Oryza sativa nipponbare
gatgtacaagtggatgcattaattcatcatcttgggtgttcttatattacaaatcaccaccatgcaagtcgccattaaccaccaacccagctttcctaatttaagtagtaatcaacaaaaggatgacctctcctctctccataccctcccagctcgctcgtcatcacaaaactaaacagcgcgcgcgaacgcacaccaacgcatcgatcccgtttgaattgcgcgcgaaagagcttaaattaagaggatgaggagaaggtgtcgaagatggtggtgtggagcgggtcgctgaggtgggtggcccagttgttgaggggccccttgccggtggcggcggcctgcacggcgaagccgaggaaggcgaccatggcgaggcgggcgtgcttgatc

SEQ ID NO: 400382 - DNA, 283 bp, Oryza sativa nipponbare
ttagatacaaaaatgaaacatgattaattactaggattacttaacacacggatcacagaaaatcaatccttgcatgcaggggaaatcgatggatcgacctctctccttaacttgttcttaattctcatgtacaatcaaagaaacacacacgcacacacacatgcgtgcactgcatctctctgagcaacgaactcgattgatttgattttgattcgctagggattaaagagaagctgagatagagatttcgacgatcatgcgacgctgaaggagctggctgcgc

SEQ ID NO: 400383 - DNA, 408 bp, Oryza sativa nipponbare
tttcagtgatgaagagaacttcacttctaaaagagtatcaacttgttttttacatcggttacatcatagtacaggtacacaatcaacaaggcatgcagtgctccatccacaattacatcccaatacaccaccaccattcacagcctactccgatcccaaaaaagagaggtaagtcgcgtcgacgaacagtcttttcatcttcctccattggcagccattgctaacactccaacacctgaagaactcctcatttgggggtgaaggcctggaagatggtggcgtggccggggtcggcgagatgggcgaagaggttgtcgatggggccggtgccggtgtactctgcctggaaccaagctcccatgacggcgagcatggcgagccgcccgttcttgatctccttggtgcgca

SEQ ID NO: 400384 - DNA, 380 bp, Oryza sativa nipponbare
tttgatcacaagaagcacagccataggctagctaataaagatccccaaagatgaccacaggtagcagcagaggtgagcatcagttacactaagaaaatggctaaagataaaaacgagtacaaacacatacaagtgtggataggacattaggaattgctacgagcgtacaagcaaccacccagctccatacacacctgggggctgggcaaagctttcatcctctttctggccttgggatcaatcccctccagcatccatgacatcgacggtgaactcgtactcctgatcgcagcccagataagaatcggacatcaggtagatcatgtactcctttctcccagcttctgaagcagcggtgaactcaagcttcactcgagccc

SEQ ID NO: 400385 - DNA, 422 bp, Oryza sativa nipponbare
tgcagataatcagatattcagattatgctaacaagggagttcaactgatcaatccactgcagctgagataaaattcagacaactttaggcaggataagaaagtggttctttaatcagcaaaattatgatgctccaagatacacacagctactgatagtctcttcaggacaggcaaaacctcgaaacgaacacgacgcaacccataagccctagcttctccttcttcttcttcttcccagggcagcggcgtccggcgcctcgtcctcctctcctccccaagctcagaacccgagcttggtgcggcgccagtgcctgcgcttcgcgttgtacctgatggtgttgtcggtgcgcatgcggatccagtacgggatggggcggttctggcgcatcttcttcgccagcttcttcttgatctggaacgt

SEQ ID NO: 400386 - DNA, 299 bp, Oryza sativa nipponbare
ggcgacttaactcactagtcaaaattcatggaaaccattattagagacaatttactcaggtagtagcaaatagtcaaaattgaaacaaaaaaaaaatccagggaaaccattcagcaatgtcaacgatgatgaaaaccacttcgagacaatttactcaggtagcaaatatttctcagccacaaatccaaacacttggtccttcctatcagaagatcagaatgaacaggttttcaaattcatctcccaactcgacgataatttacacgtacatttaacacattcttccacccttctcaaac

SEQ ID NO: 400387 - DNA, 414 bp, Oryza sativa nipponbare
tttggacgggaaaccgaaattttactactcgttagcacgggaaacccaaccctaaacgaagctactggttgtagccgaagtaaccagaaaaaatcaaatcaagacacgaacttgatagatacagtaggacgatggcatgcgatgggttggtcgggaggtagagacttttattacgccttggtgggcagcaccggcacgacgaagtgctgcgcgacgatgcggcgctggatcttgccggtggccgtcttgggaagctcgtcggcgatgtacaccttcttgggcaccttgaacgcggccaggttcctccggcagtaggccagcacctcctcttccccgagcgacacgccctcccgggggatcaccgcgcagttgatctcctccccgtacttggcgtcgggcaccccgaacgccacg

SEQ ID NO: 400388 - DNA, 359 bp, Oryza sativa nipponbare
gctggaaaatttgatgatttatttcccacttatatcatcatatacaaatactaacacatgcgaaaattatcaagcagaaaagttccatacaaattcatccagacaaacaagtgtaaaaaaccttttttttcccatttcccccttgaactatccgtaaataccaccattccaccaaactcccctttgtcttctacgacaaataatcttttcaacccagtaacttataattaattacagagagattagcaaacatataatggtaagaatcagttgtcgtaggtgcggcactcgtcggtctccgggttgtccttgcagtaggcctcgagcgggtcggaggtctccttgagcttgtcgcgcgc

SEQ ID NO: 400389 - DNA, 520 bp, Oryza sativa nipponbare
caacaagcaaaagttcagttcggtagcttattattgcaaccattaggaatagaggtaatttttcagccgctcatacagccatgctatactatgcagggcaagaagaacacaggtgcagagcagctgccattattcgcgagacacatcacacatacagagagttcgatcgatcggagttggttgatgagattagagataagataattagaacatgtccttgagtgtggggagcttcatctcgccgctggtggagagcgggatggtgaagttgccgacgatggggaggtcgatggtgaggccgacgtcgagctggtagtcgatgtcccagtcccggcccacgtccttcaccagcgagatgaggaagtcgtaagggatcttggccggtatctccagcttcgtcgtgtcgctcgccgcgatccaccccggatcgggcatcgtgccggacgccacaacgttggccggcgcacttgagggtgtaggtgaactcgcaaatggggaggcggtggtcttaggggttgga

SEQ ID NO: 400390 - DNA, 408 bp, Oryza sativa nipponbare
tagcaataatcaaacactaggtctcgtatggatcattacaaagtacacaaatgtacaaattaaaacatcaaaagagttaactaagcttaaagcagcagctgacacataagttgcaaaccccaacttttttcagtttctgaattctggatggatcatatcagattcatcacagcatcgtacaatctgtgcaagcattggtacatcgagcgatggagagagagagtagtctacaatggcggctgggccattcacgagcccggcgtgaacttggtggcgtagacccaggcgttgttggcgacggggtcggcgaggtggtcgagcaggttctccaaggggcccttgccggtgacgatggcctggacgaagaagccgaacatggagaacatggcgaggcggccattcttgatc

SEQ ID NO: 400391 - DNA, 305 bp, Oryza sativa nipponbare
gggtggagaccacacgaatacacgattgattaatttcactgagaatagcacgggtacatcacatcacacaaattcatacgttgatacacgcatagtcgccgaagcgaccagctgcttaattaatcgataacacacgggtttaattcagcaataatcagcacacacacaaaccacactcatatgggtggtttttattgtggactaattaaggtaggtgactcgccggcggcgagtgttcggttgcttcgtgacttcacttgccgcacttgcagtcggggcaggagcagctggtgccgcacttgcag

SEQ ID NO: 400392 - DNA, 419 bp, Oryza sativa nipponbare
aaatatatgtagccggagcttccatatatttcattcacatatgcctcacccaacaacatatagtcgtagcagataccactcttacatcaagtcagagagagatcaggtgaaacaaaaacaaaagcagagcacggccggtaaaatcaaaagacgatgaacaaactgggaacacacgaaacaaggtgggagacatcatcgaatcagagatgaacaattaaacaaggctatatatgacgatgacggcttagttgccaccagactcctcgcagcccgggggcttgtaggcgatgaagctgatgagctgcacctgcctgacgttgtcgaagccgatgatacggacgaatgcatcagggtacgccttcttggcctcctcgagctccttgagcacctgggtggcgtcagtgcacccgaacatgggc

SEQ ID NO: 400393 - DNA, 380 bp, Oryza sativa nipponbare
ggaaaaatcattaataatataaatatatcgaaaacagttggttaaacagagtagtcaagagtcgatcgatcgatgtacacggagacaaaatcaaagacctctctcatcacttggattaattaatactagtaatatttagagactcttgggcaagcatagaaataattagcaaatgaggatggtgatgcaggaggtgtagaggctaggcagcaagggaggggtggtggtggtcagagttggggatggtctccttgtggagatgaccgtctcccttggggacgatgagaccgaagcctccttccttcctcttgtacaggacgttcatcttcccggtcttctcgtctttgaaggcgtagaaattgtgggccacattcactagc

SEQ ID NO: 400394 - DNA, 432 bp, Oryza sativa nipponbare
ccacgcgtccgcccacgcgtccgcccacgcgtccgtctttctgctccttttttctcatgaccacaatgcttgcagctagctctgtagtgaacagcaaccttccttgctcatcaaggatatcctcctgctcagacttcacatctggctactcctggcgtcctatagaggctgcaaaactctgccggacacgagctgtgcgctcgctgcagataacctgtactgccacaaagcctgcaaagtcaccagctgaagaagaatggaagatcaagaggcaagtgctagtagaaaagcgggtccgtagtgttgatgtgaaggaagcactgcgtcttcagaaggaaaacaattttgcaattcttgatgtcaggccagtagcggactttaaagaggctcatccacctggtgccgttaatgtgcaaatatatagattgataa

SEQ ID NO: 400395 - DNA, 431 bp, Oryza sativa nipponbare
ccacgcgtccgcccacgcgtccgagcacggggaagggtgtgtaccaattcgttgacaagtacggcgcaaacgtcgacggctacagcccaatctactcgccggaggaatggtctcccaccggtgacacctacgttggtggaaccaccgggcttctgatctgggccgtgaccctcgccgggctcctcggcggcggcgccctcctcgtctacaacaccagcgccctcgccggctaaatttcacccaaatccagtctatgtatgtaacaccaagctgggtgtctgcatattcatctgtaatctaagatagccttcctctgaatgcgatgtgatgatgcccactgcttaatcaaactgcattgtgattaatctatgtaacactgtacttgcatgatgatgatatactacacttgatacttgaatttggagattaaa

SEQ ID NO: 400396 - DNA, 445 bp, Oryza sativa nipponbare
ccacgcgtccgcccacgcgtccgcccacgcgtccgcccacgcgtccgcccacgcgtccgcgaaactcagctgcaaggagaaggagaaggtaggctccagccatggcttcccagctctccgccgccacatccgtgccgcagttccatggcctccggacctactcctctcctaggtccatggtgacgctgccatcgttgaggatgagcaagaagaggtcccagggcatccggtgcgactacatcggctcagccaccaacgttatcatggtgacgacgacgacgctgatgctgttcgcggggaggttcgggctggcgccgtcggcgaacaggaagtcgacggcggggctgaagctggaggcgcgcgactccggcctgcagaccggcgaccccgccgggttcacgctcgccgacacgctggcctgcggggccgtcggccacatcatggg

SEQ ID NO: 400397 - DNA, 443 bp, Oryza sativa nipponbare
ccacgcgtccggtggaaattgcatgatgtaaacactctggtagcaggaacagcgctaattggcctaagctcaggcttcatctttgctgcagcagtgtcagtgacctctgagctctttggaccaaacagcattggcatgaaccataacatcctcatcaccaacatccctcttggatcacttctctatggtcagattgctgccctagtgtatgatgcaaatggcctaaagatgtcagtaatagacaaccacaatggcatgattgacactatggtggtttgcatggggccaaagtgctactcaaccacattcttcgtgtggggttgtatcacattcctagggttggtgtcaagcataatcctattcttgagaacaagaacagcttacagtgctgctaatggtcagcaagttataaacaccacagccaagtttcgagttgacagaac

SEQ ID NO: 400398 - DNA, 425 bp, Oryza sativa nipponbare
ccacgcgtccgcccacgcgtccgcccacgcgtccgcccacgcgtccgtgtaactcaggaggctgatgatgcacattttacatgcactaaaattgcagcagagagcattattgctttgtccatgcatgtgccaacaattgcagagacgcctgatgatatgctgcagtggtttgcagatcttgctttatcaagcactgatgaccacgttgagcaagcagaagcccatgattgcgtgaataattccagtgatgatggtctggattcatttgaatcgttgacactgaagctggaagagaccaagattgatgagtactggagcaggccacaggctcctgaaataccaaatgatgaacaagcaggattatcagtgaaccttctcactaagccaaaacgaggccagcaaaggaggaggcggcagaagcgcga

SEQ ID NO: 400399 - DNA, 431 bp, Oryza sativa nipponbare
ccacgcgtccgcccacgcgtccgcagatctatccatccatcccatcctcgatccttcattcctgcccggcggcgagcgagagagaggcggaggagatccgagatggcggggagcgggtggaggaggatcccggcggtgaggaggccgcccatgtcgcgcccggcctcggtctgcctctggatcgtgctcgtcgccgccaccctggcgctcgcccaggcgaagaaatcgaaggcggatttgactgaggtcacccacaaggtctacttcgacgtcgagattgatggcaagcccgcaggacgggttgtcatgggacttttcgggaagactgttcctaaaacggcagagaacttccgagcactttgcacaggagagaaaggaactggaaagagtggcaaagcactccacttcaagggaagtgcattccacagaat

SEQ ID NO: 400400 - DNA, 438 bp, Oryza sativa nipponbare
ccacgcgtccgcccacgcgtccgaatcatcatgtaatggtacatatctccttgttaataaggcacgctagtctagctcctcaaaatgatttacaataatataatatttacatacatataatacacttactccatcgaacaatacctctgttatctcatggttacttcccatgatcccatcatcaacaccaacattcatcacactttgctgcgttagagcaggtacaatggcaggctataagccagctacaaacatattttacgaagataaatcaagagagagaagagcaacgggctacagatttgtagccagctgtagcacggactccaagacgcagtgtgtctatgacaggtgggactagatattaatagtgtagtatgtaactattgtatgaatgggctattagattgactatagatgaattggagctagtagttg

SEQ ID NO: 400401 - DNA, 427 bp, Oryza sativa nipponbare
ccacgcgtccgggcgacctagcccgacctcgcaaccatggcaaggggtttgaagaagcatctgaagaggctcaatgcgcccaagcattggatgctcgacaagcttggtggagcttttgcccccaagccatcttgtggtcctcacaagtgcagggagtgcctgcctctgatcctcattatcaggaacaggctcaagtatgctctgacataccgtgaggttatttctatcctcatgcagcgccatgtcttggttgatggcaaggtcaggactgacatgacctacccagctggtttcatggatgtcatttgcatccccaagactggtgagaactacaggcttctgtacgacaccaagggacgtttgcgacttcagtctgtcaaggatgaggatgctaagttcaagctttgcaagggtcggtctgtgcagt

SEQ ID NO: 400402 - DNA, 351 bp, Oryza sativa nipponbare
ccacgcgtccgcggacgcgtgggtgctcctactactgctcgcctcgcttacttactaccctcctgctcctaacaacaacaacaacaacaacaacaacaacaaggaagctctatcgggaaagaaataggaggaagaaggattaaggaaggaaagcaaagcaagcattaattaaaggaaattaggaaggatgtcagactgggggccggtggtgatcgcggtggtgctgttcgtgctgctctcgccggggctgctcatccagctccccgggaggcaccacttcgtcgagttcggcaacctgcacaccagcgccatgtccatcgtcgtacactccatcatctacttcggcctcat

SEQ ID NO: 400403 - DNA, 439 bp, Oryza sativa nipponbare
ccacgcgtccgcggacgcgtgggcggacgcgtgggcggacgcgtgggttcggtttctgcgagtgagagaatctaatggcaatccaaggtttcagataggttcaattgacctctacgggaaaagcacatgagctttcttgaaagtgtgttacctcgaatagaaagccttttaaaccttctcgaagctaaactatacgtggctgtgaccatggctattatttgcaaccaacgcagttgcattatttattggaagattgtaaaatgtgaaattcaactatggaaggagtgattatcccttcaattcttgagaagactctttatatgcccccattgccttaagtctctagttgtttcctacaactcaagagtactgcagaataaggaagcacagaggagctatctaagtgttgtgtgatatatagacatgtatatgtcagttt

SEQ ID NO: 400404 - DNA, 424 bp, Oryza sativa nipponbare
ccacgcgtccgatcgccatctctctcagctctcacagctcactgcatcaatggccgcggccaccatggcgctctcctccccggtgatggcccgcgcggcgccgtcgacctcctccgcgctcttcggcgaggcgcggatcaccatgcgcaagaccgccgcgaagcccaagccggcggcgtcgtcggggagcccgtggtacggcgccgaccgcgtcctctacctcggcccgctctccggcgagccgccgagctacctcaccggcgagttcccgggcgactacgggtgggacaccgcggggctctccgccgacccggagacgttcgccaagaaccgggagctggaggtgatccactcccggtgggcgatgctgggcgcgctcggctgcgtcttcccggagctcctcgcccggaacggcgtcaagttc

SEQ ID NO: 400405 - DNA, 429 bp, Oryza sativa nipponbare
ccacgcgtccgcccacgcgtccgatctgcttcttcttccgctacgcttgtgggcacgatgagaagggcgaccattcttgtactgctcattgcactctcatctgttattgctccccttccattggaagctctcaatgtaagaggccatctactgaaatccaagacatttctgtctccggcattcttcctgcaccctggatcagtttcaaacaagttctactatgatgtccccttccctagaggccaccttgctctcaagagctttaatgctgaagtcgtagacgagaatggcgtccctgttccgctccatgatacttacctgcatcactgggttgtggaaccatactatgctttaaagaacagtgatagcgcagacgcgcaaaagctacccaaggggatcattgcaaggaactctggtgtgtgcaagaaa

SEQ ID NO: 400406 - DNA, 369 bp, Oryza sativa nipponbare
ccacgcgtccgcaggcaggcaatcagcggcgaggcaccagcccaccggccggcaatggcgtccacctcctgcttcctccaccagtccacggcccgcgtcgccgcgcgcgtcgcctccccgtccccggcgacacggacccacctcctcgtctgccgcgcccagaagcaggacgacgccgacgtctcccgccgcgcggcgctcgcgctgctggccggagcgacggcggcggtgggggtgaaggtggcgcccgccgccgcggcctacggcgaggcggggaacgtgttcgggaagcccaagactaacacggagttcattgtctacagcggcgcgggggctaagatgctgactcgatccacgtggaaccccctc

SEQ ID NO: 400407 - DNA, 436 bp, Oryza sativa nipponbare
ccacgcgtccgatggaggtctgatggactatgcatttgatttcatcatcaacaatggtggaatcgacaccgaggatgactacccttacaaaggcaaggacgaacggtgtgacgtaaacaggaaaaacgcaaaggttgtcacaattgacagctacgaagatgtaacaccaaacagtgagacgagtctgcagaaggcggtagcaaaccagcccgtcagtgttgcaattgaagccggtggcagagcattccagctctactcatcgggtatcttcacgggtaaatgtggaacagcactagaccacggcgtcgctgctgttgggtacggcacagagaatggcaaggactactggatcgtgaggaactcgtggggcaagagcttgggtgagtccggctacgtccgtatggagcgcaacatcaaggcgagcagtggcaagtgc

SEQ ID NO: 400408 - DNA, 435 bp, Oryza sativa nipponbare
ccacgcgtccgcggacgcgtgggcggacgcgtgggctgaggaggtgaccactacccagactgtcatcatgggtgttgcaccttccaagggtcatgccgaggggttggaggccggcgccgccgccggagcaggagcagagaacgggtgcaagtgcggcgacaactgcacctgcaacccctgcaactgcggcaagtgaagcaagcaacctcctgacgaaaccaaggagatggaagggcctagtactgctaagctagtagtttgatccagttacaagtgatgagttgttgtcactgtaactttgtgtttcctctgagtttgtgatctaagacctgagactgaagaaatgcatcctagttaaataagtgctaagaataaagatgttttgagacatctatggcgtgtgtacgatgatgtagtccttcctctccagtcttg

SEQ ID NO: 400409 - DNA, 435 bp, Oryza sativa nipponbare
ccacgcgtccgttttttttttttttattaaaccactatttttattcatgccaaacaccagcactagtccagtgacaaccaaacgacaatcctacactccaaaagtttacatttaggttctcaaatagtgatacatagctttgagagttgaaaccgtcagatactgacatagtttatgaggtgcccctggagttggcaaaaacttcacgaagattgtcgcagctctggacgcacaaagtctgcatcagcaggcactgaaatgtcaacggtgggcctcaactgagcacagacttcaatggcactatggacgggatcggagaagaaattgctgatgaggtcttgattaactggagcattcttgtcaacagtcacaaaagcttgttgggtcaagatgtagtcgaagcgtggcgcccattttcttgatcccaaccgggct

SEQ ID NO: 400410 - DNA, 265 bp, Oryza sativa nipponbare
ccacgcgtccgcatgtgcctacaccagcagaaaagtcatttttgaggcggcagttcttacagcagcggtggtgatcaggtcgacagcatacactttctgggctgcatagagaggccatgacttgaatgtcctcaagcccttcctgttgtctgttgtgatggacgctgattctatctaaaatgatccagatattctcaccatggggcaagatctctgtaatgatatatggcgcactggcatcgctcgcgtgctctggatacatgat

SEQ ID NO: 400411 - DNA, 436 bp, Oryza sativa nipponbare
ccacgcgtccgggagaggcttgagtctggattgtacagcaggagctacctagagaaccaaatggccgtagctcttggtggaagggttgccgaagaggtgatctttggccaagaaaatgtgacaactggggcctccaacgattttatgcaggtttcacgtgttgcaagacaaatggttgaaagatttggattcagcaagaagatcgggcaagttgcgattggtggacctggtggaaatcctttcttgggccagcagatgtcgagccagaaggactactcgatggccaccgcggatgttgtggatgctgaggtgagggagctcgtggagaaggcctactcaagagcaacgcagatcatcacgacacacatcgacatcctccacaagcttgctcagcttctgatggagaaggagacggtggacgggggagagttcatga

SEQ ID NO: 400412 - DNA, 363 bp, Oryza sativa nipponbare
ttccgacccacgcgtccgaagaaaaacaatgttaatacgtctgcgctgacacaatctgaaattcgtgacattatacttggtgctgaaatagctccaccatcacagcagaggcaacagattgctgaaattgagaaacagtctagagagacgactcagctgaccgcagttactacaaggacgaccaatgtgcatggagatgagctcatcatcacaacgaccagtccatacgagcaacaagcatttgcattaaagactgattggcgggttagggctatctctgccacaaacttgtatcttcgtgtcaatcacatatatgttaactcagatgatataaaggagactggcttcacttacattatgcca

SEQ ID NO: 400413 - DNA, 395 bp, Oryza sativa nipponbare
gcgccggagctaaacccctcgacgccgacatggggcgcatgcacagccgcgggaagggtatctcgtcgtcggcgctgccgtacaagaggactcccccgagctggctcaagaccgccgcctccgatgtggaggagatgatcatgaaggccgcgaagaagggtcagatgccgtcgcagatcggcgtggtgctccgtgaccagcacggaatccccctcgtcaagagcgtcaccggcagcaagatcctccgcatcctcaaggcccacgggcttgccccggagatcccggaggacctctacttcttgatcaagaaggctgttgctattaggaagcacttggagaggaacaggaaggacaaggactccaagttcaggcttattcttgttgagagcaggatc

SEQ ID NO: 400414 - DNA, 429 bp, Oryza sativa nipponbare
ccacgcgtccgggctgcgctgcggtggcgaggcagctgagatcggcgagtataccatggaacacgcggccaagtacgtccctcctagctgccgatctcccgatgcctctggtcttatgcatgccatccatgtcttcctcctcgccacctctccatctccctgaaccatatcaaatcaaatcctttcatctcattgagtaccggtcggtatcttgaattgaatttgcttattgttcgctgcctattaccagcacattaatttgagtcagttactctggctcattttctgtcataagtctgttgtgtcatgtactggtatgcaacataaaaaaacatgaatattagggaaggacctaatatcaaataaatcgaagaggtgaggcttcgaacccaagccggctagcccatcaccttgtggagctagccggaa

SEQ ID NO: 400415 - DNA, 435 bp, Oryza sativa nipponbare
ccacgcgtccgctctactactactagccagtgagctagctaactacctacgtggctatggcccccaccgtgatggcctactcggacacctccgcggctccattccaagggctcaagtgccacacgccggggctcctccgatagcctgacgctccaccaactggggcttgcgcaacggcagcaatggccgaaggatcaagggcatgccggtgtggccaattgagggcatcaagaagttcgagaccctatcgtacctgccaccactcaccgaggaggatcttttgaagcagatcgagtacctgctccgatccaagtgggtgccttgcctcgagttcagcaaggttggattcgtctaccgtgagaaccacaggtctgccgggtactacgagggcaggtattggaccatgtggaagctgcccatgttcagctgcaccga

SEQ ID NO: 400416 - DNA, 432 bp, Oryza sativa nipponbare
ccacgcgtccgcaagaaagcataagcaacacaagggattaactcatcactcacttagctaattaaatcttcgaccatgtcggacaagtgcggcaactgcgactgtgctgacaagagccagtgcgtgaagaaaggtaccagctatggcgtcgtcatagttgaagccgagaagagccacttcgaggaggtcgccgccggcgaggagaacggcggctgcaagtgcggcaccagctgctcctgcaccgactgcaagtgcggcaagtgaagtcacgaagcaaccgaacactcgccgccggcgagtcacctaccttaattagtccacaataaaaaccacccatatgagtgtggtttgtgtgtgtgctgattattgctgaattaaacccgtgtgttatcgattaattaagcagctggtcgcttcggcgactatgcgtgt

SEQ ID NO: 400417 - DNA, 440 bp, Oryza sativa nipponbare
ccacgcgtccggtgagttgttgtaaagttgcaagagagagatcagttgttgagtgcgtggaagcagagatcaggaagatgctggagaagctgtgggacgacgtggtggccgggcctcgaccggagaccggcctggagaagctccgcaaggccgctacaacccgcccccttgtcatcaacaaagatggcgacggcgaggcgagcggggcggcgtacaagcggacgcagtcgatgccgacgaccccgacgacgccggtgacgccgtcgtcttcgtctccgacgacgacggcgacgacgacgccgcggggcagcaacgtgtggaggagcgtgttccacccggggagcaacctcgccaccaagagcctcggcgccaacctcttcgaccgcccgcagcccaactcccccaccgtctacgactggctgtacagcgacgagaccagg

SEQ ID NO: 400418 - DNA, 437 bp, Oryza sativa nipponbare
  unsure (1)..(437): unsure at all n locations
ccacgcgtccgtcacaatcaatgattgattactacttcaggacacatcgtgcaaactcagattcaaacttgaagtacagaaacccaaaatatctttctattctcaatcatttgcgattttatctacctgagatttacccaaatctccacaagattgtctttcttgatgatgatgtagtgataaagaaggacctaaccagcctctggtcaattgatatgaaggggaaagtaattggtgttgtagagacttgtggagagagcttccatcgttttgatcgttaccttaatttctcaaatcctgtcattgtgaagaattttgacccccatgcatgtggatgggcttttggaatgaatgtctntgatctggctgaatggaggcggcagaacataactgaaatctatcactcctggcaaaagcttaatcaggacagattacta

SEQ ID NO: 400419 - DNA, 436 bp, Oryza sativa nipponbare
ccacgcgtccgcaagaagttcgagaccctatcgtacctgccaccactcaccgtggaggatcttttgaagcagatcgagtacctgcttcgatccaagtgggtgccttgcctcgagttcagcaaggttggattcgtctaccgtgagaaccacaggtctcccgggtactacgatggcaggtattggaccatgtggaagctgcccatgttcggctgcaccgatgccacccaggtgctcaaggagctcgaggaggccaagaaggcctaccccgatgcctttgtccgtatcatcggcttcgacaacgtcaggcaggtgcagttgattagcttcatcgcctacaagcccccaggttgcgaggagtctggtggcaactaagctaagatcaagcatcgcgctggtggattgctgcctataataatagtatgcagctttgttttgg

SEQ ID NO: 400420 - DNA, 435 bp, Oryza sativa nipponbare
ccacgcgtccgatcggaaaccctgttgggaagaacgttgggagggtcgttattggcctatacggggatgatgttccccagaccgcagagaacttccgtgctctttgcactggagaaaaagggtttggttacaaggggtccagtttccaccgtgtcattaaggacttcatgattcagggaggagactttgacaagggcaacggtactggagggaaaagcatatatggccggaccttcaaagacgagaacttcaaattggttcatactggacctggagtggtcagcatggccaatgctgggccaaacaccaatggcagccagttcttcatctgcactgtcaagacaccttggttggatgggaggcacgtcgtgtttgggcaggttattgaaggcatggacatcgttaagatgatcgaatcgcaggagactgacagag

SEQ ID NO: 400421 - DNA, 397 bp, Oryza sativa nipponbare
ccacgcgtccgcggacgcgtgggccgccaccatggccctctcgtccccggcgctggccggcaaggccgccgcgaaggtgttcggcgaggggcgcatcaccatgcgcaagtcggcggcgaagcccaagcccgccgcgtcggggagcccgtggtacggcgccgaccgcgtgctctacctcggcccgctctccggcgagccgccgagctacctgaccggcgagttccccggcgactacgggtgggacaccgcggggctctccgccgacccggagacgttcgccaagaaccgggagctggaggtgatccactccaggtgggcgatgctcggcgcgctgggctgcgtgttccctgagctcctcgcccgcaacggcgttaagttcggcgaggcggggggttca

SEQ ID NO: 400422 - DNA, 436 bp, Oryza sativa nipponbare
ccacgcgtccgcccacgcgtccgcccacgcgtccgcccacgcgtccgcccacgcgtccggaagtactcgagcaaagaaggagagagcttggtgagctgcagagatggccccctccgtgatggcgtcgtcggccaccaccgtcgctcccttccaggggctcaagtccaccgccggcatgcccgtcgcccgccgctccggcaactccagcttcggcaacgtcagcaatggcggcaggatcaggtgcatgcaggtgtggccgattgagggcatcaagaagttcgagaccctctcctacctgccaccgctcaccgtggaggacctcctgaagcagatcgagtacctgctccgttccaagtgggtgccctgcctcgagttcagcaaggtcggattcgtctaccgtgagaaccacagatcccccggatactacgatggcagg

SEQ ID NO: 400423 - DNA, 427 bp, Oryza sativa nipponbare
ccacgcgtccgctcagctctcacagctcactgcatcaatggccgcggccaccatggcgctctcctccccggtgatggcccgcgcggcgccgtcgacctcctccgcgctcttcggcgaggcgcggatcaccatgcgcaagaccgccgcgaagcccaagccggcggcgtcgtcggggagcccgtggtacggcgccgaccgcgtcctctacctcggcccgctctccggcgagccgccgagctacctcaccggcgagttcccgggcgactacgggtgggacaccgcggggctctccgccgacccggagacgttcgccaagaaccgggagctggaggtgatccactcccggtgggcgatgctgggcgcgctcggctgcgtctttccggagctcctcgcccggaacggcgtcaagttcggcgaggccgtgtgg

SEQ ID NO: 400424 - DNA, 374 bp, Oryza sativa nipponbare
attgcaaaaacatcatctgcttcttcatcttcttagggtacacaacaccaactcgatcatcatctcgtcgcactaaacccatcttccccaacccaaagacaacgaactcgctggccacaaatccatccaaccacaattaaccactgctaagctacggtcccccacttcacttgccggggacgaagttggtggcgtacgcccaggcgttgttgttgacggggtcggcgaggtggtcggcgaggttctcgagggggcccttgccggtgacgatggcctggacgaagaagccgaacatggagaacatggcgaggcggccgttcttgatctccttcaccttgagctccgcgaacgcctcggggtcatcggcgaggagc

SEQ ID NO: 400425 - DNA, 438 bp, Oryza sativa nipponbare
ccacgcgtccgcaacaagttcagggtgtccgcgacagcggtgcacaaggtaaagcttataggcccggacggtgtcgagcacgagtttgaagcccctgaagatacctacattctcgaggccgctgaaactgccggggtggagctgccattctcatgccgtgctggatcatgctccacatgtgcgggtaagatgtcatcgggagaagttgatcagtcggaaggatccttcctcgacgagaaccagatgggcgagggatacgttctgacatgcatttcgtaccctaaggcggattgcgtcattcacacccacaaggaggaagaactctactaggtcgctctttttatgcttctgtgggcacatttgctgatttcaaagtggactcgctgttcagttagttttcgctatccaaaaaatggccatatctttgtattagtcttt

SEQ ID NO: 400426 - DNA, 432 bp, Oryza sativa nipponbare
ccacgcgtccgctcctcgtgaaggttctggagcaactatgtctgatgacgaagacaatcaggttgatagtgagagcaacatgtttgatggaaatgatggatcagatggtatgggctttggccccttaatgctgacggagggcgagagatcattagttgagcgtgtacggcaagagctgaaacatgagcttaaacaggggtacagagaaaagcttgtggacattagggaagagatactccgaaagcgaagagctggaaaactcccaggagatacagcgtctactttgaaagcatggtggcaggctcactctaaatggccatacccaactgaggaggacaaggctcgcttggtgcaggaaacagggttgcaactaaaacagatcaataattggtttatcaaccaacgtaaacggaactggcacagcaatcctgc

SEQ ID NO: 400427 - DNA, 435 bp, Oryza sativa nipponbare
ccacgcgtccgcgcgtcttggggagttgattatctgaagtatgacaactgcaatgatgctggcaggagtgtcatggaaagatacactagaatgagcaatgccatgaagacctatggaaagaatatcttcttctcactctgtgaatgggggaaagaaaatcctgctacatgggcaggccgcatgggtaacagctggagaacaactggcgacatcgccgacaactggggcagtatgacatctcgtgcagacgaaaatgaccaatgggctgcctatgctggacctggtggatggaatgatcctgacatgcttgaagtgggaaatggtgggatgtctgaagctgagtaccggtcacacttcagtatctgggcactagcaaaggctcctcttttgatcggatgcgatgtgcgctcaatgagccagcagacgaagaacata

SEQ ID NO: 400428 - DNA, 433 bp, Oryza sativa nipponbare
ccacgcgtccggcgacggcttcttaacttcgtcgataagactctagtagaagatgttcttccaattctgcaagttgcttttcattcagagctgactccagtgcttgaaaaatgtattcggagaattgcaagatcaaatcttgataatgtatcgttggataaggaacttcctccagaagttgctgttcagataaaagagattcgccaaaaatctcagccaaatgagggtgacaccgtcatttcagaccctgtacatgagaaaagggtcagaagaatccacagggcactggattctgatgatgttgagcttgtgaagttgcttcttaacgaatctgagatcaccttggatgatgccaatgcattgcactatgctgctgcttactgtgattcgaaagttgtttcggagttgttagacttgagacttgccaacttga

SEQ ID NO: 400429 - DNA, 367 bp, Oryza sativa nipponbare
ccacgcgtccgcccacgcgtccggcaagtgggtgaagttgctcgtattcagtgcaccccggattatgcgtatggagctagtgggtttccggcctggggaattcgaccaaactcagtgctggtgttcgagattgaggttcttagcgcccagtaaacgcatcatgtaattccggatggatctaaaattccatgagtactgaaataattgtaacgtcacaacactgctgcgtgctaccgctggaatgttctatgttattgaccaagtaacgttacaccatataaaaaattaataaatcataatataacacaacaatactagatagaattgataaatcaataatcagaaaactctaaaaatatataatagg

SEQ ID NO: 400430 - DNA, 363 bp, Oryza sativa nipponbare
ccacgcgtccgggccatcgtcaccggcaagggcctggacgagaacttcgcctaccacctattcgaccccgtggacaacaacgtctgggcgtacgtcaccaacttcgttcttggcaagtgaagtgggggaccgtatcttagcagtgtttaattgcggttggatggatttgtggccatcgagtttgttgtttttgggttgtgtaagatggttttagtgcgacgagatgttgatcgagttggtgttgtgtacactaagaagatgatgaataagatgttgtttttgcattttagattaattattttttctttgcttggtctattgttttttttttttattccttcattcaatttattttttttattt

SEQ ID NO: 400431 - DNA, 349 bp, Oryza sativa nipponbare
ccacgcgtccgcccacgcgtccgcccacgcgtccgcgctctctcattgccatctctctcagctctcacagctcactgggtcaatggccgcggccaccatggcgctctcctccccggtgatggcccgcgcggcgccgtcgacctcctccgcgctcttcggcgaggcgcggatcaccatgcgcaagaccgtcgcgaagcccaagccggcggcgtcgtcggggagcccgtggtacggcgccgaccgtgtcctttacctcggtccggtctccggcgagccgccgagctaccttaccggcgagttctcgggcgactacgggtgggtcaccgcggggctgtccgtcgaccctgag

SEQ ID NO: 400432 - DNA, 425 bp, Oryza sativa nipponbare
cgtccgctggggccttgcccgctacgccgccatttctcaggacaacgggctggtgccgattgtcgagcctgagatcctcctcgacggtgagcatggcatcgacaggaccttcgaggtggcgcagaaggtgtgggcggagaccttcttctacatggccgagaacaatgtgatgttcgagggcatcctcctcaagccaagcatggtgacacccggtgccgagtgcaaggacagggccacccctgagcaagtatctgactacaccctcaagctcctccacagaaggatcccccctgccgtccccggcatcatgttcttgtcgggtgggcagtcggaggtggaggcgacgcataacctgaacgcgatgaaccaggggcccaacccgtggcacgtgtcgttctcgtacgcgagggcgctgcagaacacgt

SEQ ID NO: 400433 - DNA, 429 bp, Oryza sativa nipponbare
cgcgtccgtaccctttcttgctcttcatcgacccagtcataggagcaattgctgctgggaatgccgttgtgctgaagccatcagaaattgcaccagccacctcagcattgttcgccaagctgctacctgaatacgttgatagctcttgcataaaagtggtggagggaggcgttccagaaacaaccgcactcttagaacaaaagtgggataagatcttctacacaggtagcggaaatgtgggccgcatagtgatggcagcagctgcaaagcatcttacccctgtggctctagagcttggtggaaaatgccctgcaattgttgattctaatactgatcttcatgttaccatgaagaggctagctgttggcaagtggggatgtaacaacgggcaggcatgcattgctccagactacgttataacaacaaaat

SEQ ID NO: 400434 - DNA, 437 bp, Oryza sativa nipponbare
ccacgcgtccgagctgatgtgctgatcaaggttgcaatgatggagtctcgggtcatcatcctgcatgcgaatcccgactctggacttgtggttttccaacaagcactcaaacttggcatggtatccaatgggtatgcgtggattgcaacagattggctcacttcataccttgatccatcggtacatctcgacattggattactgagcacaatgcagggtgttcttacattgcgtcaccacactgaaaataccagaaggaagagtatgttgtcttcaaaatggagtgaattgcttaaggaggatagtggtcacagcagattcttgcttagtacttatggcctgtatgcttatgatactgtctggatgcttgctcatgcgctggatgcatttttcaatagtggcggaaacatttctttcttttctgaccccaaactaaa

SEQ ID NO: 400435 - DNA, 436 bp, Oryza sativa nipponbare
ccacgcgtccgcaaaaaaccaacccaaccgccgccgcatcgccctcgttagaacgatggccgcgtcggcgctgcaccagaccaccagcttcctcggcaccgcccctcgccgggatgagctcgtccgccgcgtcggcgactccggtggccgcatcaccatgcgccgcaccgtcaagagcgcgccccagagcatctggtatggacctgaccgtcccaagtacctgggcccgttctcggagcagacgccatcgtacctgaccggagagttcccgggagactacgggtgggacacggcggggctatcggccgacccggagacgttcgcgaggaacagggagctggaggtgatccactcgcggtgggcgatgctgggggcgctgggctgcgtcttcccggagatcctgtccaagaacggggtgaagttcggggaggcggtg

SEQ ID NO: 400436 - DNA, 406 bp, Oryza sativa nipponbare
tcctcaacttgttgcactcctagagcatcctctccttgctggaattccaggtcgccctcatgggccttttcgagggctaccgcatcaacggcctcccctgctttctcaacagctactatccttacccctgcggccattacttctacccgctcggcctttccgactacccctgtaccttcttcgagctcaaggtcaaggagatcaagaatggccgcctcgccatgttctccattgttcgacttcttctttcatgccatctttaccgtcaagggccccttggagaacctgctctaccaccttatcgaccccttcgtcaacaactcctgggtctaccccaccaagttcacgccggtctcgtaaatggcccattcgtcattgtagactactctctctctccattgctcga

SEQ ID NO: 400437 - DNA, 387 bp, Oryza sativa nipponbare
tggcgactgcgaccgaggaggttgccgctgcggctgctgccgccggcgaggcgccgccgccgccgccgccagcggtggtagaggaggcgaaggaggctttggaggcaccgaagccggaggaggcgccgaaggctgaagagggggaggagaagaaggcggagggtgagaaggagaaggagaaggcgaagaaggagaggaaaccgagggcgaggaagccccgatcggcggggccacaccacccgccctacttcgagatgatcaaggaggcgatcatggcgctggacgggaacggcaaggcgggatcgagcccgtacgcgatcgccaagtacatgggggagcagcacatgggggttctcccggcgaactaccggaaggtgctcgccgtgc

SEQ ID NO: 400438 - DNA, 430 bp, Oryza sativa nipponbare
ccacgcgtccgagcacacatttcagctcaccactgctagcttgggaagaggaggaggagcttgagcttggagagagacaacaatggcggctcaggctcttctctctgggaggcagctgctggggaggccattgcaatcttcagtctccaggtcttcttcctccaggaaggcacccttcatggtcagggcagaggccactccccctgccaagcaaggtgctgacaggcagctgtggttcgcatccaagcagtccctgagctacctggatggcacgcttccgggagacttcgggttcgacccgctggggctatcggacccggaggggaccggtgggttcatcgagccacggtggctggcctacggcgaggtgttcaacggccggacggcgatgatgggcgtcgtcggcatggtcgccccggagctcctcggc

SEQ ID NO: 400439 - DNA, 376 bp, Oryza sativa nipponbare
cgcgtccgccgtgccgcagttccatggcctccggacctactcctctcctaggtccatggtgacgctgccatcgttgaggatgagcaagaagaggtcccagggcatccggtgcgactacatcggctcagccaccaacgttatcatggtgacgacgacgacgctgatgctgttcgcggggaggttcgggctggcgccgtcggctaacaggaagtcgacggcggggctgaagctggtggcgcgcgactccggcctgcagaccggcgaccccgccgggttcacgctcgccgacacgctggcctgcggcgccgtcggccacattatgggcgtcggcgtcgtccttggcctcaagaacatctgcgttctggaccagatcatt

SEQ ID NO: 400440 - DNA, 425 bp, Oryza sativa nipponbare
ccacgcgtccggtctccccctttctgaacacagcaccaccccttctgctgcatctcccacctccctctgaattgtgggcctgaggcgatggcggcgctcgccccgtccaagatgctcggcacccggctcaacttcgccggctcctcccgctacgccaccgcggcaccgaccaccggagcgcagaagatcgtctccctcttcagcaagaagcccgccccgaagcccaagcccgccgccgtcacctcctcgagccccgacatcggcgatgagctcgccaagtggtacggtgagtgaaattgctaaatctgacggctgaaaattttgtgttccaagaaatttttaaatgtaaaattcagaatcttgtcggtttgaaaattttgccttgtttttgttgcaggccctgacaggaggatcttctggccgga

SEQ ID NO: 400441 - DNA, 410 bp, Oryza sativa nipponbare
ccacgcgttcgcccacgcgtccgcgagcagcgaggtggtgacgagctacgaggttctggagaggcggctgcgggagctcgggtgggagaggtacctcaacgacccgtgcctcctccagttccaccagcgctccaccgtccacctcatctccgtgccccgcgacttctcccgcctcaagctcgtccacatgtacgacgtcgtcgtcaagacccgcaacgtcttcgaggtccgtgacgccgccaccactgcttccccgccatgatcgcatcgatgtctatgctttgatcatcatcgatatgaccttcctcgactccgggctcaggccagacacgccgccatggcgcctacaatcgtatgtgggtatggaatgaatctaaatccaggtaaggagggatggtttatcatttgat

SEQ ID NO: 400442 - DNA, 430 bp, Oryza sativa nipponbare
ccacgcgtccgcccacgcgtccgtctactactactagccagtaagctagctaactaactacgtgggtatgggccccaccgtgatggcctgctcggccacctccgtggctccattccaagggctcaagtccaccgccgggctccccgtcagccgccgctccaccaactcgggcttcggcaacgtcagcaatggcggaaggatcaagtgcatgcaggtgtggccaattgagggcatcaagaagttcgagaccctatcgtacctgccaccactcaccgtggaggatcttttgaagcagatcgagtacctgcttcgatccaagtgggtgccttgcctcgagttcagcaagggtggattcgtctaccgtgagaaccacaggtctcccgggtactacgatggcaggtattggaccatgtggaagctgcccatgttc

SEQ ID NO: 400443 - DNA, 60 bp, Oryza sativa nipponbare
gcccggtccggggttccgggcacgacccacgcgtccgtccacgcgtccgcccacgcgtcc

SEQ ID NO: 400444 - DNA, 421 bp, Oryza sativa nipponbare
ccacgcgtccgctctcccttcaccacactacacccagatacactctcaggcaggcaatcagcaggcgaggcaccagcccaccggccggcaatggcgtccacctcctgcttgctccaccagtccacggcccgcgtagccgagcgcgtagcctccccgtgcccggcgacacggacccaccttctcgtgtgccgcgcccagaagcaggacgacaccgacgtctcccgccgagcggagctcgcgctgatggccggagcgactgcggcggtgggggtgaaggtggcacccgccgccgcggcctactgcgaggcggtgaacgtgtttgggaagcccaagacgaacaccgtgttcatcgcctacaacgacgaggggttcaagctgctaatcccagccaagtggtaccacaggaaggagcgcgagttcc

SEQ ID NO: 400445 - DNA, 438 bp, Oryza sativa nipponbare
ccacgcgtccgtccacgcgttcgaaagaatcttcccacaggatgtccggttgattgttagatctagtgctaatgtggaggatttggctggtatgtcagctgctggtctctatgattcaattcccaatgtcagtctcatggacccatgtgcctttggagctgcggttgggaaggtttgggcttctttatacacaaggagagccatcctaagccgtcgagccgttggtgtttatcagagagacgcgacaatggctgttcttgtccaagaaatactgcagccagatctctccttcgtgctttatactgtttgccccgctgaccatgaccccaaggtttgtccaggctgaggtcgcccctgggctgggtgaaacgcttgctttaggaactcgtggcaccccgtggaggctgtcatgtaacaaattcgatggaaaagttgtca

SEQ ID NO: 400446 - DNA, 436 bp, Oryza sativa nipponbare
ccacgcgtccgaaaaaccaacccaaccgccgccgcatcgccctcgttagaacgatggccgcgtcggcgctgcaccagaccaccagcttcctcggcaccgcccctcgccgggatgagctcgtccgccgcgtcggcgactccggtggccgcatcaccatgcgccgcaccgtcaagagcgcgccccagagcatctggtatggacctgaccgtcccaagtacctgggcccgttctcggagcagacgccatcgtacctgaccggagagttcccgggagactacgggtgggacacggcggggctatcggccgacccggagacgttcgcgaggaacagggagctggaggtgatccactcgcggtgggcgatgctgggggcgctgggctgcgtcttcccggagatcctgtccaagaacggggtgaagttcggggaggcggtgtg

SEQ ID NO: 400447 - DNA, 153 bp, Oryza sativa nipponbare
  unsure (1)..(153): unsure at all n locations
ccacgcgtccgcccacgcgtccgcccacgcgtccgnttactcttttgaagacacttgatcggtcgcgggtcgaatccttaaatgttgcttccccttccttcctccttactggaattatctttcttttttccaatcttcaccttaatataaata

SEQ ID NO: 400448 - DNA, 430 bp, Oryza sativa nipponbare
ccacgcgtccgccaagtcaggcttttttaggaataacaaaactccagaggatttcgcgacatggcaacgcattatacgcttggatgctatccggacagaccctgaatgggctttattatcacataaccgagctgaagtgtccaaggagaaagcactgcagtacgcaagatctgttggattgaaagattatgaccatttagagccttacatgatttatcatgctgctcggttagttgcagtgcttgaggcatatgcgctgtttgatccagagattggctactgccaaggtatgagtgacctcttgtcacctataattgtcgtgatggaggaagatcatgaagcattttggtgttttgtgggcttcatgaggaaagcgaggcacaacttcaggctcgatgaggttggaataagaaggcagctgaagatcgtc

SEQ ID NO: 400449 - DNA, 433 bp, Oryza sativa nipponbare
ccacgcgtccggcaaggagaaggagaaggtaggctccagccatggcttcccagctctccgccgccacatccgtgccgcagttccatggcctccggacctactcctctcctaggtccatggtgacgctgccatcgttgaggatgagcaagaagaggtcccagggcatccggtgcgactacatcggctcagccaccaacgttatcatggtgacgacgacgacgctgatgctgttcgcggggaggttcgggctggcgccgtcggcgaacaggaagtcgacggcggggctgaagctggaggcgcgcgactccggcctgcagaccggcgaccccgccgggttcacgctcgccgacacgctggcctgcggcgccgtcggccacatcatgggcgtcggcgtcgtcctcggcctcaagaacatcggcgtcctggaccagat

SEQ ID NO: 400450 - DNA, 434 bp, Oryza sativa nipponbare
ccacgcgtccggtgggctggctacgatgatcctgcttaacgaagtggacaaacttgatttggctagcttgattggctgggtggcatttcgccaaggagtggaatgtggatttcaaggacgaactaataaattggttgatggttgctactccttttggcagggagctgctcttgctttaacacaaaaactaatgacagttgttgatgagcaattaaaatcatcatattccagcaaaaggcctccaggagatgatgcttgtggtacgagctcttctactgaagcagcatattatgctaagtttggatttgattttatagagaagagcaaccaaataggcccactgttccacaacatcgcgctgcagcaatacatcctgctttgcgcacaggtgctggatggaaggttgagggataagcctgggaagaacagagatc

SEQ ID NO: 400451 - DNA, 450 bp, Oryza sativa nipponbare
cgatcccgaattcgcgccacgccccacgcgttcgtcaaggagaacgctgatgattccaaattgtaccccttccttccaaatgtagctggcccaggtggtttgactccattgcacctggctgcatccattgaggatgcagtggatattgttgatgctttgacagatgatcctcaacagattggtttgagctgttggcactcagcgctagatgatgatggtcagtcccctgaaacttatgccaagttgaggaacaacaatgcgtacaatgagcttgtagcacagaaattggtggacaggaagaacaaccaagttactataatggttggcaaagaggaaattcatatggatcaatcagggaatgttggtgagaaaaataaatctgcaattcaagcattgcaaataagatcttgcaaccagtgcgctattttggatgctggcttgctaagacgt

SEQ ID NO: 400452 - DNA, 433 bp, Oryza sativa nipponbare
ccacgcgtccgcccacgcgtccgaagaagtactcgagcaaagaaggagagagcttggtgagctgcagagatggccccctccgtgatggcgtcgtcggccaccaccgtcgctcccttccaggggctcaagtccaccgccggcatgcccgtcgcccgccgctccggcaactccagcttcggcaacgtcagcaatggcggcaggatcaggtgcatgcaggtgtggccgattgagggcatcaagaagttcgagaccctctcctacctgccaccgctcaccgtggaggacctcctgaagcagatcgagtacctgctccgttccaagtgggtgccctgcctcgagttcagcaaggtcggattcgtctaccgtgagaaccacagatcccccggatactacgatggcaggtactggaccatgtggaagctgcccatgttcg

SEQ ID NO: 400453 - DNA, 189 bp, Oryza sativa nipponbare
gatgaaaaccacttcgagacaatttactcaggtagcaaatatttctcagccacaaatccaaacacttggtccttcctatcagaagatcagaatgaacaggttttcaaattcatctcccaactcgacgataatttacacgtacatttaacacattcttccacccttttcaaactcctttctttttttttc

SEQ ID NO: 400454 - DNA, 492 bp, Oryza sativa nipponbare
  unsure (1)..(492): unsure at all n locations
gttctaacatacttatctattttgtcaaatgggcatgctcaagtatcatacaccgacaagtcgacagcagcaggtcatgagaaatctaacacatcttcatataggcaggaggtccaaggaggcatatccttttgggaaaggaagaagaaaggatcaaactagtgcactatttatccgagaagatgcctcgttacaactcatcacacctccatgttcatgaatactgatgcactaattacaagtaatatgtcctaattgcttattcttctccttcaacagccggtaggccttccttgaaccatgtgtagagtcctccatccagatggaacacattcttgtaaccattcaggaccaacaagtaagctgctatcagggacctcgattgcttcccatcaggaaagtntctgtgtggtttcaatgttcctnctgtcgaacatgccacaataatctttgcatctttaccaagtttctcatcaacactttgtatgaact

SEQ ID NO: 400455 - DNA, 395 bp, Oryza sativa nipponbare
aatcgggcaaattcaagtatcaagtgtagtatatcatcatcatgcaagtacagtgttacatagattaatcacaatgcagtttgattaagcagtgggcatcatcacatcgcattcagaggaaggctatcttagattacagatgaatatgcagacacccagcttggtgttacatacatagactggatttgggtgaaatttagccggcgagggcgctggtgttgtagacgaggagggcgccgccgccgaggagcccggcgagggtcacggcccagatcagaagcccggtggttccaccaacgtaggtgtcaccggtgggagaccattccttcggcgagtagattgggctgtagccgtcgacatttgcgccgtacttgtcaacgaattggttcacaccc

SEQ ID NO: 400456 - DNA, 200 bp, Oryza sativa nipponbare
  unsure (1)..(200): unsure at all n locations
aaagggagatgagcactgattccacgcacaatttacatgatcattacatcgtccatcacacaggcactcatgcatcgattacacataggagtattgattcgtgtgactagcttaatgaatttgattagccgatgatctggtccaggacgccgatgttcttgaggccgaggacgacgccnacncccatgatgtggccgacg

SEQ ID NO: 400457 - DNA, 420 bp, Oryza sativa nipponbare
  unsure (1)..(420): unsure at all n locations
ttaagcaagtcacttcaaaggataaggcgacttagaacaagaagacgacttaagtaaagtttcgacctttttatgctagttcactccaaatcgcccacaactaagaggcgatataagcacgctgttatagtctaacagaaatttactccaaccagattcggggtagaagcatagcaaaacagagcagctaataacagttctacaacgagaagcagtagcagtagcttcagtgaaacatcatttcagctcattacatcggcagttcgccgctgtccgcgatgacaactttgctcttcggtgacccactctgctggccctcagcttcaatcttgtaaaccacatccattccagacagcaccttaccgaacacgacgtgcttnccgtccaaccagctggtggttacagtggtgatgaaaaact

SEQ ID NO: 400458 - DNA, 394 bp, Oryza sativa nipponbare
gaatgctcaaaaccggaccggctcagcaacaggcaaagacaatttggtttggaggttcttaaaaggcgccttaaataaggtaaacagtcgcattacagctagcagcaaacatgagttcgcgaattgatcaacataacattacgcaaaagagctcaaaaaaggatagtctggggcagatagttctatatccttgcaaacaactcgctatagcaaaactccaggcagacgcagcagcagattttaagcgttggcagcaagcctggcggcagcatcccgcttactttgctcctagatgatgctgagcttgatgcccttgcccttgggcaggctcacccaaggcttgttgcccttgccaatggtgaacacattgcccagacgggtggcgaattggtgg

SEQ ID NO: 400459 - DNA, 404 bp, Oryza sativa nipponbare
tgggaaacgaataagggcattattgcaaaaacatcatcttcttcttcatcttcttagtgtacacaacaccaactcgatcatcatctcgtcgcactaaacccatcttccccaacccaaagacaacgaactcgctggccacaaatccatccaaccacaattaaccactgctaagctacggtcccccacttcacttgccggggacgaagttggtggcgtacgcccaggcgttgttgttgacggggtcggcgaggtggtcggcgaggttctcgagggggcccttgccggtgacgatggcctggacgaagaagccgaacatggagaacatggcgaggcggccgttcttgatctccttcaccttgagctccgcgaacgcctcggggtcatcggcgaggccgagcgggtcg

SEQ ID NO: 400460 - DNA, 182 bp, Oryza sativa nipponbare
gcaggggaaagggttggatcgacctctctccttaacttgttcttaattctcatgtacaatcaaagaaacacacacgcacacacacatgcgtgcactgcatctttctgagcaacgaactcgattgatttgattttgattcgctagggattaaagagaagctgagatagagatttcgacgatca

SEQ ID NO: 400461 - DNA, 394 bp, Oryza sativa nipponbare
  unsure (1)..(394): unsure at all n locations
ggagggattaatatggcatggcccttatctggttccaatatcaatttgcagttccgccgacctgccttctaggagcttaggagcaaccctagcttgaatttacatttacattcaaaagcaaattgggcagttctgtaaccaactgaccccgtttttttagattttatgtacacgagnaatctattataaaagcagatatacttagtgcgcagggttcgccgccgagctgcgcaatcgtcttcgtcagttaccagctgatcatttgatgatgcaaccacgcctgctctggacggtctgatacggttctgaaattgctcaagcgctgctcttcttgccgttgccaaacaagaaagacaagtttggctttgccagggtacgcttcagagccttcact

SEQ ID NO: 400462 - DNA, 476 bp, Oryza sativa nipponbare
  unsure (1)..(476): unsure at all n locations
ttttagtataccaactcactagttcagtttcactagatagaaagcataccacatgacacagcactgcattcttaattacgtacacaccacaagactggagaggaaggactacatcatcgtacacacgccatagatgtctcaaaacatctttattcttagcacttatttaactaggatgcatttcttcagtctcaggtcttagatcacaaactcagaggaaacacaaagttacagtgacaacaactcatcacttgtaactggatcaaactactagcttagcagtactaggcccttccatctccttggtttcgtcaggaggttgcttgcttcacttgccgcagttgcaggggttgcaggtgcagttgtcgccgcacttgcacccgttctctgctcctgctccggcggcggcgccggcctncaaacccctcggcatgaccccttggaaggtgccaacacccatgatgacaagtctgggt

SEQ ID NO: 400463 - DNA, 460 bp, Oryza sativa nipponbare
ccgccgcggcgccgtggccgccaaggtctcgtcggcggaggtgatcagggccaccatgccgtccctggacttagagacatccgtcttcaagaaggagaaggtgtctctagctggccatgacgagtatattgtgaggggcgggaggaatctgttcccgctgctgccggaggcgttcaaggggatcaagcagatcggcgtaatcagatggggttctcagggtcctgcacaagctcagaacctgagggactcacttgctgaggcaaaatcagacattcgtgttaagattggtctccggaaaggttctaaatcttttgaagaagcacgcgcagctggatttactgaagagagtgggacacttggagatatatgggagactatctcaagtagcgatcttttggtgttgttgatatcaaatgctgctcaggccgataactatgagggaaatttttcacacatgaaa

SEQ ID NO: 400464 - DNA, 401 bp, Oryza sativa nipponbare
tttagttagcggtgcgataagcgtaagcaccaactgtttacttgatcaatgtcagtatttgccattctttacaatgaactatacaagtatatgcaaaaacatctcgcctaaattgatgtgcttcctacaaattcgccttctccatttcacccaaggggatgaacatacaacgcaattaagcgacaaacaactctgcctgaccgtcgatgaacaggctcatgaactcttccccgtccaccgtctccttctccatcagaagctgagcaagcttgtggaggatgtcgatgtgtgtcgtgatgatctgcgttgctcttgagtaggcctttttcacgagctccctcacctcagcatccacaacatccgcggtggccatcgagtagtccttctggctcgacatctgc

SEQ ID NO: 400465 - DNA, 279 bp, Oryza sativa nipponbare
  unsure (1)..(279): unsure at all n locations
aagccgaggttaaacaccgggggggagcacgaaaccatgcgatatctttaacactgatgctaccatgagatagtngatgccactgtagatctggacattagagatataccacttaactcacagcgtgacccatgcatgcagatgcatgcatgcaggaaacaaatgccacaacacacacagtgagtctgaatctcatgacattcatttgtctttctctcgtccccccaattcattaacatcttatacatgcatactccacacaaaaaaaaaaagacgaaa

SEQ ID NO: 400466 - DNA, 377 bp, Oryza sativa nipponbare
gaaacaaaaacaaaagcagagcacggccggtaaaatcaaaagacgatgaacaaactgggaacacacgaaacaaggtgggagacatcatcgaatcagagatgaacaattaaacaaggctatatatgacgatgacggcttagttgccaccagactcctcgcagcccgggggcttgtaggcgatgaagctgatgagctgcacctgcctgacgttgtcgaagccgatgatactgacgaatgcatcagggtacgccttcttggcctcctcgagctccttgagcacctgggtggcgtcagtgcacccgaacatgggcagcttccacatggtccagtacctgccatcgtagtatccgggggatctgtggttctcacggtagacg

SEQ ID NO: 400467 - DNA, 384 bp, Oryza sativa nipponbare
ttacataatacaatatcgagagtaagcaaaatcttcactgttatcatggcgtgcacttgtacaaactacaaacaccctgttctttcaagggcagactacatcagggtatacaatctcctcaaaacaagcatcatatgctactaccggttgcgtcaagttacaggttacggatctctactcgaaacagcgcgaagttcgtagcagaaaggctatggtagcataggcgttcgtggcgcctgcttacgtgaaggtgtcctccctatcaccttctgcgacctcgccctcgtcgatgttgctgaactcgaggaaatgcgtcggccgatggtcctcgtgatagaagtcccggggcgtgccaagcttcatgttgtacttcatcagcgggtc

SEQ ID NO: 400468 - DNA, 436 bp, Oryza sativa nipponbare
  unsure (1)..(436): unsure at all n locations
tgaacattagtcaagttgtgcagggtatatcagaaacagtaatacagcatgtcactccactacctttgcatgattacatcactacccatcaaatcagtggggggcttttttaaaatctacttaaaaagttgttcacatgctaaatattaggcttgatttataagcttctaattacggaaaccatgcaagaacagataaaactttgaccgggcaaccatacggagtcagtcccctccagcctaccgccggccgccgccgccgcccatcatcttcttgaactcgtcgaagttgacgcagccatcgccgtcggcgtcgacggaccggatcatccgggagcagtcggcgacggagcacttgtcgccgagctggcggagcacgcggtggagctcccgcgccgagatcttnccgttgctgtcggcgtcgtacatccggaacg

SEQ ID NO: 400469 - DNA, 381 bp, Oryza sativa nipponbare
cgtaccgggaccaaattttatggaggaacaacaaacattccaaacaatgagatggctggattattacagagctggaccaaacaaaacaaaacacttagctagggccagtcgagcgaccacacctgccggcccctccatcgatcagaggcgcctcttattattccataaacctccctcactcatatgtagagatagacagatagatttgatttgatcaccagggaacaatcttccagcgctggttgtcaccctcgcaccactcccagagcaccagggtggttccgtcgcgcacgccgccgtggtccttgtctccatggagcgcgtcgaagttgaggtagatgttgttcaccatcctgatgcaccgaaacccactcccaacgt

SEQ ID NO: 400470 - DNA, 268 bp, Oryza sativa nipponbare
taaaaattattttacacagggaggtccattgtacttctttcatcaaccaaccagataacattgtgttacacaatctgaacgaacgaagcaactattcgggtactccgaaagaggagaacgtaacgcgtgtaaccgtagcctgcatgaaagcaatggacctcaccgccgttgctcgacggagatccacactcacttgacggggacgaagttggtagcgtacgcccatgcatcgttgatgacggggtcggcgaggaggtcggccaggttc

SEQ ID NO: 400471 - DNA, 504 bp, Oryza sativa nipponbare
  unsure (1)..(504): unsure at all n locations
tttataatccataacgatggcaccacggtccactggcaacaacctgagaaaactacttgacagtacactttattcactatagctgtatgcacatgcgactcgcatgcccccactggacgggtataaatgtaagaactaatgtgtccagaaccaaaaatacgattacataggacacgaatcctgtacaggaatggagaagtttagaagtgtgtcttcactgcctctgcaaatagcaacctagcgtcagcaaaccaatttacaggggggtggttaactagggcgtgcaagtgcaagggcgcaaagaagaatcctccacgatcatgtgaaacttcgtttcaaaagatgccttgggcagagcttccacaaaatcgcagtctttgggggcactttggtgcttcacaagtatgccangtggtattttgttttccttgatgccggcccaggaaaaaatcacctggaaagtaccaaagaacaccttcctgttgtctaatctgatcacttggg

SEQ ID NO: 400472 - DNA, 430 bp, Oryza sativa nipponbare
  unsure (1)..(430): unsure at all n locations
agtaaaaaggtaaacgtctggataataatattattaagacattatagctgatgtcttttgatcacactgcgatcaaattatgcatcataggcagtacaactccgcgtcaggaaaaagtagaggagatatatttcttgttattacttaatacagcattcacatatatcgaaccatccggtacgtacgtagtagtactccacgcgttcacatcgatgatcggggacgatatcctcaggtagtacttatgcaaaagcgttggcgtaaactgacgaactgaacggacggacggtcggatttagggctcccataagtccaagttgccggagacgaagtcgtagtggccgccgactagcttgaggggtgccgtggcgatcccctccttgacgaacgggtaggtcttgaggttctncagggattggttcacggcctc

SEQ ID NO: 400473 - DNA, 371 bp, Oryza sativa nipponbare
ggttgggaacaagttgaaggtttcactgtatttacatataagaagaatggatccatgttacatatcagtagagaaacgcctagggtcttccggctagctccacaaggggatgggctagccggcttgggttcgaagcctcaccttttctatttatttgatattaggcccttccctaatattcatgtttttttatgtggcataccagtacatgacacaacagacttatgacagaaaatgagccagagtaactgactcaaattaatgtgctggtaataggcagcgaacaataagcaaattcaattcaagataccgaccggtcctcaatgagatgaaaggatttgatttgatatggttcaaggagatggaaaggt

SEQ ID NO: 400474 - DNA, 396 bp, Oryza sativa nipponbare
aaataaaaatatagagcagattatatattgatatatcatcaacatagcccaaaacaaagctgcatactattattataggcagcaatccaccagcgcgatgcttgatcttagcttagttggcaccagacttctcgcaacctgggggcttgttggcgatgaagctaatcaactgcacctgcctgacgttgtcgaagccgatgatacggacaaaggcatcggggtaggcctccttggcctgctcgagctccttgagcacctgggaggcatcgaggcagccgaacatgggcaggtttcacatggtccaatacctgccatcgtagtacccgggagacctggggttctcacggtagacgaatccaaccttgctgaactcgaggcaaggcacccacttggatc

SEQ ID NO: 400475 - DNA, 351 bp, Oryza sativa nipponbare
agaccaagaaattggtgaagttcgattgagtatgatagacctttttactaggcaaaccacacgaatacacgattgattaatttcactgagaatagcacgggtacatcacatcacacaaattcatacgttgatacacgcatagtcgccgaagcgaccagctgcttaattaatcgataacacacgggtttaattcagcaattatcagcacacacacaaaccacactcatatgggtgggttttattgtggactaattaaggtgggtgactcgccggcggcgagtgttcggttgcttcgtgacttcacttgccgcacttgcagtcggtgcaagagcagctggtgccgcacttgca

SEQ ID NO: 400476 - DNA, 382 bp, Oryza sativa nipponbare
tcacactatttaacattttcctgggccaggagagaatgtaatatcaaaacatctacaaccatatctgcagttatgcagaagtagggatacaaaggacaggtggcaaggaaatctagttaacaactgacatctacaattaaaaaaaaatcaatcaaatactataaaaactaaactaaagagcacaagacccaccaatggggaaaactattggttatgtcagtgtggatcattgaaggtgccatctttcttcaaggattgatgttacactcccgcaggaagggctggtcataatttaggtatgccgaccagtagtttcggaatttgggcagaccaatctccagccaaagctttatattgccattgtaatgtatgaccgcggcac

SEQ ID NO: 400477 - DNA, 175 bp, Oryza sativa nipponbare
agagattattacatatgcgggaagagcagaggccattgagatggtacataaccaaactgtgaaataaaaatatatagcatattatatattgatatatcatcaacatagcccaaaacaaagctgcatactattattataggcagcaatccaccagcgcgatgcttgatcttagctt

SEQ ID NO: 400478 - DNA, 378 bp, Oryza sativa nipponbare
atttcctgaccctccacaggtaaggacgttttattccagccgaacaataaaagattcttctcaacttagaaatcttggccttaactcagcatgatctctgactgcgcggagaacatgcgataagttcacagcttactatgaaaccaaaaacagcaaagtctccgggggaagaagattagccctctggcacctattagaccactggaagctccccacactcactgatgaccaccttctttttcgggcggtcccctctgtcagtctcctgcgattcgatcatcttaacgatgtccatgccttcaataacctgcccaaacacgacgtgcctcccatccaaccaaggtgtcttgacagtgcagatgaagaactggctgccat

SEQ ID NO: 400479 - DNA, 358 bp, Oryza sativa nipponbare
aattcacaacaccatattggattgatcaggttcagaacctgcacagaaatacacactaccggtacagatctcaccctctctccaatactcgtacatccatcctcgcggtccacacgaatacgtacatctatacggtacacgtacgtacatctactgcaccgcgtacacacacgcacacatctttgcagagacgcgcattgtcggcaacctagctaggttagctgaaggcgatgcgtcggcatggcagcacgggggcggcggcgcttacttggccgggaccaagttggtggcgtaggcccaggcgttgtttgtgacggggtccgccaggtggtctgctaggttcttgagggggcccttg

SEQ ID NO: 400480 - DNA, 400 bp, Oryza sativa nipponbare
tttggatctgttatgaactgatcataagggtctctgaaaattttggttccatgtcaaatatatgtacacctatttggacatcggtatatgctattgtggtctttttccgatggaacgacgatttgtactcaccagaggtagggaagtaagtaggctgtaccattaccattgctacatggcgaggtttctacagaagaaatgggcgatgcacagagggacagagctgcgtctgcctactcctcctttggtatccaccggctccaccaaatgcttttgctctggctgctaagctcatccatgctttcgttgattgtcctcacgacctttctctgtacacgcagcacggaagcaagcaagttcctccgtgcactacctttctttggtttgatttccctaagct

SEQ ID NO: 400481 - DNA, 353 bp, Oryza sativa nipponbare
gtataaatatatatagccggggcttccatatatttcattcacatatgcctcacccaacaacatatagtcgtagcagataccactcttacatcaagtcagagagagatcaggtgaaacaaaaacaaaagcagagcacggccggtaaaatcaaaagacgatgaacaaactgggaacacacgaaacaaggtgggagacatcatcgaatcagagatgaacaattaaacaaggctatatatgacgatgacggcttagttgccaccagactcctcgcagcccgggggcttgtaggcgatgaagctgatgagctgcacctgcctgacgttgtcgaagccgatgatacggacgaatgcatc

SEQ ID NO: 400482 - DNA, 340 bp, Oryza sativa nipponbare
  unsure (1)..(340): unsure at all n locations
gcggaccgggactttttttagtttctcaattctcgatcgatcatatcatattcatttcngcggaaaccaataaaaccatcattgcaacaaccacccctccttttagatattcttagagaacacaaccccaaccttttactacctttgccgaacttaacccattttccccaacccaaaaacaaccaactctcttgccccaaatccatccaaccccaaataaccccccttaaattacccgcccccccttcaattgccgcgggacaaatatatggctgcccccccgccctcttttttctccttttcctccaggtggccccaaaggtttttgagggggcccttt

SEQ ID NO: 400483 - DNA, 366 bp, Oryza sativa nipponbare
tatcattgttaaggctttgtctttccattttaaattatctgcaaagtaagaaagtaacactcccaagttacaacagcacaccatccatatatccatgcaggcagcctgtttgtgcccttgtgcagatgcatttcatttatacaagtagaaggcactcaaatcagccaccacatgaacacacacatgttccatcatcgatcgatctacacatgcattacccggtcatgcacttacaaacaaaagatctacttgaagaagtacgggaggtcgagcacgtagaggaggaagtaggcccagaggacgccggagatgccgccgaagaagaagccgccggtgaacttggcccagccgtcggcggtctgcagc

SEQ ID NO: 400484 - DNA, 406 bp, Oryza sativa nipponbare
tatgtgagatctcactttgctctcgatacatccaagaagattgtggcaccatgcatgttttacaaatccatgcaaagaaatgctattttttttcgaaaagaatacggtctagtacttctgatcacttgtaggtttctataggtgggtatctgtccttgaacaacggtgtgccttcctttggcttggaccaagggtacttcatggttggatcccttgggaacttcctgaagttgacgaatggtgcccacaacatcatcccggggaagaagaggtaggtgaacatgaactgcaggtacgtctcgacgaacttgcgcttgaaccacctcagcctcatccagttcatgataatcggcgggaagacgaacaggtaaacgaaggcgatggcggccaccgtctgcaggatccc

SEQ ID NO: 400485 - DNA, 361 bp, Oryza sativa nipponbare
ttttatttttttttttttggccaacgggaagtgatccacaataataccattacacacaacttctgataacatgtcatcgttggaagttggacctgctgtgaattgaacaaacgcaatttgaaatgctgaacaggactacgacaattattgtcacaactcatatgacacggtcccatcaaaagactaatacaaagatatggccattttttggatagcgaaaactaactgaacagcgagtccactttgaaatcagcaaatgtgcccacagaagcataaaaagagcgacctagtagagttcttcctccttgtgggtgtgaatgacgcaatccgccttagggtacgaaatgcatgtcagaacgta

SEQ ID NO: 400486 - DNA, 460 bp, Oryza sativa nipponbare
  unsure (1)..(460): unsure at all n locations
ggggagggtataacgagttacaaacatgctgccgttgcagcatggtcatcaatatacaacattacaacaacatatggggatcgcagaacactcccattccacgattttacaacatatgcttcacaacacgttataaatacatggttgtaccgagctgtagagagacagccagcacgtcccaactacaaatgcacactagccaacagcaaacataaaaactactctctggtaaggcactatatatacgcactatagcttcacatgactaaaattataacatgacataatttctttcgtataaattagccccaggaagcttctgtccgaatcgccatcttgggagcaataaatatactggcattcttcacaatggatgcattatttacatatatatacttctttctncaaccacgttctaccaagattgctcggccttgccatcacctgcattgcttctttt

SEQ ID NO: 400487 - DNA, 432 bp, Oryza sativa nipponbare
ttatagtggcaggaaagcgggctggttgtatttttattgctgcaactttcgttgcaaacttcagaaatacactcgccagcatttgacggctgattacatatacgcttacaggcttacagcttatttctacatacataaccaaatggcatcccatttccagctctaccaatccttgcaaattgcaaaccttcttcctgaatcctgatcaatttagctgtattcgccggacacgtactaacctgtgctgcttttctttgctgactagtttggtgtcaagacatacatcttgcagtcatgaggcgccaccgatgctgatatctgtccctgagccgcgaacgaagagtgcgcccatagatcacgagcagtgaccgcgaccgatccagcgagcccgatgtttgaccaatgtgcagtgatggttgcctggtatgactg

SEQ ID NO: 400488 - DNA, 346 bp, Oryza sativa nipponbare
gggaaacgaataaaatcatgattggggaaacatcatcttcttcttcatcttcttagtgtacacaacaccaactcgatcatcatctcgtcgcactaaacccatcttccccaacccaaagacaacgaactcgctggccacaaatccatccaaccacaattaaccactgctaagctacggtcccccacttcacttgccggggacgaagttggtggcgtacgcccaggcgttgttgttgacggggtcggcgaggtggtcggcgaggttcttgagggggcccttgccggtgacgatggcctggactaagaagccgaacatggagaacatggcgaggcggacggtcttgatc

SEQ ID NO: 400489 - DNA, 440 bp, Oryza sativa nipponbare
gcagtaaccaaatcgattgacaggccacacatacaggtagtatacagattcgtctacacacaaggttattgcagaggcaaaacacgaggtatgtatatcaaacgctctagaaaagattcatgtgatgaaatacatgatgaaccacgtatgttctcaaggtaaaattaattaatgcagtatagttttaactttgtccatcgatctcaacctgtaactgtgacgacacactggctacagtgccctcgaggtactagcagtatagcagtagctgtagtacgtagcagcagcagcagcaggttcactgtcttgattggattggatcggattagtagacgtagttcttgacgaacatgccctccttggcctcggcggcctcgccgtcgctggtgtacttgccgagctgcgccagcgaagttgccttggcgcggaggagcagcgcg

SEQ ID NO: 400490 - DNA, 454 bp, Oryza sativa nipponbare
actgacaaatcatgtttatttatgtaaccctgtgtagtagaattttcaataagttacacaagaaaatccgacaaatataatgtacacctgtgtaaaacaacatgcaggaaatggcttccattgacagcatggcctgcactcactcaaatgcacaagtactgtactgaaactactgaaagttttctaacgcctctctttggggaagcccaggagggcaagaatcagtgcaaagaagctgccgtttatcagtcctctcaggatcttctgcttctcaatcgtgtaaggtgggtacctagcagttgcctcccctccgaagccgcggatcaggacggccttcttgtgggtgaaacaatcgaagctgaatttgccatggtaggagccgatcccgctgtcggcgacttcggcaaatggcaggtgcgggattggcgagatgcagggcaacatcatttacaag

SEQ ID NO: 400491 - DNA, 357 bp, Oryza sativa nipponbare
ggacgggaacaaaattaagctagataagcactgattccacgcacaatttacatgatcattacatcgtccatcacacaggcactcatgcatcgattacacataggagtattgattcgtgtgactagcttaatgaatttgattagccgatgatctggtccaggacgccgatgttcttgaggccgaggacgacgccgacgcccatgatgtggccgacggcgccgcaggccagcgtgtcggcgagcgtgaacccggcggggtcgccggtctgcaggccggagtcgcgcgccttcagctttagccccgccggcgacttcctggtcgccgacggggccaggcccaaccttcctgggaacagga

SEQ ID NO: 400492 - DNA, 396 bp, Oryza sativa nipponbare
  unsure (1)..(396): unsure at all n locations
tttttaaaatcattattgcaaagacatcatcttcttcttcatcttcttagggtacacaacaccaactcgatcatcatctcgtcgcactaaacccatcttccccaacccaaagacaacgaactcgctggccacaaatccatccaaccacaattaaccactgctaagctacggtcccccacttcacttgccggggacgaagttggtggcgtacgcccaggcgttgttgttgacggggtcggcgaggtggtcggcgaggttctcgagggggcccttgccggtgacgatggcctggacgaagaagccgaacatggagaacatggcgaggcggccgttcttgatctccttcaccttgagctccgcgaacgcctcggngtcatcggcgaggccgagcgggtc

SEQ ID NO: 400493 - DNA, 522 bp, Oryza sativa nipponbare
tatggaagggtaattaaatgcagagtatccgccatgagcgaatagagataatgcaacaccagctctgtaatatgtgtacagcaaggaaatcatcgaatttgcaaggcgtttttactccatctctgcctttgtctgcaaatgtttttgtctctgcttcaactgaagtctgcaaggtttgtatcttcaaaaatctgaatgatgaactctgtatccagtacttgatgcaagaaaatgccacagcaaattagcaataatcaaacactaggtctcgtatggatcattacaaagtacacaaatgtacaaattaaaacatcaaaagagttaactaagcttaaagcagcagctgacacataagttgcaaaccccaacttttttcagtttctgaattctggatggatcatatcagattcatcacagcattggacaatctgtgcaagcattggtacatcgagcgatggagagagagagtagtctacaatggcggctgggccattcacgagcccggcgtgaacttggtggcgt

SEQ ID NO: 400494 - DNA, 380 bp, Oryza sativa nipponbare
  unsure (1)..(380): unsure at all n locations
ttgatcataaggcaaagctgcgagcgccagatcatcttattactacagcttcttggcgatatgctacagtagcttcttcctcccttgcaaaaagaaacccaaaccttatctacaacgcaacacacacaccggacacagagcgctcgatcgatcgaagcagacgagacgacgatggcgaactactactaggtaagcgacaacacctaggctatacagggatacagcgcgcggcggcgacnggcggcgagacggcggcnatgatcaggcgctggccttgttggccttcttggagatggcggagcggatggatttgggcggctgcatcggcttcgcgggggcggccttcctcgccctcttggcgcgggctgggcgggcggggg

SEQ ID NO: 400495 - DNA, 399 bp, Oryza sativa nipponbare
tagcaaatcgatccatgcgagcatgcgtgcaaatcagttggagcacaaatttacatgttacacccacaccctacacccatgcataataatacatcgtatatacgtacgtacatacatacccctctcgatcacacgcaccatcgatcgtacaaagttgcgtacatacatacgtacacacatatacgcatacgcacgtacatacatacataattaaaaactcgtaattaattaaatacgtagttgatggcatctctaatggaacttgaggctggtgaggatgttgttgttgaccggatcagcgaggtgatcaagcaggttctgcacggggccaaccccggtgaagagcgcctggacggagaagccgaggaaggcgagcatggcgagcctgccattcttgat

SEQ ID NO: 400496 - DNA, 223 bp, Oryza sativa nipponbare
  unsure (1)..(223): unsure at all n locations
tttttatnntntttgggcaggaaacaaaattaagctggataagcactgattccacgcacaatttacatgatcattacatcgtccatcacacaggcactcatgcatcgattacacataggagtattgattcgtgtgactagcttaatgaatttgattagccgatgatctggtccaggacgccgatgttcttgaggccgaggacgacccctacccccatgatgtg

SEQ ID NO: 400497 - DNA, 431 bp, Oryza sativa nipponbare
tctcagccacaaatccaaagacttggtccttcctatcagaagatcagaatgaacaggttttcaaattcatctcccaactcgacgataatttacacgtacatttaacacattcttccacccttctcaaactcctcccttcttcttcccgggtaagattaaaattaacttgaggccagccagcgtcgccggcggcgagatgtttacaggctgggcgtcctctcggcggcgccggagatgacggtgagcaggttgttgccgaaggggtcgctgaggtgcttggagaggttctcgacggggccctcgccggtgacgtaggcctggatgaagaaccccagcatggagaacatggccagccgcccgttcttgatctccttcaccttcagcagcgccgcctggtccgggtcgctcgccagccccagcgggtcgaatgg

SEQ ID NO: 400498 - DNA, 392 bp, Oryza sativa nipponbare
acgtgataccatccatttgttttattgtcgacgaatttatcagatatgctctagatacatatcttgtgtgtatatagccggagctttgttttcacatatcctcacccaacgataattgtagtactcttacaataaaaccggccggagagggagggaagagattattacatatgtgttaagagcagaggccattgagatggtacataaccaaactgtaaaataaaaatatatagcatattatatattgatatatcatcaacatagcccaaaacaaagctgcatactattattataggcagcaatccaccagcgcgatgcttgatcttagcttagttgccaccagactcctcgcaacctgggggcttgtaggcgatgaagctaatcaactgcac

SEQ ID NO: 400499 - DNA, 207 bp, Oryza sativa nipponbare
  unsure (1)..(207): unsure at all n locations
gcttgcaggggaaatcgagggatcgacctctctccttaacttgttctaaatcctcagggccaatcaaagaaacacacacgcacacacacatgcgtgcactgcatctntctgagcaacgaactcgattgatttgattttgattcgctagggattaaagagaagctgggatagagatttcgacgatcatgcgacgctgaaggagctggc

SEQ ID NO: 400500 - DNA, 358 bp, Oryza sativa nipponbare
tttctttagaattaggcagtgatgtttccccctggcttcaaaaaaaatagtaaagaaacactaatgacaacccttcgagttttgcgtgaaggctattcgcattacaacagtcgatccatgcggcaaactttatttacctaaccatactgatattggcgcacatccatgctatggctgtggcctgctttgcactataaaaatatctttcccaaccaggcaaccttccacatcctgtgcactcccgaacttctgctccagatactggccaatcgcagccagtcgctgaccaaactgcttcctaaaggttgtatcaaccgacaatggcttcttgctgtaatcaacagtaagacgaattact

SEQ ID NO: 400501 - DNA, 375 bp, Oryza sativa nipponbare
tgatgacagacagaaattagttaagctagaaatctcctcgatcgatcacacacacacacacaattaaggtacatacatacatgcactgctgcaactgcaactgcagggtcggtgcgtggctactacaagtgtacacatggtacgttggttggcaccatctcgatcgtgtcgttgtgctcacttgccggggacgaagttggtggcgtatgcccaggcgttgttggcgacggggtcggcgacgtggtcgaagaggttctcgatggggcccttgccggtgacgatggcctggacgaagaagccgaacatggagaacatggcgaggcggccgttcttgagctccttcaccttgagctcggcgaaagtgtcagggtcgtc

SEQ ID NO: 400502 - DNA, 290 bp, Oryza sativa nipponbare
tttgacagaaacaaaattaagctagataagcactgattccacgcacaatttacatgatcattacatcgtccatcacacaggcactcatgcatcgattacacataggagtattgattcgtgtgactagcttaatgaatttgattagccgatgatctggtccaggacgccgatgttcttgaggccgaggacgacgccgacgcccatgatgtggccgacggcgccgcaggccagcgtgtcggcgagcgtgaacccggcggggtcgccggtctgcaggccggagtcgcgcgcct

SEQ ID NO: 400503 - DNA, 407 bp, Oryza sativa nipponbare
  unsure (1)..(407): unsure at all n locations
ggtatctggggccgttcaggcagtgtaaaaaagaatgaaatatcatacatgtcttagacagttgtaacttgtaaggcgcaacattgtagagctcatacatatcatacatgtcctagacagttgtatcactagcttgaaaagaactcataggccgtatggtatttgtctagtacaacattgtagagcggatggatcggctctagcaagtttgagtaaggaccaagcacgtgctgcggcaaggggcacgcatcagaatcaaccatggcgctgtactggctaactgacagaccactcaggcagtagcacgagtggtagtgatctctgttcttcccaggcttatccctcaaccctccatccagcacctgtgcgcaaagcangatgtattgctgcagcgcgatgttgtggaa

SEQ ID NO: 400504 - DNA, 485 bp, Oryza sativa nipponbare
aatcaagtacagtggatctgttatgaacttatcataagggtctctgaaaattttggttccatgtcaaatatatgtacacctatttggacatcggtatatgctattgtggtctttttccgatggaacgacgatttgtactcaccagaggtagggaagtaagtaggctgtaccattaccattgctacatggcgaggtttctacagaagaaatgggcgatgcacagagggacagagctgcgtctgcctactcctcctttggtatccaccggctccaccaaatgcttttgctctggctgctaagctcatccatgctttcgttgattgtcctcacgacctttctctgtacacgcagcacggaagcaagcaagttcctccgggcactacctttctttggttagatttccctaaactcttgaagtgtgcctctgtaaaacctccttctgcttctgttcctgatcttgccatgaggccgacgacccaacgggc

SEQ ID NO: 400505 - DNA, 337 bp, Oryza sativa nipponbare
tttaggattcacatccatcgcgtaccctttgtataaatatatatagccggagcttccatatatttcattcacatatgcctcacccaacaacatatagtcgtagcagataccactcttacatcaagtcagagagagatcaggtgaaacaaaaacaaaagcagagcacggcccggtaaatcaaaagacgatgaacaaactgggaacacacgaaacaaggtgggagacatcatcgaatcagagatgaacaattaaacaaggctatatatgacgatgacggcttagttgccaccagactcctcgcagcccgggggcttgtaggcgatgaagctgatgagct

SEQ ID NO: 400506 - DNA, 432 bp, Oryza sativa nipponbare
ccacgcgtccggaagaggtcccagggcatccggtgcgactacatcggctcagccaccaacgttatcatggtgacgacgacgacgctgatgctgttcgcggggaggttcgggctggcgccgtcggcgaacaggaagtcgacggcggggctgaagctggaggcgcgcgactccggcctgcagaccggcgaccccgccgggttcacgctcgccgacacgctggcctgcggcgccgtcggccacatcatgggcgtcggcgtcgtcctcggcctcaagaacatcggcgtcctggaccagatcatcggctaatcaaattcattaagctagtcacacgaatcaatactcctatgtgtaatcgatgcatgagtgcctgtgtgatggacgatgtaatgatcatgtaaattgtgcgtggaatcagtgcttatctagcttaaa

SEQ ID NO: 400507 - DNA, 468 bp, Oryza sativa nipponbare
  unsure (1)..(468): unsure at all n locations
ccacgcgtccgcccacgcgtccgatggccaggtacttcctgagggccaacgacctggcgttcctggaccggccgaggacggccgccggcaggtacaccgtgtacaactacgccggcgtgctgtggtcgcactacggcgagtactggcgccgggcgcgccggctgtgggtcacggagctcctcagcgcgcggaggctggcgtcgacggagcacgtccgtgccgaggaggtgcgcgccatgctgcgcggcctgagccgccgcgcgggcgccggcaccgncgtggtgctcaaggagcacatgctcatggtgaagatgatgatggagtagatgaggaagaggaagatcaggacaatgaggatgatgaggaagatgatgatgaaaactcacttcagcccctaatgtagaggaagaagtgatatttttcatgcggttattagtaccaacttatcatgcgctgagctgtgcttgg

SEQ ID NO: 400508 - DNA, 402 bp, Oryza sativa nipponbare
ccacgcgtccgggtgcccaccttcctcttcatcagggacggcgacatcgtcggccgctacgtcggctccggcaggggggagctcatcggcgagatcctcagatacaacggcgtcaaggtcacctagacatatacagattcatcactacgcagctcagctgcatgcagcaaccgtaattaaattaattactgtactactctcttgatcatgattgtaattttacaccaccacactagcttgagaagatcaagcttgttttatactggggacgatttgatcaaacctatctcgttgatttggtcccgtgtaatactagaattttggaacgtcaattgcaagttcgagacttgattttgccttaaaaaaaaaaaaaataaaataatataaaaaattaaaaagggc

SEQ ID NO: 400509 - DNA, 481 bp, Oryza sativa nipponbare
tccgacccacgcgtccgattggtgaactcaagaaactagttgaagaaggaaagataaaatatattggtctatcggaagcatctgcatcaacaatcagaagggctcatgctgtacaccctatcactgcagttcagctcgagtggtcattatggtctagagacgtggaagaagatataattccaaataagtttatccattgaaaaaaatcacatgccccattttaactatttttcttatttccatttcagagaacttggaattggaatagtagcttacagcccacttggtagagggttcttttctgggggagctaaactagtggagtctatctgttcaggatgttcgcaagcatcttcctagattttaaccagcgaatctcgagatgaatgcttaaatatttgagcgtgttaacgcaatggcagtcagaaaaggatgcacactcgtgcaacttgcattggcctgggttcatcatcaggggaag

SEQ ID NO: 400510 - DNA, 406 bp, Oryza sativa nipponbare
gccgttccggaatcgaccgggtcgacccacgcgtccggcaggagctatgctgctctgttgtctcattgctctggcagaagctcattgcatctgccgaaatgcagatgtctgcagaaagtacatcagctcatcagggttggagaaaggttgtggatgcgctttgtgacattgtttcagcctcaccgaccaaggcttcagctgctatcgttctgcaagccgagaaggacttgcagccctggattgctcgagatgatgagcatggtcagaagatgcggagagtcaaccagcgcatagttaagctgatagcagagcttatgaggaaccaccaatagcccagaagcattggtgatccttgctagtgcttcagatcttcttcttcgagcaactgatgggatgctcgttgatg

SEQ ID NO: 400511 - DNA, 469 bp, Oryza sativa nipponbare
ccacgcgtccgatcggcatcctcaacacgccgtcgtggtacaccgccggcgagcagcaatacttcaccgacaccaccaccctcttcatcatcgagctcatcctcatcggctgggccgagggccgccggtgggctgacatcatcaagcccggctgcgtcaacaccaaccccatcttccccaacaacaagctcaccggcaccgacgtcgggtaccctggtggtctgtggtttgacccgctcggctggggcaccggctcgccggagaagatcaaggagctgcgcaccaaggagatcaagaaccggcggctcgccatgctcgccgtcatgggagcttggttccaggcagagtacaccggcaccggccccatcgacaacctcttcgcccatctcgccgaccccggccacgccaccatcttccaggccttcacccccaaatgaggagttcttcaggtgttggagtgttagcaatg

SEQ ID NO: 400512 - DNA, 490 bp, Oryza sativa nipponbare
ccacgcgtccgcggcgcgtgggcggacgcgtgggctcgctcatcgccatctctctcagctctcacagctcactgcatcaatggccgcggccaccatggcgctctcctccccggtgatggcccgcgcggcgccgtcgacctcctccgcgctcttcggcgaggcgcggatcaccatgcgcaagaccgccgcgaagcccaagccggcggcgtcgtcggggagcccgtggtacggcgccgaccgcgtcctctacctcggcccgctctccggcgagccgccgagctacctcaccggcgagttcccgggcgactacgggtgggacaccgcggggctctccgccgacccggagacgttcgccaagaaccgggagctggaggtgatccactcccggtgggcgatgctgggcgcgctcggctgcgtcttcccggagctcctcgcccggaacggcgtcaagttcggcgaggcccggtggttcaaggcgggctcgcagatc

SEQ ID NO: 400513 - DNA, 446 bp, Oryza sativa nipponbare
ccacgcgtccgctcctttatccacttcgctctcttctctgcagcgctgcatcctactccctggttagcaatagcaagggtaggaagatgagcacgttagatgccacgcgagcagagctcggccttgttgttctgtacttgaacaaagccgaggccagggacaagatatgcagggcgatccaatacggctcgaagtttatcagtaacgggcagcctggcacggcacaggatgtcgacaggtccaccacccttgctcgcaaagttttccggcttctcaagtgggtcaatgatctgcatggtcttatcagccctcctgctaaggggactcctcttacactggtcttgcttgggaagtccaaaaatgcgctgctctcgactttcttgttcctggaccaatttgtatggttgggaagaacagggatatacaagaacaaggagcgcacagac

SEQ ID NO: 400514 - DNA, 471 bp, Oryza sativa nipponbare
ccacgcgtccgagcacacacaccatctgcatcttctcttctaccattcttgctttctccttgtagcctcttccttctgttcttccagagaagagaaacatatctgtgcaagctttgccttcttccatggcagtggctatagaggctccgttccatgtcctggctgtggatgatagccttcctgacaggaagctcatcgagaggctactcaagacctcttctttccaagtaaccactgttgattcggggagcaaggctctggagttcttggggctccatgatcatgaggacagcccaatttctactcaatcagatcagcaggaggttggagtgaacctgatcatcacagactactgcatgcctggcatgacaggatatgatcttctcaagaagatcaaggaatcgtcttatttaagggacatcccagttgtgatcatgtcatcggataacattccttcaaggatcaatagat

SEQ ID NO: 400515 - DNA, 494 bp, Oryza sativa nipponbare
ccacgcgtccgcggacgcgtgggtcccatgagactacgggtgggacaccggggagctctctcgccgacccggagacgtctgccaagaaccgggagctggaggtgatccactccaggcgggcgatgctccgatgcgctgggctgcgggtgccacgagctccatcgccgcgaacggcgtcaagttcgcggaggcgtgttggttcaaggcaggaggacgatgatcttcagcgagggcggggtggactaccatcggcacgccgagcctgatccacgcggcagagcactgatccacatctggaccgggcacgtaggtgctgatcgccgccagcaaggagctcctcatgcacaaggcggcgcggtccacctaggtccacaagatcaatgttggcatgcggctgctgcaacccagatcaacgctgcaagagaagctgggaaatgagccctcatacagacagatggcgcattagctgaagatatcaccggccgagctacgat

SEQ ID NO: 400516 - DNA, 468 bp, Oryza sativa nipponbare
ccacgcgtccgaacaaaatggctaaaaacagatcagtggacaagcaaccttgatcttcttaccggacttcggaaatttgcagatgatgaaaagcttcatgctgagtgggcatcagctaagttggctagcaaaaaacgcctagccaagcatgtgttggatgtgacaggtgttacaatcgacccaaatagcctttttgatatacaaattaaacgcattcatgagtacaagagacagctgctaaacattttgggagctgtttacagatacaagaagttaaagggaatgagtgcagaggagagacaaaaagttacgccacgcactgtcatgatagggggaaaagcattcgcgacttacaccaatgccaaaagaatagtaaaattggtaaatgatgttggtgctgtggtgaacaatgatcctgatgttaataaatacctaaaggtggtgttcattcccaactacaatgtatct

SEQ ID NO: 400517 - DNA, 475 bp, Oryza sativa nipponbare
ccacgcgtccgcggacgcgtggggcagcagcagcagtagctgagcttgaagcagcagagcgaggtagacatggccgccgccaccatggccctctcgtccccggcgctggccggcaaggccgccgcgaaggtgttcggcgaggggcgcatcaccatgcgcaagtcggcggcgaagcccaagcccgccgcgtcggggagcccgtggtacggcgccgaccgcgtgctctacctcggcccgctctccggcgagccgccgagctacctgaccggcgagttccccggcgactacgggtgggacaccgcggggctctccgccgacccggagacgttcgccaagaaccgggagctggaggtgatccactccaggtgggcgatgctcggcgcgctgggctgcgtgttcccggagctcctcgcccgcaacggcgtcaagttcggcgaggcggtgtggttcaaggcggggtcgcagatctttaacg

SEQ ID NO: 400518 - DNA, 460 bp, Oryza sativa nipponbare
ccacgcgtccgcaatggcgcccaccgtgatggcctcgtcggccacctccgttgctcccttccaggggctcaaatccaccgccgggctccccgtcagccgccgctccaacagcgccggcctcggcagcgtcagcaacggtggaaggatcagctgtatgcaggtgtggccgattgaaggcatcaagaagtttgagaccctgtcgtacctgccaccgctcacggtcgaggacctcttgaagcagatcgagtacctgctccggtccaaatgggtgccttgcctcgagtttagtaaggtcgggttcgtctaccgtgagaaccacaggtctcctgggtactatgatggcaggtactggaccatgtggaagctgcctatgttcggatgcactgatgccacccaggtgctcaaggagctcgaggaggccaagaaggcatatccagatgcatttgttcgcatcatcggc

SEQ ID NO: 400519 - DNA, 452 bp, Oryza sativa nipponbare
ccacgcgtccgccgggaggtcgccaacaagtgcgccgatgccgccaaggtcgccggcttcgccctcgccacctcagctctgctcgtctcgggcgccagcgcggagggcgtgccgaggaggcttaccttcgacgagattcagagtaagacgtacatggaggtgaagggaaccggcacggcgaaccagtgcccgacggtggagggcggcgtcgactccttcgccttcaaggccggcaagtacaacatgaagaagttctgcctggagccgacgtccttcaccgttaaggcggagggcgtggccaagaacgcgccacccgagttccagaagaccaagctcatgacccgcctgacctacaccctcgacgagatcgagggcccgctcgaggtcagctccgacggaaccatcaagttcgaggagaaagacggaatcgactaccccgccgtcaccgtgca

SEQ ID NO: 400520 - DNA, 446 bp, Oryza sativa nipponbare
ccacgcgtccgcggacgcgtgggccggctcctccgaaccgccgccgccctctccccgttctcgtcctccgcgccgccgcggcacagcccccgcatcctccgcgctatccctgtcggtgcgcctcacccgccgcgcgtctccgcagccgtctcgccgctggtccgtccggtcgccgccgggttcgcgctgttcagcatggccaccgccgcctcctccgccgcatccgtccacgacttcaccgtcaaggatgcaagtggcaaagatgtggacctgagcaccttcaaggggaaagtcctccttatcgtcaatgttgcatctcagtgtggcttgaccaattccaactacacggagctgagccagttgtatgagaagtacaaggaccagggttttgagatccttgctttcccatgcaaccagtttggtggacaggaacctggcactaatga

SEQ ID NO: 400521 - DNA, 220 bp, Oryza sativa nipponbare
ccacgcgtccgggttggcttctcctccccctctttaccttttcctcctcggttcggttccgtggttcgtctagggtttagtgggttgagatggcggcgccggatgtcgagtaccgctgcttcgtcggcaaccattgcctgagctatctacgaccgcttcctctaggcacccattaccacctacagcgagatcccggactccaagatcatcaaccacaggg

SEQ ID NO: 400522 - DNA, 470 bp, Oryza sativa nipponbare
ccacgcgtccggaggaggaggagctcgagcttgcagagagacaacaatggcggatcaagctcttctgtctggaaggcagatgctgcagaggccattgcaatattcagactccaggtcttattactacatgaaggcaccctacatggtcagggcagaggccacttcccctgccaagcaaggtgctgacaggcagctgtggctcgcatccaagcaggccctgagctacctggatggcacgcttccaggagacttcgggtacgacccgctggggctctcggaccccgaggagaccggtgggttcatcgagccacggcagctggcctacggcgaggagttcaacgagcggactgctatgatgggcgtcgtcggcatggtcgccccgtagctcctcggcaagctggtcctggtccccgccgagactgcgatccacgggttgcagaacggagtgatcccccccgggggcacctaca

SEQ ID NO: 400523 - DNA, 486 bp, Oryza sativa nipponbare
ccacgcgtccggcacgctggcgtcgggtcggccatcgagtacgccgtctgcgccctcaaggtcgaactcatcgtggtgattggccacagccgctgcggtggaatcaaggccctcctctcactcaaggatggagcaccagactccttccacttcgtcgaggactgggtcaggaccggtttccccgccaagaagaaggttcagaccgagcacgcctcgctgcctttcgatgaccaatgcgccatcttggagaaggaggccgtgaaccaatccctggagaacctcaagacctacccgttcgtcaaggaggggatcgccaacggcaccctcaagctcgtcggcggccactacgacttcgtctccggcaacttggacttatgggagccctaaatccgaccgtccgtccgttcagttcgtcagtttacgccaacgcttttgcataagtactacctgaggatatcgtccccgatcatcgatgtgaacgcgtgg

SEQ ID NO: 400524 - DNA, 479 bp, Oryza sativa nipponbare
ccacgcgtccgcgttactgtctcctccgctcctctccttgcgccgctgccaagacgaacaggggggagggccgggcggcgatctccatctggcgagcagagcagagcagcggaggtgaggggatcctgcatcatgtcggatatgaaggacaccaatgctgctggacctgaaactgttggaaatcctgaccctatggaccaaactgaagataactccatgccctcagctcaagaacaggaattagcaatcaagaagaaatttggaggactaatgccaaaaaaaccaccactcatctcgaaggatcatgaacgggcctattttgattctgctgactgggctctgggaaagtctggacagcaaggcgctgcgaaacccaaaggacctcttgaggcacttaggccaaagttgcagccaacacgacaacagcagcagcgttccaagcgcttgattaacacctcatcagaaaacgaggatggaga

SEQ ID NO: 400525 - DNA, 478 bp, Oryza sativa nipponbare
ccacgcgtccggcaaagaaggagagagcttggtgagctgcagagatggccccctccgtgatggcgtcgtcggccaccaccgtcgctcccttccaggggctcaagtccaccgccggcatgcccgtcgcccgccgctccggcaactccagcttcggcaacgtcagcaatggcggcaggatcaggtgcatgcaggtgtggccgattgagggcatcaagaagttcgagaccctctcctacctgccaccgctcaccgtggaggacctcctgaagcagatcgagtacctgctccgttccaagtgggtgccctgcctcgagttcagcaaggtcggattcgtctaccgtgagaaccacagatcccccggatactacgatggcaggtactggaccatgtggaagctgcccatgttcgggtgcactgacgccacccaggtgctcaaggagctcgaggaggccaagaaggcgtaccctgatgcattcgt

SEQ ID NO: 400526 - DNA, 483 bp, Oryza sativa nipponbare
ccacgcgtccgcccacgcgtccgcacagttggaaccatatttggtgtctggcctggtgacaagctgacaggcgtcaccggtggagaccaagttgctgctgccatgggcatctatggccctcgcactacttacattatcgctctcaaagattgtcctggaactcatgaattccttcttcttgatgaaggaaaatggcagcatgtcaaggacaccacaaccattggagaggggaaaatgttctctcctggtaacctgagggctacatttgataatcctgaatatgacaagctcatcaactactatgtcaaggagaagtacacattgcgttacactggaggaatggttcctgatgtcaaccagatcatagttaaggagaagggcatcttcaccaacgtgacgtctccgacagccaaggccaagctgaggctcctgttcgaggtggcgccgttgggtttcttgatagagaaagccggcgggtacagc

SEQ ID NO: 400527 - DNA, 467 bp, Oryza sativa nipponbare
ccacgcgtccgcactgctagcttgggaagaggaggaggagcttgagcttggagagagacaacaatggcggctcaggctcttctctctgggaggcagctgctggggaggccattgcaatcttcagtctccaggtcttcttcctccaggaaggcacccttcatggtcagggcagaggccactccccctgccaagcaaggtgctgacaggcagctgtggttcgcatccaagcagtccctgagctacctggatggcacgcttccgggagacttcgggttcgacccgctggggctatcggacccggaggggaccggtgggttcatcgagccacggtggctggcctacggcgaggtgttcaacggccggacggcgatgatgggcgtcgtcggcatggtcgccccggagctcctcggcaagctgggcctcgtccccgccgagacggcgatcccgtggttccagaccggcgtgat

SEQ ID NO: 400528 - DNA, 463 bp, Oryza sativa nipponbare
ccacgcgtccgttcttctctagctattagtggtggggaataatggctcccgccaccaccgcagcaatggccctcgcgccgcctccttcccatcaccatcaccatcaccatgtcaagcagctgcagctccctccgtctgtctccgtctccgtgcccctccgctccggtttccttggccgcgcactgcctgctgctgcccacccacagccgctgctcgccgccgagagccgccgcagcagcgccgtgtccgtgcggatgtcgtgggacgggcccctctcctcggtccgcctcattatgcagggccgcaacgtcaagctgaatgagaaggtgaaggagcacatcgaggagaaggcggggagagcagtggcgaagcacagccagcttgtgaaggaggtggacgtgcgcctctccgcccgcggtggcgagctcagccgaggtcccaagatttgcaggtgcgagatcac

SEQ ID NO: 400529 - DNA, 447 bp, Oryza sativa nipponbare
ccacgcgtccggccacatcttattgtcacttccatctcattctcctaattgtcatcactagcttctagctagcttaattaattaattagccatggcggaggagaagcaccaccaccacctgttccaccacaagaaggacgacgagccggccaccggagtagactcctacggcgagggcgtctacacgtcggagacggtgaccaccgaggtggtcgccggcggccaggacgagtacgagaggtacaagagggaggagaagcagcacaagcacaagcagcacctcggcgaggccggcgccctcgccgccggcgccttcgccctgtatgagaagcacgaggcgaagaaggacccggagaacgcgcacaggcacaagatcacggaggagatcgcggccacggcggcggtcggcgccggctgctacgttttccaggagcactaggagaagaa

SEQ ID NO: 400530 - DNA, 483 bp, Oryza sativa nipponbare
ccacgcgtccgcccacgcgtccgcaacccaaccgccgccgcatcgccctcgttagaacgatggccgcgtcggcgctgcaccagaccaccagcttcctcggcaccgcccctcgccgggatgagctcgtccgccgcgtcggcgactccggtggccgcatcaccatgcgccgcaccgtcaagagcgcgccccagagcatctggtatggacctgaccgtcccaagtacctgggcccgttctcggagcagacgccatcgtacctgaccggagagttcccgggagactacgggtgggacacggcggggctatcggccgacccggagacgttcgcgaggaacagggagctggaggtgatccactcgcggtgggcgatgctgggggcgctgggctgcgtcttcccggagatcctgtccaagaacggggtgaagttcggggaggcggggtggttcaaggccggcgcgcagatcttctccgagggggggctcg

SEQ ID NO: 400531 - DNA, 483 bp, Oryza sativa nipponbare
ccacgcgtccgcccacgcgtccgcgtaaacctctccctctccccactctcgcgcctcctcccatggcttccttcccgaccaccgccgccgccgccgccgcgcaggcattcgccttcgccctcgcgccgaagccatcctcctccgccgccgcaccatccgcgctcttcccccgcaccgccgcggcggcggcgttcccgacgctggctgtgcgaggaagcgggaaggcgaggcagccggtggtggccgcggcggcgggggcggggacggggagcgagcagagggagacgatactgctccccgggtgcgactacaaccactggctgatcgtgatggagttccccaaggaccccgccccgacgcgggagcagatgatcgacacctacctcaacaccctcgccaccgtccttggcagcatggaggaagccaagaagaacatgtatgccttcagcacaaccacctacactggtttccagtgcactgtcg

SEQ ID NO: 400532 - DNA, 390 bp, Oryza sativa nipponbare
ccacgcgtccgcttgtgactacacccgcttcgcttcctcccctctctaagccggggaagctaagccatggcgtccgtcagggcccgcaccccgggcgcaggcctccgctcgtcggcgtcgctcaagtctaccttcctagggcaatcctccacccgccttgcccgcgcaccgactacgaggcgtaatgttcgggcggaggccaagggagagtggctccccggcctcccttctcccacctacctcaacggctgcttgccaggcgataacgggttcgacccgttgggtctggcggaggacccggagaacctgcggtggttcgtgcaagcggagctggtgaacgggcggtgggcgaagctgggggtggccgggatgctgctgcctgaggtgctt

SEQ ID NO: 400533 - DNA, 473 bp, Oryza sativa nipponbare
ccacgcgtccgcggacgcgtgggtactgaactcaccagaccgtgcttgcaaccttgcaaagcaggcgttcgacgatgctattgctgaactggacactcttggcgaggagtcttacaaggacagcaccttgatcatgcaacttcttcgtgacaatctgactctctggacctctgacaatgcggaggatggtggtgacgagatcaaggaagcagcgaagcctgaaggagagggccactaatctgtcctgaagtctatttctgagtccatttactcagctacctgctgtattactggatcataagatgtactaggatcaattgctatgtggaatcataagattagggctgcgtatgtcaaaatgtgtcgagctgaagtacccagtggacacagtttatgtgcactacattgcttccgtgacttatttactagttaattagcaactttcaaccacttcctgtatttgcagcacatta

SEQ ID NO: 400534 - DNA, 478 bp, Oryza sativa nipponbare
ccacgcgtccgcgtcgctcgagtccatggtcgagctcgtcgcctccagcctcggcacccgcgacgtccacgccgtgtccacggaggtggtcaacagggccgggccgacgccgaggcaggcgtacagggtggaggccgtgaggcccgtgccggtgcccgggggcgacatggtggcatgccacaggatgccctacgcgtacgccgtgttcggggtgcacgggatcaagggcgcggcgtacacggtgacgctggccggcgccgacgggaccatggcggaggcggtggcggcgtgccacggggacgtggacgggcacggcgtggcggtggcggaggcgtacaagaggctcggcgtggcgccccgggaaggtgcagtctgccacttcctgcctcaggacgacatgctctgggtgcgcaactgaatgaagcagctacctgcgcgccatccatggctaattaagctccttcctatattttcgatc

SEQ ID NO: 400535 - DNA, 475 bp, Oryza sativa nipponbare
ccacgcgtccgccgattgaaggcatcaagaagtttgagaccctgtcgtacctgccaccgctcacggtcgaggacctcttgaagcagatcgagtacctgctccggtccaaatgggtgccttgcctcgagtttagtaaggtcgggttcgtctaccgtgagaaccacaggtctcctgggtactatgatggcaggtactggaccatgtggaagctgcctatgttcggatgcactgatgccacccaggtgctcaaggagctcgaggaggccaagaaggcatatccagatgcatttgttcgcatcatcggcttcgacaacgtcaggcaggtgcagttgattagcttcatcgcctacaagcccccgggttgcgaggagtccggcggaaactaagctagttggcaagccagcaagcttactcgtgagctctatacagaggagactcgattgatctattcggttttggcagctttgaacgttcg

SEQ ID NO: 400536 - DNA, 481 bp, Oryza sativa nipponbare
ccacgcgtccgcccacgcgtccgcggacgcgtgggtcgccatctatctcagctctcacagctcactgcatcaatggccgcggtcaccatggcgctctcctccccggtgatggcccgcgcggcgccgtcgacctcctccgcgctcttcggcgaggcgcggatcaccatgcgcaagaccgccgcgaagcccaagccggcggcgtcgtcggggagcccgtggtacggcgccgaccgcgtcctctacctcggcccgctctccggcgagccgacgagctacctcaccggcgagttcccgggcgactacgggtgggacaccgcggggctctccgccgacccggagacgttcgacaagaaccggaagctggaggtgatccactcccggggggcgatgctgggcgcgctcggctgcgtcttcccggagctcctcgcccggaacggcgttaagttcggcgaggcccgtgtggttcaaggctgtctcgcag

SEQ ID NO: 400537 - DNA, 477 bp, Oryza sativa nipponbare
cagaaatccgcatcaacagccagccatggcgtccacgctgaccaacgtcggcctgtctaccccggcggcggcggcgtcgtccctcgttaggccggtcgccggagctggacgcgtggtgtttccccgtgttggccgcggcgggttcgcggcggtgagggcgagcgggccggcgacgccgccggacatctcggacaagatgtcggagagcatcgacaaggcgaaggaggcgtgcgcggaggacacggcgagcggcgagtgcgcggcggcgtgggacgaggtggaggagctgagcgcggcggcgagccacgcgcgcgacaagctcaaggagacctccgacccgctcgaggcctactgcaaggacaacccggagaccgacgagtgccgcacctacgacaactgattcttaccattatatgtttgctaatctctctgtaattaattataagttactgggttgaaaagattatttgtcgtaga

SEQ ID NO: 400538 - DNA, 226 bp, Oryza sativa nipponbare
ccacgcgtccgcacgacacgacgcaccaatggcgctcgtctccgcctccttctccaccaccgccgtcgcggcgctccccggcgccgccagggccttcttcttcctcggcggcgccggcaggagcggcaggctgttgctgaggcaggccgagtcgttgtccgcgcgggcgtcgttcgccggcgctccgtggttctcgactggcctatcttgtggtctcggtagcact

SEQ ID NO: 400539 - DNA, 478 bp, Oryza sativa nipponbare
ccacgcgtccgcccacgcgtccggcttacacgagcgctagctaacgaaggcacagcgcgcttcgcgcgaaagatcggaagaaatgtcgaggccggccaggagcgacgcgcacctgtccccggagggggaggcggcgatggaggccgaggtgcgggagtactacgacgaggcggcgcccaagcgccactccaagccctcccgcagcgagccctccgccgtctacaccgacgcgctcgtccccgacgactcccaccccgagctcgacaggttccagcagctcgaagcccacaccgagaaattggtgtgcgagggtggcaaggcaggggatgagttcgtggagacggagtactacaaggatctcggctgcgtcggcaagcagcaccacacgactggaacagggttcatcaagatggacaagccctcggcggacgcctcgtttcatctgtctgatgacccagatgcatcggagcgccatgcc

SEQ ID NO: 400540 - DNA, 464 bp, Oryza sativa nipponbare
ccacgcgtccgcggacgcgtgggcggacgcgtgggcggacgcgtgggctgcccgtcaactaccggtacctcctagcctttgcagctgccgctgatgacgaaggtggtgacggcggacacggtaatggcaagcgcagctcgcccagcagcaagaaggatattttcgcgcgcctatgtcgaccgactccattcgattttggcaacaaggaattctggattgacaagaacaagggaggtatttgcttgtctatctcctcaaaggcaatggtgattacaggtatagatgaccggagatactggagccaacttgccacagaggaatcaaggtatttaccccttggtggctttgattttgcataactatcgtcttgtaggcgaataataaataattgttgaagaaaatatttgacctctgaaaatctgagttgaattaagagttatttggttaattgggtttacttctct

SEQ ID NO: 400541 - DNA, 422 bp, Oryza sativa nipponbare
gggcctcgtcgagggctaccgcatcaacggcctccccggcgtcggcgacggcaacgacctctaccccggcggccagtacttcgacccgctcggcctcgccgacgaccccgtcaccttcgccgagctcaaggtcaaggagatcaagaatggccgcctcgccatgttctccatgttcggcttcttcggtcaagccatcgtcaccggcaaggggcccttggaggaactggttgaacaacttggccaacccggtggccaacaacgcctgggtctacgccaccaagttcacgccgggctcgtgaatggcccagccgccattgtagactactctctctctccatcgctcgatgtaccaatgcttgcacagattgtacgatgctgtgatgaatctgatatgatccatccagaattcaaaaactgaaaaa

SEQ ID NO: 400542 - DNA, 479 bp, Oryza sativa nipponbare
ccacgcgtccgtggccgcggccaccatggcgctctcctccccggtgatggcccgcgcggcgccgtcgacctcctccgcgctcttcggcgaggcgcggatcaccatgcgcaagaccgccgcgaagcccaagccggcggcgtcgtcggggagcccgtggtacggcgccgaccgcgtcctctacctcggcccgctctccggcgagccgccgagctacctcaccggcgagttcccgggcgactacgggtgggacaccgcggggctctccgccgacccggagacgttcgccaagaaccgggagctggaggtgatccactcccggtgggcgatgctgggcgcgctcggctgcgtcttcccggagctcctcgcccggaacggcgtcaagttcggcgaggccgtgtggttcaaggcgggctcgcaaatcttcagcgagggcggtctcgactacctcggcaacccgagcctgatccacgctcagagca

SEQ ID NO: 400543 - DNA, 470 bp, Oryza sativa nipponbare
ccacgcgtccggttcatagctactcctgcaggtgaaatggcaagcctgcagaatttgatctgctccgtttccaagcagttggttgctccaaattgtgctgttaccagcaagctgaatgcgtctcctctgtcagtcgtcaacgctagctcgagtgaagcatcctcggatgaaaagaatgtgacaaggaggagattagctctgcttggtgctggagcattagccactggtctgctaaagagcagctctgcatatgctgaagaagtgccaaagaattacaagtcttatgtggattcaaaagatggatattcatacctgtatccagctgattggagggatttcgacttcctggggcatgattcagcgttcaaagatcgtaatggtacgctgcagtgcgtgcgtgtgggcttcatttctactacaaaaacagatttccgtgaccttggtccaatggatgaggcgatctttaattt

SEQ ID NO: 400544 - DNA, 362 bp, Oryza sativa nipponbare
gtagacatggccgccgccaccatggccctctcgtccccggcgctggccggcaaggccgccgcgaaggtgttcggcgaggggcgcatcaccatgcgcaagtcggcggcgaagcccaagcccgccgcgtcggggagcccgtggtacggcgccgaccgcgtgctctacctcggcccgctctccggcgagccgccgagctacctgaccggcgagttccccggcgactacgggtgggacaccgcggtgctctccgccgaccctgagacgttcgccaagaaccgggagctggaggtgatccacttcaggtgggcgatgctcgtgcgcgcttggctgcgtgttaccggagctttttgattggaacggcg

SEQ ID NO: 400545 - DNA, 466 bp, Oryza sativa nipponbare
cccacgcgtccggcttgagcttggagagagacaacaatggcggctcaggctcttctctctgggaggcagctgctggggaggccattgcaatcttcagtctccaggtcttcttcctccaggaaggcacccttcatggtcagggcagaggccactccccctgccaagcaaggtgctgacaggcagctgtggttcgcatccaagcagtccctgagctacctggatggcacgcttccgggagacttcgggttcgacccgctggggctatcggacccggaggggaccggtgggttcatcgagccacggtggctggcctacggcgaggtgttcaacggccggacggcgatgatgggcgtcgtcggcatggtcgccccggagcttcttggcaagctgggccttcgtcccgccgagacggcgaacccgtggtttcagaccggcgtgatcccccccgcgggcacctacacctact

SEQ ID NO: 400546 - DNA, 469 bp, Oryza sativa nipponbare
  unsure (1)..(469): unsure at all n locations
ccacgcgtccgcccacgcgtccgtgtctatgcttttggtgtcgtcctttatgaacttctttcagccaaacaagctattgtgagatcaagtgaatctgttagcgaatcaaaaggactggttttcctgtttgaggaggccctcagcgctccaaaccccacggaagctcttgacgaactgattgatccgagcctgcaaggggactaccccgtcgactcggctctcaagattgcgtcccttgcaaagtcctgcacgcatgaggagcccgggatgaggcctaccatgagatccgtcgtcgttgccctgatggcgctcacagccaacaccgatcttcgcgacatggactaccaccctttctgaggacaggttaactggaccaagtgtaaaaatgtaaagtgatgtgtaaaaatgtgcagttagtcactngatggatgcatatcccatttaattgtaggcaaaatttgggtacctg

SEQ ID NO: 400547 - DNA, 395 bp, Oryza sativa nipponbare
ccacgcgtccgcccacgcgtccgactcgctctgcgccttcgcgctgaatctggcggtgttcttgctcgtcggcaagacctccgcgctcaccatgaacgtcgccggggtggtcaaggactggctgctgatcgccttatcgtggcccgtgatccgggacacgggcacgccgatcaacctgttcggctacgggatcgccttcttgggggtggcatactacaaccacgtcaagctgcaggcgctcaaggcgaaggaggcgcagaagaagatcagccaggctgatgaggaggctggctcgctgttgcaggagcgcgatgggcacagtgctcgcaagagcgatcgctacacttggagccgcctccagagctgatcctggcacacacatactggctttttgg

SEQ ID NO: 400548 - DNA, 476 bp, Oryza sativa nipponbare
ccacgcgtccgcccacgcgtccgcccacgcgtccgcccacgcgtccgtaacgcctgagaactgaggagcgaaccggcgggatggcggcggcggcggcggtggcggcggctgggagggcagtccggtacggcgtgttatcgaaagcgctgccgacacggctgcacatcaacagcggccgaggtctcgacatctccgaggctgagggccctctcgataggtacatccaggtgttgatgaatgaaagaaaccttggaaaagtaaggagtatagagaagattttgtcaaaaagagatatggtgagagaaagctctgagagcctgatccttgagcgcatgaagaagattggcacacacaatacgaaacatgcgtggatggttgctggcgtcactatttccgggtacttgtttggggccgcattcgttgcccttcttacagagtcccaactgccaaagcgtgaagaggagaatgaggcttga

SEQ ID NO: 400549 - DNA, 400 bp, Oryza sativa nipponbare
ggcaccagcccaccggccggcaatggcgtccacctcctgcttcctccaccagtccacggcccgcgtcgccgcgcgcgtcgcctccccgtccccggcgacacggacccacctcctcgtctgccgcgcccagaagcaggacgacgccgacgtctcccgccgcgcggcgctcgcgctgctggccggagcgacggcggcggtgggggtgaaggtggcgcccgccgccgcggcctacggcgaggcggcgaacgtgttcgggaagcccaagacgaacacggagttcatcgcctacagcggcgaggggttcaagctgctgatcccgtccaagtggaaccccagcaaggagcgcgagtttcccggacaggttctccgctacgaggacaacttcgacgccaacagcaac

SEQ ID NO: 400550 - DNA, 459 bp, Oryza sativa nipponbare
ccacgcgtccggtgccgaggaggcttaccttcgacgagattcagagtaagacgtacatggaggtgaagggaaccggcacggcgaaccagtgcccgacggtggagggcggcgtcgactccttcgccttcaaggccggcaagtacaacatgaagaagttctgcctggagccgacgtccttcaccgttaaggcggagggcgtggccaagaacgcgccacccgagttccagaagaccaagctcatgacccgcctgacctacaccctcgacgagatcgagggcccgctcgaggtcagctccgacggaaccatcaagttcgaggagaaggacggaatcgactacgccgccgtcaccgtgcagctgccgggaggcgagcgcgtgccgttcctcttcaccatcaagaatctggtcgccaccggcaagccggagagcttcggcgggcccttcctcgtgcccagctacc

SEQ ID NO: 400551 - DNA, 473 bp, Oryza sativa nipponbare
cgcgtccgcccacgcgtccgcccacgcgttcgcacaccccaccagcagcagcagcagtagctgagcttgaagcagcagagcgaggtagacatggccgccgccaccatggccctctcgtccccggcgctggccggcaaggccgccgcgaaggtgttcggcgaggggcgcatcaccatgcgcaagtcggcggcgaagcccaagcccgccgcgtcggggagcccgtggtacggcgccgaccgcgtgctctacctcggcccgctctccggcgagccgccgagctacctgaccggcgagttccccggcgactacgggtgggacaccgcggggctctccgccgacccggagacgttcgccaagaaccgggagctggaggtgatccactccaggtgggcgatgctcggcgcgctgggctgcgtgttcccggagcttctcgcccgcaacggcgtcaagttcggcgaggcggtgtggttcaa

SEQ ID NO: 400552 - DNA, 359 bp, Oryza sativa nipponbare
ccacgcgtccgcttgctggtgtgttcgaggaggaggaggaggaggagaagctagcggcggcggcggcaatggcgacgagcgggctgaggagctgcagcgcggtgggcgtgccgagcctgctggcgccgtcgtcgaacaggagccgcctgccggtctgcgcctacgccaccacctccgggcgcgtcaccatgtccgccgagtggatgccgggccagccacgccccgcccacctcgacggctcctctcccggtgacttcgggttcgacccgctgggcctcgccaccgtgccggagaacttcgagcggttcaaggagtctgaggttttccactgccggtgggccatgctcgctgtgcctggg

SEQ ID NO: 400553 - DNA, 459 bp, Oryza sativa nipponbare
ccacgcgtccgcggacgcgtggggaagtactcgagcaaagaaggagagagcttggtgagctgcagagatggccccctccgtgatggcgtcgtcggccaccaccgtcgctcccttccaggggctcaagtccaccggctcgccgtgaggcagcggtcgtacaccgagctgcagatattcaaccggcggtggaaggccgcggcggagggggacgtgtgctggaccgacccctacccgtagcccgccggcgacggcgaccgagctcgtcgccggcgatggcggtgggaccgggcgtacggctagttacttgagtagctgagatatgatagatacagagcttctcttcttgatgtacagatttgtttctctcatcgtcagaataagcaaatgttagaatcaaagacgatgtaattacaatagttttttaaaaaagaaatatatcgatcaatcaaattttggcat

SEQ ID NO: 400554 - DNA, 447 bp, Oryza sativa nipponbare
ccacgcgtccgcggacgcgtgggcggcgctgctgaaggtgaaggagatcaagaacgggcggctggccatgttctccatgctggggttcttcatccaggcctacgtcaccggcgagggccccgtcgagaacctctccaagcacctcagcgaccccttcggcaacaacctgctcaccgtcatctccggcgccgccgagaggacgcccagcctgtaaacatctcgccgccggcgacgctggctggcctcaagttaattttaatcttacccgggaagaagaagggaggagtttgagaagggtggaagaatgtgttaaatgtacgtgtaaattatcgtcgagttgggagatgaatttgaaaacctgttcattctgatcttctgataggaaggaccaagtgtttggatttgtggctgagaaaaaaataattatttattttttatattattaag

SEQ ID NO: 400555 - DNA, 377 bp, Oryza sativa nipponbare
ccacgcgtccggcgcgcgcggcggagagaaattaatcgatcgatcgatcgatccgattccggccggccatggcagctgcggctccggcgacggcggcggtgcggcgcatgaagctgggctcgcagggtctggaggtctcggcgcaggggctgggctgcatgggcatgtccgccttctacgggccacccaaaccggaggccgacatggttgcgctcattcaccacgccgtcgccgtcggcgtcacccaccttgacacctcctacatgtactggccccacaccaacgagctcctcctcggcaaggctctgcagggcggcttgagggagaatgtggaggtggccacgaagattgccgtctccgttcgcctgactggaagg

SEQ ID NO: 400556 - DNA, 457 bp, Oryza sativa nipponbare
cccacgcgtccgaatgaatctatccaacagaagaagaaaattctggttgaaggtggtcaagcaacaatgttggatattgattttggaacttacccatttgtgacttcttctagcccttgacctggtgggatatgcactggccttgggattgccccaaggtgtattggtgacctgattggagtggtcaaagcttatacaacaagggttggttctgggcctttttcaactgaactgcttggacaggaaggtgatctacttaggaaatcagtaatggaatttgcgacgacaacaggccgcccaatgcgttgtggctaccttgacattactgcgctaatgtactgctgctagataaattgctctaaatactcttaatctgaccgaactcgatgttatgtgtggattaccagaagcttaggtgtgggttttttatgacctacctgatgggcataagctacaa

SEQ ID NO: 400557 - DNA, 477 bp, Oryza sativa nipponbare
cacgcgtccgcggacgcgtgggccgaatgccattcctcgcgattcctctcccctcgcctcctcgtcctccccctcctaggggatcgccggagaggaatcgcgcggaggaaaaaaaaagaaaagggcttcctcgtcgtctaagttaaaaggaagccatggagcacaaggagactggatgccagcagccagaaggcccgatcctttgcatcaataactgcggcttctttggcagtgcggctaccatgaacatgtgctcaaagtgccacaaggagatgataatgaagcaggagcaggccaagctggcagcctcctctatcgacagcattgtcaatggtggtgattccgggaaggaaccaattattgctggtcacgctgaagtagctgttgctcaagtcgaggtgaagacgcttgttgcgcaacctgctgagattgctggtcctagtgagggggtcacggtgaaccccaaggggagggaag

SEQ ID NO: 400558 - DNA, 481 bp, Oryza sativa nipponbare
ccacgcgtccgcggacgcgtgggcggacgcgtgggctccaacctcgcatcactccatgcgcgagctcgagctcagctgagtggacgatggaatgaggctcgtggctgccaaaccttgctgcctcttccgaatctcaagcgtcgccgccgttgcagccggtcgccgccggccatggcgagccgcggcggcgagcggcaatgcgcacgccgaagccgaaggcgatgaggacggccaatcgctgtcggcgagggcgaggggcaggcgggcgcggctgtcggcgaggcggcgggagaggatcgtggtggtggagggcggcggcgttgggggcatcggcgagttcctgcgtcagcccgccggcgtggagtcgctgctgaacacgagggcgctgcagagcttcgccgcggtggacgaggcgccgggggcgaacacgttccggtgcacgctgcaaagcatcggcttcctcgggttccaggtcgccccc

SEQ ID NO: 400559 - DNA, 456 bp, Oryza sativa nipponbare
  unsure (1)..(456): unsure at all n locations
ccacgcgtccgggagttccgtaaggagttcaaggagaagaaccccaagaataaatctgtcgctgctgtaggaaaagcagccggtgataggtggaaatccctgaccgaagcggacaaggctccctatgtagccaaggccaacaagctcaaggccgagtacaacaaggccattgctgcctacaacaagggcgagagcactgccaagaaggcacccgccaaggaggaagaggaggacgacgaggaggaatctgacaagtccaagtccgaggtcaatgatgaggatgacgacgagggcagcgaagaggatgaagacgatgacgagtgagccttccagtggacaagatgggagcagcaagacgctaagggcggcgggcgtcctaaggagcctatccatcatcatcatcgtctactagaattattcagtttcacttcacatcgngatggtttactttttctc

SEQ ID NO: 400560 - DNA, 463 bp, Oryza sativa nipponbare
gcgtccgagctgaggactgcagtaaatgctcatgcaagtgacagcgacctccgtctcattgtagatgggataatggcgcattacgatgagatattcaggctgaagggtgttgccgcaaaggctgatgtgtttcatatactttcaggcatgtggaaaacacctgctgaaaggtgcttcttgtggcttgggggttttcgttcctctgagcttctaaagcttcttgtgaatcagctcgagccattaactgagcagcagttgttgggactatcgaacctccaacagtcctctcagcaggctgaagatgctctatcacagggaatggaagcgttgcaacaatccttggcagatacgttggccgggtcccttggtccatcaggatcttcagggaacgtggcaaactacatgggtcaaatggctatggccatgggcaaacttgggacccttgagaatttcttcgtcaggc

SEQ ID NO: 400561 - DNA, 458 bp, Oryza sativa nipponbare
ccacgcgtccgacatactctactactactagccagtaagctagctaactaactacgtggctatggcccccaccgtgatggcctcctcggccacctccgtggctccattccaagggctcaagtccaccgccgggctccccgtcagccgccgctccaccaactcgggcttcggcaacgtcagcaatggcggaaggatcaagtgcatgcaggtgtggccaattgagggcatcaagaagttcgagaccctatcgtacctgccaccactcaccgtggaggatcttttgaagcagatcgagtacctgcttcgatccaagtgggtgccttgcctcgagttcagcaaggttggattcgtctaccgtgagaaccacaggtctcccgggtactacgatggcaggtattggaccatgtggaagctgcccatgttcggctgcaccgatgccacccaggtgcttaaggagc

SEQ ID NO: 400562 - DNA, 452 bp, Oryza sativa nipponbare
ccacgcgtccgctcaagaagtactcgagcaaagaaggagagagcttggtgagctgcagagatggccccctccgtgatggcgtcgtcggccaccaccgtcgctcccttccaggggctcaagtccaccgccggcatgcccgtcgcccgccgctccggcaactccagcttcggcaacgtcagcaatggcggcaggatcaggtgcatgcaggtgtggccgattgagggcatcaagaagttcgagaccctctcctacctgccaccgctcaccgtggaggacctcctgaagcagatcgagtacctgctccgttccaagtgggtgccctgcctcgagttcagcaaggtcggattcgtctaccgtgagaaccacagatcccccggatactacgatggcaggtactggaccatgtggaagctgcccatgttcgggtgcactgacgccacccaggtgctcaa

SEQ ID NO: 400563 - DNA, 427 bp, Oryza sativa nipponbare
ccacgcgtccgcccacgcgtccggtgatggccaaggagctggacgagggcaagcagaccgaccaggacaggtggaagggtctcgcctacgacatctccgatgaccagcaggacatcaccagggggaagggtttcgtcgactcccttttccaggctcccacgggtgatggcacccacgaggccgtcctcagctcctacgagtacctcagccagggtctcagaacgtacgacttcgacaacaccatgggaggcttctacatcgcccctgctttcatggacaagctcgtcgtccacatctccaagaacttcatgaccctccccaacatcaaggtcccactcatcctgggtatctggggaggcaagggtcagggaaaatccttccagtgtgagctcgtcttcgccaaggatgggatcaaccccatcatgat

SEQ ID NO: 400564 - DNA, 329 bp, Oryza sativa nipponbare
atggacccacgcgtgcgcccacgcgtgcgtccacgcgtccggcctagatgcgctcgtcaagatcttggacgaagagttcggaatcgtaaagggaaccatgaccacaactcactcctacaccggcgaccagaggttgctggacgcgtcgcaccgtgacctgaggagggcccgggcggcggcgctgaacatcgtgccgacgagcaccggcgccgcgaaggccgtggcgctggtgctcccgcagctgaaggggaagctcaacggcatcgcgctgcgcgtgccgaccccgaacgtgtccgtggtggacctggtgatcaacaccgtgaagaccg

SEQ ID NO: 400565 - DNA, 462 bp, Oryza sativa nipponbare
ccacgcgtccgcccacgcgtccggggcagataggctccagactggaatgaggggtgcttttgggaagccacagggaacctgtgctagggtggatattggccaggtcctcctttctgtgcggtgcaagcccaacaatgctgtccatgccagcgaagccctccgtcgtgccaagttcaagttccctggtcgccaaaagatcattgagagtagaaagtggggtttcaccaagttcagccgcgatgaatacgtcaggcttaagagcgagggtagaatcatgcctgatggtgtcaatgctaagctacttggttgccatggtcgcctctctgctcgtgcccccgggaaggccttcctctcagccgcttagatatatctatccttatcatctgtgggaaacgaaatatcggacctttttgtttgtttgtagactcgatcatatatcactttggtgaaccctgaatcacc

SEQ ID NO: 400566 - DNA, 467 bp, Oryza sativa nipponbare
ccacgcgtccgcaaaagaagaagaagaagaaagaagaagaagaagatgcagaccgctgctagcagtgtcgttggattgtcggccgtgttgcccgctgctgtgaaggggcgcagcctgcagattcaggctcctcgccgtgttgcgttgcgcgttcgtgcggcggcggcggcggtggcagtggaggctgcggaggtggactacagctctaacatctcggtgtttccgatggaggcgtgcgacctcatcggcggcgaggcgtgcaacgtgcagatgtacccagaggccaagctctcatcatcggctgctgttgctgtttctcgtgcggcggcggaggaagtcgacagggactacctatcctacgacgagcccaccacggtgttccccgaggaggcgtgcgacgatctgggcggagagttctgcaaggccacctgatcccattcccatccatggagaattggagtcttcta

SEQ ID NO: 400567 - DNA, 473 bp, Oryza sativa nipponbare
ccacgcgtccgctcaagaagtactcgagcaaagaaggagagagcttggtgagctgcagagcagaggccactcgggctgccaagcaaggtgctgacaggcagctgtggttcgcatccaagcagtccctgagctacctggatggcacgcttccgggagacttcgggttcgacccgctggggctatcggacccggaggggaccggtgggttcatcgagccacggtggctggcctacggcgaggtgttcaacggccggacggcgatgatgggcgtcgtcggcatggtcgccccggagctcctcggcaagctgggcctcgtccccgccgagacggcgatcccgtggttccagaccggcgtgatcccctccgcgggcacctacacctactgggccgacccttacactttcttcgtttacgagctcgccctcgtcggcttcgccgagcaccggcgttttcaggactggtacacgccgggc

SEQ ID NO: 400568 - DNA, 487 bp, Oryza sativa nipponbare
gccgcaaccttcctatcctaagcatttacagtacaggtctacatgaacttttggtgcagcaacatgtgatgagagacataagcaacagtgatccatgtgccccgctgattgctcttggttttgtgaccggctatgaccaactcatggacgggtaccctagcagatgacgatagggatgcattcacaaaagcatatataacagcgttaaacgaagaccctgagcaatacagagctgacgcacaaaagatggaagagtgggctcgttcccagaatggtaattctttagttgagttttcatccaaagatggagaaatagaggccattctgaaagatatttcagaaagggcccagggtaagggaagcttcagctacagccggttctttgcagttggcttgttccgtttgcttgagcttgcaaatgcaacagagccaaccatactagacaagctttgcgctgctctaaacatcaacaaaagaagtgtcgaca

SEQ ID NO: 400569 - DNA, 410 bp, Oryza sativa nipponbare
ccacgcgtccgcggacgcgtgggtgcgcccgaccatggagctcgcggtcagagcagccgccgcggcctcctgctcctccggcgcctcgctccagctcccgcgggcccgagccccgctccgcctccttggccaccgccgcctccccgctcgccgggtggctgtcgaggccgccgcgatcgccgtcgagccggaaaacaaagtaccgcagagtaacaattcagaagccgaggtgtttgcatgccctgtttgctatgagccattgataaggaaaggcccatcgggcataaacttgccatcaatttataggtctgggttcaaatgttcaaagggcaacaagtcattcaccaagcaagatatcttcttggatctaactggcacttttggaacaaaaggaatttagtggattggag

SEQ ID NO: 400570 - DNA, 333 bp, Oryza sativa nipponbare
ttttaagctagataagcactgattccacgcacaatttacatgatcattacatcgtccatcacacaggcactcatgcatcgattacacataggagtattgattcgtgtgactagcttaatgaatttgattagccgatgatctggtccaggacgccgatgttcttgaggccgaggacgacgccgacgcccatgatgtggccgacggcgccgcaggccagcgtgtcggcgagcgtgaacccggcggggtcgccggtctgcaggccggagtcgcgcgccttcagcttcagccccgccgtcgacttcctgttcgccgacggcgccagcccgaaccttc

SEQ ID NO: 400571 - DNA, 360 bp, Oryza sativa nipponbare
gtgggaggcaaaatcaagtctcgaacttgcaattgacgttccaaaattctagtattacacgggaccaaatcaacgagataggtttgatcaaatcgtccccagtataaaacaagcttgatcttctcaagctagtgtggtggtgtaaaattacaatcatgatcaagagagtagtacagtaattaatttaattacggttgctgcatgcagctgagctgcgtagtgatgaatctgtatatgtctaggtgaccttgacgccgttgtatttgaggatctcgccgatgagctcccccctgccggagccgacgtagcggccgacgatgtctccgtccctgatgaagaggaaggtgggcacccggaccc

SEQ ID NO: 400572 - DNA, 397 bp, Oryza sativa nipponbare
tgcaaaaacatcatcttctggtgggtcttcttagtgtacacaacaccaactcgatcatcatctcgtcgcactaaacccatcttccccaacccaaagacaacgaactcgctggccacaaatccatccaaccacaattaaccactgctaagctacggtcccccacttcacttgccggggacgaagttggtggcgtacgcccaggcgttgttgttgacggggtcggcgaggtggtcggcgaggatctcgagggggcccttgccggtgacgatggcctggacgaagaagccgaacatggagaacatggcgaggcggccgttcttgatctccttcaccttgagctccgcgaacgcctcggggtcatcggcgaggccgagcgggtcgaaggcgcccttcgggg

SEQ ID NO: 400573 - DNA, 480 bp, Oryza sativa nipponbare
aaccaaaaatttgaatcgttttattttgtgacggaagattccatccagtacatctcacaagtaccttgttccagaccaaatacatatatattagcataaagcaaaagagggttgcgttttccagcgcacttcaaagtgccagcttcactcgttgctgggttctccgcgctccagcttacaacggaagcaagtgttattcaccgtggatcgttatctaatccttattattgcataatatagcgtccatcttgatgagcttcgtcttggtgcatctcgtatttaggagacagggctagcagtaatgccccatatttcctttgcatactgagcgatagtacggtcgctgctgaatttgccacttccagctgtgttcagtatagacatcttgatccattttttcttatccttggaggcttcatcaaccttgggcctgtgcatcaatatagcttgggaaatcatagccaacgaggaaataatcac

SEQ ID NO: 400574 - DNA, 376 bp, Oryza sativa nipponbare
aataagggggggacaacaccatatttcattgatcaggttcagaacctgcacagaaatacacactaccggtacagatctcaccctctcttcaatactcgtacatccatgcacgcgggccacacgaatacgtacatctatactgtacacgtacgtacatgtactgcaccgtgtacacacacgcacactcttctgcagagacgcgcatcgtcgtcaacctagctagcttagctgaaggcgatgcgtcgccatggcagcacggcggcggcggcgctcacttgccggggacgaagttggtggcgtaggcccaggcgttgttgttgacggggtcggcgaggtggtcggcgaggtttttgagggggcccttgccggtgaccat

SEQ ID NO: 400575 - DNA, 475 bp, Oryza sativa nipponbare
agcattcacatatgcatgctcttcaacctatgttgatacatacatatgtacatacatacacagctgatgttgacacaaacaagatgaaaaaaaaaaactgaagcaacaaactgggaaaggggaaaccaatgcaaggtggcccgattcgaacgttcaaagctgccaaaaccgaatagatcaatcgagtctcctctgtatagagctcacgagtgagcttgctggcttgccaactagcttagtttccgccggactcctcgcaacccgggggcttgtaggcgatgaagctaatcaactgcacctgcctgacgttgtcgaagccgatgatgcgaacaaatgcatctggatatgccttcttggcctcctcgagctccttgagcacctgggtggcatcagtgcattcgaacataggcagctttcacatggtccagaccctgccatcatagtacccaggagacctgtggttctcacggtagac

SEQ ID NO: 400576 - DNA, 372 bp, Oryza sativa nipponbare
ttagtcacgattggaaggcaaatgttcgtgaagataggcacatatatgtatcgtacaatgtcctctccgcttgtcgaaatgcaaataacatcatcgggggatatgatcatcagttcacgagaacagaggaagaaacaaaagctaaaaattaaaaccatcaacagcccgatcgagtttgcattactagatacacacattgcagccttccttccctctctccatgtatcgatatatcaacccggccacgcacaaaacatttgttcattccctactcgagctgcgcgtaccacaccccttggatcttgacatccttgggcaccttggcgccgaggtctgtgtccgacggctgcacgctctcgaagacgccaatca

SEQ ID NO: 400577 - DNA, 478 bp, Oryza sativa nipponbare
tttttaataacgaacacagatacgggagataatatttcaataaaggggcaaagtgatgcagtaagccaatttcattacacgttaatactttatacattacacagcagggctacgcaaatgaaaatacagcaattccaagcacagttttattacaacattattggaagttccaagtgctcaatgcaacgcagcagtgcatctggtggcgccggcggtaaggttttaagaacttccaagcagcttcttgatgtccttctccatgctgagtggagaagtagttggcgcatagcgctccacaacacgcccctctttgtcgaccaagaacttggagaagttccatttgatattgtcaccgaaaagaccacctttgctggacttcagaaacttgtagatgggtgcagtgttgtcaccattaaacatcaaccttatcaaaaattggatactcggccttgaagcgggtgcaagcaaattggacaat

SEQ ID NO: 400578 - DNA, 272 bp, Oryza sativa nipponbare
taaccaaagcgaactcaagggatgggaacatcacggacgaagaacacctaacactggatggatggatagagggcttctcgactcgagagagccactggacacgataacgactcgactcgatgataagatgattctgacacggatagctaaggataactggccacgatgggccccaccaatcagttcctccagttcccgccggagtcgccgccgtagccgcctccacggctgccaccgtagccgtcgccgcctacgcctcggtcgtcgacaaa

SEQ ID NO: 400579 - DNA, 357 bp, Oryza sativa nipponbare
ttattatatattcgggaggggctttttttgtgtgtatatattcttaactttgttttaacagatcacacccaacgataaatgtagtactcttacaataaaaccggccggagagggagacaagagataaatacatatgtaaaaagagcaaacgccaaagggcatggacagaaccaaacagtaaaacaacacattgtagcatattatgtctcgatacatgatgaacaatatcaaccccgaagctgcatactattatcataggcagcaatgcaccggggcgatacttgatcggaggttatttgccaacagactcctcaaaacctgcggacttgtaggcgaagaagctaatcaactgcacct

SEQ ID NO: 400580 - DNA, 410 bp, Oryza sativa nipponbare
ttggtttttttttttgccactgttttgtacaatacaaacttgtttaaaaatatccattgacaaataggccgtagcacgactggagtgcaacgccgtatgcaaacaatggtttagtctatgctgaaatttggcacagatataggtaagctgtgcgatgaattaacatcggtctttgaaaaatacaacatttcttttcatatctatggaaacatcaaagacatcatatccttccctgcgatccacgaacaatgagctgctttgaatcatgaggttcccaacagaacactccctgagcaggtcagttgatgttcatatcctcagcaccagcaccgtctccatcctcgttttctgatgaggtgttaatcaagcgcctggaacgctgctgctgttgtcgtgttggctgcaacttt

SEQ ID NO: 400581 - DNA, 394 bp, Oryza sativa nipponbare
gtataaatatatatgggcggagcttccatatatttcattcacatatgcctcacccaacaacatatagtcgtagcagataccactcttacatcaagtcagagagagatcaggtgaaacaaaaacaaaagcagagcacggccggtaaaatcaaaagacgatgaacaaactgggaacacacgaaacaaggtgggagacatcatcgaatcagagatgaacaattaaacaaggctatatatgacgatgacggcttagttgccaccagactcctcgcagcccgggggcttgtaggcgatgaagctgatgagctgcacctgcctgacgttgtcgaagccgatgatactgacgaatgcatcagggtacgccttcttggcctcctcgagctccttgagcacct

SEQ ID NO: 400582 - DNA, 386 bp, Oryza sativa nipponbare
ggggggggcttagtggcaaaacagaaatgcgaatttacctttatatgcaactgtttacaccaaaaggggaaaaaaacgggtaccttgcaaaaaggagtataactttgcagtttcaagtcccacttcaactacaacccaatctgcattacaggatgggagtctaaaacgactgcagtttcagcgtttttgaggcctgcagagacactgggctcgcgttgcagcaaaagattaggcggcggcgcccacggtggcgccggcggtgagcctcgacgagccgtagagagtctcctcgaaccggatgatctcgttcttggaaccgtaggccacttgagtccgctcgtcgaggttgttgatcaccttgtccagcaccgactgtttgccgtcgc

SEQ ID NO: 400583 - DNA, 462 bp, Oryza sativa nipponbare
ggggggacaaatttacatgttacacccacaccctacacccatgcataataatacatcgtatatacgtacgtacatacatacccctctcgatcacacgcaccatcgatcgtacaaagttgcgtacatacatacgtacacacatatacgcatacgcacgtacatacatacataattaaaaactcgtaattaattaaatacgtagttgatggcatctctaatggaacttgaggctggtgaggatgttgttgtggacgggatcagcgaggtgatcaagcaggttctgcacggggccaaccccggtgaagagcgcctggacggagaagccgaggaaggcgagcatggcgagcctgccattcttgatctccttgagcttgagctccttcatctccggctcggtcttggtccccaaagccaagccggtttgaagagcgggccgccggggtaggcccgctcgccggagcc

SEQ ID NO: 400584 - DNA, 380 bp, Oryza sativa nipponbare
ggaaaaatggttaataatataaatatatcgaaaacagttggttaaacagagtagtcaagagtcgatcgatcgatgtacacggagacaaaatcaaagacctctctcatcacttggattaattaatactagtaatatttagagactcttgggcaagcatagaaataattagcaaatgaggatggtgatgcaggaggtgtagaggctaggcagcaagggaggggtggtggtggtcagagttggggatggtctccttgtggagatgaccgtctcccttggggacgatgagaccgaagcctccttccttcctcttgtacaggacgttcatctacccggtcttctcgtctctgaaggcgtagaagttgtgggccacattcactagc

SEQ ID NO: 400585 - DNA, 391 bp, Oryza sativa nipponbare
ggagaaagtcaaggggcggtgaatattgcttcacttgtacaaagtacagataaaaatacattgatacatgacacggagagagccatgcacaccacttatttggacacacagagggcaaggctgcagagaaaatcaagcaacacaagctgaactcacggccccacctgtcagcctctcactggtcgaggccggagactcttgtgaaaaacagcaacaccacgcatgcagaagaagacaaattattacacacacaaatcgacgacacggcggccggcgacgtacggcgaggtcgtcgccgccgccggcgacgttgtgatgaggtcgatcagcccaagaggtggtgcttcttctcgccggtggactcctcggcgctcttgtggtccttcttttt

SEQ ID NO: 400586 - DNA, 370 bp, Oryza sativa nipponbare
ggggggcgacgcacaaattggcatcgttttagctggcttcgttgtagatcctataataacgatacatcattaattcgatcatcccttggatgcggcctgcggcttacattaaatctcgatccaaagaagcaaagatgatgacagacagaaattaattaagctagaaatctcctcgatcgatcacacacacacacacaattaaggttcatacatacatgcactgctgcaactgcaactgcagggtcggtgcgtggctactacaagtgtacacatggtacgttggttggcaccatctcgatcgtgtcgttgggctcacttgccggggacgaagttggtggcgtatgcccaggcgttgttggcgaccgggtcc

SEQ ID NO: 400587 - DNA, 483 bp, Oryza sativa nipponbare
gacaagcaattaagcgtagtggatccaccataattaagatcgagaccatgagatagctagaacactgctgctaccatgagatagtttatccccctgtagtactgtacatcagaaattcaccactcaactcaccccctcacccatgcatccagatccatgcatgcaggaaacaattaccacaacacacacagtaagtctgaatctcatcacatccatctctctctctctcctccccccaattcattaacatcttatacatgcatactccacaaaaaaaaaaagaagaaacaagaagagaacatcttccatcgcccaatcatcggtttcaccagcctgaactcatcaagctccttgagatgccctggccctgatgaaatcgatcacacgctcagcctgacagcgtctggatgatggtgttgtgccacgggtcagacaggtgctgcagcaggttgtcgaagggccccttctgcgtcacgttgtgct

SEQ ID NO: 400588 - DNA, 484 bp, Oryza sativa nipponbare
ggaaaacgctaatacagcgatactaataatgtgctgcaaatacaggaagtggttgaaagttgctaattaactagtaaataagtcacggaagcaatgtagtgcacataaactgtgtccactgggtacttcagctcgacacattttgacatacgcagccctaatcttatgattccacatagcaattgatcctagtacatcttatgatccagtaatacagcaggtagctgagtaaatggactcagaaatagacttcaggacagattagtggccctctccttcaggcttcgctgcttccttgatctcgtcaccaccatcctccgcattgtcagaggtccagagagtcagattgtcacgaagaagttgcatgatcaaggtgctgtccttgtaagactcctcgccaagagtgtccagttcagcaatagcatcgtcgaacgcctgctttgcaaggttgcaagcacggtctggtgagttcagtacccacgcg

SEQ ID NO: 400589 - DNA, 387 bp, Oryza sativa nipponbare
ggtatcaagtttggtctgagtatagtattacatataagtatcgtttttgacgatttgtacaatatatttattacgatgtgtatgtgcatatgattagcctggtgctagcattcacatatgcatgctcttcaacctatgttgatacatacatatgtacatacatacacagctgatgttgacacaaacaagatgaaaaaaaaaaactgaagcaacaaactgggaaaggggaaaccaatgcaaggtggcccgattcgaacgttcaaagctgccaaaaccgaatagatcaatcgagtctcctctgtatagagctcacgagtgagcttgctggcttgccaactagcttagtttccgccggactcctcgcaacccgggggcttgtaggcgatg

SEQ ID NO: 400590 - DNA, 408 bp, Oryza sativa nipponbare
acttgtaagttgtaggagacagggacttttattgcaatatttgtagttaatacaccttgcaatcattcttacttagtactaatacacattgaaatatgccataggtaaaatctttaatagctatatatccaagccatattatcgtgtgagatccttatatccaagccatattatcatgtggataattaacatgtccaatagctatatccacaccatattattccccatcttcttgataacttgatacacataggatacgagatgggccttaggcatttgcactggcatcgacaggcttgaactcctggagctccttgaagtccatccatggtttctcccagaccttagcttcatagagcttcttggcatccccttccttcacctcaattgtgaaatagtacaaagtgc

SEQ ID NO: 400591 - DNA, 403 bp, Oryza sativa nipponbare
attggaaaaacacaaatttggtggtgaatcttttaaggggccacacaaccaactggatcataatttggtggaattaaaccaattttccccaacccaaagacaacgaactggttggccacaaatccatccaaccacaattaaccactgttaagctacggtcccccacttcacttgccggggacgaagttggtggcgtacgcccaggcgttgttgttgacggggtcggcgaggtggtcggcgaggttctcgagggggcccttgccggtgacgatggcctggacgaagaagccgaacatggagaacatggcgaggcggccgttcttgatctccttcaccttgagctccgcgaacgcctcggggtcatcggcgaggccgagcgggtcgaaggcgccgccggggtaga

SEQ ID NO: 400592 - DNA, 478 bp, Oryza sativa nipponbare
  unsure (1)..(478): unsure at all n locations
tttaaaaaacctttggtttgccatttcccccttgaactatccgtaaataccaccattccaccaaactcccctctgtcttctacgacaaataatcttttcaacccagtaacttataattaattacagagagattagcaaacatataatggtaagaatcagttgtcgtaggtgcggcactcgtcggtctccgggttgtccttgcagtaggcctcgagcgggtcggaggtctccttgagcttgtcgcgcgcgtggctcgccgccgcgctcagctccttcacctngtnccacgccgccgcgcactcgccgntcgccgtgtcctccgcgcacgcctccttcgccttgtcgatgctctccgacatcttgtccgagatgtccggcggcgtngncggnccgctcgnccttaccgncgggaacccgccggggcaacacggggaaacaccacgcgtccagttccggcgaccggcctaacgagggacga

SEQ ID NO: 400593 - DNA, 400 bp, Oryza sativa nipponbare
ttgatgaagagaactgcacttctaaaagagtatcaacttgttttttacatcggttacatcatagtacaggtacacaatcaacaaggcatgcagtgctccatccacaattacatcccaatacaccaccaccattcacagcctactccgatcccaaaaaagagaggtaagtcgcgtcgacgaacagtcttttcatcttcctccattggcagccattgctaacactccaacacctgaagaactcctcatttgggggtgaaggcctggaagatggtggcgtggccggggtcggcgagatgggcgaagaggttgtcgatggggccggtgccggtgtactctgcctggaaccaagctcccatgacggcgagcatggcgagccgcccgttcttgatctccttggtgc

SEQ ID NO: 400594 - DNA, 480 bp, Oryza sativa nipponbare
agaccataacataataatgctggggttatttcctgtaatacttgctgcccccaaacacaaatctgtgatcgaagcacaagttcttgggagtacaacacggttaacaccacaagaaactccttgcagaacagtaaagatgcatgtgtcctatgtgaataaccaagtgtggcttctttatatgctggtggaatgcatacatctggctgtacgtgtagtcatgtagagcgcgcgttgctcagctgtcacttctgttgggcttgtctgacgccggatacaccgtgtcagctgatgggatccactcgtttgtagcaggatttcccttgcaggaggcatggcgctccgatgcatctgggtcatcagacagatgaaacgaggcgtccgccgagggcttgtccatcttgatgaaccctgttccagtcgtgtggtgctgcttgccgacgcagccgagatccttgtagtactccgtctccacgaactcat

SEQ ID NO: 400595 - DNA, 475 bp, Oryza sativa nipponbare
taaaacatcaaaagagttaactaagcttaaagcagcagctgacacataagttgcaaaccccaacttttttcagtttctgaattctggatggatcatatcagattcatcacagcatcgtacaatctgtgcaagcattggtacatcgagcgatggagagagagagtagtctacaatggcggctgggccattcacgagcccggcgtgaacttggtggcgtagacccaggcgttgttggcgacggggtcggcgaggtggtcgagcaggttctccaaggggcccttgccggtgacgatggcctggacgaagaagccgaacatggagaacatggcgaggcggccattcttgatctccttgaccttgagctcggcgaaggtgacggggtcgtcggcgaggccgagcgggtcgaaatactggccgccggggtagaggtcgttgccgtcgccgacgccggggaggccggtgatgcggtagccct

SEQ ID NO: 400596 - DNA, 483 bp, Oryza sativa nipponbare
tgccacaatataaacaattgagactacatatttacactatacatagccagaaatggttatattttgggatcgagggagtatttgtttccgatctaatagagatgagaaatccgctaatcagaataacaccacggataagtacctagaccattagttgggaaacgaataaaatcattattgcaaaaacatcatcttcttcttcatcttcttagtgtacacaacaccaactcgatcatcatctcgtcgcactaaacccatcttccccaacccaaagacaacgaactcgctggccacaaatccatccaaccacaattaaccactgctaagctacggtcccccacttcacttgccggggacgaagttggtggcgtacgcccaggcgttgttgttgacggggtcggcgaggtggtccgcgagtttctcgagggggcccttgccggtgacgatggcctggacgaagaagccgaacatggagaacatggc

SEQ ID NO: 400597 - DNA, 400 bp, Oryza sativa nipponbare
aggtttgatcaaatcgtccgcagtataaaacaagcttgatcttctcaagctagtgtggtggtgtaaaattacaatcatgatcaagagagtagtacagtaattaatttaattacggttgctgcatgcagctgagctgcgtagtgatgaatctgtatatgtctaggtgaccttgacgccgttgtatctgaggatctcgccgatgagctcccccctgccggagccgacgtagcggccgacgatgtcgccgtccctgatgaagaggaaggtgggcacctcgacgacgtccatgtcgcggaggaactccatgcagctgtcgttctcgtcgccgttcatgcgggcgaagactgtggtgtcggccatggtgcgcgacagcttcacgactgtggggtacaccttcacg

SEQ ID NO: 400598 - DNA, 388 bp, Oryza sativa nipponbare
  unsure (1)..(388): unsure at all n locations
ataattaattcacaacaccatattgcattgatcaggttcagaacctgcacagaaatacacactaccggtacagatctcaccctctctccaatactcgtacatccatccacgcggtccacacgaatacgtacatctatacggtacacgtacgtacatctactgcaccgngtacacacacgcacactcttctgcagagacgcgcatcgtcgtcaacctagctagcttagctgaaggcgatgcgtcgccatggcagcacggcggcggcggcgctcacttgccggggacgaagttggtggcgtaggcccaggcgttgttgttgacggggtcggcgaggtggtcggcgaggttctcgagggggcccttgccggtgacgatggcctggactaag

SEQ ID NO: 400599 - DNA, 481 bp, Oryza sativa nipponbare
  unsure (1)..(481): unsure at all n locations
tagcaaatcgatccatgcgaccatgcgtgcaaatcagttggagcacaaatttacatgttacacccacaccctacacccatgcataataatacatcgtatatacgtacgtacatacatacccctctcgatcacacgcaccatcgatcgtacaaagttgcgtacatacatacgtacacacatatacgcatacgcacgtacatacatacataattaaaaactcgtaattaattaaatacgtagttgatggcatctctaatggaacttgaggctggtgaggatgttgttgtggacgggatcagcgaggtgatcaagcaggttctgcacggggccaaccccggtgaagagcgcctggacggagaagccgaggaaggcgagcatggcgagcctgccattcttgatctccttgagcttgggctnctttcatctcccgctggctcttggtcccgaagccgagcgggttgaagagcgggccgccggggta

SEQ ID NO: 400600 - DNA, 370 bp, Oryza sativa nipponbare
ggaaagaaaaggcagtgcaatttatttccataatcattttacaaggcatcgcttcccattttaggacctcaaactattggtaacaggaatgccaacattacaaagccaattgaagctagtgtgactggtaatggtattctccccttatcctttctcacaaacattgcctcataaattgggatattagtgatcactatcagtccacatagaatgacctggggtaaaaacacattccacacacctgccattattttgcttagccctgcaactaggcagacgaagttcagtaatgcgacagttgcgatgatcacaaattcaggagatgatgacccaaactcaaggatttcttgctcatacctctttgcttcat

SEQ ID NO: 400601 - DNA, 476 bp, Oryza sativa nipponbare
ttacagaaaatcaatggtggcatgcaggggaaatcgatggatcgacctctctccttaacttgttcttaattctcatgtacaatcaaagaaacacacacgcacacacacatgcgtgcactgcatctctctgagcaacgaactcgattgatttgattttgattcgctagggattaaagagaagctgagatagagatttcgacgatcatgcgacgctgaaggagctggctgcgctctcgacgaacttcctggcgcccttgaaccacctcttgtcgccggcctgcgccttgcagatgtacagcttgccgtcgttgacggtggccgtgatcagctggtgcttgccgccctcgtcgccgtccgccgtcctcgtcagcaccgttacgctgtagtactggtttccttccaccaccggcgccgagctctccaggaatgttcgccgtcgccaccccgtccgactcaaacccaccctcggaatctgt

SEQ ID NO: 400602 - DNA, 455 bp, Oryza sativa nipponbare
  unsure (1)..(455): unsure at all n locations
tttggaaggcaaatgttcgtgaagataggcacatatatgtatcgtacaatgtcctctccgcttgtcgaaatgcaaataacatcatcgggggatatgatcatcagttcacgagaacagaggaagaaacaaaagctaaaaattaaaaccatcaacagcccgatcgagtttgcattactagatacacacattgcagccttccttccctctctccatgtatcgatatatcaacccggccacgcacaaaacatttgttcattccctactcgagctgcgcgtaccacaccccttggatcttgacatccttgggcaccttggcgccgaggtctgtgtccgacggctgcacgctctcgaagacgccaatcacctcgccggtctctggcttgctcttggtgacgctcaacgtgatgttgcccgtcgacgacgaggcgttcttngacgttctcttagcgagctcc

SEQ ID NO: 400603 - DNA, 380 bp, Oryza sativa nipponbare
  unsure (1)..(380): unsure at all n locations
ttttaaacaagctaaggttgtaattaattcacaacaccatatttcattgatcaggttcagaacctgcacagaaatacacactaccggtacagatctcaccctctctccaatactcgtacatccatccacgcggtccacacgaatacgtacatctatacggtacacgtacgtacatctactgcaccgngtacacacacgcacactcttctgcagagacgcgcatcgtcgtcaacctagctagcttagctgaaggcgatgcgtcgccatggcagcacggcggcggcggcgctcacttgccggggacgaagttggtggcgtaggcccaggcgttgttgttgacggagtcggcgaggtggtcggcgaggttctcgagggggccc

SEQ ID NO: 400604 - DNA, 480 bp, Oryza sativa nipponbare
gagtttaactaagacgcagggggatttcgtgtttgatacaaaaattaagatggacggattcacaagagagcaccctctacttaagctttacattacaaggccaaccagcagctgcctgccggccgaccactgcgtgcgcacgcgcgcgcaataatcaaccaatcacacacagtacgcacgcacataaaaaccacccatagccttcacgtacgcccggacgcacgcaccggttcgtgccaagctcaagggtagatggttctcgggatgatgatgtcgccgatgttgttgtgccacgggtccgagaggtggctggccaggttctccagtgggtcggtgcccgggtacgccgactgttggacgcagaaacccacaaaagccagcatggccaatcgcccgttcttgatctccttgagctttgactcctcgaacttgacggggtccttggagaaaccgagggggtcgaaggcgccgccggggtac

SEQ ID NO: 400605 - DNA, 391 bp, Oryza sativa nipponbare
gcgcaggcacaaatccaaacacttggtccttcctatcagaagatcagaatgaacaggttttcaaattcatctcccaactcgacgataatttacacgtacatttaacacattcttccacccttctcaaactcctcccttttttttcccgggtaagattaaaattaacttgaggccagccagcgtcgccggcggcgagatgtttacaggctgggcgtcctctcggcggcgccggagatgacggtgagcaggttgttgcccaaggggtcgctgaggtgcttggagaggttctcgacggggccctcgccggtgacgtaggcctggatgaagaaccccagcatggagaacatggccagccgcccgttcttgatctccttcaccttcagcagcgccg

SEQ ID NO: 400606 - DNA, 413 bp, Oryza sativa nipponbare
  unsure (1)..(413): unsure at all n locations
tttttnnaaaaaaaaaaatgtgagctcagaactttatttattattcgcacacgtactgcgcacaaactaataaaaccacactttacaacaccactagctaggttttagacacaaacaagcataagcgatggtttaacaagagcgagcaacgcgtctgatacaatgaacacttatacaaaatctggtgtgtgctctgccatttgagctaaatttgaaccgggattttgtatttgaacatatgaaaacgtttactctgctttccaagacgacaatggaggggtctcagaatccttccaagtgccggccgtctgagcatagcggtcaccttgaacaacatctgtgctggcataggactcaagttcagtcatttccccaggggtgagcttcacagatagagctgctacattttgatt

SEQ ID NO: 400607 - DNA, 473 bp, Oryza sativa nipponbare
aattggcatcattgttgacgtcttggaagattcttagaattattgcaggcaattgcatcacattaccagtcagtagcttttcccatgtattacaggtaccaacgaaatagcggtaaatactgatgagcgtcgctcaaggccacgttagggctgaaatattttggttcaattgatgaccaaatggagttgcttttacttgtatattagagcattcctcccaggtccaacaccaatgtagtggactggaacaccaacaagctcttttatcctctcgacataacgttgggcagctaggggaagttcactgtaactccggacagacgaaatgtcactttgccacccaggcaacacctcatatttgacctgtacttgctccagagtatcaagatcccctgggaaggattgtagcttctgccaatcaggtggttataagaaacccccagcttaacttctggtaatccagacagaacatc

SEQ ID NO: 400608 - DNA, 315 bp, Oryza sativa nipponbare
  unsure (1)..(315): unsure at all n locations
taatctaacatacgcaaactgatattatcacaatgttagccgatgacaatggaaagagtaatctaggtacaagcggatcattgacggtggagacaagacattggctgcaccacaacacccaccagtggcgccaacaaggagcgctatccgttataggacgagagaaaaagtaaaacatcacgatgtgaagtgaaactgaataattctagtagacgatgatgatgatggataggctccttaggacgcccgccgcccttagcgtcttgctgctcccatcttgtccactggaaggctcactcgtaatcgncttaatcc

SEQ ID NO: 400609 - DNA, 405 bp, Oryza sativa nipponbare
gataccatccattttttttattggcgacgaatttatcagatatgctctagatacatatcttgtgtgtatatagccggagctttgttttcacatatcctcacccaacgataattgtagtactcttacaataaaaccggccggagagggagggaagagattatcacatatgtgttaagagcagaggccattgagatggtacataaccaaactgtaaaataaaaatatatagcatattatatattgatatatcatcaacatagcccaaaacaaagctgcatactattattataggcagcaatccaccagcgcgatgcttgatcttagcttagttgccaccagactcctcgcaacctgggggcttgtaggcgatgaagctaatcaactgcacctgcctgacgttgtcga

SEQ ID NO: 400610 - DNA, 480 bp, Oryza sativa nipponbare
cacatccatctcgtaccctgggtataaatatatatagccggagcttccatatatttcattcacatatgcctcacccaacaacatatagtcgtagcagataccactcttacatcaagtcagagagagatcaggtgaaacaaaaacaaaagcagagcacggccggtaaaatcaaaagacgatgaacaaactgggaacacacgaaacaaggtgggagacatcatcgaatcagagatgaacaattaaacaaggctatatatgacgatgacggcttagttgccaccagactcctcgcagcccgggggcttgtaggcgatgaagctgatgagctgcacctgcctgacgttgtcgaagccgatgatacggacgaatgcatcagggtacgccttcttggcctcctcgagctccttgagcacctgggtggcgtcagtgcacccgaacatgggcagcttccacatggtccagtacctgccatcgtagtat

SEQ ID NO: 400611 - DNA, 355 bp, Oryza sativa nipponbare
tttagcccatatctggataggatattattattaacaaaaacttgtcatgcccagctatggcttgggcgcgatctgatacacagaacaaagagaaaacataaaaaggagaaataattaatagcaagcgtcaagccggcctgcttaaaaggtgtaaaggcagctgccgaaagcgctcctcgccggtgggtcgaagttatcggcaacagggtcggtgcaaccttccggcacaggcaggttacctgcttgctgtgctccttgccctcctcctcctatgcaggccggctacgatgcatcgatgggatgcgaatagctagagatcttttattcagctggatggcgcaaaaccgttgaagga

SEQ ID NO: 400612 - DNA, 393 bp, Oryza sativa nipponbare
ttgggctgccgaaattcgaagcctcatgacttcagacttcagaattcggacaaaacagacgcatgtggcacaaacacacagacagaagaaagtaaaacaagactcgaaaagaaaaaaatcctgaagtctgtaccaaagttcagtattacacctcacagaaaatggcccgtgtctgcagctgtgtttcttcttcgacagtcatgcgttcctctgtcgaaggggaacaacgtacgggcagccaatccgagcacagtatatatagtatagcagttctgcccggggacagtcaatgtgtgtgcttcgttacattataggagtatatatttctgcacctacgcgagcccgtacttggacagtggtcttagttttcgtacactttgcactcgtcgggct

SEQ ID NO: 400613 - DNA, 472 bp, Oryza sativa nipponbare
  unsure (1)..(472): unsure at all n locations
agcgacacgaaaggcatctgatatatatttcagataaagatgttcaacacaagatagcttcagaccaggcaatatagcaccagacacttggtgattcagggttcaacaaagtgatatatgatcgagtctacaaacaaacaaaaaggtccgatatttcgtttcccacagatgataaggatagatatatctaagcggctgagaggaaggccttcccgggggcacgagcagagaggcgaccatggcaaccaagtagcttagcattgacaccatcaggcatgattctaccctcgctcttaagcctgacgtattcatcgcggctgaacttggtgaaaccccactttctactctcaatgatcttttggcgaccagggaacttgaacttggcacgacggagggctttgctggcattnacagcattgttgggcttgcaccgcacagaaaggaggacctggccaatatccaccctagcaca

SEQ ID NO: 400614 - DNA, 436 bp, Oryza sativa nipponbare
atatgtatgtaaatattatattattgtaaatcattttgaggagctagactagcgtgccttattaacaaggagatatgtaccattacatgatgattaacatataaatctgtagctacatggaattaaggtagtggagcagaggaggaaggatgatagaagactccaattctccatggatgggaatgggatcaggtggccttgcagaactctccgcccagatcgtcgcacgcctcctcggggaacaccgcggtgggctcgtcgtaggataggtagtccttgtcgactatctccgccgccgcacgagaaacagcaacagcagcctatgatgagagcttggcctttgggtacatctgcacgttgcacgcctagccgcctatgaggtcgcacgccttcaatcgaaacaccgagaagttagagctgtggttaaattccgcag

SEQ ID NO: 400615 - DNA, 383 bp, Oryza sativa nipponbare
  unsure (1)..(383): unsure at all n locations
tagcaaatcgatccatgcgaccatgcgtgcaaatcagttggagcacaaatttacatgttacacccacaccctacacccatgcataataatacatcgtatatacgtacgtacatacatacccctctcgatcacacgcaccatcgatcgtacaaagttgcgtacatacatacgtacacacatatacgcatacgcacgtacatacatacataattaaaaactcgtaattaattaaatacgtagttgatggcatctctaatggaacttgaggctggtgaggatgttgttgtggacgggatcagcgaggtgatcaagcaggttctgcacggngccaaccccggtgaagagcgcctggacggagaagccgaggaaggcgagcatggcga

SEQ ID NO: 400616 - DNA, 443 bp, Oryza sativa nipponbare
ccacgcgtccgcggacgcgtgggttcgaacattcctcctccaagactccacaagtccagagggagaaagtgtgagaagaatgtggcggaaggggaacaagcggttcggcggcggcggcgagccggcggccaagcgccgtgccgccggggacgacgggccctccgagagcgccgacgacgatatcgtcgtcgcccagatatcgaagaacaggagggtggcggtgcggacctggaacggcaaggtcgtcgtcgacatccgcgagttctacgagaaggacggcaagaccctccccggccgcaaaggtatacagctcccgatggatcagtggaagatactgagggacaatatcaaagctatagatgaggccatcaaggagaatgcgtgatcggagcccattctcttgtgatgcaagtagactaagcctacgtctgtcttttatgact

SEQ ID NO: 400617 - DNA, 442 bp, Oryza sativa nipponbare
ccacgcgtccgcccacgcgtccggaaagcataagcaacacaagggattaactcatcactcacttagctaattaaatcttcgaccatgtcggacaagtgcggcaactgcgactgtgctgacaagagccagtgcgtgaagaaaggtaccagctatggcgtcgtcatagttgaagccgagaagagccacttcgaggaggtcgccgccggcgaggagaacggcggctgcaagtgcggcaccagctgctcctgcaccgactgcaagtgcggcaagtgaagtcacgaagcaaccgaacactcgccgccggcgagtcacctaccttaattagtccacaataaaaaccacccatatgagtgtggtttgtgtgtgtgctgattattgctgaattaaacccgtgtgttatcgattaattaagcagctggtcgcttcggcgactatgcgtgta

SEQ ID NO: 400618 - DNA, 394 bp, Oryza sativa nipponbare
ccacgcgtccgtagctcactcctctcctcctcgtctaccttacctagcagcagcagctagctagcttaattagctatagcagccatggcggcgacggcactgagcagccaggtccggttgccgatgtccctgcgggtggcgacggcgccggcgccggcgcgcgtgtcggtgctgccggcgagcaacaagctgggagacaggctgcggatgcaggcgacgtacaacgtgaagctgatcacaccggacggcgaggtggagctgcaggtgccggacgacgtgtacatcctggaccaggcggaggaggaagggatcgacctgccttactcctgccgcgcgggctcctgctcctcctgcgccggcaaggtggtcttcggcgagatcgaccagtccgacc

SEQ ID NO: 400619 - DNA, 449 bp, Oryza sativa nipponbare
ccacgcgtccgcccacgcgtccgcgcatcagcagcagcaagcagctaatcgcgcacgtacgcacaccgcgacccggggcgagatggcgcagtcgatgctggtgtcgggagccaatggcacggtggccgccgcgagcaccagcaggctgcagcccgtgcggccgacgccgttctcgcggctcgtgctgtcgcagccgtcgtcgtcgctggggcgcgcggtgtccgtcaagacggtggcgctgttcggcaggtccaagaccaaggccgcgcccgcaagaaaggctgagccgaagccaaagttcaagaccgaggacggcatcttcggcacgtccggtgggatcggtttcaccaaggagaacgagctgttcgtcgggcgtgtcgccatgctcgggtttgccgcgtcgatcctgggtgaggccatcaccgggaagggaatcctggcgcagctga

SEQ ID NO: 400620 - DNA, 444 bp, Oryza sativa nipponbare
ccacgcgtccgatcatctcagcaagacaagttgatttgcagccattcaagtgctccatcgttgaaggttggctgctcttcggattcacccttcctgttgttccctaacagaagaaaccatgctgggtttgtcattcgggttgagctcgaaccatctgcgcaatttcagttgacagggttgatgttagagctcctcagattcaatgatgagcctcgtggggatccttcgctgagtccagtgatgcacacaccaaaatctacggctcagcaacaaacctcggtcttgtgccgtttccgtggaggcagctgatggggattaacggtttgtcaagcggagtgcacatcttttgaggcccagggtagcagtcggtgcggcttcgccgcagatccctatcgacttgctcctttttctgctattaggttatttcaggaagattgatttcgt

SEQ ID NO: 400621 - DNA, 322 bp, Oryza sativa nipponbare
ccacgcgtccgggagtctgttggcaactaagccgtcatcgtcatatatagcctcgtttaattgtgcatctctgattcgatgatgtctcccaccttgtttcgtgtgttcccagttcgttcatcgacttttgattttaccggccgggctctgcttttgtttttgtttcacctgatctctctctgacttgatgtaagagtggcatctgctacgactatatgttgctgggtgaggcatatgtgaatgaaatatatggaagctccggctatatatcttttaaagacacgatacatatatgtaatcttcaaggtgaattgttcatggc

SEQ ID NO: 400622 - DNA, 385 bp, Oryza sativa nipponbare
ccacgcgtccgcaagaagtactcgagcaaagaaggagagagcttggtgagctgcagagatggccccctccgtgatggcgtcgtcggccaccaccgtcgctcccttccaggggctcaagtccaccgccggcatgcccgtcgcccgccgctccggcaactccagcttcggcaacgtcagcaatggcggcaggatcaggtgcatgcaggtgtggccgattgagggcatcaagaagttcgagaccctctcctacctgccaccgctcaccgtggaggacctcctgaagcagatcgagtacctgctccgttccaagtgggtgccctgcctcgagttcagcaaggtcggattcgtctaccgtgagaaccacagatcccccggatactacgat

SEQ ID NO: 400623 - DNA, 439 bp, Oryza sativa nipponbare
ccacgcgtccgctctcctcccccccacggcggcggcggcggcggcggcggcaggatggcggattcgacggcgaggacggtgaaggacgtgaaccctcatgagttcgtcaaggcctactccgcccacctcaagcgctccggcaagatggagctccctgagtgggttgacatcgtgaagactgcgaggttcaaggagctccctccttatgatccggactggtactacacgagggctgcctcgattgcaaggaagatctacctgaggcagggtattggtgtaggtggcttccagaagatctatggtggccgccagaggaatggctcacgtcccccgcacttctgcaagagcagcggcgctatctcacgcaacatccttcagcagctgcagaagatgggcatcaatcatgtcgaccccaagggcggaagactcatcacctccc

SEQ ID NO: 400624 - DNA, 434 bp, Oryza sativa nipponbare
ccacgcgtccgcccacgcgtccgcccacgcgtccgcccacgcgtccgcccacgcgttcgcggacgcgtgggctactagccagtaagctagctaactaactacgtggctatggcccccaccgtgatggcctcctcggccacctccgtggctccattccaagggctcaagtgcaccgccgggctccccgtcagccgacgctccaccaactcgggcttcggcaacgtcagcaatggcggaaggatcaagtgcatgcaggtgtggccaattgagggcatcaagaagttcgagaccctatcgtacctgccaccactcaccgtggaggatcttttgaagcagatcgagtacctgcttcgatccaagtgggtgccttgcctcgagttcagcaaggttggattcgtctaccgtgagaaccacaagtctcccgggtactacga

SEQ ID NO: 400625 - DNA, 424 bp, Oryza sativa nipponbare
ccacgcgtccgcaaattcttgcacacgcgcagctcgagccatggccggagtgagcaccagcgtcgtcggcctcaagcccgccgcggcggtgccgcagtcggccgcctcgccggtgccgaagcgcgtgcacgtcgctgtgccgcccaaggaggagcagggcggtggcaggcgcgccgagctgctgggtctcgccgtcgtgttcgccggtactgtctttggtctggcctacttcaacatggttgggaagaacattgatgatagtgctgccactgatgccggggatgaagatagaggctggcgactagcggtgccaatttctctagggcgtactccgtcgagttcggcagtttgcagttcctctacaattttaccgtttgtcaggactttttcaagcataatatagtcctatttattttatatgatc

SEQ ID NO: 400626 - DNA, 443 bp, Oryza sativa nipponbare
  unsure (1)..(443): unsure at all n locations
ccacgcgtccggaaagcataagcaacacaagggattaactcatcactcacttagctaattaaatcttcgaccatgtcggacaagtgcggcaactgcgactgtgctgacaagagccagtgcgtgaagaaaggtaccagctatggcgtcgtcatagttgaagccgagaagagccacttcgaggaggtcgccgccggcgaggagaacggcggctgcaagtgcggcaccagctgctcctgcaccgactgcaagtgcggcaagtgaagtcacgaagcaaccgaacactcgccgccggcgagtcacctaccttaattagtccacaataaaaaccacccatatgagtgtggtttgtgtgtgtgctgattattgctngaattaaacccggtgttatcgattaattaagcagctggtcgcttcggcgactatgcgtgtatcaacgtatgaat

SEQ ID NO: 400627 - DNA, 447 bp, Oryza sativa nipponbare
ccacgcgtccgcccacgcgtccgcccacgcgtccgcccacgcgtccgcccacgcgtccgcacgacacgacgcaccaatggcgctcgtctccgcctcctcctccaccaccgccgtcgcggcgctccccggcgccgccagggcctcctccttcctcggcggcgccggcaggagcggcaggctgctgctgaggcaggccgagtcgtcgtccgcgcgggcgtcgttcgccgtgcgcgccgcggcgcccgacaggccaatctggttccccggcagcaccccgccgccgtggctcgacggcagcctccccggcgacttcggcttcgaccccctgggtctcggatcggacccggagagcttgcggtggaacgtgcaggcggagctggtgcactgccggtgggcgatgctgggcgcggcgggcatcttcatcccggagttcctgaccaagatcgg

SEQ ID NO: 400628 - DNA, 447 bp, Oryza sativa nipponbare
ccacgcgtccgcccacgcgtccgtctcaagaagtactcgagcaaagaaggagagagcttggtgagctgcagagatggccccctccgtgatggcgtcgtcggccaccaccgtcgctcccttccaggggctcaagtccaccgccggcatgcccgtcgcccgccgctccggcaactccagcttcggcaacgtcagcaatggcggcaggatcaggtgcatgcaggtgtggccgattgagggcatcaagaagttcgagaccctctcctacctgccaccgctcaccgtggaggacctcctgaagcagatcgagtacctgctccgttccaagtgggtgccctgcctcgagttcagcaaggtcggattcgtctaccgtgagaaccacagatcccccggatactacgatggcaggtactggaccatgtggaagctgcccatgttcgggtgcactga

SEQ ID NO: 400629 - DNA, 440 bp, Oryza sativa nipponbare
ccacgcgtccgcgacaaggaggggctaaacagcgagctggagaagcacattgaggatatgcatgtcttgatcaccacccctttccacccagcctatgttagcgcagaaaggatcaagaaggcaaagaacctcgagctgcttctcacagctgggattgggtcagatcatattgatctgccagcagctgctgcagcaggtttaactgtggcagaggttaccggaagtaacactgtgtcggtggcagaagatgagctcatgcgcattttgattttgctcaggaacttcttgcccgggtatcagcaggttgttcatggtgaatggaatgttgctggcattgcctatagggcttatgatcttgaaggaaaaactgtggggactgttggggctggtcgtattggcaggctcttacttcagcgtcttaagccctttaactgcaacct

SEQ ID NO: 400630 - DNA, 432 bp, Oryza sativa nipponbare
  unsure (1)..(432): unsure at all n locations
ccacgcgtccgagcgaatccagcagcagaagcagcagcagcagctcagccgccgccgatggcgtccacgatcatggccccaacctcccgcgtcctcgccgccaagacccccttcctcggccatccccgcccctccaatgcccccgtccgcgacatcgccgccgccgccaccggccgcatcaccatgagcaaggagctgtggtacgggccggatagggtgaagtacctggggccattctcggcgcagacgccgtcgtacctgaggggcgagttcccgggcgactacgggtgggacacggcggggctctccgcggacccggaggcgttcgcgaggaacagggcgctggaggtgatccacggccggtgggcgatgctcggcgcgctgggctgcatcacgcncgaggtgctcgagaagtgggtgcgcgtcgacttc

SEQ ID NO: 400631 - DNA, 425 bp, Oryza sativa nipponbare
ccacgcgtccgcggacgcgtgggatcgccatctctctcagctctcacagctcactgcatcaatggccgcggccaccatggcgctctcctccccggtgatggcccgcgcggcgccgtcgacctcctccgcgctcttcggcgaggcgcggatcaccatgcgcaagaccgccgcgaagcccaagccggcggcgtcgtcggggagcccgtggtacggcgccgaccgcgtcctctacctcggcccgctctccggcgagccgccgagctacctcaccggcgagttcccgggcgactacgggtgggacaccgcggggctctccgccgacccggagacgttcgccaagaaccgggagcctggagtgatccactcccggtgggcgatgctgggcgcgctcggctgcgtcttcccggagctcctcgcccggaacg

SEQ ID NO: 400632 - DNA, 448 bp, Oryza sativa nipponbare
ccacgcgtccgaagagatcaggtagaacagtgagagtgaggtgcagaaaaatttgagctgaagctgaggatggcaacatccatgatcaccctggcggtggtggcgcccccccggaccaagggccttccaggcatatgccgccggggatcctccttactcatcgactgcagcggggggaagaagatcaagaccagacacgccctacggcataggaggtggcatgatagtctgatataagatgcatctggccagaagagcacggggaaggatgcgtaccaaatgcctgacaagtacggcgcacacgaccacggatacagtccaatctactgcccggaggaatggtgtcccaccggcgacacctacgtgggcggaaccaccggtcttctgatctgggccgtgaccctgggcgtgctcctcgacggacgcgccctagtaggctacaacacca

SEQ ID NO: 400633 - DNA, 421 bp, Oryza sativa nipponbare
ccacgcgtccgcggggtgaagttcggggaggcggtgtggttcaaggccggcgcgcagatcttctccgagggggggctcgactacctggggaaccccaacctggtgcacgcgcagagcatcctcgccatctgggcggtccaggtggtgctcatgggattcgtcgagggctaccgcgtcggcggcggcccgctcggcgagggcctcgacaaggtgtacccaggcggcgccttcgacccgctcggcctcgccgacgaccctgacaccttcgccgagctcaaggtgaaggagctcaagaacggccgcctcgccatgttctccatgttcggcttcttcgtccaggccatcgtcaccggcaagggccccatcgagaacctcttcgaccacgtcgccgaccccgtcgccaacaacgcctgggcatacg

SEQ ID NO: 400634 - DNA, 399 bp, Oryza sativa nipponbare
ccacgcgtccggcttgagcttggagagagacaacaatggcggctcaggctcttctctctgggaggcagctgctggggaggccattgcaatcttcagtctccaggtcttcttcctccaggaaggcacccttcatggtcagggcagaggccactccccctgccaagcaaggtgctgacaggcagctgtggttcgcatccaagcagtccctgagctacctggatggcacgcttccgggagacttcgggttcgacccgctggggctatcggacccggaggggaccggtgggttcatcgagccacggtggctggcctacggggaggtgttcaacggccggacggcgatgatgggcgtcgtcggcatggtcgccccggagctcctcggcaagctgggcctcgtcc

SEQ ID NO: 400635 - DNA, 445 bp, Oryza sativa nipponbare
ccacgcgtccgagctccagcaactcagatttcgatcaagcatggcctccctgagattgaaatatattgctatttgcttgtcctgatttttcttattgaccagaagaaatacgacgatgctaaagcatgtgcaaatgcaagcattgctcgtctgaaaaacttgaacaggagaactgttgatgttctggcatctagactgtacttctattactcatatgtgcatgaactcaccaacagccttgctgaaatccgtgggaatctgctagccttacacagaatggcaactcttcaccgcgatgaacttggccaggaaactttgctcaacctgcttcttcgcaattacctccattataatttgtatgatcaagcagagaaacttaggtcaaaagctcctcgttttgaagcccactccaatcaacaattctgtcgatacctgttctacttgg

SEQ ID NO: 400636 - DNA, 436 bp, Oryza sativa nipponbare
ccacgcgtccgcccacgcgtccgcggacgcgtgggcgcgccaccgccaccgccaccgccaccctcgccgcggcgccgcctccactccactccaccgccgccgcctatataacccacctccacctcgcttccccggcctcgactccactgctccaccaccatgcaggcgcacgcccacacgctcgggctccgcatctccccgccgccgcctggcgccgcgcggcgccgcgctcgcccgcgccggcgcgcagtccgtgtcgccgcggcggcgtcggcgccgcggcgggagacggacccgaggaagcgggtggtgatcacggggatggggctggtgtccgtgttcgggaacgaggtggacgccttctacgagcggctgctcgccggggagagcggtgtcggcgccatcgaccgcttcgacgccggcggcttccccacga

SEQ ID NO: 400637 - DNA, 447 bp, Oryza sativa nipponbare
ccacgcgtccgagccaacgtaccaggtggtgcagcccatcaatggcgaccccttcatcggcagcctggagacgccggtgacctccagcccgctggtcgcctggtacctctccaacctcccggcgtaccgcaccgccgtcagcccgctgctccgcggcatcgaggtcggcctcgcccacggctacctcctcgtcgggcccttcgcgctcaccggcccgctccgcaacacgccggtgcacggccaggccggcgccctcggcgccgcaggcctcgtcgccatcctcagcgtctgcctcaccatgtacggcgtcgcctccttcggcgagggcgagccgtccacggcgccgacgctgacgctcaccggccgcaagaaggaggccgacaagctgcagaccgccgacggctgggccaagttcaccggcggcttcttcttcggcggcatctccgg

SEQ ID NO: 400638 - DNA, 444 bp, Oryza sativa nipponbare
ccacgcgtccgagaagagcaggctgagaaaaaggaggaggcagccaaggagaagccagatgaaccacaagagatcgtactgaaagtcgacatgcactgcgaaggatgtgcaaagaaggtcgagaaatccctcttgagatttgaaggagtcgaaaacgtcaaggctgacagtcgatcgaagacggttgtggtgaaaagcaaggccgcagatccctcaaaggtctgcgagagggttcagaggaagacaaagagaagagttgagctgattttccctcttgctccacctccagaagaggagaagaaagaggaggctgcagcaccacctccagaagaaaagaaagaggagccaccgaagacaataactgtcatcttgaaggtccagatgcactgcgacgcttgtgcgcagattctgcaaaagcgtataaacaggacaaaaggtgtagaa

SEQ ID NO: 400639 - DNA, 395 bp, Oryza sativa nipponbare
ccacgcgtccggactgaaaggagcgcctcgactcgcatctcgccgccgcgcagctaagctagggttttccgccaccgccgatctcgcccccgcccccggccagccatggacgcctctctcatgggcgccccctccgccgcagcgggagacaatcccacctccggggagcaccggatggggaccaccatcgtcggcgtctgctacgacggcggcgtcgtcctcgccgccgattccagaaccagcaccggaatgtatgtggcaaaccgtgcgtcggacaagattactcagctaactgacaatgtgtacatctgccgctctggatctgctgctgatacacaagtaatttccgattatgtacgctattttctccaccaacacacaattcagcttgggca

SEQ ID NO: 400640 - DNA, 432 bp, Oryza sativa nipponbare
  unsure (1)..(432): unsure at all n locations
ccacgcgtccgaaagagagagagagagatggcgtcnccgtcttcgtcgtcttcgctgtgcttgacctgcgcggcgccgcgcgccggcttcgtcggccgccatctcaccttctcctcgcccaggaaagcattccgagtgagggcatcatccacggttgacatgttgtggacaaatgacatgatatcaagcacttgcattctttcttgctactttttcaggctttgcgcgcacgacaaacctggtaccgtggcaccgtgccactggataacctggccagccacctgattgacccgtggcacaacaacatcggcgacatcatcatcccgagaaccatctacccttgagcttggcacgaaccggtgcgtgcgtccgggcgtacgtgaaggctatgggtggtttttatgtgcgtgcgtactgtgtgtgatagattga

SEQ ID NO: 400641 - DNA, 439 bp, Oryza sativa nipponbare
cacgcgtccgcccacgcgtccggcgagggcgggctcgactacctcggcaacccgagcctgagtccacgcgcagagcatcctcgccatctgggcggtccaggtggtgctcatgggcgccgtcgaggggtaccgcatcgccggcgggccgctcggcgaggtcgtcgacccgctctaccccggcggcagcttcgacccgctcggcctcgccgacgacccggaggccttcgcggagctcaaggtgaaggagatcaagaacggccgcctcgccatgttctccatgttcggcttcttcgtccaggccatcgtcaccggcaagggccccctcgagaacctcgccgaccacctcgccgaccccgtcaacaacaacgcctgggcctacgccaccaacttcgtccccggcaagtgagcgccgccgccgccgtgctgccatggcgacgca

SEQ ID NO: 400642 - DNA, 440 bp, Oryza sativa nipponbare
ccacgcgtccgcccacgcgtccgcccacgcgtccgcccacgcgtccgcccacgcgtccgcccacacggacacggccacaccacccaccaactgagagctgagcaggcgagcgagcggacatggcagcatcgctccaagccgcggccaccctgatgcagccggccaagctcggcggccgggcctcctccgccgcgctgccatcgcgcccgtcttcgcacgtcgccagggcgttcggcgtcgacaccggtgccgccggcaggatcacgtgctccctgcagtccgacatccgggaggtcgccaacaagtgcgccgatgccgccaagctcgccggcttcgccctcgccacctcagctctgctcgtctcgggcgccagcgcggagggcgtgccgaggaggcttaccttcgacgagattcagagtaagacgtacatggaggtgaag

SEQ ID NO: 400643 - DNA, 446 bp, Oryza sativa nipponbare
ccacgcgtccgatccaatcatgtgtttttcttcctctggtctccctgagaagcttgtgctcaatcttgaggctgcgggatatgtaatgcctactccagtgcaaatgcaagtcatcccttcatcaatatgtaatagaagcttacttgtctctgctgatactggttcagggaaaacagcttcttttcttgttcccataattgcacattgttcacacgtgcgatcagagagatgcacagacaagcaagggccattagctatagtccttgctccaactagagagctatgtctgcaggtggaagaacaagcaaaagtgcttggaaagggtttaccttttaagactgctctagttgttggtggagatcccttggctcagcaaatctacaggattgaaaatggcatcgagttgattgttggcacccctgggaggctaattgatctactcatgg

SEQ ID NO: 400644 - DNA, 442 bp, Oryza sativa nipponbare
ccacgcgtccgcccaaccccaatgctcagagaactccagccctctccatcaccgtccctttccggcttcggctccccaaccggcggctcaccgccgcggcggtgttccaggaccagaccaacccaagaaacccagcgagcaagggaggcgacgacgatgaggcgtacggcgaggtggaccgtattgtgtccagccgcaccatcaagaatccggtgttcgcggaggacggctcggccaccacggtcaccgccacggagtacctcgtcgagtggaaggacgggcacgagccttcgtggatcccggcggaggccatagcggcggacgtggtggcggagtacgagacgccgtggtggacggccgccaagaaggcggacgcggcggagatcactgcgctactcgcggacgagacgctgcggcgtgaccccgacgcggaggatgcgca

SEQ ID NO: 400645 - DNA, 446 bp, Oryza sativa nipponbare
ccacgcgtccgcccacgcgtccgcccacgcgtccgagagaagctaccacgaggaatcactaaaatcaagaagctaagacacttgtttgctgatagatgtgttgacgagaagcagtcggagttccgatactttgtaggaatgcaggcacctaaagatctatccaacctgaaagaactacaaactctggagactgttgaagccagcaaggacttagctgagcagttgaagaaactcatacaactaaaaagtgtatggattgacaacataagctctgctgattgtgataatatttttgctacactgtcaaatatgccgctactttccagtttgcttctttctgcaaggaatgagaatgagccactttcttttgaggctctcaagccaagttccacagaactccacaggttaattgtcagagggcaatgggccaagagtacattggacta

SEQ ID NO: 400646 - DNA, 445 bp, Oryza sativa nipponbare
ccacgcgtccggctattttggtcggccacagaacttttggaaaaggaaaaatacagagtgtgactgaattggatgatggatctgctctgtttatcacggtcgcaaaatatctctctccagcactgcatgaaatcgaccaagtaggcatccaacctgacatacaatgcacccctgaaatgttatctttgccaagagcaccttcgctaaaagaggacgacaaagccacaaatctggagatggattcatgtatcatggtggcagagcaagcattggaaattgagaaatcaaagggatctgcttcgtaggtacttctgtaagccagaatcctttgtatgtccacatttagttggtcaggttcatagtggcatctgcagatgaaattcagcatagctccatgtataatattgtaatctaccgtaggttgtatagttagtataggctgtaa

SEQ ID NO: 400647 - DNA, 441 bp, Oryza sativa nipponbare
ccacgcgtccggcacgctgccgacgatcctggtcatcgagttcgtcgccatcgccttcgccgagcaccagcgcaccatggagaaggaccccgagaagaagaagtaccccggcggcgccttcgaccccctcggcttctccaaggaccccgtcaagttcgaggagtacaagctcaaggagatcaagaacgggcgattggccatgctggcttttgtgggtttctgcgtccaacagtcggcgtacccgggcaccggcccactggagaacctggccagccacctctcggacccgtggcacaacaacatcggcgacatcatcatcccgagaaccatctacccttgagcttggcacgaaccggtgcgtgcgtccgggcgtacgtgaaggctatgggtggtttttatgtgcgtgcgtactgtgtgtgattggttgattattgcgcgcgc

SEQ ID NO: 400648 - DNA, 436 bp, Oryza sativa nipponbare
ccacgcgtccgcccacgcgtccgaaccaacccaaccgccgccgcatcgccctcgttagaacgatggccgcgtcggcgctgcaccagaccaccagcttcctcggcaccgcccctcgccgggatgagctcgtccgccgcgtcggcgactccggtggccgcatcaccatgcgccgcaccgtcaagagcgcgccccagagcatctggtatggacctgaccgtcccaagtacctgggcccgttctcggagcagacgccatcgtacctgaccggagagttcccgggagactacgggtgggacacggcggggctatcggccgacccggagacgttcgcgaggaacagggagctggaggtgatccactcgcggtgggcgatgctgggggcgctgggctgcgtcttcccggagatcctgtccaagaacggggtgaagttcgggga

SEQ ID NO: 400649 - DNA, 439 bp, Oryza sativa nipponbare
ccacgcgtccgcccacgcgttcgagcagcagcaggagctgagcttgaagcactagagcgaggtacacatggcgcgccgccaccatggccctctcgtccccggcgctggccggcaaggccgccgcgaaggtgttcggcgaggggcgcatcaccatgcgcaagtcggcggcgaagcccaagcccgccgcgtcggggagcccgtggtacggcgccgaccgcgtgctctacctcggcccgctctccggcgagccgccgagctacctgaccggcgagttccccggcgactacgggtgggacaccgcggggctctccgccgacccggagacgttcgccaagaaccgggagctggaggtgatccactccaggtgggcgatgctcggcgcgctgggctgcgtgttcccggagctcctcgcccgcaacggcgtcaagttcggcgaggc

SEQ ID NO: 400650 - DNA, 438 bp, Oryza sativa nipponbare
ccacgcgtccggtaagatttgtctttggtgttaccgcttttttacccctgatgacatctgctgttgcagttcttgtaaatgaacaccgtctatcttcaggggaacgtgctatgtcacactctggttcaggattcattgagacctctaagcagcatatccggcagctttggacttcagtaaagcaacctaacattttcttgcccaccttgtttatattcctctggcaagcaacacctaagtcggattccgccatgtttctcttcatcacaaataagcttgggttcacgccagaatttctaggacgtgtaaagcttgttacatctattgcttcattgcttggtgttgggctttataactattttctaaaggcggttcctctaaggaaaatcttcctggcgacaaccatcataggttcagcccttggaatgacacaggttc

SEQ ID NO: 400651 - DNA, 443 bp, Oryza sativa nipponbare
  unsure (1)..(443): unsure at all n locations
ccacgcgtccggttgaacccctcaggaaccgcctttcggagaatactgagatacagagtgccaaattggtcaaagctacagcagagaatgtggatgatgcagtcagggagcttcctgatgccaacttgagaccagaggatttgtgggcaattcactcaatgcgtgtttctccaaaacctcacaaacggaataacccttcttggatagctatagaaaaggctacaaatttaggggagaagattggcttgaaacacttcaagcctgtaaaacctctcggctgtggtgacactggcagtgtgcacttggttgagctacaaggaagtggtgaattatttgcaatgaaggccatggacaagtcagtgatgttgaaccgcaacaaggtacatcgagcttgtattgaaagagaaatatacgcactnatggatcatccatttcttccaaca

SEQ ID NO: 400652 - DNA, 443 bp, Oryza sativa nipponbare
ccacgcgtccgctcttccccgtctcgtggtcgagagaaaccgagaggagagagagggagaggagcgctgccgattttccggagggggagatctttttcttctccctgaaggttcgagatcgatctgcgacgaggaggagcggggaatcgtaactttatttccgaggaaatttcaacaaattgatgcactaatggagtccaagggtggcaaaaagaagtctagcagtagtcgttcctccctgatgtacgaagctcccctcggctacagcattgaggacctccgacctgccggcggcatcaagaagttccgctctgctgcttactccaactgcgcgaggaagccctcttgatagcccccttggctaccttgacctagtagtttagttactcctctgaattctcgttttgggctttcttacatctctctggctagctgcttcccag

SEQ ID NO: 400653 - DNA, 445 bp, Oryza sativa nipponbare
ccacgcgtccgctggacaatgatgagttttcatctgaaagtgcatcaaatcaaatggttctgttcaaccctgaaactgtagctaaagggcaagatgaacttggagagaaccattcaccatctttgcagaaatcagccaataatccgaaccgaggaatgccatctattggggcattcactgtccaatgtgccaagtgtttcaaatggagacttattccgacaaaagagaagtatgaagaaattcgtgagtgtattatacaggaaccttttgagtgcgaacgagcccgtgagtggagacctgatgtaacatgtaatgatccagaagatatatctcaggatggaagcaggctttgggctattgacaaacccaatattgcactacctcctcctggatgggaaagacagatcagaataagaggcgaaggaggcaccaaatttgctgatgt

SEQ ID NO: 400654 - DNA, 443 bp, Oryza sativa nipponbare
acgcgtccgcattggctgacatagtgaaggcagagctcaaggactaccccaaactgaagctcacgcaggggaggatggtgttcgagatccggcccaccatcaagtgggacaagggcaaggccctcgagttcctcctcgagtcgctagggttcgccgactgcaccaacgtgctgccggtgtacatcggcgacgaccggaccgacgaggacgcgttcaaggtgctccgcaagagaggccagggcatcggcatcctcgtgtccaagtaccccaaggacaccaacgcctcctactccctgcaggagccagccgaggtgatggagttcttgctgcggctggtggagtgggagcgcctctcccgtgctcgccccaagtggtgatttcgccgacggcttcaacccacatttcccgacagctatctctctctctctctctgctactgctct

SEQ ID NO: 400655 - DNA, 444 bp, Oryza sativa nipponbare
cgtccggccggaggaatggtctcccaccggtgacacctacgttggtggaaccaccgggcttctgaggtgggccgtgaccctcgccgggctcctcggcggcggcgccctcctcgtctacaacaccagcgccctcgccggctaaatttcacccaaatccagtctatgtatgtaacaccaagctgggtgtctgcatattcatctgtaatctaagatagccttcctctgaatgcgatgtgatgatgcccactgcttaatcaaactgcattgtgattaatctatgtaacactgtacttgcatgatgatgatatactacacttgatacttgaaaaaaaaataataaataaataaaacatacattattaaaaataaaatataaaaaataattcgcacaattaagtatgaactacatctagattgaaatatacataataaaaaaaagggggg

SEQ ID NO: 400656 - DNA, 442 bp, Oryza sativa nipponbare
ccacgcgtccgccacgcgtccgagcaagtcgccaaaatcgctgaaatgctgcttgagaaggaggtcctccaccaggacgatttggttagggtattaggagaacggcctttcaaggcatccgagccaactaactacgacctcttcaagcaagggttccaggatgaagaagacagcaagaaccaagaggcggccaaaacccctcagcctgatgatgacggaacaccctcgcttggcgaggttgtacccacgtaatcctgcagcaaatttacagctgtaaattgcactcctattcgatagattcttgtttgttgttgcagcataagaaaatttgtataaattaacgccctcgcctaatctctgatgtgggaacccagttggcttttcgccggccatagtgtttccctgttttaaatgaatacgaagagctagtcgaggatcaaaa

SEQ ID NO: 400657 - DNA, 443 bp, Oryza sativa nipponbare
ccacgcgtccgcccacgcgtccgccccaatgcaaagatctatggagttgaacctgctgaagcaaatgttttgaatggtggcaaaccaggtcctcacctcatcactggaaatggagtgggatttaagccggaaattttgaatatggatataatggaaaaggttattgaggtgaaaggtgaggatgctgttaagatggctcgagaattggcactgaaggagggtcttctggttggaatatcatcaggagctaacacagttgctgctcttgaactagcaaagaagccagaaaacaaagggaagctcattgtgactgttcttccgagtttaggggagagatacctgtcatctgcattgtttgaggaattgagagcggaggctgaggccatgcagccagtgccagtggactaacttggataatcaacctaggcattgagtatttgatg

SEQ ID NO: 400658 - DNA, 422 bp, Oryza sativa nipponbare
ccacgcgtccggtcgtcgtccgtgcagccgcccaggcggcagcagcagcagcaaccgcggaggggattgaagcagctgccggggctcgtggcgacggcggccgtggccgtggccgcggcgccgctaccggcgctggcggagcagatggagaaggcggcgctgttcgacttcaacctgacgctcccgctgatcgcgaccgagttcctgctgctgatggtggcgctggacaagctctacttcacgccgctgggcaagttcatggacgagcgcgacgccaagatccgtgccgagctcggcggcgtcaaggacgcgtccgaggaggtgcggcagctggaggagcaggccgccgccgtgctgaaggcggcacgcgccgagatcgccgcggcgctcaacaagatgaagaaagagaccacccaggagct

SEQ ID NO: 400659 - DNA, 443 bp, Oryza sativa nipponbare
ccacgcgtccgcgaccatgtcggacaagtgcggcaactgcgactgtgctgacaagagccagtgcgtgaagaaaggtaccagctatggcgtcgtcatagttgaagccgagaagagccacttcgaggaggtcgccgccggcgaggagaacggcggctgcaagtgcggcaccagctgctcctgcaccgactgcaagtgcggcaagtgaagtcacgaagcaaccgaacactcgccgccggcgagtcacctaccttaattagtccacaataaaaaccacccatatgagtgtggtttgtgtgtgtgctgattattgctgaattaaacccgtgtgttatcgattaattaagcagctggtcgcttcggcgactatgcgtgtatcaacgtatgaatttgtgtgatgtgatgtacccgtgctattctcagtgaaattaatcaatcgtgtattc

SEQ ID NO: 400660 - DNA, 359 bp, Oryza sativa nipponbare
ccacgcgtccgcggacgcgtgggcggacgcgtggggttttttcaaaaaaaaaacaactttggataagcatctacttcccagaggtgcgagaaatcataattggggctgccctttcacaataaccactcttaccacggcgagcatgacaccccttctctcttgtatggcgcaacctcaatacaatgccttggtctccgttttcaagggtgtcgcgttgaaaacccgcgctacatccccaatttatgatgtacgaagcacatccccctttagccaccggccatattagacatgagggcgggaccgataagtccttctcaacattttcccaaccctattggcaaatgggcccccccctgacc

SEQ ID NO: 400661 - DNA, 426 bp, Oryza sativa nipponbare
ttccaccagtacagcctcaagttcaagcttcacgccaagtggggaaagctgccgaattacgcggtgattgagcagaggtacttcgattgcgagatgttccctgcaaacgatgaccacccctcgcacgacgtagcgagggggcagaggttcgtcaaggaggtgtatgagacgctgcgagcgagtccgcagtggaacgagactgctctgatcatcacctatgatgagcatggtggattctatgaccatgtgcctacgccggttgtcggggttccacagcctgatggaattgttggccctgatccttactacttcaagtttgatcggcttggagtgcgcgtgccttctttccttatctcaccatggatcgagaagcgcactgtgatccatgaaccaaatgggccgcaggactcctcacaatatgagcac

SEQ ID NO: 400662 - DNA, 448 bp, Oryza sativa nipponbare
ccacgcgtccgcccacgcgtccgcaccacccaccaactgagagctgagcaggcgagcgagcggacatggcagcatcgctccaagccgcggccaccctgatgcagccggccaagctcggcggccgggcctcctccgccgcgctgccatcgcgcccgtcttcgcacgtcgccagggcgttcggcgtcgacaccggtgccgccggcaggatcacgtgctccctgcagtccgacatccgggaggtcgccaacaagtgcgccgatgccgccaagctcgccggcttcgccctcgccacctcagctctgctcgtctcgggcgccagcgcggagggcgtgccgaggaggcttaccttcgacgagattcagagtaagacgtacatggaggtgaagggaaccggcacggcgaaccagtgcccgacggtggagggcggcgtcgactccttcgccttcaa

SEQ ID NO: 400663 - DNA, 428 bp, Oryza sativa nipponbare
ccacgcgtccggccaaggagaaggagctcgccaacgggaggctggcgatgctggcgttcttggggttcctggtgcagcacaacgtgacgcagaaggggcccttcgacaacctgctgcagcacctgtctgacccgtggcacaacaccatcatccagacgctgtcaggctgagcgtgtgatcgatttcatcagggccagggcatctcaaggagcttgatgagttcaggctggtgaaaccgatgattgggcgatggaagatgttctcttcttgtttcttctttttttttttgtggagtatgcatgtataagatgttaatgaattggggggaggagagagagagagatggatgtgatgagattcagacttactgtgtgtgttgtggtaattgtttcctgcatgcatggatctggatgcatgggtgagggggt

SEQ ID NO: 400664 - DNA, 446 bp, Oryza sativa nipponbare
ccacgcgtccgcaggaagcaattatttgagtatgatgaggtattgaatagccaaagagatcgagtatatgcagaaagaagacgcgctcttgcgtctgatagtcttgaatcacttattgtggaatatgctgaattaacaattgatgacattttagaggcaaacattggccctgataccccgagagaagattgggatcttagcaaactgatagctaaacttcaacagtattgctatctattagatgatttgacaccagaattgttggagggcaaatcgtcaagctatgaggatttgcaagagtaccttcgtacccgaggacgtgaagcatactaccaaaaagctgagattgtggagaaacaagctccaggcttgatgaaagaagctgagaggttccttattctaagcaacattgataggctctggaaggaacacttgcaggcattgaa

SEQ ID NO: 400665 - DNA, 441 bp, Oryza sativa nipponbare
ccacgcgtccgcccacgcgtccggtgaaggatggtgcagagggacgccgaggatggctgagcagtagtcttccctggacagctcccaagaagggattcagcttgagcgatctaatcggggatggcacagatggtttgcctgtcacacttgggcttgctgcagctactggtttgggaatacttgcctacacagagatagagactgtgcttcagtttttggggtcagctgccattgtccagctagttgcaagcaaactcatatatgctgaggaccgaaagagaacccttaaacagatcgatgattcttcaacaaaaaggttgctccaaaggagcttgttgatgaaataaaggaaatcggtcaggctctgctgccttctactggtaccaagagccaaccagcaatcacagaagctgctccagcaacagcagaagctgctccagc

SEQ ID NO: 400666 - DNA, 443 bp, Oryza sativa nipponbare
ccacgcgtccggacatactctactactactagccagtaagctagctaactaactacgtggctatggcccccaccgtgatggcctcctcggccacctccgtggctccattccaagggctcaagtccaccgccgggctccccgtcagccgccgctccaccaactcgggcttcggcaacgtcagcaatggcggaaggatcaagtgcatgcaggtgtggccaattgagggcatcaagaagttcgagaccctatcgtacctgccaccactcaccgtggaggatcttttgaagcagatcgagtacctgcttcgatccaagtgggtgccttgcctcgagttcagcaaggttggattcgtctaccgtgagaaccacaggtctcccgggtactacgatggcaggtattggaccatgtggaagctgcccatgttcggctgcaccgatgccacc

SEQ ID NO: 400667 - DNA, 445 bp, Oryza sativa nipponbare
ccacgcgtccgcccacgcgtccgctttgatgccaaattgaggagggagagtactgatgttgaggacatgtttctggctcatatatcgggaatggacaccctagcccgcggccttcggaatgttgtcaagctgatcgaggatggttccctggatgagcttgttcgcaagcgctaccagagttttgatagtgagatcggtgccttgattgaggctgggaaaggagacttcgagacactagagaagaaggttctggagtggggtgaacccattgttccatctggcaagcaggaactggctgagattctgttccaagctgctctatagatggtgccgtggtgctgttcatagttctaggaataaagcctagcacgcctttggaaacggaatgtgcattctatcattgtctactacgagcaataatctagttatagtttagttattagcc

SEQ ID NO: 400668 - DNA, 443 bp, Oryza sativa nipponbare
ccacgcgtccgcaagaaagcataagcaacacaagggattaactcatcactcacttagctaattaaatcttcgaccatgtcggacaagtgcggcaactgcgactgtgctgacaagagccagtgcgtgaagaaaggtaccagctatggcgtcgtcatagttgaagccgagaagagccacttcgaggaggtcgccgccggcgaggagaacggcggctgcaagtgcggcaccagctgctcctgcaccgactgcaagtgcggcaagtgaagtcacgaagcaaccgaacactcgccgccggcgagtcacctaccttaattagtccacaataaaaaccacccatatgagtgtggtttgtgtgtgtgctgattattgctgaattaaacccgtgtgttatcgattaattaagcagctggtcgcttcggcgactatgcgtgtatcaacgtatg

SEQ ID NO: 400669 - DNA, 446 bp, Oryza sativa nipponbare
ccacgcgtccgcccacgcgtccgcccacgcgtccgcccacgcgtccggccttctagctgttcccatcagttgtgtcagtgaacatattgaaactttggaagaaatcgatgtagaatacaaggagttggctttagaatccggcatcaagcactggggacgagttcctgcattaggttgtgaacccacgttcataacagatcttgccgatgctgttattgaaagcttgccttatgttggtgctatggcagtttcaaaccttgaagctcgacaggcactggtgccacttgggagtgtggaagaactgctagcggcgtacgactcgaaacgcgacgagctgccccctccagtgactgtatgggagtggggctgaacgaagagcgcggagacctggaatggacgggctgctatgctggccgtgctggctctcctagtgctggaggtgacaa

SEQ ID NO: 400670 - DNA, 450 bp, Oryza sativa nipponbare
ccacgcgtccgccccgctccactctcaggcaggcaatcagcggcgaggcaccagcccaccggccggcaatggcgtccacctcctgcttcctccaccagtccacggcccgcgtcgccgcgcgcgtcgcctccccgtccccggcgacacggacccacctcctcgtctgccgcgcccagaagcaggacgacgccgacgtctcccgccgcgcggcgctcgcgctgctggccggagcgacggcggcggtgggggtgaaggtggcgcccgccgccgcggcctacggcgaggcggctaacgtgttcgggaagcccaagacgaacacggagttcatcgcctacagcggcgaggggttcaagctgctgatcccgtccaagtggaaccccagcaaggagcgcgagttccccggacaggtcctccgctacgaggacaactttcacgccaacagcaacgtct

SEQ ID NO: 400671 - DNA, 438 bp, Oryza sativa nipponbare
ccacgcgtccgcggacgcgtgggtcatgggattcgtcgagggctaccgcgtcggcggcggcccgctcggcgagggcctcgacaaggtgtacccaggcggcgccttctacccgctcggcctcgccgacgaccctgacaccttcgccgagctcaaggtgaaggagctcaagaacggccgcctcgccatgttctccatgttcggcttcttcgtccaggccatcgtcaccggcaagggccccatcgagaacctcttcgaccacgtcgccgaccccgtcgccaacaacgcctgggcatacgccaccaacttcgtccccggcaagtgagcacaacgacacgatcgagatggtgccaaccaacgtaccatgtgtacacttgtagtagccacgcaccgaccctgcagttgcagttgcagcagtgcatgtatgtatgtaccttaatt

SEQ ID NO: 400672 - DNA, 448 bp, Oryza sativa nipponbare
ccacgcgtccgcggacgcgtgggcggaaacacggtgaacgcctcgtcccgaaaccccggaaagccggcgagagctcgagaagtcgagaccaacctcgccgagcggatcactcgcactactcccacctcgccgcccgccgccgccgccgccgggttcccgtgctgcgcgcgcttcgatctccttctccttctccttctcgcggccgttcttgtgcgtgagtgagagacagtgaggtggtgggagacccgtgggaagggagaggggggcggaaatggcgaagcacttcgtgctcaacaccggcgccaagatcccctccgtgggcctcggcacctggcagtccgaccccggcgtcgtcggcaacgccgtctacgccgccgtcaaggcggggtatcggcacatcgattgcgccagtgcgtacaacaacgaaaaggaggtagggttggctctg

SEQ ID NO: 400673 - DNA, 433 bp, Oryza sativa nipponbare
ccacgcgtccggccgccacgccggccctcgcctcgcgcgcccgcatctcccggcccaagctttccgccgcctccccctgcaccacctcctcctcctccactccacgcctcgtccacctcggcagcaggaggcttccccttcgctcgctccgtggcctcgccgccgccgccgcttctggcgccgtcgaagcggaggagggagaagaggagaagcaagtcggaggtggggatgcgagcgccggcgaggaagcgcaggagtacaaggttaaggtgcctgaaaggcaggatccaatgcttgttctgaagttcatatggatggagaagaacattggcatagccctcgaccagttggttcccggctatggcagcattccgttaagcccatactacttctggccacggaaagatgcctgggaggagctaagagcaaagct

SEQ ID NO: 400674 - DNA, 451 bp, Oryza sativa nipponbare
ccacgcgtccgcccacgcgtccgcccacgcgtccgcagaaactgaaaaaagttggggtttgcaaaagaaaaaaaaaaaaaaaaaaaaaaaaaaaaaaaaaaaaaagggaggtggatattgtggtatcctagcttactaccgctagcttgcttcgtcatacttcgtctgtggtggttcacctctctgacctcactcttcgcttgattttaccgtcctaatggtggcatgcctgcgtatggctaacttgtttgcctggcaggagaagctcctttttgtatgtggcgcaattatggtatggtcgtgcccctttgtcctttcttgccttttctcctactgatcatgcacatcttccgtcccccgatgtagcgtttttcattccgttgtggtgtgtgcttctcacatgagttactgtactaccttgggcatcctgatgttccgctttttttttttt

SEQ ID NO: 400675 - DNA, 416 bp, Oryza sativa nipponbare
ccacgcgtccgcttgtgactacacccgcttcgcttcctcccctctctaagccggggaagctaagccatggcgtccgtcaccgcccgcaccccggtcgcagccctccgctcgtcggcgtcgctcaagtctaccttcctagggcaatcctccacccgcctcgcccgcgcaccgactacgaggcgtaatgttcgggcggaggccaagggagagtggctccccggcctcccttctcccacctacctcaacggcagtttgccaggcgataacgggttcgacccgttgggtctggcggaggacccggagaacctgcggtggttcgtgcaggcggagctggtgaacgggcggtgggcgatgctgggggtggccgggatgctgctgcctgaggtgctgacgaagatcggcttgatcgacgcgcc

SEQ ID NO: 400676 - DNA, 443 bp, Oryza sativa nipponbare
ccacgcgtccgcggacgcgtgggctcgagcaaagaaggagagagcttggtgagctgcagagatggccccctccgtgatggcgtcgtcggccaccaccgtcgctcccttccaggggctcaagtccaccgccggcatgcccgtcgcccgccgctccggcaactccagcttcggcaacgtcagcaatggcggcaggatcaggtgcatgcaggtgtggccgattgagggcatcaagaagttcgagaccctctcctacctgccaccgctcaccgtggaggacctcctgaagcagatcgagtacctgctccgttccaagtgggtgccctgcctcgagttcagcaaggtcggattcgtctaccgtgagaaccacagatcccccggatactacgatggcaggtactggaccatgtggaagctgcccatgttcgggtgcactgacgccaccc

SEQ ID NO: 400677 - DNA, 186 bp, Oryza sativa nipponbare
ccacgcgtccgctgatataaggagcgcgccgagcaccgccttagacaatgtcgaccgcctacgccggcgtctctggccagagcgggtgcgtcgacactgctatcccgcgcacccgcgcaacagtcgaagccagccgtgtctagcaagtaccgacctgcactggccgctgctacaacaggagcaacc

SEQ ID NO: 400678 - DNA, 427 bp, Oryza sativa nipponbare
ccacgcgtccggctgcaaggagaaggagaaggtaggctccagccatggcttcccagctctccgccgccacatccgtgccgcagttccatggcctccggacctactcctctcctaggtccatggtgacgctgccatcgttgaggatgagcaagaagaggtcccagggcatccggtgcgactacatcggctcagccaccaacgttatcatggtgacgacgacgacgctgatgctgttcgcggggaggttcgggctggcgccgtcggcgaacaggaagtcgacggcggggctgaagctggaggcgcgcgactccggcctgcagaccggcgaccccgccgggtttacgctcgccgacacgctggcctggggcgccgtcggccacatcatgggccgtggcgtcgtccttggccttaagaacatcggcgttct

SEQ ID NO: 400679 - DNA, 446 bp, Oryza sativa nipponbare
ccacgcgtccgcccacgcgtccgcgcatcagcagcagcaagcagctaatcgcgcacgtacgcacaccgggacccggggcgagatggcgcagtcgatgctggtgtcgggagccaatggcacggtggccgccgcgagcaccagcaggctgcagcccgtgcggccgacgccgttctcgcggctcgtgctgtcgcagccgtcgtcgtcgctggggcgcgcggtgtccgtcaagacggtggcgctgttcggcaggtccaagaccaaggccgcgcccgcaagaaaggctgagccgaagccaaagttcaagaccgaggacggcatcttcggcacgtccggtgggatcggtttcaccaaggagaacgagctgttcgttgggcgtgtcgccatgctcgggtttgtcgcgtcgatcctgggtgaggttatcaccgggaagggattcctggcgcagc

SEQ ID NO: 400680 - DNA, 402 bp, Oryza sativa nipponbare
tttacaaaatgaggagagcacattaggcacatagctgcttggttggcacaataccagacaaggccacattttccgcgcatgaccaaactaaaacattacttgatattactagacagggtaatgaagattaccataccaaaagtgcaatattcctcggagtcataaaagacagacgtaggcttagtctacttgcatcacaagagaatgggctccgatcacgcattctccttgatggcctcatctatagctttgatattgtccctcagaatcttccactgatccatcgggagctgtatacctttgcggccggggagggtcttgccgaccttttagaagaactcgcggatgtggacaacgaccttgccgttccaggtccaaaccgccaccctacggttcttgata

SEQ ID NO: 400681 - DNA, 485 bp, Oryza sativa nipponbare
ttacacgattgattaatttcactgagaatagcacgggtacatcacatcacacaaattcatacgttgatacacgcatagtcgccgaagcgaccagctgattaattaatcgataacacacgggtttaattcagcaataatcagcacacacacaaaccacactcatatgggtggtttttattgtggactaattaaggtaggtgactcgccggcggcgagtgttcggttgcttcgtgacttcacttgccgcacttgcagtcggtgcaggagcagctggtgccgcacttgcagccgccgttctcctcgccggcggcgacctcctcgaagtggctcttctcggcttcaactatgacgacgccatagctggtacctttcttcacgcactggctcttgtcagcacagtcgcagttgccgcacttgtccgacatggtcgaagatttaattagctaagtgagtgatgagttaatcccttgtgttgcttatgcttt

SEQ ID NO: 400682 - DNA, 487 bp, Oryza sativa nipponbare
ttaacaactaattaaacaaggtacgtctttacacctacacgtacacagtacatatacacttgaaagaaagtctcaatgatgcgcaagcacaacaatggcggctaaacctcggtagatcgatcgatcctcgtaattctactcttcgtcgtcgtcgctgacgaacttgccggtgccggggttgatggcggcgatgaagaagaagacgacgttgaagaggacgagcggctcgatctcgttgatggggacgccggtctcgatgttgagctgcgcgagggcgcccttgccggtgatgatctcgccgatgatggagaaggcgatgccgagctgcgcgagccggccgacgaacagctcgttggccttggtgaagccgaacagcgggccgccctcgctgaggcccagcgcggagcggaagcccttgcccggggcgatgacggccttgtcgaggcccgtcaccggctggtcgtcgacgaagctgccgcggtcgccg

SEQ ID NO: 400683 - DNA, 347 bp, Oryza sativa nipponbare
aaaacacgtcaactttgttaagcaagagcagaattaggggataaaccccattacataaccaaggataatggctgaaagcaaaagagccacccctgagaagggggggttaactgaactacgaaatcaatcttcctgaaataacctaatagcagaaaaaggagcaagtcgatagggatctgcggggaagccgcgacgactgctaccctgggcctaaaaagatgtgcactccgtttgacaaaccgttaatccccatcagctgcctccacggaaacggcacaagaccgaggtttgttgctgagccgtaaattttggtgggtgcatcactggactcagcgaaggatccccac

SEQ ID NO: 400684 - DNA, 466 bp, Oryza sativa nipponbare
aaatatatatagccggagcttccatatatttcattcacatatgcctcacccaacaacatatagtcgtagcagataccactcttacatcaagtcagagagagatcaggtgaaacaaaaacaaaagcagagcacggccggtaaaatcaaaagacgatgaacaaactgggaacacacgaaacaaggtgggagacatcatcgaatcagagatgaacaattaaacaaggctatatatgacgatgacggcttagttgccaccagactcctcgcagcccgggggcttgtaggcgatgaagctgatgagctgcacctgcctgacgttgtcgaagccgatgatacggacgaatgcatcagggtacgccttcttggcctcctcgagctccttgagcacctgggtggcgtcagtgcacccgaacatgggcagcttccacatggtccagtacctgccatcgtagtatccgggggatct

SEQ ID NO: 400685 - DNA, 481 bp, Oryza sativa nipponbare
ggcttaatttaattttcttttgtccggaactagtgacagtgcattaggagttcattcaggaaaagacaaaacacatactgcagtatcatacctagatcatccaacttccaattctctgagccagcaaagatagggcatgttctaattcaaaactgcaaacaaactatagccgactcaaccaaagatagggcatgttctaattcaaaactgcaaacaaactgtagccgactcaaccaccaaacatatgagaggcagtaagggttgaagatccatggatctgttcaggcgatggtaacatcaactcttccggccacttggtccagatcacgccttccctgggaggtgatgagtcttccgcccttggggtcgacatcgatgatgcccatcttctgcagctgctgaaggatgttgcgtgagatagcgccgctgctcttgcagaagtgcgggggacgtgagccattcctctggcggccaccataga

SEQ ID NO: 400686 - DNA, 436 bp, Oryza sativa nipponbare
aaccaaactgtaaaataaaaatatatagcgggttagatattgatatatcatcaacatagcccaaaacaaagctgcatactattattataggcagcaatccaccagcgcgatgcttgatcttagcttagttgccaccagactcctcgcaacctgggggcttggtagcgatgaagctaattaactgcacctgcctgacgttgtcgaagcccatgatacggacaaaggcatcggggtaggccttcttggcctcctcaagctccttgagcacctgggtggcatcggtgcagccgaacatgggcaggttccacatgggccaatacctgccatccgaatacccgggagacctgtggttctcacggtagacgaatccaaccttgctgaactcgaggcaaggcacccacttggatcgaagcaggtactcgatctgctttaaaag

SEQ ID NO: 400687 - DNA, 414 bp, Oryza sativa nipponbare
ggtgaaccaatataagatgcatgattagaaatcaaagtgagatcgacgaatcgagagaaaattcgctacaaatctccactcagatgatacaaatacacagtagcacgacaagcgttcaattatgcatgcagttgtgtcatatcacaaaggttctaggtacaggaatgttttcatggctggccaatcgatcgatgatcatcatcagatcatcaccatttccagaagacgttggatccgcacttgtacttctccttcccctcgcactcgatctcgagatcatctgagatgaatgggactttcttctgcttggcgaggtcctggcagccggtgaagttgtaggggaactggcagctgccgaactcgacggtgtacgcccttgcgaagttggcgccgctcgtcgccagcctttttttg

SEQ ID NO: 400688 - DNA, 477 bp, Oryza sativa nipponbare
acacgattgattaatttcactgagaatagcacgggtacatgacatcacacaaattcatacgttgatacacgcatagtcgccgaagcgaccagctgcttaataatcgataacacacgggtttaattcagcaataatcagcacacacacaaaccacactcatatgggtggtttttattgtggactaattaaggtaggtgactcgccggcggcgagtgttcggttgcttcgtgacttcacttgccgcacttgcagtcggtgcaggagcagctggtgccgcacttgcagccgccgttctcctcgccggcggcgacctcctcgaagtggctcttctcggcttcaactatgacgacgccatagctggtacctttcttcacgcactggctcttgtcagcacagtcgcagttgccgcacttgtccgacatggtcgaagatttaattagctaagtgagtgatgagttaatcccttgggtgcttatg

SEQ ID NO: 400689 - DNA, 409 bp, Oryza sativa nipponbare
gggtgggagggatgaaaagaacttcacttttaaaagagtatcaacttgttttttacatgggttacaatatagtacaggtccacattcaacagggcatgcagggctccatccacaattccatcccaatacaccaccacctttcacggcctactccgatcccaaaaaagaggggtaggtcgcgtcaacaaacagtcttttaattttcctccatgggcggccatggctaacactccaacacttgaagaactcctaatttgggggtgaaggcctggaaaatggtggcgtggccggggtcggcgagatgggcaaagaggttgtctatggggccgggcccggtttactctgcctggaaccaagctcccatgacgggaagcatggcgggccgcccgtttttgatctccttggggcg

SEQ ID NO: 400690 - DNA, 488 bp, Oryza sativa nipponbare
taaatatatatagccggagcttccatatatttcatgcacatatgcctcacccaacaacatatagtcgtagcagataccactcttacatcaagtcagagagagtcaggtgaaacaaaaacaaaagcagagcacggccggtaaaatcaaaagacgatgaacaaactgggaacacacgaaacaaggtgggagacatcatcgaatcagagatgaacaattaaacaaggctatatatgacgatgacggcttagttgccaccagactcctcgcagcccgggggcttgtaggcgatgaagctgatgagctgcacctgcctgacgttgtcgaagccgatgatacggacgaatgcatcagggtacgccttcttggcctcctcgagctccttgagcacctgggtggcgtcagtgcacccgaacatgggcagcttccacatggtccagtacctgccatcgtagtatccgggggatctgtggttctcacggtagacgaat

SEQ ID NO: 400691 - DNA, 455 bp, Oryza sativa nipponbare
gaacgggttaatccgagggctttttattcttcggagccatggttgccatggcaggcatccattatttccttgtccaatagtttctcagggaacacttaggcaacaacaacaacacaaggggttttggttcctatccgaatctctgtttcccttcactgcgggaaggtggccacaggatggacacccaacacacaaggaagggttattactggtactggctcgcgagctgaccttccttgacgatgtagttctgcaccgggaagtcttcccctttgaagtacctgtccagcatgtccttcactcctgctgcgtatttaagctgtgcataaattgtagtcccagagatatgaggggtcatggcatgattaggcatgtatcgccatgggtgatcctttggggctggttgggggaaccagacatcaccaccatatcctgcaacttgaccactagagcaa

SEQ ID NO: 400692 - DNA, 479 bp, Oryza sativa nipponbare
aagttgcaaaccccaacttttttcagtttctgaattctggatggatcatatcagattcatcacagcatcgtacaatctgtgcaagcattggtacatcgagcgatggagagagagagtagtctacaatggcggctgggccattcacgagcccggcgtgaacttggtggcgtagacccaggcgttgttggcgacggggtcggcgaggtggtcgagcaggttctccaaggggcccttgccggtgacgatggcctggacgaagaagccgaacatggagaacatggcgaggcggccattcttgatctccttgaccttgagctcggcgaaggtgacggggtcgtcggcgaggccgagcgggtcgaagtactggccgccggggtagaggtcgttgccgtcgccgacgccggggaggccgttgatgcggtagccctcgacgaggcccatgaggacgacctggaatcccagcacggcgaggatgcttt

SEQ ID NO: 400693 - DNA, 472 bp, Oryza sativa nipponbare
tttattgcaaaaacatcatcttcttcttcatcttgttagtgtacacaacaccaactcgatcatcatctcgtcgcactaaacccatcttccccaacctaaagacaacgaactcgctggccacaaatccatccaaccacaattaaccactgctaagctacggtcccccacttcacttgccggggacgaagttggtggcgtacgcccaggcgttgttgttgacggggtcggcgaggtggtcggcgaggttctcgagggggcccttgccggtgacgatggcctggacgaagaagccgaacatggagaacatggcgaggcggccgttcttgatctccttcaccttgagctccgcgaacgcctcggggtcatcggcgaggccgagcgggtcgaaagcgccctcggggtagagcgggtcgacgacctcgccgagcggcccgcccgcgatgcggtacccctcgacggcgcccatgagcac

SEQ ID NO: 400694 - DNA, 437 bp, Oryza sativa nipponbare
ttccaaattcaagtatcaagtgtggaatatcatcatcatgcgaggtacagtgttacatagattaatcacaatgcaacttgattaagcagtgcgcatcattacttcgcattcagaggaaggctatcttagattacagatgaatatgcagacacccagcttggcgttacatacatagactggatttgggtgaaatttagcccgcgagggcgctggcgtagtagactaggagggcgccgccgccgaggagccatgagagggtcacggcccatatcaaaggcccggaggttccaccaacttatgtgtcaccggcgggagaccattccttccacgagctgattgagctgaagctcgacaccattgcgccggacttgtcaactaatcgttacacaccatatctggtgctcttagtgagagatgcaacaatatccactgacatg

SEQ ID NO: 400695 - DNA, 447 bp, Oryza sativa nipponbare
gtgttgggtttttttttttttttttttttttttttttttttttttttttttttgggtttttttaaaaataaataaaaaatttctggatgggataaaaacacacacaaaattaaggggcaaaaataaatgcacgggtgaaaatggaaatggaggggcggggggggggtactaaaaagggaaaaaagggacgttggggggaacaatttagatagggggggggggataaattgccggggaaaaaattgggggggtatgccacaactttattgggaacggggatggcaaattggtcaaaaagggtttcaatggggccctttgcgggaaaaaagggctggacaaaaaaacccaaaatggaaaaaatgggggggggggcggtcttgagctctttaaacttgaactcggcaaaggggttaaagtcgtcggagaggccaaacgggttaaaaggcc

SEQ ID NO: 400696 - DNA, 460 bp, Oryza sativa nipponbare
agcaaatcgatccatgcgaccatgcttgcaaatgagttggagcacaaatttacatgttacacccacaccctacacccatgcataataatacatcgatatacgtacgtacatacatacccctctcgatcacacgcaccatcgatcgtacaaagttgcgtacatacatacgtacacacatatacgcatacgcacgtacatacatacataattaaaaactcgcaattaattaaatacgtagctgatggcatctctaatggaacttgaggctggtgaggatgttgttgcggacgggatcagcgaggtgatcaagcaggtaatgcacggcgtcaaccctcgtgaagagcgcctggacggagaaaccgaggaaggcgagcatggcgagcctgccattcttgatctacttgagcttgagctgcttcatttccggcttgatattggtccccaaaaccagcggtttgaa

SEQ ID NO: 400697 - DNA, 487 bp, Oryza sativa nipponbare
aaagcacgcaacgaacaaattacacatgacaaagctggatcactgatgtctttacactatttcagatctgtcacaccataacatacacaacgggaacccgaaaagaattggcatctaatgatcataatccggttacactcaaatcaaaatttctcccttgaagatggaggccggtaaaatcaaatatgctacatctagcaattcctcactaattaccaactgccagaaaatgctgcaggctatatattttctgaagcaaaaaattggaatcatggcttgaatggcgcaaatactaccactgaattgtgacctccaaatccaaatgaattagagatagcaacattcacttcgtgctgctgcttctcgttggctactgtatcaaaatcaacttcaggctcggggttaaattggttaatagtaggatgcacccatccagtagttatggctttgacaacggcaatagcttctaacccaccagcggcaccta

SEQ ID NO: 400698 - DNA, 477 bp, Oryza sativa nipponbare
tctaaatgatatttttgaacttccttaacgaaaagaaattacatacagcacaagaagcatcttgcactagataattgcgcacagctgaacataattatgcagtccagttcttcagtaaatctagtgaaagtcagatacagaagaaagttgcttaagggaggtgtatggctggagggcagattcattggaccatcggatcagggttcccagctgcaagtatgtccagcaacgagttctggggctccagctcttcatgccacagttgtagtttgtctccagggtgaaatttcctcgaaacaccatctgcgtttatagtgacggtacgaacaacccctccactagcaccatcacgggctatagcaagggaaactaccttaaccacaaacttctcagcttcttcctgggacatgccctccttccattcgtggtcaagcaatccatagaggtaactagagcctgaacctcccattgcaaatg

SEQ ID NO: 400699 - DNA, 482 bp, Oryza sativa nipponbare
gctaaagaacgatatttattatgaacaatttcgtgagcacggtagtatcacatgacactgagaatatgtagtatatcttcgcggacagtgagaaaaacggtgccctccacgttttcttcttccttcaatttctccaatataacgtacagcttggcacatatctgtacaaaccgcggtactggtaaacaaaaacaacgtacacagcatactactttaggatcctcatgctggtacagccacaggtttttggctggtcttgattcccttgatagcttctgcatagtctggagccccgaaaacggctgaaccagcaacaatggcgttggccccagcttcaatgaccttgtaggcgtttttgggaccaactccaccatcaacctcaatccaagggtttactcccttctttgcacataatcttctcaactcttgaatcttttttacttggcttttaataaaggtcttgccaccaaatccaggattta

SEQ ID NO: 400700 - DNA, 480 bp, Oryza sativa nipponbare
  unsure (1)..(480): unsure at all n locations
aattcacaacaccatatttcattgatcagggtcagaacctgcacagaaatacacactaccggtacagatctcaccctctctccaatactcgtacatctatccacgcggtccacacgaatacgtacatctatacggtacacgtacgtacatctactgcaccgngtacacacacgcacactctcctgcagagacgcgcatcgtcgtcaacctagctagcttagctgaaggcgatgcgtcgccatggcagcacggcggcggcggcgctcacttgccggggacgaagttggtggcgtaggcccaggcgttgttgttgacggggtcggcgaggtggtcggcgaggttctcgagggggcccttgccggtgacgatggcctggacgaagaagccgaacatggagaacatggcgaggcggccgttcttgatctccttcaccttgagctccgcgaaggccttcgggtcggcggcgaggccgagcgggtc

SEQ ID NO: 400701 - DNA, 484 bp, Oryza sativa nipponbare
  unsure (1)..(484): unsure at all n locations
ttatcgtacaatgtcctctccgcttgtcgagagtgcaaataacatcatcgggggatatgatcatcagttcacgagaacagaggaagaaacaaaagctaaaaattaaaaccatcaacagcccgatcgagtttgcattactagatacacacattgcagccttccttccctctctccatgtatcgatatatcaacccggccacgcacaaaacatttgttcattccctactcgagctgcgcgtaccacaccccttggatcttgacatccttgggcaccttggcgccgaggtctgtgtccgacggctgcacgctctcgaagacgccaatcacctcgccggtctctggcttgctcttggtgacgctcaacgtgatgttgcccgtcgacgacgaggcgttcttgacgttctccttagcgagctcctcctcgtctcctctgcctccggcggngagcgccacagcgttgtcgtagccggtagagccaccgcgg

SEQ ID NO: 400702 - DNA, 479 bp, Oryza sativa nipponbare
  unsure (1)..(479): unsure at all n locations
tttatcaaagcgctaatgatacattttgcagcaggacaggcattttatcccgttctgttaaacacagcacaaccaggaagaatcgaacaccctccgtcgactgcgacacgctgtcacccggcgaccggcggcggcggcggagcatcaccgccagcagccaccccagattgccgctgctcgaactcctggaggagttcggcgtcgacgttctccgcgggctcccacgtggccttctcgatgtccacccacttgacaaggtactcccatttcccctgcccttccgccgcctccctattgttgacgacggcctccgcgacggcgtactccagcccggcgtcgaagtccttcaccaggtgctncgtcacccacgccgccctaacccacttcctgtcggcggcgttgcgccaattcaccaagtacttccgacacttggccttgccggggccgggcaccaccttttgcactttggcccaattgta

SEQ ID NO: 400703 - DNA, 483 bp, Oryza sativa nipponbare
ggcaggctaagagagtttggtaattggtactgaacgcaaacagcccttaagtaatcgagttttcggcttgagagtacatgaacgtgcgtgctggtactcttgtcatcaatcaatatcaccaaatcgacgtaccataccagatcgagtttaactaagaccagtttgatttcgtgtttgatacaaaaattaagatggacggattcacaagagagcaccctctacttaagctttacattacaaggccaaccagcagctgcctgccggccgaccactgcgtgcgcacgcgcgcgcaataatcaaccaatcacacacagtacgcacgcacataaaaaccacccatagccttcacgtacgcccggacgcacgcaccggttcgtgccaagctcaagggtagatggttctcgggatgatgatgtcgccgatgttgttgtgccacgggtccgagaggtggctggccaggttctccagtgggccggtgcccgg

SEQ ID NO: 400704 - DNA, 402 bp, Oryza sativa nipponbare
tttttaattaagctagaaatctcctcgatcgatcacacacacacacacaattaaggtacatacatacatgcactgctgcaactgcaactgcagggttggtgcgtggctactacaagtgtacacatggtacgttggttggcaccatctcgatcgtgtcgttgtgctcacttgccggggacgaagttggtggcgtatgcccaggcgttgttggcgacggggtcggcgacgtggtcgaagaggttctcgatggggcccttgccggtgacgatggcctggacgaagaagccgaacatggagaacatggcgaggcggccgttcttgagctccttcaccttgagctcggcgaaggtgtcagggtcgttggccaggccaagcgggtcgaaagcgccgcctgggtacacc

SEQ ID NO: 400705 - DNA, 465 bp, Oryza sativa nipponbare
tataattaattcacaacaccatatttcattgatcaggttgagaacctgtacagaaatacacactaccggtacagatctgaccctttcttcaatactcgtacttccatccacgcggtccacacgaatacgtacatctatacggtacacgtacgtacatatactgcaccgtgtacacacacgcacactctcctgcagagacgcgcatcgtcgtcaacctagctagcttagctgaaggcgatgcgtcgccatggcagcacggaggcggcggcgctcacttgccggggacgaagttggtggcgtaggcccaggcgttgttgttgacggggtcggcgaggtggtcggcgaggttctcgagggggcccttgccggtgacgatggcctggacgaagaagccgaacatggagaacatggcgaggcgggcgttcttgatctccttcaccttgagctccgcgaaggccttcgggt

SEQ ID NO: 400706 - DNA, 487 bp, Oryza sativa nipponbare
attataaacactactactttattgaatcatctccaagaaaagagtataagctttacaagaatatatcctatttatgtgaagtactaagatctttacctaaccaaaagaataatcatgtacacgattttgaggcagctcagactgaaaacactcaacaatgctaacatcacatgaagcctcttattactatacaggaaaaagaactgctccagtttgatctacccttaaaatgtatcaagatttaggggaacatcttcatcaggcttcgcttttggttgagtttccttgccaattagtttcagaggaacatctagttcaggggggctcatgcaacgtatgagtggccaattgatgtcttgaaaaaaggaatgttgcttgatgtcatttgcaccagcatttgaacctatacgatttgaaggatctctctgaagtaatccatggattaattgctttgctgcaagactaaccggaatgctactgggaaatg

SEQ ID NO: 400707 - DNA, 484 bp, Oryza sativa nipponbare
ctgaaattagtagccactgaaatacaaaaagtaccaaacgtatttttctcataattcctgtaaaaaaacctggaccgcttttaattacaagaaatgttccagttttgacttttcaggattctagtgaatattgcgagtaattaggccctcaaagatggtgtataggtccttgttatctggaccaaatatttcgtcagccttccttagtgtatcctctctggtctgtttgtgtgagttcaactcctttacattggctagaaatgcactgaactgctcataagacaaacggtttctgacttgacggaagaactcttttccatcaactcgtgttcgtcctgtgtgacttcctgcatcaaatggagatgtcactgaactatgaccagaataggccgaggacctgtcatcaaacaaattccttgatgtaattgaaattgaatgccgccttggaggtgatattgacgcgaaactccttggaggtgagtct

SEQ ID NO: 400708 - DNA, 491 bp, Oryza sativa nipponbare
  unsure (1)..(491): unsure at all n locations
agatgtaaatttatgtagctcaactaatcttgaaattgagcaacgtttgatgacggaagctgtcaaaacagaacaaaaaaatggcgtggcgtgataacatatncatagacgtgggcatcggtatctgctgaattaccctccagtagcgcagctaaatgaaaatagcaacaaaaaaaataagtctgaacaaatatgtgactgatagttgttcaggtgctacatctggttcatgcaacgtcagatttttcacttcatcgagcttcacttatcgttcacgagggggctgtaaatagggtaccacatcttccgagccacaaagtcgactgtgtccgcctcagtcatgctcttgaggtccctagcgtctacatcacaacgcccctcggccagatcttcatcaacagcggcacggacgactgcggcgccgacacgtgcggtgatgtgcctgatacttgagattgatggaaagaggatgccttttcgaatttcatcgt

SEQ ID NO: 400709 - DNA, 438 bp, Oryza sativa nipponbare
gatcctcgactagctcttcgtattcatttaaaacagggaaacactatggccggcgaaaagccaactgggttcccacatcagagattaggcgagggcgttaatttatacaaattttcttatgctgcaacaacaaacaagaatctatcgaataggagtgcaatttacagctgtaaatttgctgcaggattacgtgggtacaacctcgccaagcgagggtgttccgtcatcatcaggctgaggggttttggccgcctcttggttcttgctgtcttcttcatcctggaacccttgcttgaagaggtcgtagttagttggctcggatgccttgaaaggccgttctcctaataccctaaccaaatcgtcctggtggaggacctccttctcaagcagcatttcagcgattttggcgacttgctcggacgcgtggcggacgcgtgg

SEQ ID NO: 400710 - DNA, 485 bp, Oryza sativa nipponbare
ttattctgataaatgtggaattacatagagagagtccatggtatatagttcagtgacagcacaatctgaagatacataatttgtaatggggaattaaagtactaattgaaaatttatttagagtatagcaatttcgttcatcaaatactcaatgcctaggttgattatccaagttagtccactggcactggctgcatggcctcagcctccgctctcaattcctcaaacaatgcagatgacaggtatctctcccctaaactcggaagaacagtcacaatgagcttccctttgttttctggcttctttgctagttcaagagcagcaactgtgttagctcctgatgatattccaaccagaagaccctccttcagtgccaattctcgagccatcttaacagcatcctcacctttcacctcaataaccttttccattatatccatattcaaaatttccggcttaaatcccactccatttccagtgatgag

SEQ ID NO: 400711 - DNA, 464 bp, Oryza sativa nipponbare
agcaaaaggatcattgattttatacttatcacgagaagttcactgaaattacattcttaggagaagcagcgtatacacacggataaaacacggagaaaatctttacgagagatggttggtgtttgggaggcaagaacggccggcggcggggcggccattacgcggatgggagcaccttcttgacgatctcgtcgctgagggaggcgatctgggcgtcgagcgccttgacggcctcctccttctgcgcctcgaggttggcgagcgcctccacgagctcggcctcgacgcggcggcgcccctcgtccagcttcgcctccagctcctgggtggtctccttcttcatcttgttgagcgccgcggcgatctcggcgcgtgccgccttcagcacgggggcggcctgctccttcagctgccgcacctcctcggacgcgttcttgacgccgccgagctcggcacggatcttg

SEQ ID NO: 400712 - DNA, 486 bp, Oryza sativa nipponbare
gaagttcgattgagtatgatagacctttttactaggcaaaccacacgaatacacgattgattaatttcactgagaatagcacgggtacatcacatcaaacaaattcatacgttgatacacgcatagtcgccgaagcgaccagctgcttaattaatcgataacacacgggtttaattcagcaataatcagcacacacacaaaccacactcatatgggtggtttttattgtggactaattaaggtaggtgactcgccggcggcgagtgttcggttgcttcgtgacttcacttgccgcacttgcagtcggtgcaggagcagctggtgccgcacttgcagccgccgttctcctcgccggcggcgacctcctcgaagtggctcttctcggcttcaactatgacgacgccatagctggtacctttcttcacgcactggctcttgtcagcacagtcgcagttgccgcacttgtccgacatggtcgcggacgcg

SEQ ID NO: 400713 - DNA, 425 bp, Oryza sativa nipponbare
cgtgaagataggcacatatatgtatcgtacaatgtcctcggcgcttgtcgaaatgcaaataacatcatcgggggatatgatcatcagttcacgagaacagatgaagaaacaaaagctaaaaattaaaaccatcaacagcccgatcgagtttgcattactagatacacacattgcagccttccttccctctctccatgtatcgatatatcaacccggccacgcacaaaacatttgttcattccctactcgagctgcgcgtaccacaccccttggatcttgacatccttgggcaccttggcgccgaggtctgtgtccgacggctgcacgctctcgaagacgccaatcacctcgccggtctctggcttgctcttggtgacgctcaacgtgatgttgcccgtcgacgacgaggcgttcttgacgttctc

SEQ ID NO: 400714 - DNA, 494 bp, Oryza sativa nipponbare
agctagaacactgctgctaccatgagatagtttatgccggggtagtactgtacatcagaaattcaccactcaactcaccccctcacccatgcatccagatccttgcatgcaggaaacaattaccacaacacacacagtaagtctgaatctcatcacatccatctctctctctctcctccccccaattcattaacatcttatacatgcatactccacaaaaaaaaaaagaagaaacaagaagagaacatcttccatcgcccaatcatcggtttcaccagcctgaactcatcaagctccttgagatgccctggccctgatgaaatcgatcacacgctcagcctgacagcgtctggatgatggtgttgtgccacgggtcagacaggtgctgcaacaggttgtcgaagggccccttctgcgtcacgttgtgctgcaccaggaaccccaagaacgccagcatcgccagccttccgttggcgagctccttctccttggcc

SEQ ID NO: 400715 - DNA, 374 bp, Oryza sativa nipponbare
taatgacaaaggaattagcaatgaagactcccatttcgcggcagttattgcccaaaaataattcttaacatccacgtataaactccacagaaaataaaatcataacgactgacatatggcacaatgtgtgcacatattaacgggcaatgcaacaactgaaatgaccgtcatcaaaacttcacaagtactaaaagagctagatatgtcacacgctaatattgaaagaaccactagaacgagactgatttcttcttggtggaagcattgggcaactttgcacacaatgggtacctcttctacacattctagatgacgccaacattcaccgagcttcttatgttacgcacggttaaacgaccaaaaagaggtttctc

SEQ ID NO: 400716 - DNA, 492 bp, Oryza sativa nipponbare
tttttgaggtaaaagaaatatttagttggcaaaggtatcggtttacaattgtaagactggtgtcgcctactatgaacaatatgccagggcatgggcgtagctgattggtcgacatgtcaaagaaacatttacattaagaaactgtattccagcatcaaggcactgaattatctcattacttgtactgctctctactctgacaaacatccctataggcttaattatagggctggggacgacgaccaccaacatggagatatataacgacaaaattttagtgaccacactcaagatgcagcttgggcagcaccaagtttgttagcacccttgtcgactttcttctttgtccccttcttttcagatttctcctcttcttggttcttcatcactggcttgaactgataaacagagtaaattacattccgtcgaatttgagccatcatatccaagaaaagattatatccctccagtttatattcaataagaggatct

SEQ ID NO: 400717 - DNA, 483 bp, Oryza sativa nipponbare
cttgtgtgtatatagccggagctttgttttgacatgagcctcacccaacgataattgtagtactcttacaataaaaccggccggagagggagggaagagattattacatatgtgttaagagcagaggccattgagatggtacataaccaaactgtaaaataaaaatatatagcatattatatattgatatatcatcaacatagcccaaaacaaagctgcatactattattataggcagcaatccaccagcgcgatgcttgatcttagcttagttgccaccagactcctcgcaacctgggggcttgtaggcgatgaagctaatcaactgcacctgcctgacgttgtcgaagccgatgatacggacaaaggcatcggggtaggccttcttggccttctcgagctccttgagcacctgggtggcatcggtgcagccgaacatgggcagcttccacatggtccaatacctgccatcgtagtacccgg

SEQ ID NO: 400718 - DNA, 476 bp, Oryza sativa nipponbare
ttgggttgggcaaagccatggacatggcaattgcgaatttctgctctacaaaatctcttttctacctgtagcagaaaaatggatttgagaagtacaaagatccccaaccaatgctcttctcacctttgagaagtgtccaaggggatggggcctgttatatctatattgctccttaatactctacatgccctagagctcagaggatcaaataaaagagctcatagaatcatacgttacagtgtttgttgggttatctgtacattgatgaagttgtgagactttgtatgctccaccccgacaagtttctgaaagaggagggttggcatatgaccctagcaccccttgaatgataatcttgtaggttgcctccgtgaagtggagaccatcccatgaagtgtactttgatgggtcagagcagaccacagacccagggtgcccgcacaatattgacggagaacaattgtatggagcatcac

SEQ ID NO: 400719 - DNA, 482 bp, Oryza sativa nipponbare
gagtatgatagacctttttactaggcaaaccacacgaatacacgattgattaatttcactgagaatagcacgggtacatcacatcacacaaattcatacgttgatacacgcatagtcgccgaagcgaccagctgcttaattaatcgataacacacgggtttaattcagcaataatcagcacacacacaaaccacactcatatgggtggtttttattgtggactaattaaggtaggtgactcgccggcggcgagtgttcggttgcttcgtgacttcacttgccgcacttgcagtcggtgcaggagcagctggtgccgcacttgcagccgccgttctcctcgccggcggcgacctcctcgaagtggctcttctcggcttcaactatgacgacgccatagctggtacctttcttcacgcactggctcttgtcagcacagtcgcagttgccgcacttgtccgacatggtcgaagatttaattagct

SEQ ID NO: 400720 - DNA, 483 bp, Oryza sativa nipponbare
tttaaaatgaaacatgattaattactaggattacttaacagacggatcacagaaaatcaatccttgcatgcaggggaaatcgatggatcgacctctctcctaacttgttcttaattctcatgtacaatcaaagaaacacacacgcacacacacatgcgtgcactgcatctctctgagcaacgaactcgattgatttgattttgattcgctagggattaaagagaagctgagatagagatttcgacgatcatgcgacgctgaaggagctggctgcgctctcgacgaacttcctggcgcccttgaaccacctcttgtcgccggcctgcgccttgcagatgtacagcttgccgtcgttgacggtggccgtgatcagctggtgcttgccgccctcgtcgccgtccgccgtcctcgtcagcaccgttacgctgtagtactgctttcctcccaccaccggcgccgagctctccaggatgttcgccgtcg

SEQ ID NO: 400721 - DNA, 482 bp, Oryza sativa nipponbare
ggacagacagaaattaattaagctagaaatctgggggatcgatcacacacacacacacaattaaggtacatacatacatgcactgctgcaactgcaactgcagggtcggtgcgtggctactacaagtgtacacatggtacgttggttggcaccatctcgatcgtgtcgttgtgctcacttgccggggacgaagttggtggcgtatgcccaggcgttgttggcgacggggtcggcgacgtggtcgaagaggttctcgatggggcccttgccggtgacgatggcctggacgaagaagccgaacatggagaacatggcgaggcggccgttcttgagctccttcaccttgagctcggcgaaggtgtcagggtcgtcggcgaggccgagcgggtcgaaggcgccgcctgggtacaccttgtcgaggccctcgccgagcgggccgccgccgacgcggtagccctcgacgaatcccatgacccacgcgt

SEQ ID NO: 400722 - DNA, 488 bp, Oryza sativa nipponbare
tagcaccaaaatggcattccagttttattcagaggagcagtaaaaaggatttccaagggaacatgatgctgctgatcaagcacttcattacataggacagaatagctcgagagcactgaaccaccaaacattaaatatgcgtaaatttgctaatacaatcaatgttcaataagcgtgattggcactgacggaactcctaaatttccctgtcccagagctcctcatgggtcttgtaaacgctctgtggattgacaatgaagttgcccctgagcagcctaacctgcttaatctccgagaacttagcaagcaagtcctctggaatagaccagtcataaacatctaagttctgctttatcctttcttcactcacactttttgggagtacactgtgacccatctgaatgttccagcgcagcgccacttgtgcaggagttttgccaagcttctctgcaatcgagataatgatgggttccttaaggacattgccg

SEQ ID NO: 400723 - DNA, 480 bp, Oryza sativa nipponbare
  unsure (1)..(480): unsure at all n locations
acagagatcaatcacaattcatttccataaacaaaaccgtatccgaaaacagtttgaatcgatctacagggtcatgtaacaacaaagatccgtgtaaataaagcaagaaaaaaagaaacaaggttctcaaggatgggagaattgagatatcctcttaggttgacaagctgccaccaccctgttgccaaaggttgatgatatcagtggcctgattcagaaggatgatcatctgtttctgagagatccactctttctcctccagctttgctcttagctcctcccaggcatctttccgtggccagaagtagtatgggcttaacggaatgctgccatagccgggaaccaactggtcgagggctatgccaatgttcttctccatccatatgaacttcagaacaagcattggatcctgcctttcaggcaccttaaccttgtactcctgcgcttnctcggcggcgctcgcattcccacctccgactt

SEQ ID NO: 400724 - DNA, 486 bp, Oryza sativa nipponbare
taaaacaagactcgaaaagaaaaaaatcctgaagtctgtaccaaagttcagtattacacctcacagaaaatggcccgtgtctgcagctgtgtttcttcttcgacagtcatgcgttcctctgtcgaaggggaacaacgtacgggcagccaatccgagcacagtatatatagtatagcagttctgcccggggacagtcaatgtgtgtgcttcgttacattataggagtatatatttctgcacctacgcgagcccgtacttggacagtggtcttagttttcgtacactttgcactcgtcggtctccgggttgtccttgcagaagtcctccagtgggtcgccgctgccctgcaccgccgcgccgggccacttgctcgccaccagatgcgccagatcgaccacgcgttggctgtagccccactcgttgtcgtaccaggcgaccaccttgaccatgtcgtcgcccatgaccatggtgagcgaggcgtcgatg

SEQ ID NO: 400725 - DNA, 469 bp, Oryza sativa nipponbare
taattaacaaacaccaccatatttgatcgagcagggaaacagcctgcacagacacactcactacccagacagaactcaccctctattaaatactcatacatccatgcaggcggcacaaacacatacatacatacataccgcgcacgtacatacattgaatggagtgcacacacacacactcactttcatagacagacacgcatgtgaacctacctagctaacttaaatgaaagccatgcgcatgcatggacggacgggggggggctcactcacttgccacgaactaagttggtggcgcccacccaggctttgttactgactcggtcagctaggcggtcaggtagtttatggaggcgtcccttgccactaacgactgcccgaacaaaccaaccatgcatggcatacatgggcgggcggccgtgattgatctcctttagatcgagctccaggaatgcctgccggtcgtcag

SEQ ID NO: 400726 - DNA, 271 bp, Oryza sativa nipponbare
gtttcgagaaagatatcgtccgattctccttctatggattcttttccgatcgagatgtatggatccatgtgtctacatacctagattctgttcatgagttaacgaaaatgtgcaagagctctatttgcctctgccattctatgagtcgcttcctttttgcgtatggcacccccaccccctttggcagcatctactaattcggaacttaatttgaaagccatatttcgacccggacgcttttgggatgcttctaataaccaaccaatggcaa

SEQ ID NO: 400727 - DNA, 436 bp, Oryza sativa nipponbare
aatataacggcgaaaagcatgcggattaacataatttgatacagtgagacaacctaggatcacagaatttcagtacaaaaacagatacagttgctcggcaattacagcgagattcaagctcacatgttctcacatcaacagaccgcaataatttcgggccacaatgttctttccctaaaaactaggtaaaaacaagcagcagcttaccgtacaagtttgtcatgactgcttgggaagtttgaagccaaaaactttttggaacatactgctgagatggcttttgtggcttcaagtgtggatatgtcatcaggaagagatgtgggaatgttgtcccaaagtacgctccgtcaatgttgccttggtacttggatcttggataatgtaaattttcacattttggacagtatatttttactgtgctagacctaggaatatt

SEQ ID NO: 400728 - DNA, 488 bp, Oryza sativa nipponbare
aggcaaaatcaagtctcgaacttgcaattgacgttccaaaattctagtattacacgggaccaaatcaacgagataggtttgatcaaatcgtccccagtataaaacaagcttgatcttctcaagctagtgtggtggtgtaaaattacaatcatgatcaagagagtagtacagtaattaatttaattacggttgctgcatgcagctgagctgcgtagtgatgaatctgtatatgtctaggtgaccttgacgccgttgtatctgaggatctcgccgatgagctcccccctgccggagccgacgtagcggccgacgatgtcgccgtccctgatgaagaggaaggtgggcacctcgacgacgtccatgtcgcggaggaactccatgcagctgtcgttctcgtcgccgttcatgcgggcgaagacggtggtgtcggccatggtgcgcgacagcttcacgacggtggggtacaccttcacgcagggcccgcatcg

SEQ ID NO: 400729 - DNA, 433 bp, Oryza sativa nipponbare
tagatcctataataacgatacatcattaattcgatcatccgttggatgcggcctgcggcttacattaaatctcgatccaaagaagcaaagatgatgacagaatgaaattaattaagctagaaatctcctcgatcgatcacacacacacacacaattaaggtacatacatacatgcactgctgcaactgcaactgcagggtcggtgcgtggctactacaagtgtacacatggtacgttggttggcaccatctcgatcgtgtcgttgtgctcacttgccggggacgaagttggtggcgtatgcccaggcgttgttggcgacggggtcggcgacgtggtcgaagaggttctcgatggggcccttgccggtgacgatggcctggacgaagaagccgaacatggagaacatggcgaggcggccgttcttgagctcctt

SEQ ID NO: 400730 - DNA, 482 bp, Oryza sativa nipponbare
  unsure (1)..(482): unsure at all n locations
aactaagaccagtttgatttcgtgtttgatacaaagattgagatggacggattcacaagagagcaccctctacttaagctttacattacaaggccaaccagctctgcctgccggccgaccactgcgtgcgcacgcgcgcgcaataatcaaccaatcacacacagtacgcacgcacataaaaaccacccatagccttcacgtacgcccggacgcacgcaccggttcgtgccaagctcaagggtagatggttctcgggatgatgatgtcgccgatgttgttgtgccacgggtccgagaggtggctggccaggttctncagtgggccggtgcccgggtacgccgactgttggacgcagaaacccacaaaagccagcatggccaatcgcccgttcttgatcttcttgagcttgtactcctcgaacttgacggggtccttggagaagcccagggggtcgaaggcgcccccggggtacttcttcttct

SEQ ID NO: 400731 - DNA, 93 bp, Oryza sativa nipponbare
ctataaatatatatagccatcgctcgattatatttcatgggaatattttccgatcgagatgtatggatccatgtgtttacatacctagattct

SEQ ID NO: 400732 - DNA, 470 bp, Oryza sativa nipponbare
ttcaggaaaaagtagaggagatatatttcttgttattacttaatacagcattcacatatatcgaaccatccggtacgtacgtagtagtactccacgcgttcacatcgatgatcggggacgatatcctcaggtagtacttatgcaaaagcgttggcgtaaactgacgaactgaacggacggacggtcggatttagggctcccataagtccaagttgccggagacgaagtcgtagtggccgccgacgagcttgagggtgccgttggcgatcccctccttgacgaacgggtaggtcttgaggttctccagggattggttcacggcctccttctccaagatggcgcattggtcatcgaaaggcagcgaggcgtgctcggtctgaaccttcttcttggcggggaaaccggtcctgacccagtcctcgacgaagtggaaggagtctggtgctccatccttgagtgagaggagggcc

SEQ ID NO: 400733 - DNA, 484 bp, Oryza sativa nipponbare
tttgacagaaacaaaattaagctagataagcactgattccacgcacaatttacatgatcattacatcgtccatcacacaggcactcatgcatcgatttacataggagtattgattcgtgtgactagcttaatgaatttgattagccgatgatctggtccaggacgccgatgttcttgaggccgaggacgacgccgacgcccatgatgtggccgacggcgccgcaggccagcgtgtcggcgagcgtgaacccggcggggtcgccggtctgcaggccggagtcgcgcgcctccagctacagccccgccgtcgacttcctgttcgccgacggcgccagcccgaacctccccgcgaacagtatcagcgtcgtcgtcgtcaccatgataacgtcgggggctgagccgatgtagacgcaccgggtgccctgggacctattcttgctcatccttaacgatggcagcgtcaccatggacctaggagaggagt

SEQ ID NO: 400734 - DNA, 294 bp, Oryza sativa nipponbare
  unsure (1)..(294): unsure at all n locations
ccacgcgtccgcccacgcgtccggngcatcaagaagttcgagaccctctcctacctgccaccgctcaccttggaggacctcctgaagcagatcgagtacctgctccgttccaagtgggtgccctgcctcgagttcagcaaggtcggattcgtctaccgtgagaaccacagatcccccggatactacgatggcaggtactggaccatgtggaagctgccccatgtcgggtgcactgacgccacccaggtgctcaaggagctcgaggaggccaagaaggcgtaccctgatgcattc

SEQ ID NO: 400735 - DNA, 471 bp, Oryza sativa nipponbare
  unsure (1)..(471): unsure at all n locations
ccacgcgtccgcccacgcgtccggaaattttatttcaatcctggtgacaccggcttcaaggctttcaaaacgaagtatgctacaattggtgttggaatttgttgggatcagtggttcccagagtgtgcaagggccatggtgcttcagggggctgaaattttgttctatccaactgcaattggttctgagccccaggataataacctagattcccgagaacactggaagcgcgtcatgcaaggacatgctggtgctaacctggttccccttgttgcttctaacaggataggaagggaaaccgttgagactgagcatggtgaaagcactataacattcttcgggaattcattcatagcagggccaaccggtgaaattgtgaagcttgcaaatgacaaagatgnaaacgttcttgtagcagagttcgacttggacgagatcaagtctaccaggcatggttgggggatatttagg

SEQ ID NO: 400736 - DNA, 412 bp, Oryza sativa nipponbare
ccacgcgtccgagcatcttttcttctctctagcataaggggctgtacccgtttatgcgaaagggagatgccttgttctactagctcaccctgcccctcactgatgccctatggcgctttcaggtgggtaccactctctagtacctcaagcatctccttcttaagtccatacccgtcctggtcggcaagcctcattcattcaagggtgggaacaacaagggcatgccttatggccaacggccattcatgagagggctgctgtacatccgcttctcacagtggtaatccccgactatttgaaccctgacactgtgcttggcatctggagacccacctaccagcttggccatcgtcgcgaggcacccacatacttctcgacaagcgcgagcagaccatgccttacgacgcgaaca

SEQ ID NO: 400737 - DNA, 481 bp, Oryza sativa nipponbare
ccacgcgtccgctcaaggaagctggaatcggcgccatgctcaacgagctgagcagcaccgtggtgttcgaaaggcccaaggacgaggagttcgtccggaggtggcagctcgcctgcgagggcaacatcgctcatgtcgtggtgatgcccagtgtgaccatcgacaagctggactacttcctgaacgagctgacggagaagcgggcgacctggtaccaggacggatcatgccagcctccctgcctcgccaaagacgtaggcgaggagaactgcctctgcagcatccacaagaagtgaagaggagcttatatattataacaaggagccatgttgcagtgtagctttgtgttgttgtcgtggcctgaagttagtactcctaatgcgttgtgttgtaccccgatgccttctgtatgtaataatgcgttatgcagtcagtgcagcttataatgttgttatcgtcaggatattacagttaagttaaa

SEQ ID NO: 400738 - DNA, 475 bp, Oryza sativa nipponbare
ccacgcgtccgctcaagaagtactcgagcaaagaaggagagagcttggcgagctgtaaagatggcccgctgcgtgatggcgtcgtaggacaccaccgtggctactttgcaggggctgaagtccaccgccgtgatgcccgtggcccggcggtccggcaactccagcttgggcaacgtcagcaatggcggcaggatcaggtgcatgcaagtgtggccgattgagggcatgaagaaagtcgagaccttctgctacctgtcaccgatgaccgtggaggacctgctgaagcatatcgagtacctgctacgatacaagtgggtgccctgcctcgagttcaggcaagtgtcggatctcgctaccgtgagaaccacagaacgcgcggtactacgatggcaggtactggaccatgtggaagctgcccatgtttcgaggcactgacgccacccaggtgctcaaggagctcgaggaggccaagaag

SEQ ID NO: 400739 - DNA, 453 bp, Oryza sativa nipponbare
ccacgcgtccgcccacgcgtccgggtggtctgtggtttgacccgctcggctggggcaccggctcgccggagaagatcaaggagctgcgcaccaaggagatcaagaacgggcggctcgccatgctcgccgtcatgggagcttggttccaggcagagtacaccggcaccggccccatcgacaacctcttcgcccatctcgccgaccccggccacgccaccatcttccaggccttcacccccaaatgaggagttcttcaggtgtgggagtgttagcaatggctgccaatggaggaagatgaaaagactggtcgtcgacgcgacttacctctctttttgggatcgagtaggctgtgaatgggtggggtgtattgggatgtaattgtggtggagcactgcatgccttgtgattggtacctgtctatgtgtaccgatgtaaaaacaagttgaactcttt

SEQ ID NO: 400740 - DNA, 477 bp, Oryza sativa nipponbare
ccacgcgtccgcagtgatcctctacaatcatcgactttcagcaaattaagatggctgctgccttctcctccaccgttggagctccggcgtccactccgaccaacttcctggggaagaagctgaagaagcaggtgacatcggcggtgaactaccatggcaagagctccaacatcaacaggttcaaggtgatggccaaggagctggacgagggcaagcagaccgaccaggacaggtggaagggtctcgcctacgacatctccgatgaccagcaggacatcaccagggggaagggtttcgtcgactcccttttccaggctcccacgggtgatggcacccacgaggccgtcctcagctcctacgagtacctcagccagggtctcagaacgtacgacttcgacaacaccatgggaggcttctacatcgcccctgctttcatggacaagctcgtcgtccacatctccaagaacttcatgaccc

SEQ ID NO: 400741 - DNA, 395 bp, Oryza sativa nipponbare
  unsure (1)..(395): unsure at all n locations
ccacgcgtccgcccacgcgtccggagctcgctaaggagaacgtcaagaacgcctcgtcgtcgacgggcaacatcacgttgagcgtcaccaagagcaagccagagaccggcgaggtgattggcgtcttcgagagcgtgcagccgtcggacacagacctcggcgccaaggtgcccaaggatgtcaagatccaaggggtgtggtacgcgcagctcgagtagggaatgaacaaatgttttgtgcgtggccgggttgatatatcgatacatggagagagggaaggaaggctgcaatgtgtgtatctagtaatgcaaactcgatcggggctgtgatggtttaatttttagnctttggttcttcctcttgtctcgtgaactgatgacatatccccggtgatg

SEQ ID NO: 400742 - DNA, 473 bp, Oryza sativa nipponbare
ccacgcgtccgcggacgcgtgggcaagaagtactcgagcaaagaaggagagagcttggtgagctgcagagatggccccctccgtgatggcgtcgtcggccaccaccgtcgctcccttccaggggctcaagtccaccgccggcatgcccgtcgcccgccgctccggcaactccagcttcggcaacgtcagcaatggcggcaggatcaggtgcatgcaggtgtggccgattgagggcatcaagaagttcgagaccctctcctacctgccaccgctcaccgtggaggacctcctgaagcagatcgagtacctgctccgttccaagtgggtgccctgcctcgagttcagcaaggtcggattcgtctaccgtgagaaccacagatcccccggatactacgatggcaggtactggaccatgtggaagctgcccatgttcgggtgcactgacgccacccaggtgctcaaggagctcgagg

SEQ ID NO: 400743 - DNA, 476 bp, Oryza sativa nipponbare
ccacgcgtccgcccacgcgtccggtggacgcgtctcacatgtcggacaccgaggaggaggaggagtttgctgacgagggagtggcaggggtggacggggagctgaaagagttaaggataggagagacctttgaagggttcactgggacatcatcattgtcaacaacaaatgatgatgatgcatccagcacaactacggaggctatgttcatcatctcaccaaatggaaagttcaagaggaagattaagtcgtggatgcgtggtgctcttctggggagcggctcatttgggatggtgtatgagggcatcagtgatgaaggagcgttttttgctgtgaaggaagtatctttgcttgaccaaggaagcaacgcacaacaatctattcttgcacttgaacaggaaattgcactcctaagtcagtttgaacatgaaaatatagtccagtattatggaactgacaaggaagaatcaaaactg

SEQ ID NO: 400744 - DNA, 481 bp, Oryza sativa nipponbare
  unsure (1)..(481): unsure at all n locations
gacccacgcgtccggcagcagcagcagtagctgagcttgaagcagcagagcgaggtagacatggccgccgccaccatggccctctcgtccccggcgctggccggcaaggccgccgcgaaggtgttcggcgaggggcgcatcaccatgcgcaagtcggcggcgaagcccaagcccgccgcgtcggggagcccgtggtacggcgccgaccgcgtgctctacctcggcccgctctccggcgagccgccgagctacctgaccggcgagttccccggcgactacgggtgggacaccgcggggctctccgccgacccggagacgttcgccaagaaccgggagctggaggtgatccactccaggtgggcgatgctcggcgcgctgggctgcgtgttcccggagctcctcgcccgcaacggcgtcaagttcggcgnagcgggtgggttcaaggcggggtcgcagatcttcagcgagggcgggctcgact

SEQ ID NO: 400745 - DNA, 259 bp, Oryza sativa nipponbare
ccacgcgtccgaacccactccgatcgcaaatactctctctcgccgatagcagcagcagcagcaatggccgccctcgccgccgcatccaccgccttcgccgccaagccgcgcctggcgcgcgcgccgtcgtccccggccgcgcggttctccgtgtcgtgctccgcgtcgggcaacaacggcggcgccggcgagatggcgcagtcgctggcggcgtcggccaagacgttctccgcggcgctggcgctgtcctcggagctgc

SEQ ID NO: 400746 - DNA, 436 bp, Oryza sativa nipponbare
ccacgcgtccgcgagaagaagaagtaccccggcggcgccttcgaccccctcggcttctccaaggaccccgtcaagttcgaggagtacaagctcaaggagatcaagaacggtcgattggccatgctggcttttgtgggtttgtgcgtacaacagtcggcgtacccgggcaccggcccactggagaacctggccaggcacctctcggacccgtggcacaacaacatcggcgacttctatatggctgaaaactacgatgcccatgttcttggtattgatctttcaatcaacatggtttcatttgcaatcgaacgtgccattggacgcacgtgttcggttgagtttgaagtagctgattgcaccacaaagacctacgcaccaaatacatttgatgtgatctacagccgtgacaccattcttcacatacatgataaacctg

SEQ ID NO: 400747 - DNA, 434 bp, Oryza sativa nipponbare
ccacgcgtccgcccacgcgtccgggaggacaagctccacccaggtggcccattcgacccgctggggctggcgagcgacccggaccaggcggcgctgctgaaggtgaaggagatcaagaacgggcggctggccatgttctccatgctggggttcttcatccaggcctacgtcaccggcgagggccccgtcgagaacctctccaagcacctcagcgaccccttcggcaacaacctgctcaccgtcatctccggcgccgccgagaggacgcccagcctgtaaacatctcgccgccggcgacgctggctggcctcaagttaattttaatcttacccgggaagaagaagggaggagtttgagaagggtggaagaatgtgttaaatgtacgtgtaaattatcgtcgagttgggagatgaatttgaaaacctgttcattct

SEQ ID NO: 400748 - DNA, 476 bp, Oryza sativa nipponbare
  unsure (1)..(476): unsure at all n locations
ccacgcgtccgcccacgcgtccgcccacgcgtccggggaaccttgcttggggtgtcgacaactcgacactcgagaacctgttcagtgagcagggaaccgtgctcgatgccaaggtcatctacgacagggagagcggcaggtcgaggggttttggttttgtcacctatggctccgctgaagaagtcaacaatgccatatcaaatcttgacggcgttgacctggacggcaggcagatccgagttacagttgcagaatcaaagccaaggcgccaattttgagattttttttttggttatgttgatttagaggttgatgatgtgcttccaagatgttagtttgtagcttctactattgtacaccaatatggcgaaaaggaaaattgatgcggttgatgagagactgaaagtctgaaattgtacacgaagggaagattnttccncaaagatgcaatatgcacagatcctcttgttagaaag

SEQ ID NO: 400749 - DNA, 475 bp, Oryza sativa nipponbare
ccacgcgtccggcgagaggagagcgcgagcagagcaagcaaccaagcagcagcagcgatggccgccgcagccacgacatcctcccacctgctcctgctctcccgccagcaggcggcggcctcgctccaatgcggcctctccttccggaggcagcccggcaggctcgccggtgggtcgtcggccccgagcgtgcggtgcatggcggccgtcgacacggcctcggcgcccgccgcgacggaggctagcaagaagagcagctacgagatcaccacgctgacgacgtggctgctgaagcaggagcaggccgggaccatcgacggcgagatgaccatcgtgctggccagcatctccacggcgtgcaagcagatcgcctcgctggtgcagcgcgcgcccatctccaacctcaccggcgtccagggcgccgtcaacgtgcagggcgaggaccagaaaaaacctcgacgtcgtctccaaacga

SEQ ID NO: 400750 - DNA, 426 bp, Oryza sativa nipponbare
  unsure (1)..(426): unsure at all n locations
ccacgcgtccgcggacgcgtgggtcgagctgaaaaaaaaagagaggccacgaagagagctcagctgctgcctctagcttacttggtgataaggaggaggaggaggaggagggcaccgacatggccgcagccacggcgtacaccgtggcgctcctcggcgccaccggcgcgcgcgtccccgccgctccacgctccgccgcgcttctgccgcgccgcggcggcgtgctccaaccgctgcgcctccaggacgcgccgcgactgtccctgctccgcgtcagggccgcctccgacgacacctncacctcggccagcggcgacgagctcgtcgccgacctcaaggcaaagtgggaggcgatcgaggacaagccgacgttcctcctctacagcggcggcgccgtcgtcgccctctggctcaccaccgtccgtc

SEQ ID NO: 400751 - DNA, 402 bp, Oryza sativa nipponbare
  unsure (1)..(402): unsure at all n locations
ccacgcgtccgcggacgcgtgggcggcggcgagccacgcgcgcgacaagctcaaggagacctccgacccgctcgaggcctactgcaaggacaacccggagaccgacgagtgccgcacctacgacaactgattcttaccattatatgtttgctaatctctctgtaattaattataagttactgggttgaaaagattatttgtcgtagaagacagaggggagtttggtggaatggtggtatttacggatagttcaagggggaaatgggaaaaaaaaggttttttacacttgtttgtctggatgaatttgtatggaacttttctgcttgataattttcgcatgtgttagtatttgtatatgatgatataagtgggaaataaatcatcaaattttccagcnnnnna

SEQ ID NO: 400752 - DNA, 478 bp, Oryza sativa nipponbare
  unsure (1)..(478): unsure at all n locations
ccacgcgtccggtggaatcaagaagagggaacagtggattgacggcttgtgaggttctcctgttccaccatgaggacatgggtattccctatgagattgcaaagattggcattcggcagggaatgtgggggtgtgtaaagagaatcgaacctggacttcgggcctatcagaaagcgagagctgctggggagccattgtctcagagtgccttgatggcgcatatcaataccaaggtcggtgacaattttgttcgtggattggaatccaacgacgatcagtcagatattgtggaagcagaagagaaacccgcgaaaaaccgagtagcaaggttccttgtgctcggtggagctgttgctctggcttgcactcttgatcaaaggctgttgaccaaggctctcatncttcgtgttgcacggaaatttgtagggcagaggaacacattgtagcattacctgatctctgtcactaatcctctgag

SEQ ID NO: 400753 - DNA, 484 bp, Oryza sativa nipponbare
ccacgcgtccggtcataccattcggttgtgtaggagaagatgacatgttagagatagttctggattacaatgaactaaagaacatcccttatatcagagaaacaatagagtcgttcaaccaagattgtccaggagtaaggagtactgtaaaaggagaggaaggaaatcaggtcttacacttgcctgctgttctacctaaattaccaggtcggctatactatctatttggaaaaccaattgaaatgaaaggaatggacggtgtacagagggatagggagagtgcaaaccaattatatttggacatcaagacagaggtggagaatataatgtcttatctgaagaggaagagagagcaagatccttaccgaagcatcacagcgcgcacgttttatcaggcaacatggggagttactgctcaaatccctactttcgaaccatgaaaattaggttcaaatgtattttgtgggaatgagattaatttatg

SEQ ID NO: 400754 - DNA, 315 bp, Oryza sativa nipponbare
  unsure (1)..(315): unsure at all n locations
agcgccnntgcgagaactactgcaagttcggcctgctctgcggcgcagacggcctcccanacctgatgttcagcggcgaccagcggcagctggggcgagttcatcaccccgggcttgctcttcctctacatcgtcggctggancagctgncacgggagcggctacctcttcgccatcagcgaggagaagaagccggccatgagggagatcatcatctacgtcgggctcgccgtcaagctacttccgagggggttcatccggcccggtgccgcctaccgtgagcncatcaccggcaagctcgtcgtcaacgacgct

SEQ ID NO: 400755 - DNA, 434 bp, Oryza sativa nipponbare
  unsure (1)..(434): unsure at all n locations
ccacgcgtccggaagaagaggagagagaaggggaggaggaagaaatggctgccgtccaagcagcaatctccacctgctgctcttcgtcttgcctgtcccggccgccaccgccgttcgcgaggaggcggcgcttcaaggtcacggccatggctccccagaagaaggtgaacaggtacgacgagaagtggtcgaagcagtggttcggggcggggatattcgcggaggggagcgaggaggtggaggtggacgtgttcaagaagctggagaggcggaaggtgctgagcacggtggagaaggccgggctgctgtccagggcggaggagctcggcgtcacgctctcctcgctcgaggagctcggcctcctctccaaggccgaggacctcggcctcctcagccctgtcgaggccgncgncggcgncttccccgacgccctc

SEQ ID NO: 400756 - DNA, 480 bp, Oryza sativa nipponbare
ccacgcgtccggctactgctataaggagcgcgccgtgcaccgcctctcacaatgtcgaccgccgccgccgccgccgctgcccagagctggtgcttcgccactgtcaccccgcgctcccgcgccacagtcgtcgccagcctcgcctccccatcaccgtcctcctcctcctcctcctccaacagcagcaacctcccggcccccttccgcccccgcctcatccgcaacacccccgtcttcgccgcccccgtcgcccccgccgcgatggacgccgccgtcgaccgcctcaaggatgggttcgccaagttcaagaccgagttctatgacaagaagccggagctcttcgagccgctcaaggccggccaggcacccaagtacatggtgttctcgtgcgccgactctcgcgtgtgcccgtcggtgaccatgggcctggagcccggcgaggccttcaccgtccgcaacatcgccaacatggtcccagct

SEQ ID NO: 400757 - DNA, 415 bp, Oryza sativa nipponbare
  unsure (1)..(415): unsure at all n locations
ccacgcgtccgcgtacccttgtgactacacccgcttcgcttcctcccctctctaagccggggaagctaagccatggcgtccgtcaccgcccgcaccccggtcgcagccctccgctcgtcggcgtcgctcaagtctaccttcctagggcaatcctncacccgcctcgcccgcgcaccgactacgaggcgtaatgttcgggcggaggccaagggagagtggctccccggcctcccttctcccacctacctcaacggcagcttgccaggcgataacgggttcgacccgttgggtctggcggaggacccggagaaactgcggtggttcgtgcaggcggagctggtgaacgggcggtgggcgatgcctggggtggccgggatgctgctgcctgaggtgctgacgaagatcgggttgatcg

SEQ ID NO: 400758 - DNA, 475 bp, Oryza sativa nipponbare
ccacgcgtccgagaccctatcgtacctgccaccactcaccgtggaggatcttttgaagcagatcgagtacctgcttcgatccaagtgggtgccttgcctcgagttcagcaaggttggattcgtctaccgtgagaaccacaggtctcccgggtactacgatggcaggtattggaccatgtggaagctgcccatgttcggctgcaccgatgccacccaggtgctcaaggagctcgaggaggccaagaaggcctaccccgatgcctttgtccgtatcatcggcttcgacaacgtcaggcaggtgcagttgattagcttcatcgcctacaagcccccaggttgcgaggagtctggtggcaactaagctaagatcaagcatcgcgctggtggattgctgcctataataatagtatgcagctttgttttgggctatgttgatgatatatcaatatataatatgctatatatttttatttta

SEQ ID NO: 400759 - DNA, 482 bp, Oryza sativa nipponbare
ccacgcgtccgcccacgcgtccgcggacgcgtgggcgcgccccagagcatctggtatggacctgaccgtcccaagtacctgggcccgtgctcggagcagacgccatcgtacctgaccggagagttcccgggagactacgggtgggacacggcggggctatcggccgacccggagacgttcgcgaggaacagggagctggaggtgatccactcgcggtgggcgatgctgggggcgctgggctgcgtcttcccggagatcctgtccaagaacggggtgaagttcggggaggcggtgtggttcaaggccggcgcgcagatcttctccgagggggggctcgactacctggggaaccccaacctggtgcacgcgcagagcatcctcgccatctgggcggtccaggtggtgctcatgggattcgtcgagggctaccgcgtcggcggcggcccgctcgtggagggcctcgacaaggtgtacccaggcgg

SEQ ID NO: 400760 - DNA, 480 bp, Oryza sativa nipponbare
ccacgcgtccgcggacgcgtgggcggacgcgtgggagcagcagcagtagctgagcttgaagcagcagagcgaggtagacatggccgccgccaccatggccctctcgtccccggcgctggccggcaaggccgccgcgaaggtgttcggcgaggggcgcatcaccatgcgcaagtcggcggcgaagcccaagcccgccgcgtcggggagcccgtggtacggcgccgaccgcgtgctctacctcggcccgctctccggcgagccgccgagctacctgaccggcgagttccccggcgactacgggtgggacaccgcggggctctccgccgacccggagacgttcgccaagaaccgggagctggaggtgatccactccaggtgggcgatgctcggcgcgctgggctgcgtgttcccggagctcctcgcccgcaacggcgtcaagttcggcgaggcggtgggttcaagggcgggtccagatcttca

SEQ ID NO: 400761 - DNA, 478 bp, Oryza sativa nipponbare
  unsure (1)..(478): unsure at all n locations
ccacgcgtccgctgatattgtgaggctggatgggcagctgcgacgggagcaggagaaggtggcaagcttagtgcgggagaaggagaaagtggcaaaacaggaggctttgcanaaacgccaactacaagttatggagaagattgcaggagtgctggagcaggtccgagtggatgatactgcaggtattctctctctggaagggttgcttaagacctttcaggaattgaaggcatgctacgtggaggaattcaagatgtgcagtgttgcatggattgcctgccggtttgctcatccgctactaatccgagtcttccaggggtggcaaccactgcaaaatccgttgtttggcttggagatcatgtcatcatggaaagatttgctgcagggggatcaagcatatgacttctcaggtgatgtggaatcgatggctccatatgcacaattggtttgcgaggtcatcctacccgctgtgaggata

SEQ ID NO: 400762 - DNA, 489 bp, Oryza sativa nipponbare
  unsure (1)..(489): unsure at all n locations
ccacgcgtccgatcggcgatctcctccacctccactcctctccgacctccctccgccgaccagaagccatggccgcgccgcgccgccctcgcctcctccccctcctcctcctcctcgccctctccctctccctcgccgccgcctccgccttccagtccgacgagctgctcctccacgacgacgacgagttcgagggcgcgggcgcccgccccacgccagggccgcccgcgcccgcggcggcggcggtctcctcctcccgccggcggcccggggacagcagcgcggcggcggcggagtccagcgccgtgcagttctcgctcgagcacgacctcggcgccgggttcgtccccgcggggtccttctccgcccgcctcaagtcctccgcgcacggctcccagactctcactaagcttcggttcacaaggaacgagttgactggngatgaaaaggaggcatttaaaaaattgctggatgaagatggtttttatt

SEQ ID NO: 400763 - DNA, 478 bp, Oryza sativa nipponbare
ccacgcgtccggctcgacggctcgagcttaaaaccctagagccgctcctcctcctcctcctcgcctaccccgaaacccaaatcccccccaaggcggacgcgcccgcaaagggtcgagcgcgctcatggctcgcgtgtacgtggggaacctggatccgcgcgtgacggcgcgggagatcgaggacgagttccgcgtgtttggggttctgaggagtgtatgggttgctagaaaaccaccaggttttgcctttattgactttgatgaccgcagggatgcagaagatgcaattcgtgatttagatggcaagaatggatggagggttgagctgtcaaccaaagctggtagtggtcgtggccgagatcgttccggtggttctgacatgaagtgctatgaatgtggcgaacctggtcattttgcacgtgaatgccgcttacggattggttctggaggccttggcagtggaagacgccgcagccgc

SEQ ID NO: 400764 - DNA, 469 bp, Oryza sativa nipponbare
ccacgcgtccgcgctggtcaattttctctctcacatcaacatcaacctaataccaatgtcatcagggccagtccctggggtttccagtgtagaacagtccattgtggcccgtgatccagtggcgatggttttgtatgctgtggtggtcactgtatgtgcacctatatgggaagagattgtgttccgaggtttcctccttccatctctaacgcgttacatgccacttccatggtcaatcctggtaagcgctgcagcttttgcactggcacacttcaatgcacagagggttatgcctttggtttttcttggtgttgtgatgggaggggtctttgcaagatcacgcaacttgttggcgtcaatggtgttgcacagcctatgggaacggtttgtgttcttggatttgatgaagtgagctattctggtgagactgcaacttcgggcacctgagacaagttctactaagactatg

SEQ ID NO: 400765 - DNA, 475 bp, Oryza sativa nipponbare
ccacgcgtccgcccacgcgtccgcccacgcgtccggttcgcctgttcgtcctcctctcttcctccacttgatctcggtggaccttttttttttgctgcgagaaacgtagatccagcttgtttcgatgtcgaaatgcacagcaaatattgggcatgaaacctacaggatcttcatcgtcgataacggaggcaagaactacctcgccgtggacacgtccggcaacgtcgtccttgtggaagatccggagagaacgcaaccctccagcaactcctatggccgacagctgatatggtacaaggtcgtcgacgaggccaccggcggcggcggcagcacaactaaccagaacttcgtcctgaaaaacaacagcaagcccctcgtcgtcaagagtagtcgtggcgacgggcggcagcggctggatgttgttcttggccagggaagagatgttggagaacgctggacgttggaggagatacac

SEQ ID NO: 400766 - DNA, 483 bp, Oryza sativa nipponbare
ccacgcgtccgcaccgtcgctcccttccaggggctcaagtccaccgccggcatgcccgtcgcccgccgctccggcaactccagcttcggcaacgtcagcaatggcggcaggatcaggtgcatgcaggtgtggccgattgagggcatcaagaagttcgagaccctctcctacctgccaccgctcaccgtggaggacctcctgaagcagatcgagtacctgctccgttccaagtgggtgccctgcctcgagttcagcaaggtcggattcgtctaccgtgagaaccacagatcccccggatactacgatggcaggtactggaccatgtggaagctgcccatgttcgggtgcactgacgccacccaggtgctcaaggagctcgaggaggccaagaaggcgtaccctgatgcattcgtccgtatcatcggcttcgacaacgtcaggcaggtgcagctcatcagcttcatcgcctacaagcccccgggc

SEQ ID NO: 400767 - DNA, 485 bp, Oryza sativa nipponbare
ccacgcgtccgtgagagtgtggctgaaaggggagaaggctggggaggcagagatcttcgtggacaacctgccggggaatgcagacaacattcggctgggttcagatggtcacttctggattgcccttctccaggtgaggtctccatggctggacctgatctctcgctggagcttgacgaggagggtcatcgcgtcgttcccggcgctcgtcgagaggaccaaggcgacgctcaagggagcagtggtggctcaggtgtcgttgaacggcgagatcgtgagggttcttggtgactctgaagggaatgtgatcaacatggtcacttcggtgacagagttcaacggagatctcttcctcggcagccttgcgaccaacttcataggaaaattatccctggctaaggttacacgggagcaggaggatgcagttccttcgtagacagttacagtttgaagtgttgatgtgtgatcatcagttggtatcgtaa

SEQ ID NO: 400768 - DNA, 369 bp, Oryza sativa nipponbare
ccacgcgtccggcagcacaaggagaggaccaatcattgacttatctgatgcaatgttcgaccgcacgttactggggacgaggctgtcacacccctcaccagagagcgggaggatcgagacgagcctcgtgttccgcggcgataagaaggcgccagcaaagaaagctgcaaggccgtcggcgccgacaacagacaggccgctgtggttccccgacccgctggtgctgcactacctggacgggccgctcgtgaagtaatacagcatccgaacactcggcctcggcgagccacctaccttacctagagcacaagctagactagctataccagagcctgtcgagtaacagctcattatagatcatttaaaccc

SEQ ID NO: 400769 - DNA, 365 bp, Oryza sativa nipponbare
ccacgcgtccgcccacgcgtccgcccacgcgtccgcagccaatgaaggcgattttgcgacataacaggttatcaactacagaatactgatcgatactagtcctgctgaccaccctgaccaatttgatcataggcgacagttgaaccataatttcactgtctatacatgtaacattatcttttggcctcttagggctataattatagccgattgctgtatcggtgcggtgacctggtaataatgtgtagaataaagtgccaaagagaaatgtatactagtgtacatgattgctggatgctgttgatagcaagcaacctgaaagagagaaatgtacatgaaaacggctcgatcttgtcgattcgttc

SEQ ID NO: 400770 - DNA, 481 bp, Oryza sativa nipponbare
ccacgcgtccgctcgagcaaagaaggagagagcttggtgagctgcagagatggccccctccgtgatggcgtcgtcggccaccaccgtcgctcccttccaggggctcaagtccaccgccggcatgcccgtcgcccgccgctccggcaactccagcttcggcaacgtcagcaatggcggcaggatcaggtgcatgcaggtgtggccgattgagggcatcaagaagttcgagaccctctcctacctgccaccgctcaccgtggaggacctcctgaagcagatcgagtacctgctccgttccaagtgggtgccctgcctcgagttcagcaaggtcggattcgtctaccgtgagaaccacagatcccccggatactacgatggcaggtactggaccatgtggaagctgcccatgttcgggtgcactgacgccacccaggtgctcaaggagctcgaggaggccaagaaggcgtaccctgatgcattc

SEQ ID NO: 400771 - DNA, 437 bp, Oryza sativa nipponbare
  unsure (1)..(437): unsure at all n locations
gagagcttggtgagctgcaaagagtgggacggcggcatgagtggagaggacggccaccaccgtctctcccttccagagggctcaagtgcaccgacagcatgcccgtcgcccgncgntccnncgactccagcttcngcatcgtcagcaatggcggcaggatcaggtgcatgcannnnanatcagattgagggcatcaagaattgtgagaccctctcctacctgccaccgctcaccgtggaggacctcctgaagcanatcaggtaccgtgtccagtccaagtggagtgccctgcctcgagttcagacaaggtcggattcgtctaccgtgagaaccacagatcccccggatactacgatggcaggtactggaccatgtagaagctgtccatgttcgggtgcacnnacgccacccaagtgctcaaggagctcgaggaggcc

SEQ ID NO: 400772 - DNA, 461 bp, Oryza sativa nipponbare
ccacgcgtccgccgacgtcgggtaccctggtggtctgtggtttgacccgctcggctggggcaccggctcgccggagaagatcaaggagctgcgcaccaaggagatcaagaacgggcggctcgccatgctcgccgtcatgggagcttggttccaggcagagtacaccggcaccggccccatcgacaacctcttcgcccatctcgccgaccccggccacgccaccatcttccaggccttcacccccaaatgaggagttcttcaggtgttggagtgttagcaatggctgccaatggaggaagatgaaaagactgttcggcgacgcgacttacctcttttttttgggatcggagtaggctgtgaatggtggtggtgtattgggatgtaaatggggatggagcactgcatgccctgttgattgtgtacctgtactatgatgtaaccgatgtaaaaaacaagttgat

SEQ ID NO: 400773 - DNA, 475 bp, Oryza sativa nipponbare
  unsure (1)..(475): unsure at all n locations
ccacgcgtccgcatagtagctcttgctggtctcaaagatacaattactggtgaaactcttagtgacccagataagcctgttgtgcttgaacgcatggaatttcctgatcctgtcattaaagttgctattgaaccaaagaccaaagctgatgctgacaaaatggcaaccggactaatcaagcttgctcaagaagacccatcattccacttctctagagatgaggagaccaaccagactgttattgaaggaatgggagaattgcaccttgacatcattgttgacagattaaagagagaattcagggttgaagcaaatgttggagctccgcaagtcaactaccgtgaaagtatttccaagatttcagaagtacaatacgttcacaagaaacagtctggtggatctgggcaatttgcggacattattgtgcgattcgagcctttggnaggctgaagtgggtatgaattcaagagtgaaa

SEQ ID NO: 400774 - DNA, 478 bp, Oryza sativa nipponbare
ccacgcgtccggcattcgctagccacgccgtccgctcaggccgaggcgcatcgcgcagggggagaaggggaggagaagatgtcgagcgacggagggccggtgcttggcggcgtcgagccggtggggaacgagaacgacctccacctcgtcgacctcgcccgcttcgccgtcaccgagcacaacaagaaggccaattctctgctggagttcgagaagcttgtgagtgtgaagcagcaagttgtcgctggcactttgtactatttcacaattgaggtgaaggaaggggatgccaagaagctctatgaagctaaggtctgggagaaaccatggatggacttcaaggagctccaggagttcaagcctgtcgatgccagtgcaaatgcctaaggtctagacatgtttggtttagatacccgccaaacaaaattttcacctgttccatgcattaccatgtataatatatatatatatatatata

SEQ ID NO: 400775 - DNA, 466 bp, Oryza sativa nipponbare
ccacgcgtccgcccacgcgtccgcccacgcgtccgcggacgcgtgggggccgccggtgggctgacatcatcaagcccggctgcgtcaacaccgaccccatcttccccaacaacaagctcaccggcaccgacgtcgggtaccctggtggtctgtggtttgacccgctcggctggggcaccggctcgccggagaagatcaaggagctgcgcaccaaggagatcaagaacgggcggctcgccatgctcgccgtcatgggagcttggttccaggcagagtacaccggcaccggccccatcgacaacctcttcgcccatctcgccgaccccggccacgccaccatcttccaggccttcacccccaaatgaggagttcttcaggtgttggagtgttagcaatggctgccaatggaggaagatgaaaagactgttcgtcgacgcgacttacctctcttttttgggatcggagt

SEQ ID NO: 400776 - DNA, 482 bp, Oryza sativa nipponbare
ccacgcgtccgccacgcgtccggcacaaactgcacaatcaaatcaagcgttggagagaggaagaaggtaagctaagcaaagcaagcaaagctagagagaaagtgacagcagcaatggcggggggcgagcttgtgctgctggacttctgggcgagcccgttcgggcagcggtgccgcatcgcgctggcggagaagaagctcccctacgactactccgagcaggagctcctcggcgccaagagcgacctcctcctccgctccaaccccatccacgccaaggtccccgtcctcctccacggcgacggagacggccgcgccgtctgcgagtccctcgccatcctcgagtacctcgacgacgccttcccggacgccacccctcgcctcctcccctccgccgccgacgacccgtacgcgcgcgcccgggccaggttctgggccgactacgtcgacaagaaggtgtacccggtggggacgccgctgtgg

SEQ ID NO: 400777 - DNA, 482 bp, Oryza sativa nipponbare
ccacgcgtccggttgatggatggcgctcccgtaagaggtgagtctattccggtaagactcttcttgacaccatatgagttgaccccgacttaccgcaacataaacaacaagttcaatgtcaagtactacctgaacctggttcttgttgacgaggaagaccggaggtacttcaagcagcaagagatcacaatgtaccgccttcaagaaactccgcaatcttcataaactcctgttgccttgacttggtaacgaccagaaaaacttgggtctgtctggcataggagagcaccggagtagcaacttagcatgatgcgccttcctgtatataactctccagaggagcgatgccctttgtgatgtaccgtgtactgtttttgcctatgctcttttcccccccattttctccttcattctgatcaggaaacaaaccatgacaacgctggcattgttgcccttttcgccttgttcatttgagctttctt

SEQ ID NO: 400778 - DNA, 473 bp, Oryza sativa nipponbare
ccacgcgtccgcccaccagcagcagcagcagtagctgagctggaagcagcatagcgaggtagacatggccgccgccaccatggccctctcgtccccggcgctggccggcaaggccgccgcgaaggtggtcggcgaggggcgcatcaccatgcgcaagtcggcggcgaagcccaagcccgccgcgtcggggagcccgtggtacggcgccgaccgcgtgctctacctcggcccgctctccggcgagccgccgagctacctgaccggcgagttccccggcgactacgggtgggacaccgcggggctctccgccgacccggagacgttcgccaagaaccgggagctggaggtgatccactccaggtgggcgatgctcggcgcgctgggctgcgtgttcccggagctcctcgcccgcaacggcgtcaagttcggcgaggcggtgtggtcaaggcggcgtccagatcttcagcgagggc

SEQ ID NO: 400779 - DNA, 473 bp, Oryza sativa nipponbare
ccacgcgtccgagcagatggtcgattgcgaccatgagtgtgattcatcagaacctgattcatgtgatgctggatgcaatggtggattgatgactaacgccttcagctatcttttgaaatccggtggccttgagagtgagaaggattacccctacactgggagggatggcacctgcaaatttgacaagtcgaagattgttacttcagttcagaacttcagtgttgtctctgtcgatgaggatcagattgctgccaaccttgtcaaacatgggccacttgcaattggcatcaatgctgcgtacatgcaaacatacattggtggtgtttcgtgcccgtacatctgtggcaggcaccttgatcacggtgttcttctcgttggctacggcgcatctggttttgctccaatccgcctaaaggataaggcctactggatcatcaagaactcctggggcgagaactgtggagagcatgggt

SEQ ID NO: 400780 - DNA, 486 bp, Oryza sativa nipponbare
ccacgcgtccgccagaggctcattcatcgaaaattatagagacaggaaaagaaaaatgaatttctatcaaatcaactgcaagatgttctccatcttgcaaattcctactttgtttgaagtatattactttgcttatctatatctatagattacctaaatctaaatcaatctacgttctgaaatagagttctttatttttatagaattactcctcattaggctgcatacattagtcatcctatcttaattaggctctaattcgtagtattttcgtttttattcctttttctagagattctagagaaaatgagacaaagtgaagcgagagagttttgtttctataagaattatgtctccaccatacctaaatagaaaggaaatcaaaaagaaagggggtcgggattccattggatgaatctttaaagaagacgtggcaaagaggaaacaaaggctaaactaagccctttggtttgagaaaaaccgatc

SEQ ID NO: 400781 - DNA, 492 bp, Oryza sativa nipponbare
  unsure (1)..(492): unsure at all n locations
ccacgcgtccgcccacgcgtccgcggacgcgtgggcgaaactcagctgcaaggagaaggagaaggtaggctccagccatggcttcccagctctccgccgccacatccgtgccgcagttccatggcctccggacctactcctctcctaggtccatggtgacgctgccatcgttgaggatgagcaagaagaggtcccagggcatccggtgcgactacatcggctcagccaccaacgttatcatggtgacgacgacgacgctgatgctngttcgcgggaggttcgggctggcgccgtcggcgaacaggaagtcgacggcggggctgaagctggaggcgcgcgactccggcctgcagaccggcgaccccgccgggttcacgctcgccgacacgctggcctgcgggcccgtcggccacatcaatgggcgtcggcgcgtcctcggcctcaagacaatcggcgtctggaccagatcatcggctaatcaaattcattaag

SEQ ID NO: 400782 - DNA, 479 bp, Oryza sativa nipponbare
ccacgcgtccgggtaagtgaggaccgaggagacaagatggtgcagaaggagctttcccaggcatggtggttcgacagccacaaccttgcaaggacatctccatggctaaccaacacgctttcagaactagatgacaagaccaagcaaatgctcaagatgatcgaccaggacgccgactcgtttgcgcagcgagccgagatgtattacaagaagcgccccgtcctggtggacatgctcggcgacctgtaccgaacacaccgctcgctggcagagcagcttgatctcctcaagaacggcaatggcacacgccacaccgtgttcgggccatcctcctgcacccagagctggtctcatcaggcagcagcagcagcaatgggtggcaagggaacaacagggagcaggtcttcgatctcactctgctcagacaactacgactctgaatctgaagtcgatgaccctgaacaagaaaacatggagga

SEQ ID NO: 400783 - DNA, 479 bp, Oryza sativa nipponbare
ccacgcgtccgcaagaaagcataagcaacacaagggattaactcatcactcacttagctaattaaatcttcgaccatgtcggacaagtgcggcaactgcgactgtgctgacaagagccagtgcgtgaagaaaggtaccagctatggcgtcgtcatagttgaagccgagaagagccacttcgaggaggtcgccgccggcgaggagaacggcggctgcaagtgcggcaccagctgctcctgcaccgactgcaagtgcggcaagtgaagtcacgaagcaaccgaacactcgccgccggcgagtcacctaccttaattagtccacaataaaaaccacccatatgagtgtggtttgtgtgtgtgctgattattgctgaattaaacccgtgtgttatcgattaattaagcagctggtcgcttcggcgactatgcgtgtatcaacgtatgaatttgtgtgatgtgatgtacccgtgctattctcag

SEQ ID NO: 400784 - DNA, 477 bp, Oryza sativa nipponbare
ccacgcgtccggctaattaagcaaaagaagaagaagaagaaagaagaagaagaagatgcagaccgctgctagcagtgtcgttggattgtcggccgtgttgcccgctgctgtgaaggggcgcagcctgcagattcaggctcctcgccgtgttgcgttgcgcgttcgtgcggcggcggcggcggtggcagtggaggctgcggaggtggactacagctctaacatctcggtgtttccgatggaggcgtgcgacctcatcggcggcgaggcgtgcaacgtgcagatgtacccagaggccaagctctcatcatcggctgctgttgctgtttctcgtgcggcggcggaggaagtcgacagggactacctatcctacgacgagcccaccacggtgttccccgaggaggcgtgcgacgatctgggcggagagttctgcaaggccacctgatcccattcccatccatggagaattggagtcttcta

SEQ ID NO: 400785 - DNA, 491 bp, Oryza sativa nipponbare
ccacgcgtccgcccacgcgtccgatccatccgttcctccgatcagttccaacttccaacctccgatcccaacgagaaaaccaatactgacacctctgcctcgcaacgcggcgcgcggccgtgctgcgatcgatcgaccggccggagtccggcatgcaaatgggagctgcctggcgcgggcggcggcggcggtgatgggcgcggcgagctctaggctggagaaggcgctgggcgagcagttccccgagggcgagcgctacttcggcctcgagaacttcggcaacacctgctactgcaacagcgtcctgcaggcactttacttttgtgttcctttccgtgagcaattactggagtactatgcaaataataaaagcaccggagatgtcgaagacaatatgttaacgtgcttagctgacctgttctctcagatcagcaaccagaagaagaaaacaggtgttatcgctcctaagcgtttcatacaacgactgaaga

SEQ ID NO: 400786 - DNA, 487 bp, Oryza sativa nipponbare
  unsure (1)..(487): unsure at all n locations
ccacgcgtccggaaagcataagcaacacaagggattaactcatcactcacttagctaattaaatcttggaccatgtcggacaagtgcggcaactgcgactgtgctgacaagagccagtgcgtgaagaaaggtaccagctatggcgtcgtcatagttgaagccgagaagagccacttcgaggaggtcgccgccggcgaggagaacggcggctgcaagtgcggcaccagctgctcctgcaccgactgcaagtgcggcaagtgaagtcacgaagcaaccgaacactcgccgccggcgagtcacctaccttaattagtccacaataaaaaccacccatatgagtgtggtttgtgtgtgtgctgattattgctgaattaaacccgtgtgttatcgattaattaagcagctggtcgcttcggcgactatgcgtgtatcaacgtatngaattgtgtgatgtgatgtacccgtgctattctcagtgaaattaatc

SEQ ID NO: 400787 - DNA, 485 bp, Oryza sativa nipponbare
  unsure (1)..(485): unsure at all n locations
ggcccacgcgtccgcgtcgaagctcagctcctcctcctctcgcatggcagccatggccaccaccgcgtatcagcctactcaagagctccttcgctggcgcgcgcctccccgccgccgccctgaaccccaccgtctccgtcgcgccgcgcaccggcggcgccatctgcaactccatctcgtcgtcgtcgtccactcccccctacgacctcaacgccatcaggttcagccccatcaaggagtccatcgtgtctcgcgagatgacccggcggtacatgaccgacatgatcacctacgccgacaccgacttcgtcgtcgtcggcgccggctccgcggggctctcctgcgcgtacgagctctccaaggacccctccgtcagcgtcgccgtcatcgagcagtcggtgtcccccggcggcggcgcgtggctcggcgggcagctgntctccgccaaatgggtgcgcaagccggcgcacctgttcctcgacgag

SEQ ID NO: 400788 - DNA, 472 bp, Oryza sativa nipponbare
  unsure (1)..(472): unsure at all n locations
ccacgcgtccgacctgtattgcttgcgtcaaggaggaagctagttgcattatcatcgttttgcttttgctttacattcttcaaggtacttctcagcacttgctttgggtgatccatctgttaaaattgatgatgtcactccaaagatttttccatctggtccactgtttccaactgagaaacggatcgcagagctttttgaaacaaatacttactctggtgtcaacatttttgatgcaactgtgcgccctcagctcaatgtaactggtgttgttgagattcccgaaggaaatggntctggcgtagtttgggatgattccggccatattgttacaaactaccatgtggttggcaatgccctttcaaaaaaaccaaagcctggcgaagttgttgcgcgtgtcaacattcttgctgctgatgggatacagaaaaattttgaaggcaaattggttggtgcttgccgttctaaagat

SEQ ID NO: 400789 - DNA, 495 bp, Oryza sativa nipponbare
  unsure (1)..(495): unsure at all n locations
ccacgcgtccgtcctactccagagacttcgtggcaccacttcagtcaggaaagagcttgatgacttagttgctgctagcaacctctcgcaggacagttcagtatccgttcaggaatatattcaagaggaaatacaggccacagtttgtcatagcactcctggtccctttcttcaaccagcttactggaatcaatgtgatgaacttctatgcaccggttatgttcaagacgattggtctgaaggagagcgcgtctctcctatcctcagtggtcaatcgactctgcgcaactttcgccaatatcatggcgatgatcgttgtcgacaggtttgggcgtagaaagctcttccttgtaggtggtattcagatgatcctttcccagcttgctgtgggtgcaatcctggctgcagagttcaaggactatggatccatggacagagagtatgcttaccttgtgtagatcaccatgtgtgtgtttgttgctggctntgcatggt

SEQ ID NO: 400790 - DNA, 477 bp, Oryza sativa nipponbare
ccacgcgtccgcggacgcgtgggggagaagaagccagcccccgcggggttcgtgccgccgcagctggaccccaacacgccgtccccgatcttcggcgggagcacggggggactcctccggaaggcgcaggtggaggagttctacgtcatcacatggacgtcgcccaaggagcaggtgttcgagatgcccacgggcggcgccgccatcatgcgcgagggccccaacctgctgaagctggccaggaaggagcagtgcctggccctgggcaccaggctccgctccaagtacaagatcaactaccagttctaccgcgtcttccccaatggcgaggtgcagtacctccaccccaaggacggcgtctacccggagaaggtcaacgccggcaggcagggcgtcggccagaacttccgcagcatcggcaagaacgtcagccccaatcgaggtcaagttcaccggcaagaacgtcttcgacatcta

SEQ ID NO: 400791 - DNA, 459 bp, Oryza sativa nipponbare
ccacgcgtccgcggacgcgtgggtttcaatggtgttgacactgatgggactgtcacaaagggaggatattctactcacatagtagtacatgagaggtattgctttaaaatacctgatggctaccctttggaaaaggcagcacctttactttgtgctggcatcactgtatatagtccgatgatgcggcataatatgaaccagccagggaagtcactcggcgtcattggacttggtggcttgggtcacatggcagtaaaatttgggaaagcctttggactgaaagtcacagttattagtactagtgaatcaaagagaaaagaagctattgaccttcttggtgcagataatttcgtggtgtcatcggatgaaaatcagatggagaccttgaaaagctctctgaacttcattattgacacagcctccggcgatcacccattcgatccttatctcacgcttctg

SEQ ID NO: 400792 - DNA, 477 bp, Oryza sativa nipponbare
ccacgcgtccgcccacgcgtccgcccacgcgtccgcgctcatcgccatctctctcagctctcacagctcactgcatcaatggccgcggccaccatggcgctctcctccccggtgatggcccgcgcggcgccgtcgacctcctccgcgctcttcggcgaggcgcggatcaccatgcgcaagaccgccgcgaagcccaagccggcggcgtcgtcggggagcccgtggtacggcgccgaccgcgtcctctacctcggcccgctctccggcgagccgccgagctacctcaccggcgagttcccgggcgactacgggtgggacaccgcggggctctccgccgacccggagacgttcgccaagaaccgggagctggaggtgatccactcccggtgggcgatgctgggcgcgctcggctgcgtcttcccggagctcctcgcccggaacggcgtcaagttcggctgaggccggtggttcaaggcg

SEQ ID NO: 400793 - DNA, 469 bp, Oryza sativa nipponbare
ccacgcgtccgcggacgcgtgggggcccttttgatgttgatgtttttgactctactatagattacataaagttaatgaagacaatctttgactttgagtcaattaaaaagcttctggcatctccgaagtttacattctgttatgatgctctccatggtgttgctgggacttacgcaacacgcatctttgtggaagagcttggtgctgctgaaagctcattgttgaactgtgttccgaaggaagactttggagggggccatccagatcctaacctcacctatgcaaaagaacttgttgaccggatgggccttggaaaatcctcaaatgctgaacccccagaatttggtgctgcagctgatggtgatgctgatcgcaacatgattctgggtaaaagattcttcgtaacaccttcaggatcggttgccattattggcagccaatgttgtcagtcgattccttacttttcttc

SEQ ID NO: 400794 - DNA, 476 bp, Oryza sativa nipponbare
ccacgcgtccggccgccgcatcgccctcgttagaacgatggccgcgtcggcgctgcaccagaccaccagcttcctcggcaccgcccctcgccgggatgagctcgtccgccgcgtcggcgactccggtggccgcatcaccatgcgccgcaccgtcaagagcgcgccccagagcatctggtatggacctgaccgtcccaagtacctgggcccgttctcggagcagacgccatcgtacctgaccggagagttcccgggagactacgggtgggacacggcggggctatcggccgacccggagacgttcgcgaggaacagggagctggaggtgatccactcgcggtgggcgatgctgggggcgctgggctgcgtcttcccggagatcctgtccaagaacggggggaagttcggggaggcggggtgttcaaggccggcgcgcagatcttctccgagggggggctcgactacctggggaaccc

SEQ ID NO: 400795 - DNA, 476 bp, Oryza sativa nipponbare
ccacgcgtccgcctttctgaacacagcaccaccccttctgctgcatctcccacctccctctgaattgtgggcctgaggcgatggcggcgctcgccccgtccaagatgctcggcacccggctcaacttcgccggctcctcccgctacgccaccgcggcaccgaccaccggagcgcagaagatcgtctccctcttcagcaagaagcccgccccgaagcccaagcccgccgccgtcacctcctcgagccccgacatcggcgatgagctcgccaagtggtacggccctgacaggaggatcttcttgccggagggtctcctggaccgctcagaggtgccggactacctcaacggagaggtccccggagactacggctacgacccttttggcctcagcaagaagccagaggacttctccaagtaccaggcctatgaactgatccatgccaggtgggcgatgctcggcgccgctgggtcatca

SEQ ID NO: 400796 - DNA, 397 bp, Oryza sativa nipponbare
ccacgcgtccgcacccaccaactgagagctgagcaggcgagcgagcggacatggcagcatcgctccaagccgcggccaccctgatgcagccggccaagctcggcggccgggcctcctccgccgcgctgccatcgcgcccgtcttcgcacgtcgccagggcgttcggcgtcgacaccggtgccgccggcaggatcacgtgctccctgcagtccgacatccgggaggtcgccaacaagtgcgccgatgccgccaagctcgccggcttcgccctcgccacctcagctctgctcgtctcgggcgccagcgcggagggcgtgccgaggaggcttaccttcgacgagattcagagtaaggacgtacatggagggaagggaaccggcacggcgaaccagtgccc

SEQ ID NO: 400797 - DNA, 496 bp, Oryza sativa nipponbare
ccacgcgtccgcgaaaggagacccttcaacacttcaagaaaccatgggcccatgagcatgaacctgttggaaatctcttagatgcagtcaaaactatcaaaccaacagtattgattggcacatctggaaaggggcaaactttcactcaggaggttgttgaagccatttcctcatttaatgagaggcctgtcatttttgccttgtccaacccaacatctcagtctgagtgcaccgctgaacaagcgtacacatggagcaagggccgcgcggtgtttgcaagtggaagtccatttgatccggtggagtatgatggcaaaatatacgtgcctggccaggcaaacaacgcctacatcttcccagggtttggccttggtgtggtgatgtctggtgcaatccgtgttcatgatgacatgcttcttgcagcttcggaagcactggctcagcaggtcacacaagagaatttcgacaagggccttacttatcctcccttctcaaa

SEQ ID NO: 400798 - DNA, 481 bp, Oryza sativa nipponbare
ccacgcgtccggctgcaaggagaaggagaaggtaggctccagccatggcttcccagctctccgccgccacatccgtgccgcagttccatggcctccggacctactcctctcctaggtccatggtgacgctgccatcgttgaggatgagcaagaagaggtcccagggcatccggtgcgactacatcggctcagccaccaacgttatcatggtgacgacgacgacgctgatgctgttcgcggggaggttcgggctggcgccgtcggcgaacaggaagtcgacggcggggctgaagctggaggcgcgcgactccggcctgcagaccggcgaccccgccgggttcacgctcgccgacacgctggcctgcgggcgcgtcggccacatcaatgggcgtcggcgtcgtcctcggcctcaagaacaatcgcgtcctggaccagatcatcggctaatcaaattcattaagctagtcacacgaatcaatac

SEQ ID NO: 400799 - DNA, 479 bp, Oryza sativa nipponbare
ccacgcgtccgcggacgcgtgggtgagggtggtggtggtgatgatgatgcggagcaggaggacgccggctcagacgacggttacccgcagatgacagagaagcagaagaagctatttgagttgcggctgaagatgaatgaagctaggaaggcaaatcagcaagcgatggtggcagagaagaagaggatggagcctcgcgctgagagtagaggtgtttctaaacaaaagtggctggaagacagaaaaaagaagatcggaaagcttcttgactcaaatggcctggacatgacaaagtcttacatgctcgatacacaggagtcggccgaagcaaaatacaagaagtgggaaaaggaacctgcaccatatggttgggatgttttcaaccagaagaccttatatgatgcatacaaaaagaggaccaagaacattgaggttgacatggaggcatacaacaaagcaaaggaagccgatcctgaatt

SEQ ID NO: 400800 - DNA, 475 bp, Oryza sativa nipponbare
ccacgcgtccgcggacgcgtgggcggacgcgtgggcggacgcgtgggctcgagcaaagaaggagagagcttggtgagctgcagagatggccccctccgtgatggcgtcgtcggccaccaccgtcgctcccttccaggggctcaagtccaccgccggcatgcccgtcgcccgccgctccggcaactccagcttcggcaacgtcagcaatggcggcaggatcaggtgcatgcaggtgtggccgattgagggcatcaagaagttcgagaccctctcctacctgccaccgctcaccgtggaggacctcctgaagcagatcgagtacctgctccgttccaagtgggtgccctgcctcgagttcagcaaggtcggattcgtctaccgtgagaaccacagatcccccggatactacgatggcaggtactggaccatgtggaagctgcccatgttcgggtgcactgacgccacccaggtgctc

SEQ ID NO: 400801 - DNA, 367 bp, Oryza sativa nipponbare
gtataaatatatatagccggagcttccatatatttgattcacatatgcctcacccaacaacatatagtcgtagcagataccactcttacatcaagtcagagagagatcaggtgaaacaaaaacaaaagcagagcacggccggtaaaatcaaaagacgatgaacaaactgggaacacacgaaacaaggtgggagacatcatcgaatcagagatgaacaattaaacaaggctatatatgacgatgacggcttagttgccaccagactcctcgcagcccgggggcttgtaggcgatgaagctgatgagctgcacctgcctgacgttgtcgaagccgatgatacggacgaatgcatcagggtacgccttct

SEQ ID NO: 400802 - DNA, 495 bp, Oryza sativa nipponbare
atgtcatggaccagtgggctcagtcgatgtacgttattaaggcacagcattaaagactgactgaggagttacattatcatatggctaacatgcataaacttggtagaaatagcgtaattagagcggacagaaacaatcagtttgaccatcgagagtcacgctcagatgtatgcaacgatgtattggttggtgactggtgcccatattgactatgatgagagcttttgttgtgcgcggtcgactcatatccttatgtccttaattgatgatgccatgaaaatggattattctatgaattgctgaaaacgaggctcatcaaaatgcaaaatctaagactactataagactactaataaaataagaaaaaaaattggaacgatgaaattaccggtccctaatatccaactgactgaataatgtcttataacgtactctatgtttctttggcaaaaaagccagcatacgttgacgttttcccaaaaagttttggagacc

SEQ ID NO: 400803 - DNA, 447 bp, Oryza sativa nipponbare
ggatgcaattttcatcccatcaattgtaacttaactgtaatatcctgacgataacaacattataagctgcactgactgcataacgcattattacatacagaaggcatcggggtacaacacaacgcattaggagtactaacttcaggccacgacaacaacacaaagctacactgcaacatggctccttgttataatatataagctcctcttcacttcttgtggatgctgcagaggcagttctcctcgcctacgtctttggcgaggcagggaggctggcatgatccgtcctggtaccaggtcgcccgcttctccgtcagctcgttcaggaagtagtccagcttgtcgatggtcacactgggcatcaccacgacatgagcgatgttgccctcgcaggcgagctgccacctccggacgaactccttgtccttgggcctttcgaacaccacg

SEQ ID NO: 400804 - DNA, 504 bp, Oryza sativa nipponbare
taaaatatatatagccggagcttccatatataagattaacatatgcctcacccaacagcatataggcgcagcatatacccctcgtacataaagtcagagagagatcaggcgaaacaaagactgaagcagggctcggccggtgaaagcaaaagacggtgaacaaactgggaacacacgaaacaaggtgggagacatcatctgaatcagagaggaacactgaaacaaggctatctatgacgatgactgcttagttgccaccagactcctagccgcccgggggcttgtaagcgatgaagctgatgagctgcacctgcctgacgttgtcgaagccgacgatacgggcgagtgcatcagggtacgccttcttggccttctcgagctccttgagcacctgggcggcgtcagtgcacccgaacatgggcagctctcacatggtccaggacctgccatagcagtatacggtggatctgtggttcttacggcagacgaatacgaccttgctgg

SEQ ID NO: 400805 - DNA, 465 bp, Oryza sativa nipponbare
tttagcccatatctttatattatattattatgaacaggaacttgtcatgcccagctatggcttgggcgcgatctgatacacagaacaaagagaaaacataaaaaggagaaataattaatagcaagcgtcaagccggcctgcttaaaaggtgtaaaggcagctgccgtcgtcgctcctcgccgttgggtcgaagttcttggcaacagggtcggtgcaaccttccggcacaggcaggttacctgcttgctgtgctccttgccctcctcctcctatgcaggccggctacaatgcattgatgggatgcgaatagctagagatcttttattcagctggatggcgcaaaaccgtaaaaggaaccagtcttcatggcgtcggagttagcgttaccaagagcagtcttgcttaagtactgctcaagcagctgcacacgcttgacgttcttctggctcttcacaagcatgtatt

SEQ ID NO: 400806 - DNA, 463 bp, Oryza sativa nipponbare
gttcgtgaagataggcacatatatgtatcgtacaatggcctgtgcgcttgtcgaaatgcaaataacatcatcgggggatatgatcatcagttcacgagaacagaggaagaaacaaaagctaaaaattaaaaccatcaacagcccgatcgagtttgcattactagatacacacattgcagccttccttccctctctccatgtatcgatatatcaacccggccacgcacaaaacatttgttcattccctactcgagctgcgcgtaccacaccccttggatcttgacatccttgggcaccttggcgccgaggtctgtgtccgacggctgcacgctctcgaagacgccaatcacctcgccggtctctggcttgctcttggtgacgctcaacgtgatgttgcccgtcgacgacgaggcgttcttgacgttctccttagcgagctccggacgcgtgggcggacgcgtgg

SEQ ID NO: 400807 - DNA, 490 bp, Oryza sativa nipponbare
cacatccatctcgtaccctttgtataaatatatatgggcggagcttccatatatttcattcacatatgcctcacccaacaacatatagtcgtagcagataccactcttacatcaagtcagagagagatcaggtgaaacaaaaacaaaagcagagcacggccggtaaaatcaaaagacgatgaacaaactgggaacacacgaaacaaggtgggagacatcatcgaatcagagatgaacaattaaacaaggctatatatgacgatgacggcttagttgccaccagactcctcgcagcccgggggcttgtaggcgatgaagctgatgagctgcacctgcctgacgttgtcgaagccgatgatacggacgaatgcatcagggtacgccttcttggcctcctcgagctccttgagcacctgggtggcgtcagtgcacccgaacatgggcagcttccacatggtccagtacctgccatcgtagtatccgggggatc

SEQ ID NO: 400808 - DNA, 490 bp, Oryza sativa nipponbare
  unsure (1)..(490): unsure at all n locations
tttataattaattcacaacaccatatttcattgatcaggttcagaacctgcacagaaatacacactaccggtacagatctcaccctctctccaatactcgtacatccatccacgcggtccacacgaatacgtacatctatacggtacacgtacgtacatctactgcaccgngtacacacacgcacactctcctgcagagacgcgcatcgtcgtcaacctagctagcttagctgaaggcgatgcgtcgccatggcagcacggcggcggcggcgctcacttgccggggacgaagttggtggcgtaggcccaggcgttgttgttgacggggtcggcgaggtggtcggcgaggttctcgagggggcccttgccggtgacgatggcctggacgaagaagccgaacatggagaacatggcgaggcggccgttcttgatctccttcaccttgagctccgcgaaggcctccgggtcgtcggcgaggccgagcgggtcg

SEQ ID NO: 400809 - DNA, 335 bp, Oryza sativa nipponbare
tttcatttttggcacgaaggaattgttctcaagaatgttaagatggtaaatacacacaagagagaggtacggtatacaagacttagtttttcttaagtacaacagatctttcattcctccatgatcctatcagcttctacacccaaaccacacaaattaccatgcacgagccctcttcctacactggcaaatcaacttacctggggcttgagtagccaagcattcatgtggtgatcagtagccgatgtcagcttcgtcgacaacgaggttgccggtgatgagctcaccggaggcggcgacgggccagatgaacccccttgggaggagcttgacgg

SEQ ID NO: 400810 - DNA, 442 bp, Oryza sativa nipponbare
agaagggacaggttttcaaattcatctcccaactcgaccataatttacacctacatttaacacattcttccacccttctcaaactcctcccttttttttcccgggtaagattaaaattaacttgaggccagccagcgtcgccggcggcgagatgtttacaggctgggcgtcctctcggcggccccggaaatgaccgtgagcaggttgttgcccaaggggtcgctgaggtgcttggagaggttctcgacggggccctctcctgtgacttaggcctggatgaagaaccccagcatggagaacatggccagccgcccgttcttgatctccttcaccttcagcagcgccccctggtccgggtcgctcgccagccccagcgggtcgaatgggccacctgggtggagcttgtcctccccgacgcctgggcggacccctgggtccaccc

SEQ ID NO: 400811 - DNA, 418 bp, Oryza sativa nipponbare
tgcgaagaaattgttttgaatttcgaagaaacaactgatagtaggtttgatacagtttttgcactacgctgttactgcacatgggagcagaacatattctcgtagagatatacaaacatcacacagaggaagcagcagcaagcactctagagagtcaccccccaaaacttccccggacaaatgcagctgcttaattactccgttccagcgatcttcttcttcaaggtctcgatgtcggtcgccaactctttcctgctctccttgaagaggaggtagcggtagacgaaccagccggtgtagccgaggccgacgagctccaggatcttggggagcagcggcacggagttgatggcgccgacgacgacggtggtgagccagagggcgacgacggcgccgccgctgtagaggaggaacgtcg

SEQ ID NO: 400812 - DNA, 489 bp, Oryza sativa nipponbare
tatatatgactttgcgagtcctctgatttactccacataggagcagattacaagaaacaaaggctccacgtaatatatagctggaattccttttccaaatgtaaaagtacagattttttactccattgcctctctttctcattatccaacagccggcgttgtatatacatcgaagtccttcatctgccctcaatggcatcatggcatgtgccacaggccaatgtcagccattggatcatcatctcctcctcaattcctccatgccaagacagtgaatgtgccagtgttcatccaataagcagattggctcagaggattagtgacagagatcaggtaatgctacaatgtgttcctctgccctacaaatttccgtgcaacaccgaagatgagagccttggtcaacagcccttgatcaagagtgcaagccagagcaacagctccaccgagcacaaggaaccttgctactcggtttttcgcgggtttctcttc

SEQ ID NO: 400813 - DNA, 497 bp, Oryza sativa nipponbare
tttgcacgaaggaattgttctcaagaatcttaagatggtaaatacacacaagagagaggtacggtatacaagacttagtttttcttaagtacaacagatcttccattcctccatgatcctatcagcttctacacccaaaccacacaaatcaccatgcacgagccctcttcctccactgccaaatcaactcacctggggcttgagtagccaagcatccatgtggtgatcagtagccgatgtcagcgtcgtcgacgacgaggttgccggtgatgagctcacggtaggcggcgacgggccagatgaaccccctcgggaggagcttgacggcgagctcgacgtcgatgatgatctccctcatggccggcttcttctcgccgctgatggcgatgaggtagctcctgccgacccagccgatccagccggcgatgtagaggaagagcaagcccggggtgatgaactcgccccagtgccgctggtcgccgctgacgatgaggtgc

SEQ ID NO: 400814 - DNA, 400 bp, Oryza sativa nipponbare
  unsure (1)..(400): unsure at all n locations
tttaaaaggtaaactcttcataataatattattaagacattatagctgatgtcttttgatcacactgcgatcaaattatgcatcataggcagtacaactccgcgtcaggaaaaagtagaggagatatatttcttgttattacttaatacagcattcacatatatcgaaccatccggtacgtacgtagtagtactccacgcgttcacatcgatgatcggggacgatatcctcaggtagtacttatgcaaaagcgttggcgtaaactgacgaactgaacggacggacggtcggatttagggctcccataagtccaagttgccggagacgaagtcgtagtggccgccgacgagcttgagggtgccgttggcgatcccctncttgacgaacgggtaggtcttga

SEQ ID NO: 400815 - DNA, 468 bp, Oryza sativa nipponbare
gctctgaaacaattctctatgtatgctatcttatgccctgaattcttcagtctttcagtttcagagtgtagtgcagatgcagaaatgcccatattcaggaagacatctaaggtatgatctgctataaaagagtatccatctcacagattcataaccctcaaaaagggttacttatgcagtgaaaagggttttatgctctttcatacagtgtgacagtgtgtgtacatataatttggaaaaacaaagtgaagatggatttacagcagcgtttctcagatacagcggacttatagctacaagctgatcacacaagtgaactttgctgctgatgatgatatggatcatgttgttatagcttacgcccaccacgggttgtcgccggtcctgaagtcggtctccacccacggcacgaagagaaccttgccgtcgtcgacgtcggcgtgcaccaatgccagcgacaggggagcc

SEQ ID NO: 400816 - DNA, 498 bp, Oryza sativa nipponbare
tagcaattaagcgtagtttatccaccataattaagagcgagaccatgagatagctagaacactgctgctaccatgagatagtttatccccctgtagtactgtacatcagaaattcaccactcaactcaccccctcacccatgcatccagatccatgcatgcaggaaacaattaccacaacacacacagtaagtctgaatctcatcacatccatctctctctctctcctccccccaattcattaacatcttatacatgcatactccacaaaaaaaaaagaagaaacaagaagagaacatcttccatcgcccaatcatcggtttcaccagcctgaactcatcaagctccttgagatgccctggccctgatgaaatcgatcacacgctcagcctgacagcgtctggatgatggtgttgtgccacgggtcagacaggtgctgcagcaggttgtcgaaaggccccttctgcgtcacgttgtgctgcaccaggaaccccaagaa

SEQ ID NO: 400817 - DNA, 486 bp, Oryza sativa nipponbare
acgtgataccatccattttttttattgtcggcgaaggtatcagatatgctctagatacatatcttgtgtgtatatagccggagctttgttttcacatatcctcacccaacgataattgtagtactcttacaataaaaccggccggagagggagggaagagattattacatatgtgttaagagcagaggccattgagatggtacataaccaaactgtaaaataaaaatatatagcatattatatattgatatatcatcaacatagcccaaaacaaagctgcatactattattataggcagcaatccaccagcgcgatgcttgatcttagcttagttgccaccagactcctcgcaacctgggggcttgtaggcgatgaagctaatcaactgcacctgcctgacgttgtcgaagccgatgatacggacaaaggcatcggggtaggccttcttggcctcctcgagctccttgagcacctgggtggcatcg

SEQ ID NO: 400818 - DNA, 440 bp, Oryza sativa nipponbare
taattcgatcatcccttggatgcggcctgcggcttacattaaatctcgatccaaagaagcaaagatgatgacagacagaaattaattaagctagaaatctcctcgatcgatcacacacacacacacaattaaggtacatacatacatgcactgctgcaactgcaactgcagggtcggtgcgtggctactacaagtgtacacatggtacgttggttggcaccatctcgatcgtgtcgttgtgctcacttgccggggacgaagttggtggcgtatgcccaggcgttgttggcgacggggtcggcgacgtggtcgaagaggttctcgatggggcccttgccggtgacgatggcctggacgaagaagccgaacatggagaacatggcgaggcggccgttcttgagctccttcaccttgagctcggcgaaggtgtcagggtcgtc

SEQ ID NO: 400819 - DNA, 410 bp, Oryza sativa nipponbare
ttataattaattcacaacaccatatttcattgatcaggttcagaacctgcacagaaatacacactaccggtacagatctcaccctctctccaatactcgtacatccatccacgcggtccacacgaatacgtacatctatacggtacacgtacgtacatctactgcaccgcgtacacacacgcacactctcctgcagagacgcgcatcgtcgtcaacctagctagcttagctgaaggcgatgcgtcgccatggcagcacggcggcggcggcgctcacttgccggggaccaaagttgtggcgtaggcccaggcgttgttgttgactgggtctgcgaggtggtcggcgaggttctcgagggggcccttgccggtgaccatggcctggaccaagaaacccaacatggagaacat

SEQ ID NO: 400820 - DNA, 410 bp, Oryza sativa nipponbare
aaaaccaaaaccaatttgatttcctgtttaatacaaaaattaaaatggccggttttacaaaaaaccccttattttggggggggcttactacttatattctttaaacaaatttcctttccccacttggttacccaacgtttaccggaggcactataactggcacaccaaaggggcctccttacccgtccttttaaactaagaaaaggtcctttaaaatttttaacccccacaccgttttggccccaattttttaacaccttttgaacccacttcacttccccaattaatgggccaaccccccaacccttggaacccctttacatttcaggtgggaaaaaccccatctttagggtccaaacctttccctcattttggacttttgggaaaaaacccccctttttccccttaaa

SEQ ID NO: 400821 - DNA, 474 bp, Oryza sativa nipponbare
  unsure (1)..(474): unsure at all n locations
aatggcactgaatcatttttatttccggatcctttttattcattcctcccagagagacggatccatggaagttttcttgccctcatcaggcaagcagagcacacacacacggtggcagtggaagtgctatgaacaagacgctaatcaacatccagagctaaaacaaacaaggggatcaatgcaaatcccgaaaaaaaaacacaggggaaagtccacatcttcttctcgtccccaactcctccgtgtcaccaccacgtcttgcggatttttttttaccctgttctattcgctcaggcgtccacgatctcgccgtcgtccttcgacgccaggatcagctccgggtgcgccgccgccgccgccgtcttnttgatcgtgccgtcgatggcgttcggccggccgagcgccttcagcgccaggtgcgccgccttctggccggagatcattatggctccgaacgtcgggcccattcttggg

SEQ ID NO: 400822 - DNA, 490 bp, Oryza sativa nipponbare
ttaaatatatatagccggagcttccataggtttcatgcacatatgcctcacccaacaacatatagtcgtagcagataccactcttacatcaagtcagagagagatcaggtgaaacaaaaacaaaagcagagcacggccggtaaaatcaaaagacgatgaacaaactgggaacacacgaaacaaggtgggagacatcatcgaatcagagatgaacaattaaacaaggctatatatgacgatgacggcttagttgccaccagactcctcgcagcccgggggcttgtaggcgatgaagctgatgagctgcacctgcctgacgttgtcgaagccgatgatacggacgaatgcatcagggtacgccttcttggcctcctcgagctccttgagcacctgggtggcgtcagtgcacccgaacatgggcagcttccacatggtccagtacctgccatcgtagtatccgggggatctgtggttctcacggtagacgaat

SEQ ID NO: 400823 - DNA, 331 bp, Oryza sativa nipponbare
caggtaaagtctatgcagtgtgcataagcgcattaacagtcacactcacttagtcaaatgccaagagcgagcgaccgttgtacaagaggatgcattaattcatcacccgggtagtcctcatatcacacatctcctcaatgcaagtagccctcaacgaccaacccagcttttctaatttacgcactcatccccaactggttggcctggcttttatcgataccttaccaggtgggtcgacttcacaaaactaaacagtgcgcgcgaacgcacactaactcatcgatctctgttgaattgcacgcgaaagagcttaaattaataggatgaggag

SEQ ID NO: 400824 - DNA, 495 bp, Oryza sativa nipponbare
ggtgaaacaaaaacaaaagcagagcacggccggtaaaatcaaaagacgatgaacaaactgggaacacacgaaacaaggtgggagacatcatcgaatcagagatgaacaattaaacaaggctatatatgacgatgacggcttagttgccaccagactcctcgcagcccgggggcttgtaggcgatgaagctgatgagctgcacctgcctgacgttgtcgaagccgatgatacggacgaatgcatcagggtacgccttcttggcctcctcgagctccttgagcacctgggtggcgtcagtgcacccgaacatgggcagcttccacatggtccagtacctgccatcgtagtatccgggggatctgtggttctcacggtagacgaatccgaccttgctgaactcgaggcagggcacccacttggaacggagcaggtactcgatctgcttcaggaggtcctccacggtgagcggtggcaggtaggagagggtctcgaact

SEQ ID NO: 400825 - DNA, 501 bp, Oryza sativa nipponbare
taaatatatatagccggagcttccatatatttcattgacatatgcctcacccaacaacatatagtcgtagcagataccactcttacatcaagtcagagagagatcaggtgaaacaaaaacaaaagcagagcacggccggtaaaatcaaaagacgatgaacaaactgggaacacacgaaacaaggtgggagacatcatcgaatcagagatgaacaattaaacaaggctatatatgacgatgacggcttagttgccaccagactcctcgcagcccgggggcttgtaggcgatgaagctgatgagctgcacctgcctgacgttgtcgaagccgatgatacggacgaatgcatcagggtacgccttcttggcctcctcgagctccttgagcacctgggtggcgtcagtgcacccgaacatgggcagcttccacatggtccagtacctgccatcgtagtatccgggggatctgtggttctcacggtagacgaatccgaccttgctg

SEQ ID NO: 400826 - DNA, 477 bp, Oryza sativa nipponbare
tcacttctaaaagagtatcaacttgttttttacatgggttacatcatagtacaggtacacaatcaacaaggcatgcagtgctccatccacaattacatcccaatacaccaccaccattcacagcctactccgatcccaaaaaagagaggtaagtcgcgtcgacgaacagtcttttcatcttcctccattggcagccattgctaacactccaacacctgaagaactcctcatttgggggtgaaggcctggaagatggtggcgtggccggggtcggcgagatgggcgaagaggttgtcgatggggcccgtgccggtgtactctgcctggaaccaagctcccatgacggcgagcatggcgagccgcccgttcttgatctccttggtgcgcagctccttgatcttttccggcgagccggtgccccaaccgagcgggtcaaaccacagaccaccagggtacccgacgttcgcggacccctgg

SEQ ID NO: 400827 - DNA, 379 bp, Oryza sativa nipponbare
tttagagcaaggaaacaaaaattttataggtaccggtttctcttctgaaaaccttaacaaggcagtcttcaaaaagaagaaaagaacttgacaaggccattatcaggtccaaaacaatggcaaacaatatctccccgaggggcttgacgctacaaagctacatacacttggatgtcctattatccacctgctccggtgtcgccgtttagtatatctaccaaaatctggaaaaaaaattaagcagtactagcttcctcctgtttcgccgcagagagctcgttctggatgtgcttggggacgacgtttaacttggcgagctgcatcgtgtaagacgcgcgccccttggtcattcctcttagcgtgctgacgtactggaaca

SEQ ID NO: 400828 - DNA, 483 bp, Oryza sativa nipponbare
  unsure (1)..(483): unsure at all n locations
aaaagagtatcaacttgttttttggatcggttacatcatagtacaggtacacaatcaacaaggcatgcagtgctccatccacaattacatcccaatacaccaccaccattcacagcctactccgatcccaaaaaagagaggtaagtcgcgtcgacgaacagtcttttcatcttcctccattggcagccattgctaacactccaacacctgaagaactcctcatttgggggtgaaggcctggaagatggtggcgtggccggggtcggcgagatgggcgaagaaggtttcnatggggccggtgccggtgtactttgcctggaaccaagctcccattacggcgagcatggcgagccgcccgntcttgatctccttggtgcgcagctccttgatcttcttcggcgagccggtgccccagccgagcgggtaaaccacaaaccaccagggtaccccaccttcgtgcccggtgagctttttttttgggaa

SEQ ID NO: 400829 - DNA, 497 bp, Oryza sativa nipponbare
  unsure (1)..(497): unsure at all n locations
tttttaaacaagttattttgaacgaccttggttaatgacgacaagtagttaaatgagtaaatagcagtaataataacaaccaaattaaggtgtacacacaatagcgtagctagtcgtcgatgccgtagtgcttcctgaggaggccgatgaagtcgtagatctcctccggcgagcggaggctgccggcgacgctgtcccgctccatgcaccgccgcgcccacgccgccacccgcgggcactccttctccacgctgaacccgccgtacctcgcgaagctgtacacccacggcatcatcggcaccagcgccacgtccacaaacccaaactcgccgccgaagaattccttctccccgagctcgccgtcgagcgtccgcagcgcctccaccagctcgccgcgcgcccccgccgccgngcgtacgcccttctnccccttgaccttccacagccgcgtccccaccgggtacaccttcttgtcgacgtagtcggcccagaacctg

SEQ ID NO: 400830 - DNA, 477 bp, Oryza sativa nipponbare
ttcaacaaatatatggttatcccacaaagtctaacaagaaagctcaaatgaacaaggcgaaaagggcaacaatgccagcgttgtcatggtttgtttcctgatcagaatgaaggagaaaatgggggggaaaagagcataggcaaaaacagtacacggtacatcacaaagggcatcgctcctctggagagttatatacaggaaggcgcatcatgctaagttgctactccggtgctctcctatgccagacagacccaagtttttctggtcgttaccaagtcaaggcaacaggagtttatgaagattgcggagtttcttgaaggcggtacattgtgatctcttgctgcttgaagtacctccggtcttcctcgtcaacaagaaccaggttcaggtagtacttgacattgaacttgttgtttatgttgccgtaagtcggggtcaactcatatggtgtcaagaagagtcttaccggaatagact

SEQ ID NO: 400831 - DNA, 350 bp, Oryza sativa nipponbare
aaattcacaacaccatatttcattgatcagggtgagaacttgcacataaacacacactaccgatacacaattgaccctttttacaatactcgtacatccatccacgcggtccacactaatacatacatgtatacggaacacgtacttacatatactggactgtgtacacacacgcacactttcctgcagagacgcacatcgtctgcaacctagctagcttagctgaaggcgatgcgtctccatggcaacacggtggcggcggccctcacttgccggcgacgaaactggtgggcgacgcccaggcgttgttgtttactgagatcactaggtcgaccacgaggttctccagg

SEQ ID NO: 400832 - DNA, 473 bp, Oryza sativa nipponbare
aaagctacctccaaatagcgtgtagcgttgcgtagcaaaccaagcatataacttaggacaaacattcagttgcagcttcacatcatcgctgcttatcataactgcaataacagcgcagatggagcataaactaagtatatttcgtagttctagcttatatataatatcagaatcaccaactgtgaaccatccacaggatggtcgggggactactgatcagaatctactcctttgaggtgtggatggcagacacggtggagaccatagaatccacgccacatttgttgcggacgttggagcccctgcagatcttgtagtacccatgctctccccagttctcgccccaggagttcttgatgatccagtaggccttatcctttaggcggattggagcaaaaccagatgcgccgtagccaacgagaagaacaccgtgatcaaggtgcctgccacagatgtacgggcacgaaacacca

SEQ ID NO: 400833 - DNA, 490 bp, Oryza sativa nipponbare
gtctgaatattcagctaagaccattccaaggctcctggtcgggatgcataaactaaaccaacaactaggataagcacgaaaatgaaagcttcgataaaaacggatatacccaatacgtcgaaactcattgcccaagggtagagaaagaccgtttccacatcaaaaacaacaaaaactagcgcaaacatgtaatagcgtattcggaattgtaaccaagccccccccatgggttctatacccgattcataactagaaagcttctctggtccttcacgaaccggagctaaaagtgctgaaatccaaaatgctaaaataggaataaggcttgctattattagaaatgcccaaaaaatatcatattcgtaaagcagaaacataaatgtactcccattaatgtggaataggcggaactgaattagtcaattcaagtcagcattgtcaatttatacagaatttctctcttttcctcggtgaaacaaggatcggtttt

SEQ ID NO: 400834 - DNA, 491 bp, Oryza sativa nipponbare
gatggaaatttatgtgcatgtacaattgggccggggaagaaagaatacaacggttataagcaagggattatcaagtccacgaggaagaagcagaggcaggcaaattacatagtattatacggattataaagaagaaaccaccaccattacactaatacacacaaagctcgatcaagcagcttaattaatttcttccacatgtacgacatgcatcctctcctcactccgtgatcaatttaagatgattctttgcagctccagctcgacgacgatccatccgaattaaaatcatttgacctcctggatctcgtccagggcgtagttgttggtcgacacgccggcgtagttcaccttggcgaaccgaaccaccaccgggtagcgagtgttgggatcctgatcaacggtgacgacggagccagtgccgttgtaccagtaggactccctcctcaggatctttaccttggtgcctcttttggggccaatgggaggcg

SEQ ID NO: 400835 - DNA, 435 bp, Oryza sativa nipponbare
aaacattaagaggaaaaggtttcgtgtttagaactggaaaaccaagcaatcaaaaacattttcttcctcgaagatccaacaacaaagctctgcatcaagaaacattccattggttgacagaaacaaaattaagctagataagcactgattccacgcacaatttacatgatcattacatcgtccatcacacaggcactcatgcatcgattacacataggagtattgattcgtgtgactagcttaatgaatttgattagccgatgatctggtccaggacgccgatgttcttgaggccgaggacgacgccgacgcccatgatgtggccgacggcgccgcaggccagcgtgtcggcgagcgtgaacccggcggggtcgccggtctgcaggccggagtcgcgcgccttcagctttagccccgacgtcgactttctgttcg

SEQ ID NO: 400836 - DNA, 491 bp, Oryza sativa nipponbare
tagaccaagaaattgttgaagttcgattgagtatgatggacctttttactaggcaaaccacacgaatacacgattgattaatttcactgagaatagcacgggtacatcacatcacacaaattcatacgttgatacacgcatagtcgccgaagcgaccagctgcttaattaatcgataacacacgggtttaattcagcaataatcagcacacacacaaaccacactcatatgggtggtttttattgtggactaattaaggtaggtgactcgccggcggcgagtgttcggttgcttcgtgacttcacttgccgcacttgcagtcggtgcaggagcagctggtgccgcacttgcagccgccgttctcctcgccggcggcgacctcctcgaagtggctcttctcggcttcaactatgacgacgccatagctggtacctttcttcacgcactggctcttgtcagcacagtcgcagttgccgcacttgtccgacatg

SEQ ID NO: 400837 - DNA, 477 bp, Oryza sativa nipponbare
  unsure (1)..(477): unsure at all n locations
gtaccattacatgatgattaacatataaatctgtaggtacatggaattaaggtagtggagcagaggaggaaggatgatagaagactccaattctccatggatgggaatgggatcaggtggccttgcagaactctccgcccagatcgtcgcacgcctcctcggggaacaccgtggtgggctcgtcgtaggataggtagtccctgtcgacttcctccgccgccgcacgagaaacagcaacagcagccgatgatgagagcttggcctctgggtacatctgcacgttgcacgcctcgccgncgatgaggtcgcacgcctccatcggaaacaccgagatgttagagctgtagtccacctccgcagccttcactgncaccgncggcgncgccgcacgaacgcgcaacgcaacacggcgaggagcctgaatctgcaagctgcgccccttcacaagagcgggcaacacggccgacaatccaacga

SEQ ID NO: 400838 - DNA, 410 bp, Oryza sativa nipponbare
tttgaactgtagaaactttattccagatttatcatttattacccatccctaggacggtaacattcttgtgatgaaaatacatatgcccatgcttaaggtaactggatacaaggaacttcacatcacgtcgaaaaggaaatattacaatacaggcatgaacgacacggggaaaaaaaggcttgaagtaactccggtagactcatcagaattacagcgtgcagtactgaacaagtagtaagattttgcaggaaacagttcatagatatacatgactggaatagatccggataccggatgaccagattcaccggtagttgcggtaaagtgggctgtacatgcagctctctgcatacttaaccaggtcctttggccgagggcgcctgcttgcccacgcgtccgcggacgcgtgg

SEQ ID NO: 400839 - DNA, 494 bp, Oryza sativa nipponbare
tttttccagtacaagcatatttttatacatgggaaactttaaataaacattatcccaggattggtacaacctgtacgcataaaccaaagaacagaaaaataaacagaaaacaagaaacctgtggatttatgccgctatagcaccttccacaaaactcgtcattttcttttattgcctaccgcagattccaccatataatatctaaagttgaatggtctttcattcaacttattctaattactgaatcttctatattatcaggtgcaggcagtgtggtaataaaatgataactgtataactatcgaaaaatgtgagagagacatcaacttttttcagcaaggctttcatagaagagtatgtagccgttatcagtgttaccactgaactcttgtgctgagccaaagaatgtctgtaccatggactcatcagtcatctcaacattctcgtcgtcgaagaacaaccagtggttgtggctcttcactaagctgatatag

SEQ ID NO: 400840 - DNA, 257 bp, Oryza sativa nipponbare
ttactaggcaaaccacacgaatacacgattgattaatttcactgagaatagcacgggtacatcacatcacacaaattcatacgttgatacacgcatagtcgccgaagcgaccagctgcttaattaatcgataacacacgggtttaattcagcaataatcagcacacacacaaaccacactcatatggggtgtttttatttgggactaattaaggaggtgactcgccggcggcgagtgttcggttgcttcgtgacttc

SEQ ID NO: 400841 - DNA, 391 bp, Oryza sativa nipponbare
atgcaaaacacagggcggccgccttttttttttttggtttggttttagacgctaatcaacatccagagctaaaacaaacaaggggatcaatgcaaatcccgaaaaaaaaacacaggggaaagtccacatcttcttctcgtccccaactcctccgtgtcaccaccacgtcttgcggattttttttttaccctgttctattcgctcaggcgttcacgatctcgccgtcgtccttcgacgccaggatcagcttcgggtgcgccgccgccgccgccgtcttattgatcgtgccgcctatggggtttcggccggccgagcgcctttagcgccaggtgcgccgtcttctggccggagatcattatggcttctaacgtcgggcccattttcggggcgc

SEQ ID NO: 400842 - DNA, 503 bp, Oryza sativa nipponbare
tttttatgacgtataataagcagaaactctgatgtatattggggcaccatctatggagaggagagagagagagagagagagttctgaatcgattcgttttagtatttaagaaacaaacgaaaaaggcttcaggttggaagcatgaacagctcagcaaatgcgatatttacaaaagcaatagatcggggatgccaacttactgctagaaatacatcagatacttgcctcttctaaaggcaaggttacctccagagtttcagcgcctctttggattgtcaagctcaccttgtctccaacgccataatcatccagaaccctcgatagatcagatttgcctttgataggtttaccgtccacggcaacaatgacatcaccaagaacaatgttaccagcaaaacccctactggtaggaacaagaccagctttggctgcagcactgcccccaggaacctgcaatattagagatccagtgcgaacattaagctgatatgcgattggatctg

SEQ ID NO: 400843 - DNA, 502 bp, Oryza sativa nipponbare
taatgttacatttctttgtaattaccatctgaaagagccaggcacggcaactgaccacctcaacacactacatttagacagaagaattacaaacttacatttgctaattagaaccctacactttgtatggtttttgtatggtcaaatacattccaattcatagggctttacatgctagggagagctgttttctctgcttgtttttcctcctcctcccctacaatcttcttccagaaccaatgcttcctccagacctgctccatctgctccatgggcagcttctttgtctccggcaggaagaaataaacaaacactgtcatcaagcagatccatcctgcaaagaagaagaatgtccctgacttgatgcggcatagaactgcaaggaatgtctgtccaatcacaaatgtcatcaggaagaccactgcaacaacaatactctgccctgctgatctgatctcaagtggacatatctcagttgggaccaagaatgtcaatggccccc

SEQ ID NO: 400844 - DNA, 493 bp, Oryza sativa nipponbare
ataagaagagattatatcccaccatcgatcgattacgccatcatcaataactgaagagcagcctgacagatgattaaaattacatgtccatccacccaaaacacaagtaattaataggtcgattatgagagaagaagaagaagaagaagaagtctagatgtcgaagacgttcttgccggtgaacttgacctcgatggggctgacgttcttgccgatgctgcggaagttctggccgacgccctgcctgccggcgttgaccttctccgggtagacgccgtccttggggtggaggtactgcacctcgccattggggaagacgcggtagaactggtagttgatcttgtacttggagcggagcctggtgcccagggccaggcactgctccttcctggccagcttcagcaggttggggccctcgcgcatgatggcggcgccgcccgtgggcatctcgaacacctgctccttgggcgacgtccatgtgatgacgtagaac

SEQ ID NO: 400845 - DNA, 495 bp, Oryza sativa nipponbare
attattattgcatacacttctatcattaatggtgtactgaagatatcaagatactacttgaacgagttctcaatgtcgattacaaagcgaaatctgacatcccggtcaacaagcctctgaagagcctcgttgatgtaatctatcttgatcatctcgatatctgggtagattttgtttgccgcacagaagtttatcatctcctggatgtccttcgtacctccagttacactaccagataaactccgcccaccgagattaaggtttgcaggatgcactttgatttcacttgggaagctaagtagtgccattacaccaccaactttcagaagcgtgagataaggatcgaatgggtgatcgccggaggctgtgtcaataatgaagttcagagagcttttcaaggtctccatctgattttcatccgatgacaccacgaaattatctgcaccaagaaggtcaatagcttcttttctctttgattcactagtactaataact

SEQ ID NO: 400846 - DNA, 494 bp, Oryza sativa nipponbare
gggaaacgaataaaatcattattgcaaaaacatcatgttcttcttcatcttcttagtgtacacaacaccaactcgatcatcatctcgtcgcactaaacccatcttccccaacccaaagacaacgaactcgctggccacaaatccatccaaccacaattaaccactgctaagctacggtcccccacttcacttgccggggacgaagttggtggcgtacgcccaggcgttgttgttgacggggtcggcgaggtggtcggcgaggttctcgagggggcccttgccggtgacgatggcctggacgaagaagccgaacatggagaacatggcgaggcggccgttcttgatctccttcaccttgagctccgcgaacgcctcggggtcatcggcgaggccgagcgggtcgaaggcgccgccggggtagagcgggtcgacgacctcgccgagcggcccgccggcgatgcggtacccctcgacggcgcccatgagcaccacct

SEQ ID NO: 400847 - DNA, 479 bp, Oryza sativa nipponbare
  unsure (1)..(479): unsure at all n locations
aagcaaaaaaaacatcgatatatcgcttatataaagtacccgcttcagtttcagaactgacaacattatcgccgcacactttaccggacctgcagcagaaacgcagtattggcaagaaaacgagaacagttgatacatacacgtttattcggggagagatgtaaaaaggctatcaaacaggaggccataaagaaagttcatgggtagcctcaaaagcattctagaatggctcttgaaaagtttatgtgatgacggtgggagcagatcggccagtgtactcttgcatctttgacagcttcagtgcaacatcaaccagaggagcaagggcatcctgcgaatccctgccggtcttggaagaatccttctcatactgctcgatgtagacacggatagtagcaccaacagagccagttccagagaggcggaacaccaaccgggaaccatctncgaagagggaccggacaccctgatgcttggag

SEQ ID NO: 400848 - DNA, 390 bp, Oryza sativa nipponbare
ttacgtaagtgcttgctgatacaatatcaacgtggggggtgcattgccggttccatatgaacaaacacatatacacctgctccccgtatcgccattatgccgatcctagcctagcttggcgaggacatcgccaagagcagatttggtcaacgtgtaatacatacatatctacatacagctccagatcttggctgcatggacaagcccgtcaatggtggcgaagagcttgccggtgaggtccttgaggcccttcttctcgtccttgggcttggagttgatgacggtttttgaggttctagctcatgtaggaagccctgatgcggaagtcgtccctgtctaacggccactgcttcttttcgatgagcggcttgaggttgatgatgtcctggg

SEQ ID NO: 400849 - DNA, 415 bp, Oryza sativa nipponbare
gacagacagaaattaattaagctagaaatctcctcgatcgatcacacacacacacacaattaaggtacatacatacatgcactgctgcaactgcaactgcagggtcggtgcgtggctactacaagtgtacacatggtacgttggttggcaccatctcgatcgtgtcgttgtgctcacttgccggggacgaagttggtggcgtatgcccaggcgttgttggcgacggggtcggcgacgtggtcgaagaggttctcgatggggcccttgccggtgacgatggcctggacgaagaagccgaacatggagaacatggcgaggcggccgttcttgagctccttcaccttgagctcggcgaaggtgtcagggtcgtcggcgaggcctagcgggtcgaaggcgccgcctgggtacaccttgt

SEQ ID NO: 400850 - DNA, 409 bp, Oryza sativa nipponbare
tttgatcagaatgaacaggttttcaaattcatctcccaactcgacgataatttacacgtacatttaacacattcttccacccttctcaaactcctcccttcttcttcccgggtaagattaaaattaacttgaggccagccagcgtcgccggcggcgagatgtttacaggctgggcgtcctctcggcggcgccggagatgacggtgagcaggttgttgccgaaggggtcgctgaggtgcttggagaggttctcgacggggccctcgccggtgacgtaggcctggatgaagaaccccagcatggagaacatggccagccgcccgttcttgatctccttcaccttcagcagcgccgcctggtccgggtcgctcgccagccccagcgggtcgaatgggccacctgggtggagc

SEQ ID NO: 400851 - DNA, 481 bp, Oryza sativa nipponbare
ggaaggcaaatgttcgtgaagataggcacatatatgtatcgtacaatgtcctctccgcttgtcgaaatgcaaataacatcatcgggggatatgatcatcagttcacgagaacagaggaagaaacaaaagctaaaaattaaaaccatcaacagcccgatcgagtttgcattactagatacacacattgcagccttccttccctctctccatgtatcgatatatcaacccggccacgcacaaaacatttgttcattccctactcgagctgcgcgtaccacaccccttggatcttgacatccttgggcaccttggcgccgaggtctgtgtccgacggctgcacgctctcgaagacgccaatcacctcgccggtctctggcttgctcttggtgacgctcaacgtgatgttgcccgtcgacgacgaggcgttcttgacgttctccttagcgagctcctcctcgtctcctctgcctccggcggggag

SEQ ID NO: 400852 - DNA, 466 bp, Oryza sativa nipponbare
tgtagaaactttattccagatttatcatttattacccatccctaggacggtaacattcttgtgatgaaaatacatatgcccatgcttaaggtaactggatacaaggaacttcacatcacgtcgaaaaggaaatattacaatacaggcatgaacgacacggggaaaaaaaggcttgaagtaactccggtagactcatcagaattacagcgtgcagtactgaacaagtagtaagattttgcaggaaacagttcatagatatacatgactggaatagatccggataccggatgaccagattcaccggtagttgcggtaaagtgggctgtacatgcagctctctgcatacttaaccaggtcctttggccgagggcgcctgcttgccaaaccaagttcatatgcctttgctgcaacgttggctgcaatgtgggcagagatctttctgatgtttgagaagggaggataagta

SEQ ID NO: 400853 - DNA, 479 bp, Oryza sativa nipponbare
aattgaaatggaaaccagaggtatcaagtttggtctgagtatagtattacatataagtatcgtttttgacgatttgtacaatatatttattacgatgtgtatgtgcatatgattagcctggtgctagcattcacatatgcatgctcttcaacctatgttgatacatacatatgtacatacatacacagctgatgttgacacaaacaagatgaaaaaaaaaaaactgaagcaacaaactgggaaaggggaaaccaatgcaaggtggcccgattcgaacgttcaaagctgccaaaaccgaatagatcaatcgagtctcctctgtatagagctcacgagtgagcttgctggcttgccaactagcttagtttccgccggactcctcgcaacccgggggcttgtaggcgatgaagctaatcaactgcacctgcctgacgttgtcgaagccgatgatgcgaacaaatgcatctggatatgccttc

SEQ ID NO: 400854 - DNA, 433 bp, Oryza sativa nipponbare
tcgttctgattgcctttggcagttgctacacatcttatatgtggaatttatctttgcaaaaaggttacacctgcagagctgcagctacaaattgtacaatatatacaagcccaaaatgatgaaggtaaagggcagcttggctggctataccgttcgctatattgaattgtcattggaagcatttgatgtggatgcgtcctcggagttccttgcttcagatttctcgttggagtaagttgacagtattgtaacccagattaactccacgcagtcaacccacagaagtctttgttcaacaggaactaggccatatgtaaccaagtgtgcaaaaggccacaacttccagccggcagtaagcatgggccaaaacgtggatttgagctcactggaaatagtggccggtgattccaaacgaaagaaccccaagaccacc

SEQ ID NO: 400855 - DNA, 452 bp, Oryza sativa nipponbare
ttagataagcactgattccacgcacaatttacatgatcattacatcgtccatcacacaggcactcatgcatcgattacacataggagtattgattcgtgtgactagcttaatgaatttgattagccgatgatctggtccaggacgccgatgttcttgaggccgaggacgacgccgacgcccatgatgtggccgacggcgccgcaggccagcgtgtcggcgagcgtgaacccggcggggtcgccggtctgcaggccggagtcgcgcgcctccagcttcagccccgccgtcgacttcctgttcgccgacggcgccagcccgaacctccccgcgaacagcatcagcgtcgtcgtcgtcaccatgataacgttggtggctgagccgatgtagtcgcaccggatgccctgggacctcttcttgctcatcctcaacgatggcagcgtcaccatggacc

SEQ ID NO: 400856 - DNA, 412 bp, Oryza sativa nipponbare
ttacacaacttctcgaatatgctatattctcacgacattacatccgagttggctttcttacagttacagtttccaagcaaattgttgataggttacaacttacaagcaaaagacagctggggaaacagacaacatgtccactctctaccagcagagtgtgcagagtttctaatctggcaaggcagtccccctttcaagattgttcttgatctcaagagtatacttgccaaatgccctctcaaccttcttgttgaagtgttcgttccggtcattgatcgagtcaatgtccttgtcttcatggaacttgcgcctcctgctgaatgctttccgtttctcatcccgttccttaagctcattaaccatcctgtctatgttttcttccgggaccttagacaccttcccatattggaga

SEQ ID NO: 400857 - DNA, 413 bp, Oryza sativa nipponbare
tgtataaatatatatagccggagcttccatatgtttgattcacatatgcctcacccaacaacatatagtcgtagcagataccactcttacatcaagtcagagagagatcaggtgaaacaaaaacaaaagcagagcacggccggtaaaatcaaaagacgatgaacaaactgggaacacacgaaacaaggtgggagacatcatcgaatcagagatgaacaattaaacaaggctatatatgacgatgacggcttagttgccaccagactcctcgcagcccgggggcttgtaggcgatgaagctgatgagctgcacctgcctgacgttgtcgaagccgatgatactgacgaatgcatcagggtacgccttcttggcctcctcgagctccttgagcacctgggtggccgtagtgcacc

SEQ ID NO: 400858 - DNA, 447 bp, Oryza sativa nipponbare
ccacgcgtccgcccacgcgtccgaacgcggcgcagcacacaccccagctcctcctccggcgacgagaaaaaaaaatggacgcgcagtacaacccgcgaacggtggaggaggtcttccgcgacttcaagggccgccgcgccggcctcgtccgcgcgctcaccgcagatgtggaggatttcttccggcaatgcgacccggaaaaggaaaacttgtgcctttatgggtttcccaatgagcattgggaagtaaatttgcccgcagaagaggtgccacctgagctcccagagccagcattgggcattaactttgcacgagatgggatgcaggaaaaagattggctgtccatggttgcagtgcacagtgatgcatggttactttctgttgcattttactttggtgctcggttcggatttgataaaaatgacaggaagcgcctgtttggtatga

SEQ ID NO: 400859 - DNA, 439 bp, Oryza sativa nipponbare
ccacgcgtccgcccacgcgtccgcgaggttcgggttcggcggcgggaagaaggcggcggcgaagaaggcggcgaggccgtcggcgccgacgacggacaggccgctgtggttccccggcgcggtggcgccggactacctggacgggtcgctcgtcggcgactacggcttcgacccgttcggcctcgggaagccggcggagtacctgcagttcgagctggactcgctggaccagaacctggccaagaacaacgccggcgagatcatcggcacccggttcgagaccggcgaggtgaagtccaccccgttccagccctacaccgaggtgttcggcctccagcgcttccgcgagtgcgagctcatccacggccgctgggccatgctcgccaccctcggcgccctctccgtcgagtggctcaccggcgtcacctggcaagacgcc

SEQ ID NO: 400860 - DNA, 437 bp, Oryza sativa nipponbare
ccacgcgtccgcaagttgtgaagatcgcatactttggtgtggctcgacaaggaaatcaagagggacagatgactgctgaaactggaacctatagatggatggcacccgagatcattaaccataagccttatgataacaaagcagatgtgttcagctttgctattgttctgtgggagctggtaactttgaaggtcccatacgataacatgacgcccttgcaggctgcactaggagtaaggcagggatttcgcttggagattccctcaagtgtgaacccgagattgtcaaaactgattcagcggtgttgggacgaagatcctgatgtccggcctgtttttgcagagattgtcatcgaacttgaagacatcttacagcatgcccaggcaaacagcaggggagccagtcggggttctagagctaagatacagaagaaatca

SEQ ID NO: 400861 - DNA, 441 bp, Oryza sativa nipponbare
ccacgcgtccgacccacgcgtccgcccacgcgtccgcggacgcgtgggtgccgccgccgtcgccgccggcaccgtccgcccccctcgtccgccgcgcgcgcgtgccgacgaggagttctcctcactccctctcagcccctcccaatccgagaagcaggatcggtgggctgctgtccagcaatgatgtcgatggcctccaccaccgccagccccttttgcccttcacccatgcccagaggacgcaaatgcacagttcgagttcaagctggagctgccggagcggatgcatctgataagtcgctcgagattatgcgcaaattctctgagcagtacgcccgccgctccaacaccttcttctgttccgagaagtccgtcaccggcgttggtatcaagggacttgctgatcacaaggatcaacttggagctcctctatgcccttgg

SEQ ID NO: 400862 - DNA, 481 bp, Oryza sativa nipponbare
gctgcacgcgtgccgtaccggttctcgtgttcgacccacgcgtccgcctcggtgcaccaaccgagtgcgagtagcattctagtcggaacaaacggaacaattagtttcaggccgattttagttacaaactttttcttcaaacttttaacttttctatcacatcaaaactttcctatacaaataatcttacaacttttccgtcacatcgttccaatttcaactataaacttttaagtttagcgtgaactaaacacacccctagtggagtcgaaccaaagtgatgcacttagttgtcggccgatgtggcatgctgctacgatgcacatcttgacattgacgtgtcatgaagacatgttcctccatcttgccacactatatactacctctatgacacgcgatgtccatgtatcaataatattactaggatgtatatgatgttacagatttgtgatattttttttcttttattactgtaacaaac

SEQ ID NO: 400863 - DNA, 416 bp, Oryza sativa nipponbare
ccacgcgtccggtggcttctccaccttcggctacgccgcgcagggcctctccggcctgacgccgtggatcatgttcaggtcggagaaccacgccatgccggacccgccgtgccgccgcgccatgtcgatcgagccgtgcttccatcaggctcccttctacgactgcaaggcgaagaggaacgctgacctgggcaagatggtgccgttcgtgaggcactgcgaggacgtcagttggggcctgaaggttgtaaatcaaactcagtggtagctgtaaatttgtcgtttgctcgttaactagggaagattttttttctttgtccaaaaggactacacagattcattctttactccacatatatttgatccaaatgtagataactgaagaacaaaatagcagtaaagttgtgtgttacctg

SEQ ID NO: 400864 - DNA, 433 bp, Oryza sativa nipponbare
ccacgcgtccgcccacgcgtccgcccacgcgtccgcccacgcgtccgcccacgcgtccgcccacgcgtccgagagagagtgagagagagagagagagagagagaggagacgccaccacgcgcaccgagctcgcgattccaatccccgcacgcctcctccgccaccgccgcctcggcctccgccgccgccgcgaccaggatcacagttgcgatggaacacaaggaggctggctgccagcagcccgagggcccaatcctttgcatcaataactgcggcttctttggcagcgcggcgaccatgaacatgtgctccaagtgccacaaggagatgatcatgaaggaggagcaggccaagcttgctgcctcctccatcgatagcattgtcaatggttgtgacggtgggaaggagcatattgttgctgccagtggtagca

SEQ ID NO: 400865 - DNA, 439 bp, Oryza sativa nipponbare
ccacgcgtccggttggcttctcctccccctctttaccttttcctcctcggttcggttccgtggttcgtctagggtttagtgggttgagatggcggcgccggatgtcgagtaccgctgcttcgtcggcggcctcgcctgggccaccgacgaccgctccctcgaggccgccttctccacctacggcgagatcctcgactccaagatcatcaacgacagggagacggggaggtcacgtgggtttggcttcgtcaccttctcctccgagcagtcgatgcgcgacgccatcgagggcatgaacggcaaggagctcgacggccgcaacatcaccgtcaatgaggcccagtcccgccgctccggcggcggaggcgggggctacggcggcggcggtggcggctacagcggcggtcgtggaggcggccgctactgaggaggtggcggc

SEQ ID NO: 400866 - DNA, 444 bp, Oryza sativa nipponbare
ccacgcgtccggttctgcttgagatcgtctccggccgccgcaactacggcttccgccaggactccgtcggcagcgaggactggtacttccccaagtgggccttcgagaaggtctacgtcgagcgccgcatcgacgacatcatcgaccctcgcatcgtccaggccgaggcctacgacgacgaccccgccagcctcgccaccgtcgagcgcatggtcaagacggccatgtggtgccttcaggaccgcgccgacatgaggccctccatgggcaaggtcgccaagatgctcgagggcaccgtcgagatcaccgagcccgtcaagcccaccatcttctgcgtccaggacgactgatctctcctaggagtactccacttcttgccacgagagacacacaaattatctttcttatttattatactagtactagttcagatcagatcagagc

SEQ ID NO: 400867 - DNA, 437 bp, Oryza sativa nipponbare
ccacgcgtccgggaaggccaattttagttgaggcactgacttaccgggtcggccatcactcgacatccgatgattcaaccaaatacaggccggtcgatgagatcgagcactggcgaacagcgcgagatccgatttccaggtacagaaaatgggttcaggggaatggctggtggtgtgatgaagatgaatctgaactcaggaacaatgtgaggcaagagcttctgaaagccattcaggtggcagaaagaatgccgaaaccgccgctcgctgaactattcaccgatgtttatgatgaagttccttccaacctaagagagcaagagcgattgctgagggatacaatcaagaagcaccctgcagactacccagctgatgtgcatatttagttgtattgggtgaccagaggtttccatattgtagtaactattgataattta

SEQ ID NO: 400868 - DNA, 405 bp, Oryza sativa nipponbare
ccacgcgtccgcccacgcgtccgccacgcgtccgcgtggttcgtctagggtttagtgggttgagatggcggcgccggatgtcgagtaccgctgcttcgtcggcggcctcgcctgggccaccgacgaccgctccctcgaggccgccttctccacctacggcgagatcctcgactccaagatcatcaacgacagggagacggggaggtcacgtgggttcggcttcgtcaccttctcctccgagcagtcgatgcgcgacgccatcgagggcatgaacggcaaggagctcgacggccgcaacatcaccgtcaatgaggcccagtcccgccgctccggcggcggaggcgggggctactgcggcggcggtggcggctacagcggcggtcgtggaggcggcggctacagagg

SEQ ID NO: 400869 - DNA, 409 bp, Oryza sativa nipponbare
ccacgcgtccgtgttcggcttcttcgtccaggccatcgtcaccggcaagggccccctcgagaacctcgccgaccacctcgccgaccccgtcaacaacaacgcctgggcctacgccaccaacttcgtccccggcaagtgagcgccgccgccgccgtgctgccatggcgacgcatcgccttcagctaagctagctaggttgacgacgatgcgcgtctctgcaggagagtgtgcgtgtgtgtacgcggtgcagtagatgtacgtacgtgtaccgtatagatgtacgtattcgtgtggaccgcgtggatggatgtacgagtattggagagagggtgagatctgtaccggtagtgtgtatttctgtgcaggttctgaacctgatcaatgaaatatggtgttgtgaattaattat

SEQ ID NO: 400870 - DNA, 437 bp, Oryza sativa nipponbare
ccacgcgtccgcggacgcgtgggctacggggaggtcaggttctccgacctctccggcttcaggtatttggtctggatcaacgccatcacggctgcctactcggtggcctccatcctgctgtcatcctgcaggttcatcactcgctttgattggctcattttcctcctggatcaggcgtcggcgtacctgctgctgacgtcggcgtcggcggcggcggaggtggtgtacctggcgcgggagggcgaccgggaggtgtcgtggggggaggtgtgctcctacttcggccgcttctgcggcgccgccaccgtgtccgtggcgctcaacgccgccgccctcctctgcttcatggcgctctccctcatctccgccttcagggtcttcaccaagttcaacccaccatctcaatccaactccaagcagcagctgtcgcaggagca

SEQ ID NO: 400871 - DNA, 444 bp, Oryza sativa nipponbare
ccacgcgtccgcggacgcgtgggcggacgcgtgggatctcgtcccccctcttcccggcgcggcggttgctctccagccatggccgccgccgccgccgccgccgtcgcctgcggcatgtctacgtccttcctcatccgcctctcgccttcgccgccggcgtcttcccacgtgcctctccctcggtctccggcttcgtcggcgcgcccgcggcgagcgtcttccgtctccctctccaccgcgcctaggccgagggcacgcgccgccggctccgactctccctccaactttggaggtcaaacatcactgatgccaccattcagccttatgcttgatgaaggctctagatctaaaaagccatatagatggcaaagggtgttgcttaaagtaagtggggaggctcttgctggagatcacacagaaaatattgatccaaagatcacgatg

SEQ ID NO: 400872 - DNA, 442 bp, Oryza sativa nipponbare
ccacgcgtccgacgacacgcagtcgtgcatggaccccaacgtgatggagtccagggtggtggtgagctcctgcggccacgacgggccgttcggcgccacgggcgtcaagcggctgcaggacatcggcatgatcgacgccgtgcccggcatgcgcgccctcgacatgaacaccgccgaggacgagatcgtccgcctcacccgcgaggtcgtccccggcatgatcgtcaccggcatagaggtcgccgagatcgacggcgccccgagaatgggcccgacgttcggagccatgatgatctccggccagaaggcggcgcacctggcgctgaaggcgctcggccggccgaacgccatcgacggcacgatcaagaaggcggcggcggcggcggcgcacccggagctgatcctggcgtcgaaggacgacggcgagatcgtggacgcctga

SEQ ID NO: 400873 - DNA, 442 bp, Oryza sativa nipponbare
ccacgcgtccgcggacgcgtgggcggacgcgtgggcgcgccgcgcactccttgcactagcccatggcgacggctatgatggctgcgaccgccacctcgtgctcccctcgccgcgcgccggtcgtcgcgtcgtcgtccgtgcagccgcccaggcggcagcagcagcagcaaccgcggaggggattgaagcagctgccggggctcgtggcgacggcggccgtggccgtggccgcggcgccgctaccggcgctggcggagcagatggagaaggcggcgctgttcgacttcaacctgacgctcccgctgatcgcgaccgagttcctgctgctgatggtggcgctggacaagctctacttcacgccgctgggcaagttcatggacgagcgcgacgccaagatccgtgccgagctcggcggcgtcaaggacgcgtccgaggaggtgcg

SEQ ID NO: 400874 - DNA, 441 bp, Oryza sativa nipponbare
ccacgcgtccgggtgttaagaagcacttagcaccatttttaccatctcatccagtgatcaccactggtggcttccctctccctgagaaaaccgaccctcttggtaccatttctgctgccccatggggatcagcgttgattctgccaatttcctacacatacatagccatgatgggttctaagggtctcactgatgcttcaaagattgcaatcttgaatgcaaactacatggcaaagcgtctggagaaacactacccagttcttttccgtggagtcaatggaactgttgcccatgaattcatcattgatttaagaggatttaagacgactgctggtatagagccagaggatgttgcaaagcgtttgatggactatggattccatgcacctactatgtcatggcctgttccaggcacacttatgattgaacccactgaaagtg

SEQ ID NO: 400875 - DNA, 445 bp, Oryza sativa nipponbare
ccacgcgtccgaaattcttgcacacgcgcagctcgagccatggccggagtgagcaccagcgtcgtcggcctcaagcccgccgcggcggtgccgcagtcggccgcctcgccggtgccgaagcgcgtgcacgtcgctgtgccgcccaaggaggagcagggcggtggcaggcgcgccgcgctgctgggtctcgccgccgtgttcgccgccaccgccgccgggcaggccaaggccggcgtgttcgacgagtacctcgagaagagcaaggccaacaaggagctgaacgacaagaagaggctggcgacgagcggcgccaacttcgcgagggcgtacaccgtcgagttcggcagctgccagttcccctacaacttcaccggctgccaggacctcgccaagcagaagaaagtcccattcatctcagatgatctcgagatcgagtgcgaggggg

SEQ ID NO: 400876 - DNA, 442 bp, Oryza sativa nipponbare
ccacgcgtccggctctagggtttttcccttgctcgtctgcgccgccacctcctccaccttctcttcccctcccaaccatgacggcggccgagatcgggaagcaggaggaggagctccgcgcccagatcgaggagcagaagctcaacgagggagatgagccagtcgttgttgaagatgacgatgacgatgaagatgatgacgacgaggatgacaaagatgacgatgatgcggagggaggtgatgcaagtggaagatctaagcagagtcgtagtgagaaaaaaagcaggaaggccatggtgaagcttggcatgaagtctatcactggtgtgagccgtgttactgtcaagaagagcaagaatatcctttttgtcatctccaaaccggatgtcttcaagagccctacatccgacacctatgtcatttttggcgaggccaagatcga

SEQ ID NO: 400877 - DNA, 441 bp, Oryza sativa nipponbare
ccacgcgtccggcaacgtcagcaatggcggcaggatcaggtgcatgcaggtgtggccgattgagggcatcaagaagttcgagaccctctcctacctgccaccgctcaccgtggaggacctcctgaagcagatcgagtacctgctccgttccaagtgggtgccctgcctcgagttcagcaaggtcggattcgtctaccgtgagaaccacagatcccccggatactacgatggcaggtactggaccatgtggaagctgcccatgttcgggtgcactgacgccacccaggtgctcaaggagctcgaggaggccaagaaggcgtaccctgatgcattcgtccgtatcatcggcttcgacaacgtcaggcaggtgcagctcatcagcttcatcgcctacaagcccccgggctgcgaggagtctggtggcaactaagccgtcatcgt

SEQ ID NO: 400878 - DNA, 437 bp, Oryza sativa nipponbare
ccacgcgtccgggagtacggatacatgcttgtgaaggagcaggagaacgtcaagcgtgtgcagctggctgagcagtacttgagcgaggctgctcttggtgacgctaactccgacgccatgaagactggttccttctacggttctgcgccatccagctgaataaaagatctctagctattcgcatcccatcgatgcatcgtaggcggcctgcataggaggaggagggcaaggagcacagcaagcaggtaacctgcctgtgccggaaggttgcaccgaccctgttgccaagaacttcgacccaacggcgaggagcgacgacggcagctgcctttacaccttttaagcaggccggcttgacgcttgctattaattatttctcctttttatgttttctctttgttctgtgtatcagatcgcgcccaagccatagctgggca

SEQ ID NO: 400879 - DNA, 439 bp, Oryza sativa nipponbare
ccacgcgtccgcccacgcgtccgcccacgcgtccgcccacgcgtccgcccacgcgtccggagagagggagagagaacggaggagagaaaggacagaaagcttgatactgatcaactccaacaatgaggccattattctccaaggaacatttggacctgatgacaaccaggatgactcgagcaatacaagttctggtgtttcacttggtgactactttcttggtcctggattagatatcctcttgcagcatttggcggaaagtgatcttaatcgttctggtacaccacctgccaagaaggaagctgtagaagcattgccaactgtgaacatccaggaagtgttaggctgttctgtctgtcttgaggatttcgaaatggggacagaagcgaaggagatgccttgtcaacataagttccactcccagtgcatacttccatgg

SEQ ID NO: 400880 - DNA, 439 bp, Oryza sativa nipponbare
ccacgcgtccgcccacgcgtccgcaagaaagcataagcaacacaagggattaactcatcactcacttagctaattaaatcttcgaccatgtcggacaagtgcggcaactgcgactgtgctgacaagagccagtgcgtgaagaaaggtaccagctatggcgtcgtcatagttgaagccgagaagagccacttcgaggaggtcgccgccggcgaggagaacggcggctgcaagtgcggcaccagctgctcctgcaccgactgcaagtgcggcaagtgaagtcacgaagcaaccgaacactcgccgccggcgagtcacctaccttaattagtccacaataaaaaccacccatatgagtgtggtttgtgtgtgtgctgattattgctgaattaaacccgtgtgttatcgattaattaagcagctggtcgcttcggcgactatg

SEQ ID NO: 400881 - DNA, 370 bp, Oryza sativa nipponbare
  unsure (1)..(370): unsure at all n locations
ccacgcgtccgctctcagctctcacagctcactgcatcaatggccgcggccaccatggcgctctcctccccggtgatggcccgcgcggcgccgtcgacctcctccgcgctcttcggcgaggcgcggatcaccatgcgcaagaccgccgcgaagcccaagccggcggcgtcgtcggggagcccgtggtacggcgccgaccgcgtactctacctcggcccgctctccggcgagccggcgagctacctcaccggcgagtgcccaggcgactacatgcggtacagcgatgctctctccgccgacccggagacgttcgccaagaaccgggagctggaggtgatccactccccggtgggcgatgcntggcgcgctc

SEQ ID NO: 400882 - DNA, 392 bp, Oryza sativa nipponbare
ccacgcgtccgcccacgcgtccggcctacgtcaccggcgagggccccgtcgagaacctctccaagcacctcagcgaccccttcggcaacaacctgctcaccgtcatctccggcgccgccgagaggacgcccagcctgtaaacatctcgccgccggcgacgctggctggcctcaagttaattttaatcttacccgggaagaagaagggaggagtttgagaagggtggaagaatgtgttaaatgtacgtgtaaattatcgtcgagttgggagatgaatttgaaaacctgttcattctgatcttctgataggaaggaccaagtgtttggatttgtggctgagaaatatttgctacctgagtaaattgtctcgaagtggttttcatcatcgttgac

SEQ ID NO: 400883 - DNA, 308 bp, Oryza sativa nipponbare
ccacgcgtccgcccacgcgtccggtcgacagggactacctatcctacgacgagcccaccacggtgttccccgaggaggcgtgcgacgatctgggcggagagttctgcaaggccacctgatcccattcccatccatggagaattggagtcttctatcatccttcctcctctgctccactaccttaattccatgtagctacagatttatatgttaatcatcatgtaatggtacatatctccttgttaataaggcacgctagtctagctcctcaaaatgatttacaataatataatatttacatacatata

SEQ ID NO: 400884 - DNA, 442 bp, Oryza sativa nipponbare
ccacgcgtccgcggacgcgtgggccgccgccgctgcccagagctggtgcttcgccactgtcaccccgcgctcccgcgccacagtcgtcgccagcctcgcctccccatcaccgtcctcctcctcctcctcctccaacagcagcaacctcccggcccccttccgcccccgcctcatccgcaacacccccgtcttcgccgcccccgtcgcccccgccgcgatggacgccgccgtcgaccgcctcaaggatgggttcgccaagttcaagaccgagttctatgacaagaagccggagctcttcgagccgctcaaggccggccaggcacccaagtacatggtgttctcgtgcgccgactctcgcgtgtgcccgtcggtgaccatgggcctggagcccggcgaggccttcaccgtccgcaacatcgccaacatggtcccagcttactgc

SEQ ID NO: 400885 - DNA, 439 bp, Oryza sativa nipponbare
ccacgcgtccgaaggccagagagctatagctagccaagattctccagtgagattctcagctgtccccggccgttcgtccgtccaaggaaggagagccatggtgggaacctcctcctggtcatcgtcctcgacgtgcacgtcgtcgctcggctctctcgacgacgacgtcgtcgtcgcgtgcgtcgtcaaggcagcggacgccgcagccgaggggacgttcgtcaagttcctctgcagctacggcgggaggatcctccctcgccacgccgacggcgcgttgcgctacgtcggcggcgacaaccgcgtcgtctccgtcgaccgctccctccctttccacgagttgcaacggaagctgagggagatgtgcgggtgggaggcggtgtgcctgcggtgccagctcccgacggaggacctggacgcgctcgtctccgtcaccggc

SEQ ID NO: 400886 - DNA, 405 bp, Oryza sativa nipponbare
ccacgcgtccgcgccctttttttttttttttttttatcgttgaattgttcgtctcattgctattgatgaattgatacacacttgcatacacacaagagaaaactgaggaacagatcatcggtacgtagtatattcgcgatggacaaatcgatatatatatatataggatagagccgtaggaggcatatttagattgagaagaaagaataattagttgacggtgaccttgccgaccatcccagctccggcgtgcggctcgcagtagaagccgtatgtgccggggacggtgagcgtgacggagaaggtctcgccgggggcgttgaggtactcctcctgcgatatcttggacacgtcgacgccgctcggaaccgcgtcctcgtcgaacaccacgttgtgagggaagcc

SEQ ID NO: 400887 - DNA, 441 bp, Oryza sativa nipponbare
ccacgcgtccgatttcagcagatatggaagaatacgtgaagtggagttgaagcgcgactacgcatttattgagttcagtgatccccgtgatgctgaggaagcaaggtacaaccttgatggcagggatgttgatggaagccgcattcttgttgagtttgctaaaggggttccacgtggtcctggtggttcacgtgaatatatggggagaggacctcctcctggaacaggtcggtgttttaactgtgggattgatggtcactgggcaagagactgcaaggctggtgactggaagaacaaatgttaccgctgtggggagagaggtcacatagaaagaaactgtcaaaacagcccaagaaatctcaggcgtgagagaagttattcatgctctccatcgccacgccgtggacgtggtcgcagtcggagctatagccggagccggag

SEQ ID NO: 400888 - DNA, 438 bp, Oryza sativa nipponbare
ccacgcgtccggcagatccgcagctaagaaggagagagctagctgagctgcatagatggccccgctcacgatggcacttacggccaccaccgtatctcccttccaggggctcaagtccaccgccggcctgcccgtggcccgactatccagcaactgcagcttcttgaacgtaacgacatgacgtcaggatcacgtgcatgcaggaacacccgattgaggacataaagatgatgctgaccctcttctaccagccaccgctctcgtggaggacctctagaccagataaagtacatgctccgctccaggtgactgccatgccataaacacaaaaaggtcggatacatgtaccgtgaaaaccacatatccactgcttactacgttagctggtacaggaccatgatgtagctgaccatgtgccggtgcactgactcgcaccca

SEQ ID NO: 400889 - DNA, 439 bp, Oryza sativa nipponbare
ccacgcgtccgcccacgcgtccggatcgaggtgctcgtcatcggctacatcgagttccagcgcaacgcggagctggacccggagaagaggctgtacccgggggggtcctacttcgacccgctcgggttggcgtcggacccggagaagaaggagcggctgcagctggcggagatcaagcacgcccgcctcgccatggtcgccttcctcggcttcgccgtgcaggccgccgccaccggcaaggggcccctcaacaactgggccacccacctaagcgacccgctccacaccaccatcttcgacaccttcttctcatcctcttaatttaagctctttcgcgcgcaattcaaacgggatcgatgcgttggtgtgcgttcgcgcgcgctgtttagttttgtgatgaccagcgagctgggagggtatggagagaggagaggtcatt

SEQ ID NO: 400890 - DNA, 422 bp, Oryza sativa nipponbare
ccacgcgtccgcggacgcgtgggcaagaagtgctcgagcaaagaaggagagagcttggtgagctgcacagatggccccctccgtgatggcgtagtcggccaccaccgtcgctcccttacaagggctcaagtccaccgccggcatgcccgtcgcccgccgatccggcaactgcagctttggcaacgtcagcaatggcggcaggatcaggtgcatgcaagcgtggccgattgagggcatcaagaaggtcgagaccctctgctacctgacaccgatcaccgtggaggacctactgaagcagatcgagtacctgctccgatccaagcgggtgccctgcctggagtacagcaaggacggattcgtctaccgtgagaaccacagatcccccgaatactacgatggcaggtactggaccatgtggaagc

SEQ ID NO: 400891 - DNA, 441 bp, Oryza sativa nipponbare
ccacgcgtccgctcgagcaaagaaggagagagctcggtgagctgcatagatggccccctccgtgatggcgtcgtggtccaccaccagggctcgctttcagaggcctcaagtacaccgccaaggtgccattcgtccatcacgccaatggaacaaaatattccacgttttgcccaatttccaggatcaggtgcatgcaggtgtggccgattgagggcatcaagaagttctagaccctgtcctacctgccaccgctcaccgtggaggacctactgaagcatatccagcaccttgtgcgatccaagctggcgccatgcctcgagctcagcagaagtatttcattagtgctgagattgcccgtagtgcacatgctcggaagagggtcgttctaccacggattccattgcaccccttgggggatcttcaattgcccccatgtgctca

SEQ ID NO: 400892 - DNA, 441 bp, Oryza sativa nipponbare
ccacgcgtccggcgaccccttcttcggcagcctggagacgccggtgacctccagcccgctggtcgcctggtacctctccaacctcccggcgtaccgcaccgccgtcagcccgctgctccgcggcatcgaggtcggcctcgcccacggctacctcctcgtcgggcccttcgcgctcaccggcccgctccgcaacacgccggtgcacggccaggccggcgccctcggcgccgcaggcctcgtcgccatcctcagcgtctgcctcaccatgtacggcgtcgcctccttcggcgagggcgagccgtccacggcgccgacgctgacgctcaccggccgcaagaaggaggccgacaagctgcagaccgccgacggctgggccaagttcaccggcggcttcttcttcggcggcatctccggcgtcctctgggcctacttcctcctcta

SEQ ID NO: 400893 - DNA, 441 bp, Oryza sativa nipponbare
ccacgcgtccgggcacaagcaaatccgccgcagcttcgggctctgcacccaccggcggcaagcaggggagggagaagaggagaagatgggtgggggcatggaggtgcacaagaaccggtggatcgaggagtggaacgccggccgcgagaacctcgagttcaacttccgctggacgcgccgcagcctcgccgtcgtcggcctcttcggcctcgccgtccccatcctcgtctacaagggcatcgtccgtgaattccacatgcaagatgaggatgctggaagaccaccgaggaagttcttgtaagttgtaaccagccagaatcatgctagttttgttttaagaaataaatgcctttaccacacggcacaccctggcgattccaatctgagaaacatggtgacactcagttctgcacttctgcttgtaagcttttagctgctgtg

SEQ ID NO: 400894 - DNA, 440 bp, Oryza sativa nipponbare
ccacgcgtccggcagcagccgtcagccaccacccaccgcgaccgaggaagaagaagagaggagatcaggaggaggggaagaggaagtagggatgggtttcgtgatggagttcgcggagaacctgatcctgcggatgatggaggacccggggaagcgggacgcggcgcatcgggagcacgtgtaccggatgaaggagcggtgcgagcgcaccaaggcggcgtggagcctcccgctccgcccctacggcttctggaccttcgaccgcttcaactcccagctctcctgggatccccagatcagccacgcccccggccgccgcgacccctacgacggcgtcctccaccgtcactccaacccacccccctcctcctcctgatcccccgattcgatccggaatagatgccgttcgtgaggaagtgtggtcgcaataagaaacccgt

SEQ ID NO: 400895 - DNA, 422 bp, Oryza sativa nipponbare
ccacgcgtccgattacattcaataggcgggtcgcatattgaatataatggtccacacctttgaaacccatgggcacgttgtatatactatgtgcaccttctcttcattcagcgcgcgcatcgcctacgaggcgcgcaagcagttacccgacgatcgaatctggctcaccaacgagatcatccacagcccgacctggaacaagcgatcggaggtcatgggcctccaaaacatgactgttgatgcaggtatcaaggatatggatgttgtctagcaaggggatgatggcgcattgcctgcatttgcagccgtcgtggaggagatgtacacgctgaatgagcagagggcgcaggtagtcgatacaacgtgcccctgggtttcaaaggtgtggagcatgatttcacatctgcgagccggcgactgca

SEQ ID NO: 400896 - DNA, 435 bp, Oryza sativa nipponbare
ccacgcgtccgggaaggcacccttcatggtcagggcagaggccactccccctgccaagcaaggtgctgacaggcagctgtggttcgcatccaagcagtccctgagctacctggatggcacgcttccgggagacttcgggttcgacccgctggggctatcggacccggaggggaccggtgggttcatcgagccacggtggctggcctacggcgaggtgttcaacggccggacggcgatgatgggcgtcgtcggcatggtcgccccggagctcctcggcaagctgggcctcgtccccgccgagacggcgatcccgtggttccagaccggcgtgatcccccccgcgggcacctacacctactgggccgacccttacactctcttcgtcttcgagctcgccctcgtcggcttcgccgagcaccgccgcttccaggactg

SEQ ID NO: 400897 - DNA, 441 bp, Oryza sativa nipponbare
ccacgcgtccggcagcagtagctgagcttgaagcagcagagcgaggtagacatggccgccgccaccatggccctctcgtccccggcgctggccggcaaggccgccgcgaaggtgttcggcgaggggcgcatcaccatgcgcaagtcggcggcgaagcccaagcccgccgcgtcggggagcccgtggtacggcgccgaccgcgtgctctacctcggcccgctctccggcgagccgccgagctacctgaccggcgagttccccggcgactacgggtgggacaccgcggggctctccgccgacccggagacgttcgccaagaaccgggagctggaggtgatccactccaggtgggcgatgctcggcgcgctgggctgcgtgttcccggagctcctcgcccgcaacggcgtcaagttcggcgaggcggtgtggttcaaggcgggg

SEQ ID NO: 400898 - DNA, 436 bp, Oryza sativa nipponbare
ccacgcgtccgcccacacattctcgaagaaggagaagaaggagaggagcagccatggcgtcgtcggtggcagcggcggcgagcacgttcctggggacgaggctggcggacccggcgccgcagagcgggaggatcgtggcgaggttcgggttcggcggcgggaagaaggcggcggcgaagaaggcggcgaggccgtcggcgccgacgacggacaggccgctgtggttccccggcgcggtggcgccggactacctggacgggtcgctcgtcggcgactacggcttcgacccgttcggcctcgggaagccggcggagtacctgcagttcgagctggactcgctggaccagaacctggccaagaacaacgccggcgagatcatcggcacccggttcgagaccggcgaggtgaagtccaccccgttccagccctacaccga

SEQ ID NO: 400899 - DNA, 444 bp, Oryza sativa nipponbare
ccacgcgtccgctcgtcgcaacagctacaaacgcccacatcacacgcagaaatccgcatcaacagccagccatggcgtccacgctgaccaacgtcggcctgtctaccccggcggcggcggcgtcgtccctcgttaggccggtcgccggagctggacgcgtggtgtttccccgtgttggccgcggcgggttcgcggcggtgagggcgagcgggccggcgacgccgccggacatctcggacaagatgtcggagagcatcgacaaggcgaaggaggcgtgcgcggaggacacggcgagcggcgagtgcgcggcggcgtgggacgaggtggaggagctgagcgcggcggcgagccacgcgcgcgacaagctcaaggagacctccgacccgctcgaggcctactgcaaggacaacccggagaccgacgagtgccgcacctacgacaact

SEQ ID NO: 400900 - DNA, 446 bp, Oryza sativa nipponbare
ccacgcgtccgcgccacgctcgttgccaagaagctcttcaacgccaagatcaagccctacatcccggacttcaagctcgcgttcgagcacttctgcatccacgccggtggccgcgccgtgatcgacgagctggagaagaacctccagctgcagccggtccacgtcgaggcctctcgcatgacgctccaccgcttcggcaacacgtcgagcagctccatctggtacgagctcgcctacatggaggccaagggccgggtccgccgcggccaccgcatctggcagatcgcgttcggcagcgggttcaagtgcaacagcgccgtctggcacgctctccgcaacgtcaatccgtcgccggagagcccctgggaggattgcattgaccgctacccggtggagctcgtcgacggcttcgccacccacaacaacacgcagcaataacaccatct

SEQ ID NO: 400901 - DNA, 440 bp, Oryza sativa nipponbare
ccacgcgtccgttctgatatccgaaagcttttgcgacgtattcttgatccaaaccctgcgacacggatctcagtttcagaaattatggaagatccttggtttagagtaggtcttaattcagatctacttaacaagaccataccaacagataaagttgataaagttgtgcatgttgacatggattcaacatttggtaatttaagcaacaatataaatgaaggaaaacaagaagcagaaaatcttactagcttgaatgcttttgatattatttctctttcatcaggatttgatctttctgctatgtttgaagatgaaaacagcaaagaggaatcaaaatttacatccactaacacagctacgacaatcaccaaaaagcttgaggatgttgcgaagaatttacgattaaaattcttgaagaaaaatggtggtttgttaaagat

SEQ ID NO: 400902 - DNA, 436 bp, Oryza sativa nipponbare
ccacgcgtccgacaggaccctcagggacaggggccctctcccagctagtcaggtcgtgagagatctcagcgggaagttcacgttcatcctgtatgacactctgtcaaaatccaccttcgttgctgcagatgctgatggtagcattcctttcttctggggcgttgactccgagaaccaccttgtgttctctgacaatgttgaccttctcaaggcatcctgcgggaactcgtttgcgccattccccaaaggctgcttctacaccacctctggagggctgcagagcttcgagcacccgctgaacgagctgaagcctgtgccgcgggtcgacagccagggccagatgtgcggctccaactacaaggtcgacagcgaggccaagaaggactccgggatccctcgggtcggcagcgccgcagactggtccaaccatttctga

SEQ ID NO: 400903 - DNA, 442 bp, Oryza sativa nipponbare
ccacgcgtccggaagtactcgagcaaagaaggagagagcttggtgagctgcagagatggccccctccgtgatggcgtcgtcggccaccaccgtcgctcccttccaggggctcaagtccaccgccggcatgcccgtcgcccgccgctccggcaactccagcttcggcaacgtcagcaatggcggcaggatcaggtgcatgcaggtgtggccgattgagggcatcaagaagttcgagaccctctcctacctgccaccgctcaccgtggaggacctcctgaagcagatcgagtacctgctccgttccaagtgggtgccctgcctcgagttcagcaaggtcggattcgtctaccgtgagaaccacagatcccccggatactacgatggcaggtactggaccatgtggaagctgcccatgttcgggtgcactgacgccacccaggtg

SEQ ID NO: 400904 - DNA, 443 bp, Oryza sativa nipponbare
  unsure (1)..(443): unsure at all n locations
ccacgcgtccgcccaaatctcaaatcctcctccgtctccaagctctcgtcgtcgtcgtcagacatgtcgggccgtggcaagggaggcaaggggctgggcaagggaggcgcgaagaggcacaggaaggtgctgcgcgacaacatccaggggatcacgaagcccgcgatccggaggctggcgaggaggggcggcgtgaagcgcatctccgggctgatctacgaggagacccgcggcgtgctcaagatcttcctcgagaacgtcatccgcgacgccgtcacctacaccgagcacgcccgccgcaagaccgtcaccgccatggacgtcgtctacgcgctcaagcgccagggccgcaccctctacggcttcggcggctgattccttccttccttccttcctggtggcgtgcgggttgtggtggtggtgtangagctaggggttcgatg

SEQ ID NO: 400905 - DNA, 442 bp, Oryza sativa nipponbare
ccacgcgtccgcggacgcgtgggcggacgcgtgggcggacgcgtgggcggacgcgtggggaagtactcgagcaaagaaggagagagcttggtgagctgcatagatggccccctccgtgatggcgtggtggtccaccaccgcctctcccttacaggggctcaagtccaccgccggcatgcccgtcggccgccgctccagcaactccagcttctgcaacatcagcaatggcggcaggatcaggtgcatgcaggtgtggccgattgagggcatcaagaagttagagaccctatcctacctgccaccgctcaccgtggaggacctgctgaagcacatctgagtacctgctccgttccaagtgtatgccctgcctcgagttcagcaaggtcggattcgtctaccgtgagaaccacagatcccccggatactacgatggcaggtactg

SEQ ID NO: 400906 - DNA, 440 bp, Oryza sativa nipponbare
ccacgcgtccgcccacgcgtccgcccacgcgtccgattatgtgtgaatcatacatattgtaacagctgcagtagtttaaaactgggtttttgtaggtcacaacaatcccaaacccaaaaaaggatatatctgatatctgtcagaactttactagaccaaaataaccatattttcatttcatggcataatttactcataccttagttttctttcaatatggtgtttcaataacacattacatccagtgctcagtccagaggttctttccatggtgtttcaataagttattacatcaagtggtcaccccaaaggatcaatgcttgcatttcccataggtacttttatgctagaaaagtatcaaccttagttgatttgtattaatgaccatgatttattgaatttcttatcagtgttcacatcaagagtatatgttatacctc

SEQ ID NO: 400907 - DNA, 441 bp, Oryza sativa nipponbare
ccacgcgtccgcccaccgtccgcccacgcgtccgggtgctgaaggtgatattcagattttcagagtgagtgctcgtgtgttgtgcgatcagtgcccgcagttcgatcgatccgtgttgatctttgaaagaaagatgtcgtgctgcggaggaaactgcggctgcggatccggctgccagtgcggcagcggctgcggaggatgcaagatgtacccggagatggctgaggaggtgaccactacccagactgtcatcatgggtgttgcaccttccaagggtcatgccgaggggttggaggccggcgccgccgccggagcaggagcagagaacgggtgcaagtgcggcgacaactgcacctgcaacccctgcaactgcggcaagtgaagcaagcaacctcctgacgaaaccaaggagatggaagggcctagtactgctaagctagt

SEQ ID NO: 400908 - DNA, 442 bp, Oryza sativa nipponbare
ccacgcgtccgcggacgcgtgggcggacgcgtgggcggacgcgtggggttccctgctgttattttcacctgcattgcattatctactgttttgtttgctggtgctgcaattatgggatacataatgtttggtgaatcaacagaatctcagttcacattgaacttgccatctaatctggtagcttccaagattgccgtctggacaacggtgacaaatccaataactaaatatccttactgtgttattttgtcttttttacacctattttcccacgctactttgtcattattgaacaacatgttggcagttcattacaaactaatagatagctagttcaattatacggaataagaagattttcaatttattaggttgtaaaaaagcatatttaattcaagtttctcataatgttgtttcatactttgttccatgttgtaagccg

SEQ ID NO: 400909 - DNA, 441 bp, Oryza sativa nipponbare
ccacgcgtccgcccacgcgtccgcccacgcgtccgaagcagaaagctagagagctagcaatggcgcccaccgtgatggcctcgtcggccacctccgttgctcccttccaggggctcaaatccaccgccgggctccccgtcagccgccgctccaacagcgccggcctcggcagcgtcagcaacggtggaaggatcagctgtatgcaggtgtggccgattgaaggcatcaagaagtttgagaccctgtcgtacctgccaccgctcacggtcgaggacctcttgaagcagatcgagtacctgctccggtccaaatgggtgccttgcctcgagtttagtaaggtcgggttcgtctaccgtgagaaccacaggtctcctgggtactatgatggcaggtactggaccatgtggaagctgcctatgttcggatgcactgatgccaccc

SEQ ID NO: 400910 - DNA, 448 bp, Oryza sativa nipponbare
ccacgcgtccgatcgaatccaccacacggtaccctcctctctcctgctccgaccaccatggccatggccacgcaagcctccgccgccaagtgccacctcctcgccgcctgggcaccggcgaagccgcgctcatccaccctctccatgcccacctcgagggcacccacctccctcagagcggcggcggaggatcagcccgccgcggcggcgacggaggagaagaagccagcccccgcggggttcgtgccgccgcagctggaccccaacacgccgtccccgatcttcggcgggagcacggggggactcctccggaaggcgcaggtggaggagttctacgtcatcacatggacgtcgcccaaggagcaggtgttcgagatgcccacgggcggcgccgccatcatgcgcgagggccccaacctgctgaagctggccaggaaggagcagtgcc

SEQ ID NO: 400911 - DNA, 438 bp, Oryza sativa nipponbare
ccacgcgtccgcggacgcgtgggccgcctccctccgcgtccgctcccaccaggagaacgtcgccggtgtcaagctccccaagttcacccacttcgtcgaccccgccgccggctccgctgggccatccaacgcgtcccccagcctcaccggcctcgcccgcggcgggcagcaggtcgccgcctgccgcgccgcgcacgtcaaggccatcgaggtgctcgtcgagctcgcctcgctgcagacgtccttcctgaccctcgatgaggccatcaagaccaccaaccgccgtgtcaacgcgctggagaacgtcgtgaagccgaggctggagaacaccatcagctacatcaagggggagctggacgagctcgagcgtgaggacttcttcaggctcaagaagatccagggttacaagaagagggagatcgagaggcagatggctgc

SEQ ID NO: 400912 - DNA, 441 bp, Oryza sativa nipponbare
ccacgcgtccgagaagtacaaggaccagggttttgagatccttgctttcccatgcaaccagtttggtggacaggaacctggcactaatgaggagattgtccaatttgcttgcacccgcttcaaggccgagtatccaatttttgataaggttgatgttaatggtgacaacactgcacccatctacaagtttctgaagtccagcaaaggtggtcttttcggtgacaatatcaaatggaacttctccaagttcttggtcgacaaagaggggcgtgttgtggagcgctatgcgccaactacttctccactcagcatggagaaggacatcaagaagctgcttggaagttcttaaaaccttaccgccggcgccaccagatgcactgctgcgttgcattgagcacttggaacttccaataatgttgtaataaaactgtgcttggaatt

SEQ ID NO: 400913 - DNA, 440 bp, Oryza sativa nipponbare
ccacgcgtccggctagagggcttcttctctttggtcccccggggaatggaaagacgatgcttgccaaagctgttgcatcagaatctgaagcaacattttttaatgtttcagcttcttcactgacatcaaagtgggtaggagaggctgaaaagcttgtacggacactcttcatggtcgctgtcgatagacaaccatctgtaatttttatggatgagattgatagtgtcatgtcagcaaggttagctaatgagaatgatgctagcaggcggttgaaatctgaatttcttatccagtttgatggggtcacttcaaaccctgatgatcttgttattgttataggtgctaccaataagccacaagagctggatgatgctgttctccgtagactggtaaagagaatatatgtgccattacctgatccaaatgtccgaagattactg

SEQ ID NO: 400914 - DNA, 444 bp, Oryza sativa nipponbare
ccacgcgtccggtactcgagcaaagaaggagagagcttggtgagctgcagagatggccccctccgtgatggcgtcgtcggccaccaccgtcgctcccttccaggggctcaagtccaccgccggcatgcccgtcgcccgccgctccggcaactccagcttcggcaacgtcagcaatggcggcaggatcaggtgcatgcaggtgtggccgattgagggcatcaagaagttcgagaccctctcctacctgccaccgctcaccgtggaggacctcctgaagcagatcgagtacctgctccgttccaagtgggtgccctgcctcgagttcagcaaggtcggattcgtctaccgtgagaaccacagatcccccggatactacgatggcaggtactggaccatgtggaagctgcccatgttcgggtgcactgacgccacccaggtgctcaa

SEQ ID NO: 400915 - DNA, 442 bp, Oryza sativa nipponbare
ccacgcgtccgcggacgcgtgggcggacgcgtgggcggacgcgtggggggagttttctcagaaacatcattccccccaccccagccatcatccgtctgctccggaacccggctctgagagagtgagaggatttgagataaagaggccggctgtggccttgatcctgcctcgcaagctggcgttgtcacaggcatgtcttcagtgtcgccgagaaaacagccgcttgttcagcgggaggcatccacgagcatgaatgataacgagggcggattctcatggctgacagctctgggattcggtttccttaccttcaactccgggatggcgatctaccggtccgatggcgatcgtggatcggtggcgttcgtattaacatcgtacatcgatctcgtgctgctcttcgcgtgcctccgtctcttcgagaaagcgccgagggactctg

SEQ ID NO: 400916 - DNA, 446 bp, Oryza sativa nipponbare
ccacgcgtccggcgcgccgtgcaccgcctctcacaatgtcgaccgccgccgccgccgccgctgcccagagctggtgcttcgccactgtcaccccgcgctcccgcgccacagtcgtcgccagcctcgcctccccatcaccgtcctcctcctcctcctcctccaacagcagcaacctcccggcccccttccgcccccgcctcatccgcaacacccccgtcttcgccgcccccgtcgcccccgccgcgatggacgccgccgtcgaccgcctcaaggatgggttcgccaagttcaagaccgagttctatgacaagaagccggagctcttcgagccgctcaaggccggccaggcacccaagtacatggtgttctcgtgcgccgactctcgcgtgtgcccgtcggtgaccatgggcctggagcccggcgaggccttcaccgtccgcaacatc

SEQ ID NO: 400917 - DNA, 440 bp, Oryza sativa nipponbare
ccacgcgtccggtgggcctgaggcgatggcggcgctcgccccgtccaagatgctcggcacccggctcaacttcgccggctcctcccgctacgccaccgcggcaccgaccaccggagcgcagaagatcgtctccctcttcagcaagaagcccgccccgaagcccaagcccgccgccgtcacctcctcgagccccgacatcggcgatgagctcgccaagtggtacggccctgacaggaggatcttcttgccggagggtctcctggaccgctcagaggtgccggactacctcaacggagaggtccccggagactacggctacgacccttttggcctcagcaagaagccagaggacttctccaagtaccaggcctatgagctgatccatgccaggtgggcgatgctcggcgccgctgggttcatcatccccgaggcctgcaaca

SEQ ID NO: 400918 - DNA, 440 bp, Oryza sativa nipponbare
ccacgcgtccgcggacgcgtgggcggacgcgtgggcggacgcgtgggcgcgactgaaaggagcgcctcgactcgcatctcgccgccgcgcagctaagctagggttttccgccaccgccgatctcgcccccgcccccggccagccatggacgcctctctcatgggcgccccctccgccgcagcgggagacaatcccacctccggggagcaccggatggggaccaccatcgtcggcgtctgctacgacggcggcgtcgtcctcgccgccgattccagaaccagcaccggaatgtatgtggcaaaccgtgcgtcggacaagattactcagctaactgacaatgtgtacatctgccgctctggatctgctgctgatacacaagtaatttccgattatgtacgctattttctccaccaacacacaattcagcttgggcagccagc

SEQ ID NO: 400919 - DNA, 444 bp, Oryza sativa nipponbare
ccacgcgtccgatcaccaccaaggctaacgttgactatgagaagattgtcagggagacatgccgtaacatcggttttgtgtcagctgatgtcggtctcgatgctgaccactgcaaggtgcttgtgaacatcgagcagcagtcccctgacattgcacagggtgtgcacggccacttcaccaagcgccctgaggagattggtgctggtgaccagggacacatgtttggatatgcaactgatgagacccctgagttgatgcccctcagccatgtccttgctaccaagcttggcgctcgtcttacggaggttcgcaagaatgggacctgcgcatggctcaggcctgacgggaagacccaagtgactgttgagtaccgcaatgagagcggtgccagggtccctgtccgtgtccacaccgtcctcatctctacccagcatgatgagacag

SEQ ID NO: 400920 - DNA, 443 bp, Oryza sativa nipponbare
ccacgcgtccgcggacgcgtgggtctcgccaagctcttcctcttcctcttcctcttcctcctcctcgccgcgtgccgagaagatggggaagcggtggatccctctcgaggccaaccccgacgtcatgaaccagttcatgtgggggctgggagtcgccgagggggaggcgcagttctgcgacgtctacggcctcgacgacgagctgctcgccatggtgccccagcccgtgctcgccgtcctcttcctctacccgctcacttccctggacgacgacgaggaggaatcaggcgctgctgccacttccacggctggggacaaggatttgagcaagagggtatactttacaaagcagactgttggcaacgcatgcggaacagttggtgttatccatgcaatagggaatgctgcatccaaactcaagctggttgagggatcctattttg

SEQ ID NO: 400921 - DNA, 440 bp, Oryza sativa nipponbare
ccacgcgtccgcggacgcgtgggcggacgcgtgggtggctgcatatcatttgaaatgggcaataatagtgtgtcagtaacttgatttttggaatgcagttcctcatggagcaatgatctacaagatatgcaacagttcagtgaggattcagattacatggggcattatgttgtaatatgtgggtatgatgctgatgcttgcgaatttgagataagggaccctgccagttcgagacagcgtgaaagggtgtcaatgaagagcttagatcaggcccgcaagtcctttggaactgatgaggatattattttggtttctttaactggaaaaattggaatgaagctctcacgtaaactcctggtgggctccttgtgaaaacctcaactccctggttccatgtgtatatacgttgtacatgccactgtagttatgattgtcatctg

SEQ ID NO: 400922 - DNA, 445 bp, Oryza sativa nipponbare
ccacgcgtccggctcctcctcctcctcctcctcttcctccctcccgatcccctcccccgcacgaaactcaaagcatccccggcgccgcagctccccggaggaggaagcccccgcgccccgccccgaccagatccgatggccaacagcaacctcccccggcgaatcatcaaggagacgcagcgactcctcagcgagccagcgccgggaatcagcgcgtctccgtcggaggagaacatgcgctacttcaacgtcatgatccttggcccggcacagtccccctatgaaggtggagtttttaagcttgaactctttttacctgaggaatatcctatggctgctccaaaggttaggttcctgaccaaaatataccaccccaacattgacaagcttggtaggatatgccttgacattctcaaggacaaatggagcccagcccttcagattc

SEQ ID NO: 400923 - DNA, 447 bp, Oryza sativa nipponbare
ccacgcgtccggttcgccaagaaccgggagctggaggtgatccactccaggtgggcgatgctcggcgcgctgggctgcgtgttcccggagctcctcgcccgcaacggcgtcaagttcggcgaggcggtgtggttcaaggcggggtcgcagatcttcagcgagggcgggctcgactacctcggcaacccgagcctgatccacgcgcagagcatcctcgccatctgggcggtccaggtggtgctcatgggcgccgtcgaggggtaccgcatcgccggcgggccgctcggcgaggtcgtcgacccgctctaccccggcggcagcttcgacccgctcggcctcgccgacgacccggaggccttcgcggagctcaaggtgaaggagatcaagaacggccgcctcgccatgttctccatgttcggcttcttcgtccaggccatcgtcaccggc

SEQ ID NO: 400924 - DNA, 449 bp, Oryza sativa nipponbare
ccacgcgtccgccaagcgctcgccggggcacgtctcggtggtggacttcaagcgcgcgctccgccgcgccttcgggctggagcgcgtcgcggcgtcccgaggcggcgccacggggaacggcaagccacggttgctaatcatttcccgcaagaactcgcggcggttcctcaatgagcgggagatggcgcaggccgctgccgctgtgggcttcgaggtgcgcattgccgagcccgatcagcacaccgacatgtccacattcgcccagctcgtcaattccgccgatgtcatgatcggtgtccatggtgctgggctcaccaacatggtgttcctcccccgcggcgccgtcctcatccaggtggtgccattcggcggcctagagtggctcaccactgtcaccttcaagaatccggcgaaagacatggaggtcacctacatggattacaatgtgc

SEQ ID NO: 400925 - DNA, 448 bp, Oryza sativa nipponbare
ccacgcgtccgctcaagaagtactcgagcaaagaaggagagagcttggtgagctgcagagatggccccctccgtgatggcgtcgtcggccaccaccgtcgctcccttccaggggctcaagtccaccgccggcatgcccgtcgcccgccgctccggcaactccagcttcggcaacgtcagcaatggcggcaggatcaggtgcatgcaggtgtggccgattgagggcatcaagaagttcgagaccctctcctacctgccaccgctcaccgtggaggacctcctgaagcagatcgagtacctgctccgttccaagtgggtgccctgcctcgagttcagcaaggtcggattcgtctaccgtgagaaccacagatcccccggatactacgatggcaggtactggaccatgtggaagctgcccatgttcgggtgcactgacgccacccaggtgc

SEQ ID NO: 400926 - DNA, 356 bp, Oryza sativa nipponbare
  unsure (1)..(356): unsure at all n locations
ccacgcgtccgcggacgcgtgggcggacgcgtggggtgaaattattctccctcaatctctttcaatcctctttaattccctccaaaccaaataaggccttagggaagagaaggggtagggcaaggggaaccaacacaagtcgctgctgccatagcgcatccggtttaaaaccgatgtgacacctcgctgtaaattatgtacttctactgtagagtgtgcagggaacaaacgggttgtgtaagggtaaaagtgtgtccaccatatttgtgtccaattgccgaaggcatagaagtaaaaataaattttgtttcanaaaaaaaaaataaaaaaaaaaaaaaaaaaaaaaaaaaataaaa

SEQ ID NO: 400927 - DNA, 436 bp, Oryza sativa nipponbare
ccacgcgtccgcggacgcgtgggtcagtaccgagcaactgatgcagttctgaaggggcctggcaagctcaagctggtttttgagggaaaggatgagcagattgatctggaggtgttcaacttcactggtgctggaggagttgctttgtctatgtacaacactgatgagtcaatccgagcttttgctgaagcttctatgacaactgcttatgagaagaaatggccgctttatcttagcaccaaaaacacaatcctgaagaaatatgatggaaggttcaaggatattttccaggaggtctatgaagctgggtggaaatccaagtttgaggctgccggaatatggtatgagcatcgtctcatcgatgacatggttgcttatgcacttaagagtgaagggggctatgtgtgggcttgcaagaattacgatggagatgtgc

SEQ ID NO: 400928 - DNA, 440 bp, Oryza sativa nipponbare
ccacgcgtccgctctttttccactacgcactagtagtagcactctggtattctcccatggcgactgcgaccgaggaggttgccgctgcggctgctgccgccggcgaggcgccgccgccgccgccgccagcggtggtagaggaggcgaaggaggctttggaggcaccgaagccggaggaggcgccgaaggctgaggagggggaggagaagaaggcggagggtgagaaggagaaggagaaggcgaagaaggagaggaaaccgagggcgaggaagccccgatcggcggggccacaccacccgccctacttcgagatgatcaaggaggcgatcatggcgctggacgggaacggcaaggcgggatcgagcccgtacgcgatcgccaagtacatgggggagcagcacatgggggttctcccggcgaactaccggaaggtgctcgcc

SEQ ID NO: 400929 - DNA, 442 bp, Oryza sativa nipponbare
attaatatcaatacatgtcaggtaaagtctatgcagggggcatatgtgcattcacagtcacactcacttagtcaaataccaagatcgatcgatcgatgtacaagtggatgcattaattcatcatcttgggtgttcttatattacaaatcaccaccatgcaagtcgccattaaccaccaacccagctttcctaatttaagtagtaatcaacaaaaggatgacctctcctctctccataccctcccagctcgctcgtcatcacaaaactaaacagcgcgcgcgaacgcacaccaacgcatcgatcccgtttgaattgcgcgcgaaagagcttaaattaagaggatgaggagaaggtgtcgaagatggtggtgtggagcgggtcgctgaggtgggtggcccagttgttgaggggccccttgccggtggcggcggcctgcacggcg

SEQ ID NO: 400930 - DNA, 444 bp, Oryza sativa nipponbare
agttaataggctgttgtattagtgggagcgtgggttcccatgttcaaaagcaagaacatgaaagctaaggaacgacaaattgttgtttactacacatcttatcatgaccgatttcatcggtagaatgtcatcttacagagactacatatacaaactctggtgtcaagcagaataatggaagaaaaggtgcactgaggttatatctttgatgttgcgtctttgatctcctccaaggttatagcctggtcttgtccagcaaagtcattgtcgggggtaagaaaaagcatgcaatggcattccttcctctcacgcatgggaacacaagggcagttccaaaatccttgtgctacctcagcagctttgtcatcataatgcctacaagggcatagaggagctccaagttgatccttgtgatcagcaagtcccttgataacaacggcggtg

SEQ ID NO: 400931 - DNA, 429 bp, Oryza sativa nipponbare
agctaaatctcacgttaattgtcggcatgggcattaattaacaactaattaaacaaggtacgtctttacacctacacgtacacagtacatatacacttgaaagaaagtctcaatgatgcgcaagcacaacaatggcggcgaaacctcggtagatcgatcgatcctcgtaattctactcttcgtcgtcgtcgctgacgaacttgccggtgccggggttgatggcggcgatgaagaagaagacgacgttgaagaggacgagcggctcgatctcgttgatggggacgccggtctcgatgttgagctgcgcgagggcgcccttgccggtgatgatctcgccgatgatggagaaggcgatgccgagctgcgcgagccggccgacgaacagctcgttggccttggtgaagccgaacagcgggccgccctcgctga

SEQ ID NO: 400932 - DNA, 374 bp, Oryza sativa nipponbare
caggtaacacacaactttactgctattttgttcttgggttagctacatttggatcaaatgtatgtggactaaagaatgaatctgtgtactccttttggacaaagaaaaaaaatcttccctagttaacgagcaaacgacaaatttacagctaccactgagtttgatttacaaccttcaggccccaactgacgtcctctcagtgcctcacgaacggcaccatcttgcccaggtcagcgttcctcttcgccttgcatacttaaaatggagccttatggaaacacggctccatcgacatggctcggcggcacggcgggtccagcatggcttgattctcccacctgaacatgatccacggcttcagtcctgaaaacccc

SEQ ID NO: 400933 - DNA, 446 bp, Oryza sativa nipponbare
ttgatggaccattgctgataactattactgattgaaatggggcaagcatgggacatagtacatcacagagctagctaaatgagacaccacaatactgaccgaaaaccaccaagaataaagattacacaacatacccaacacgcaaaccacttgacttgactgagaggatgaattctttcggctgccaggatgcagtgtgcatcacaaagttgaacaatttaagaaatgtagcagccgacaagaagaagtgtgaggatagagcagcaaaggtggatgttgaaatcttgtaggttgcaatccattccacgcccctagccgccttagatcttgtcgagcttctcagccttcaccactgggttggccttggcgatggcatccctagccgcagtccggtagtcgaactggcattcatgcttgtcggagtagcggtgcaacgcacagtacat

SEQ ID NO: 400934 - DNA, 303 bp, Oryza sativa nipponbare
gcgaacaagactttgaaactcttttttttctccttgttttctatttcatttcattccgatagatagcaacaagcagttcaaacaccataaccaaagcgaactcaattcatggtaacatcacggaccaaaaacacctaacacttgatggatggatagagggcttctctactcgagagagccactggacaccataaccactctactcgatgataaaatgattcttacaccgatagctaaagataacttgccaccatgggcccccccaattagtttctttcattcccgcccgagtctcctccgtaa

SEQ ID NO: 400935 - DNA, 413 bp, Oryza sativa nipponbare
ataactgggggatcagcattttattgcctgaattattgttgttattatttatcaatgctatgaacctaaattatcaatagttactacaatatggaaacctctggtcacccaatacaactaaatatgcacatcagctgggtagtctgcagggtgcttcttgattgtatccctcagcaatcgctcttgctctcttaggttggaaggaacttcatcataaacatcggtgaatagttcagcgagcggcggtttcggcattctttctgccacctgaatggctttcagaagctcttgcctcacattgttcctgagttcagattcatcttcatcacaccaccagccattcccctgaacccattttctgtacctggaaatcggatctcgcgctgttcgccagtgctcgatctcatcgaccg

SEQ ID NO: 400936 - DNA, 278 bp, Oryza sativa nipponbare
caaacaccataaccaaagcgaactcaattcatggtagcatcgcggaccaagaacacctaacactggatggatggatagagggcttctcgactcgagagagccactggacacgataacgactcgactcgatgataagatgattctgacacggatagctaaggataactggccacgatgggccccaccaatcagtttctccacatccctccggagacgcctccgcaaccgacgccacagcatgacaccgtagccgccgccgccgccgccacggccgccgc

SEQ ID NO: 400937 - DNA, 410 bp, Oryza sativa nipponbare
tataattaattcacaacaccatatttcattggtgagggtcagaacctgcacagaaatacacactaccggtacagatctcaccctctctccaatactcgtacatccatccacgcggtccacacgaatacgtacatctatacggtacacgtacgtacatctactgcaccgcgtacacacacgcacactctcctgcagagacgcgcatcgtcgtcaacctagctagcttagctgaaggcgatgcgtcgccatggcagcacggcggcggcggcgctcacttgccggggacgaagttggtggcgtaggcccaggcgttgttgttgacggggtcggcgaggtggtcggcgaggttctcgagggggcccttgccggtgacgatggcctggacgaagaagccgaacacggacgcgtgg

SEQ ID NO: 400938 - DNA, 444 bp, Oryza sativa nipponbare
ttaagatataaatgtgatttatcagattgctctagggtccgttgtacatagtatgacaacatagcagctatatcagctggaaaatctctgttaccattggtttttttatttttgctcaaaggttgtacaaggaaccaggatttggataagctattctagcctaaaaactctagagatccacatgttaccaagcaataggcaatgcagctacacagctagcgacagagagctccagtgaaatcataactcgttcaccaatcttctttcttgatccagtgcattccccacaatctggtcctgatcttttgtgcagcctataaacgtgccaaccttctcaccaacaatagctttcgcaatatttccaggtttttgcaaattaaacacgacaacaggaatgttgttttcttggcatagcgtaatggcagtcatgttcattactgagag

SEQ ID NO: 400939 - DNA, 448 bp, Oryza sativa nipponbare
aatggcactgaatcatttttatttcctcatccttttgattgcattcctcccagagagacggatccatggaagttttcttgccctcatcaggcaagcagagcacacacacacggtggcagtggaagtgctatgaacaagacgctaatcaacatccagagctaaaacaaacaaggggatcaatgcaaatcccgaaaaaaaaacacaggggaaagtccacatcttcttctcgtccccaactcctccgtgtcaccaccacgtcttgcggattttttttaccctgttctattcgctcaggcgtccacgatctcgccgtcgtccttcgacgccaggatcagctccgggtgcgccgccgccgccgccgccttcttgatcgtgccgtcgatggcgttcggccggccgagcgccttcagcgccaggtgcgccgccttctggccggagatcatcatgg

SEQ ID NO: 400940 - DNA, 444 bp, Oryza sativa nipponbare
tatacttatcacgagaagttcactgaaattacattcgtaggagaagcagcgtatacacacggataaaacacggagaaaatctttacgagagatggttggtgtttgggaggcaagaacggccggcggcggggcggccattacgcggatgggagcaccttcttgacgatctcgtcgctgagggaggcgatctgggcgtcgagcgccttgacggcctcctccttctgcgcctcgaggttggcgagcgcctccacgagctcggcctcgacgcggcggcgcccctcgtccagcttcgcctccagctcctgggtggtctccttcttcatcttgttgagcgccgcggcgatctcggcgcgtgccgccttcagcacggcggcggcctgctcctccagctgccgcacctcctcggacgcgtccttgacgccgccgagctcggcacggatcttg

SEQ ID NO: 400941 - DNA, 444 bp, Oryza sativa nipponbare
tgctagtcaataaagctaatttcacctttgaacgggggtggggaagcaatgaagtacagaattacaggagaaggtggcagctgaggagagaatcaggagctgtcacaactcacaaagctatatacaagttcagaagctgaacgagaagagagcatgcttccctcctacaggaagcattatgacttcttggtgctgttttacaaatctgggtgattattggaagatcatgcggtagcagctgcagcttcttctgcgacttgggatccctgttgcagagtgcagatgaggttgcgatccccatacacattgtccacgcgacatgttgttggccagaacttggcgccccgaagccacgctgcagggaacgcagcgtactccctggagtacggcttagtccatgagtcgctcatcagaagttggggcgggtgaggagcactcttgagg

SEQ ID NO: 400942 - DNA, 361 bp, Oryza sativa nipponbare
gcaaaaaaaggcagtaaccccccattttactcaaaacattcaatagatttttcttacattgtcccaaaactttttattataataacaatggtgcccccaaaccacaaagcaaactttttaacacatttaaaccccccatttaaattaggtaaaatggaaaccgaatcaaatgatccaaccccaatttcgctaagttgtgagttccatgatggctttgaccatttccccattggcagccttgagtgccttcaccgccttggaccttaacacggtggcctgggtcatcaccagcttgatttcctttggctcgacaccaatttttttgacggcctcattatttttcttggcttttttcaacccc

SEQ ID NO: 400943 - DNA, 444 bp, Oryza sativa nipponbare
aaatatatatagccggagcttccatatatttgagtgagatatgcctcacccaacaacatatagtcgtagcagataccactcttacatcaagtcagagagagatcaggtgaaacaaaaacaaaagcagagcacggccggtaaaatcaaaagacgatgaacaaactgggaacacacgaaacaaggtgggagacatcatcgaatcagagatgaacaattaaacaaggctatatatgacgatgacggcttagttgccaccagactcctcgcagcccgggggcttgtaggcgatgaagctgatgagctgcacctgcctgacgttgtcgaagccgatgatacggacgaatgcatcagggtacgccttcttggcctcctcgagctccttgagcacctgggtggcgtcagtgcacccgaacatgggcagcttccacatggtccagtacctgc

SEQ ID NO: 400944 - DNA, 447 bp, Oryza sativa nipponbare
gatctgtaaattgagttgttaatgaatccgctttagtgcggggactctatatgatatttctttttctttgaaggaaaaattctataacaaggtttgagaccttgtatctattcctcttttttctatactagtagaatttcattgcattgagttctttcttagatctagatggagtggaatagagaaatagaaaaaagtcctttcggatgaaaatggaagaatattacgccatatatcccacttggacaaattagaagcaattttctcttatcctcatttgttccttcctttagataaatactcaaaatccccttacaataatgcaatttcgaagggaccttttccctcgtgttgagaaaacttttcttcttccaattcttcttcattcaattcatttcaaaaaattcaattggtactcaaaatacttccattggtatgcgcaagaaa

SEQ ID NO: 400945 - DNA, 442 bp, Oryza sativa nipponbare
tatagcccatatctttatattatattattattgacagaaacttgtcatgcccagctatggcttgggcgcgatctgatacacagaacaaagagaaaacataaaaaggagaaataattaatagcaagcgtcaagccggcctgcttaaaaggtgtaaaggcagctgccgtcgtcgctcctcgccgttgggtcgaagttcttggcaacagggtcggtgcaaccttccggcacaggcaggttacctgcttgctgtgctccttgccctcctcctcctatgcaggccgcctacgatgcatcgatgggatgcgaatagctagagatcttttattcagctggatggcgcagaaccgtagaaggaaccagtcttcatggcgtcggagttagcgtcaccaagagcagcctcgctcaagtactgctcagccagctgcacacgcttgacgttctc

SEQ ID NO: 400946 - DNA, 438 bp, Oryza sativa nipponbare
gttgaagttcgattgagtatgatagacctttggacgaggcaaaccacacgaatacacgattgattaatttcactgagaatagcacgggtacatcacatcacacaaattcatacgttgatacacgcatagtcgccgaagcgaccagctgcttaattaatcgataacacacgggtttaattcagcaataatcagcacacacacaaaccacactcatatgggtggtttttattgtggactaattaaggtaggtgactcgccggcggcgagtgttcggttgcttcgtgacttcacttgccgcacttgcagtcggtgcaggagcagctggtgccgcacttgcagccgccgttctcctcgccggcggcgacctcctcgaagtggctcttctcggcttcaactatgacgacgccatagctggtacctttcttcacgcactggctc

SEQ ID NO: 400947 - DNA, 432 bp, Oryza sativa nipponbare
tgggaaacgaataaaatcattattgcaaaaacatcggctgcttcttcatcttcttagtgtacacaacaccaactcgatcatcatctcgtcgcactaaacccatcttccccaacccaaagacaacgaactcgctggccacaaatccatccaaccacaattaaccactgctaagctacggtcccccacttcacttgccggggacgaagttggtggcgtacgcccaggcgttgttgttgacggggtcggcgaggtggtcggcgaggttctcgagggggcccttgccggtgacgatggcctggacgaagaagccgaacatggagaacatggcgaggcggccgttcttgatctccttcaccttgagctccgcgaacgcctcggggtcatcggcgaggccgagcgggtcgaatgcgcccccggggtagagcgggtcga

SEQ ID NO: 400948 - DNA, 392 bp, Oryza sativa nipponbare
gtcaacgatgatgaaaaccacttcgagacaatttaggcagggggcaaatatttctcagccacaaatccaaacacttggtccttcctatcagaagatcagaatgaacaggttttcaaattcatctcccaactcgacgataatttacacgtacatttaacacattcttccacccttctcaaactcctcccttcttcttcccgggtaagattaaaattaacttgaggccagccagcgtcgccggcggcgagatgtttacaggctgggcgtcctctcggcggcgccggagatgacggtgagcaggttgttgccgaaggggtcgctgaggtgcttggagaggttctcgacggggccctcgccggtgacgtaggccggacgcgtgggcggacgcgtgg

SEQ ID NO: 400949 - DNA, 308 bp, Oryza sativa nipponbare
tatatgtatgtaaatattatattattgtaaatcattgtgaggagctagactagcgtgccttattaacaaggagatatgtaccattacatgatgattaacatataaatctgtagctacatggaattaaggtagtggagcagaggaggaaggatgatagaagactccaattctccatggatgggaatgggatcaggtggccttgcagaactctccgcccagatcgtcgcacgcctcctcggggaacaccgtggtgggctcgtcgtaggataggtagtccctgtcgaccggacgcgtgggcggacgcgtgg

SEQ ID NO: 400950 - DNA, 400 bp, Oryza sativa nipponbare
agtaaaaaggtaaactcttcataataatattattaagacgttatagctgatgtcttttgatcacactgcgatcaaattatgcatcataggcagtacaactccgcgtcaggaaaaagtagaggagatatatttcttgttattacttaatacagcattcacatatatcgaaccatccggtacgtacgtagtagtactccacgcgttcacatcgatgatcggggacgatatcctcaggtagtacttatgcaaaagcgttggcgtaaactgacgaactgaacggacggacggtcggatttagggctcccataagtccaagttgccggagacgaagtcgtagtggccgccgacgagcttgagggtgccgttggcgatcccctccttgacgaacgggtaggtcttg

SEQ ID NO: 400951 - DNA, 457 bp, Oryza sativa nipponbare
gcctcgccgctgtgccggttgtgatgctgctgctggtgcagaacacgagcggggggggacgacatctgatgcgccgcccaccgggatgcgcacgacggcgcgctgccagtctgacggtggtacagggcatggggtaccgtcctggacggcggcggcggtgtcgttgtcgtcgtccttgggaacaggaacgcccggatcttgagcggctggaggcggtcccggctggccgcgtcgtactcctccagcaggttggcgaggtcgtcgtcgccggtgacggagacgagcgcgtccaggtcctccgtcgggagctggcaccgcaggcacaccgcctcccacccgcacatctccctcagcttccgttgcaactcgtggaaagggagggagcggtcgacggagacgacgcggttgtcgccgccgacgtagcgcaacgcgccgtcggcgtggcgagggaggatcc

SEQ ID NO: 400952 - DNA, 462 bp, Oryza sativa nipponbare
  unsure (1)..(462): unsure at all n locations
agtggccgtggccgccagcgccatgctcgcgggcggcgccatggcgcaggaggggcttctcggcgccaatggcggcgtgctggtgttcnagccgaacgacttcaccgtcaagtccggcgagaccatcacgttcaagaacaacgccggcttccctcacaacgtggtgttcgacgaggacgcggttccgagcggcgtcgacgtgtccaagatatcgcaggaggagtacctcaacgcccccggcgagaccttctccgtcacgctcaccgtccccggcacatacggcttctactgcgagccgcacgccggagctgggatggtcggcaaggtcaccgtcaactaattattctttcttctcaatctaaatatgcctcctacggctctatcctatatatatatatatcgatttgtccatcgcgaatatactacgtaccgatgatctgttcctcagttttctcttgtgtg

SEQ ID NO: 400953 - DNA, 418 bp, Oryza sativa nipponbare
aaaatcaaaaaacgatcaacaaacggggggcactctaaacaaggtagcagacatcatcaaatcaaagattaacaattaaacaagtctatttatgactatgacaccttagtttccaccagactcccttcagtcctaatgcttgtacacaatgaatcttatcacctgcaccttcctgaccttatccaagcccattatacagacaaatgcatcatgctacaccttcttatcctactcgagcttcttgagcacctgagtggcctcattgcacccgaacatggccaactttcacatggtccaccccctgccatcctagtatccaaaagatctgtagctcttacggaagaccaatactacctttctcaactatacgcggtcacccacttctaactgatcaactactcaatctccttcatgaggt

SEQ ID NO: 400954 - DNA, 439 bp, Oryza sativa nipponbare
tatttactttttttttgggcattcacagtcacggtgggttagtcaaataccaagatcgatcgatcgatgtccaagtggatgcattaattcattatcttgggtgttcttatattacaaattaccaccatgcaagtcgcctttaaccaccaacccatctttcctaatttaagtagtaattaacaaaaggatgacctattctttattcataccctcccagctcgctcgtcatcacaaaactaaacagcgcgcgcgaacgcacaccaacgcatagatcccgtttgaattgcgcgcgaaagagcttaaattaagaggatgaggagaaggtgtccaatatggtggtgtggagcggttcgctgaggtgggtggcccatttgttgaggggccctttgccggtggcgggggtctgcactgcgaagccgaagaaggcgaccatggctag

SEQ ID NO: 400955 - DNA, 440 bp, Oryza sativa nipponbare
ataaatatatataacccgagcttccatatattgcagtcacatatgcctcacccaacaacatatattcgtaacaaataccactcttacatcaagtcagagagagatcacgtgaaacaaaaacaaaaccatatcacggactgtaaaatcaaaagactattaacaaactgggaacacactaaacaaggtgggagacatcatccaatcaaagatgaacaattaaacaaggctatatatgacaatcacagcttatttgccaccagactcctcacaccccgaaggcttgtaggctatgaagctgatgagctacacctgcctgactttgtccaagcccatgatactgaccaatgcatcaaggtactccttcttggcctcctcgagctccttgaccacctaagtggcgtcagtgcacccgaacatgggcagattccacatggtccact

SEQ ID NO: 400956 - DNA, 430 bp, Oryza sativa nipponbare
aaatctatataaccggagctaacatataataaactcgcgttggcctgacccaaccacatatagccctaccctataccactctaacatcacgtcacatatagatcatgtgaaacacaaacataagccaagcacggccggtaaaatcaaaactacgataaacaaactgcaaacacaccaaacaaggatggagacattatataatcacagatcaacaatctaacaatgctatatatgacgatcactgcttaactgccaccagacttctttcaacccgagggcttgtaagccataaaactcatgagctgcacctgcctcacgttgtcgaatcctatgataccgacgaatgcattagggtacgccttcttggcctcctcgaactccttgagcacctggctggcgtcagtgcacccaaacatgagcagctttcaca

SEQ ID NO: 400957 - DNA, 403 bp, Oryza sativa nipponbare
atccatgcagggggggggtttgtgcccttgtgcaaatgcatttcatttatacaagtagaaggcactcaaatcagccaccacatgaacacacacatgttccatcatcgatcgatctacacatgcatcacccggtcatgcacttacaaacaaaagatctacttgaagaagtacgggaggtcgagcacgtaaaggaggaagtaggcccaaaggaccccggagatgccgccgaaaaaaaagccgccggtgaacttggcccaaccgtcggcggtctgcaacttgtcggcctccttcttgcggccggtgagcgtcagcgtcggcgccgtggacggctcgccctcgccgaaggaggcgaccccttacatggtgaggcagactctgaggatggcgacgaggcctgcggcgc

SEQ ID NO: 400958 - DNA, 437 bp, Oryza sativa nipponbare
ttaagatagtgtttggattggcttaaatgcgggggggagtagttcttgatataacggtggttacataggtatacctcagaacaaaacttggagcagagcacagcagctaaaagcttacaagcagaagtgcagaactgagtgtcaccatgtttctcagattggaatcgccagggtgtgccgtgtggtaaaggcatttatttcttaaaacaaaactagcatgattctggctggttacaacttacaagaacttcctcggtggtcttccagcatcctcatcttgcatgtggaattcacggacgatgcccttgtagacgaggatggggacggcgaggccgaagaggccgacgacggcgaggctgcggcgcgtccagcggaagttgaactcgaggttctcgcggcccgcgttccactcctcgatccaccggttcttgtgcacc

SEQ ID NO: 400959 - DNA, 428 bp, Oryza sativa nipponbare
agctagcaaatcgatccatgcgaccatgcttgcaaatcaattggagcacaaatttacatgttacacccacaccctacacccatgcataataatacatcgtatatacgtacgtacatacatacccctctcgatcacacgcaccatcgatcgtacaaagttgcgtacatacatacgtacacacatatacgcatactcacgtacatacatacataattaaaaactcgtaattaattaaatacgtagttgatggcatctctaatggaacttgaggctggtgaggatgttgttgtggactggatcagcgaggtgatcaagcaggttctgcacggggccaaccccggtgaagagcgcctggactgagaagcctaggaaggccagcatggcgagcctgccattcttgatctccttgagcttgagctccttcatct

SEQ ID NO: 400960 - DNA, 439 bp, Oryza sativa nipponbare
ttataattaattcacaacaccatatttcattggtcgggttcagaacctgcacagaaatacacactaccggtacagatctcaccctctctccaatactcgtacatccatccacgcggtccacacgaatacgtacatctatacggtacacgtacgtacatctactgcaccgcgtacacacacgcacactctcctgcagagacgcgcatcgtcgtcaacctagctagcttagctgaaggcgatgcgtcgccatggcagcacggcggcggcggcgctcacttgccggggacgaagttggtggcgtaggcccaggcgttgttgttgacggggtcggcgaggtggtcggcgaggttctcgagggggcccttgccggtgacgatggcctggacgaagaagccgaacatggagaacatggcgaggcggccgttcttgatctccttca

SEQ ID NO: 400961 - DNA, 443 bp, Oryza sativa nipponbare
gtacaagtggatgcattaattcatcatcttgggtgggcggatattacaaatcaccaccatgcaagtcgccattaaccaccaacccagctttcctaatttaagtagtaatcaacaaaaggatgacctctcctctctccataccctcccagctcgctcgtcatcacaaaactaaacagcgcgcgcgaacgcacaccaacgcatcgatcccgtttgaattgcgcgcgaaagagcttaaattaagaggatgaggagaaggtgtcgaagatggtggtgtggagcgggtcgctgaggtgggtggcccagttgttgaggggccccttgccggtggcggcggcctgcacggcgaagccgaggaaggcgaccatggcgaggcgggcgtgcttgatctccgccagctgcagccgctccttcttctccgggtccgacgccaacccgagcgggtc

SEQ ID NO: 400962 - DNA, 406 bp, Oryza sativa nipponbare
ggcagttatatcatcatatacaaatactaacacatgcgaaaattatcaagcagaaaagttccatacaaattcatccagacaaacaagtgtaaaaaaccttttttttcccatttcccccttgaactatccgtaaataccaccattccaccaaactcccctctgtcttctacgacaaataatcttttcaacccagtaacttataattaattacagagagattagcaaacatataatggtaagaatcagttgtcgtaggtgcggcactcgtcggtctccgggttgtccttgcagtaggcctcgagcgggtcggaggtctccttgagcttgtcgcgcgcgtggctcgccgccgcgctcagctcctccacctcgtcccacgccgccgcgcactcgccgctcgccgtgtcct

SEQ ID NO: 400963 - DNA, 444 bp, Oryza sativa nipponbare
gaataaaacatgttttcaattaaatggtcaatgcaagtatcgtttcatactgaacacatgataatgaaaaatcaaatgacaaacttttttagaaaagtacattattgattactaatagcacatacaacacatcaacacattgccacaatctctactgtcatttcacttgtcaaaatatttaacattaagactgttcgttcaatgattgtggttgtggctgctcaccttgccaagcccatacaatatcctttagtgctggtctcatctcttgtttgaccttttgatactcaagtgtatcaccatttatcttcgtaaattccactaaatgaaaatctggtgtgatctgaaatatttcagcattgatggacattacacctttccttccaggttttgatccttccatctttaacaaaccaccatttttcttcaagaattttaatcgta

SEQ ID NO: 400964 - DNA, 438 bp, Oryza sativa nipponbare
tttatctgaagctttcattgagctttatttatgagagcactatagataaacctcaaccacaacctggtatcatcagattacataagtatcagtattcagtactatgacgtagaaagatagcaatgctctgaatgtttgcagaaaagttttactgacgcctgaaagtaaaacctaccgcgtcgtctcaggagtggttcttgagtacttcagcatcagacatacagggcagagtccacaactggaaatgccgaaatggtaaaatggaagccatctcaatggtatctttgcctcagaaatggttggaccagtctgcggcgctgccgacccgagggatcccggagtccttcttggcctcgctgtcgaccttgtagttggagccgcacatctggccctggctgtcgacccgcggcacaggcttcagctcgttcagcgggtgct

SEQ ID NO: 400965 - DNA, 422 bp, Oryza sativa nipponbare
  unsure (1)..(422): unsure at all n locations
aaaagccggagcttccatatatgtcagttacatattcctcacccaacaacatatattcttancaaataccactcttacatcaaatcaaaaagagatcaggtgaaacaaaaacaaaagcagagcacggccggtaaaatcaaaagacgatgaacaaactgggaacacaccaaacaaggtgggagacatcatctaatcagagatgaacaattaaacaaggctatatattaccatgaccgcttaatttgccaccaaactcctcgcaccccgggggcttttagccaataaacctaataacctgaacttgcctaactttttcaaacccattaatccgaccaaatccttaaggtaccccctttttggcctcttcaacctctttaaccacctggttggcttaaggccacccaaccttggccagtttcaaa

SEQ ID NO: 400966 - DNA, 390 bp, Oryza sativa nipponbare
aaaccaaatcttcacttcaaattcatccaattcatttaaacaaaaaagtcccttcccaaaacccaacccaaaccaaaaattccccccgaatcccatcaaaaccctattttctacaccaccaccaccacccgcaccccaccaggaaggaaggaaggaaggaatcacccccccaacccctaaagggtcccccccttgcccttgaacccctaaaccacctccattgcggtgaccgttcttccgcgggcctgctctgtgtaagtaaccgcctcccgaataaccttctcaaaaaaaatctttacccccccccgggtctcctcgtaaatcaaccccgaaattcccttaacccccccccttcttgccagcctccggatcgcgggcttcttaatcccc

SEQ ID NO: 400967 - DNA, 437 bp, Oryza sativa nipponbare
tttttaaatatatatagccggagcttccataggtgcattcacatatgcctcacccaacaacatatagtcgtagcagataccactcttacatcaagtcagagagagatcaggtgaaacaaaaacaaaagcagagcacggccggtaaaatcaaaagacgatgaacaaactgggaacacacgaaacaaggtgggagacatcatcgaatcagagatgaacaattaaacaaggctatatatgacgatgacggcttagttgccaccagactcctcgcagcccgggggcttgtaggcgatgaagctgatgagctgcacctgcctgacgttgtcgaagccgatgatacggacgaatgcatcagggtacgccttcttggcctcctcgagctccttgagcacctgggtggcgtcagtgcacccgaacatgggcagcttccacatggt

SEQ ID NO: 400968 - DNA, 443 bp, Oryza sativa nipponbare
ttttaccaaaaaatgatgcatgtcaaaattgaatatgccgaccttaccatgactaacaaaacttacacaaagaaaaccaaggtgggttcaccctaatgtcctcccttttgcaaagcacctcagactaatacacctttgagattacatactatataaatatatatataactttacatgaaacttgcagaaaacatttcttctagtagaaacaatgatgctagaaaagcatgcattcacttgtagttttggattatcttagataaagatgagtatgtgcccacaccagcacagcagagcccaacaacaatgatgaatacacatagcagtacctgataccaagtcactgttctcctaaggattgccaagaagcatgcacatggtagaatatacgccacaaacatggtgaggaaggacccaactagtgacataacaagtccgaagaa

SEQ ID NO: 400969 - DNA, 443 bp, Oryza sativa nipponbare
ggtctgagtatagtattacatataagtatcgttttggacgatttgtacaatatatttattacgatgtgtatgtgcatatgattagcctggtgctagcattcacatatgcatgctcttcaacctatgttgatacatacatatgtacatacatacacagctgatgttgacacaaacaagatgaaaaaaaaaaactgaagcaacaaactgggaaaggggaaaccaatgcaaggtggcccgattcgaacgttcaaagctgccaaaaccgaatagatcaatcgagtctcctctgtatagagctcacgagtgagcttgctggcttgccaactagcttagtttccgccggactcctcgcaacccgggggcttgtaggcgatgaagctaatcaactgcacctgcctgacgttgtcgaagccgatgatgcgaacaaatgcatctggatatgc

SEQ ID NO: 400970 - DNA, 441 bp, Oryza sativa nipponbare
gaagagcagcctgacagatgattaaaattacatggggatgcacccaaaacacaagtaattaataggtcgattatgagagaagaagaagaagaagaagaagtctagatgtcgaagacgttcttgccggtgaacttgacctcgatggggctgacgttcttgccgatgctgcggaagttctggccgacgccctgcctgccggcgttgaccttctccgggtagacgccgtccttggggtggaggtactgcacctcgccattggggaagacgctgtagaactggtagttgatcttgtacttggagcggagcctggtgcccagggccaggcactgctccttcctggccagcttcagcaggttggggccctcgcgcatgatggcggcgccgaccgtgggcatctagaacacctgctccttgggcgacgtccatgtgatgacgtacaac

SEQ ID NO: 400971 - DNA, 427 bp, Oryza sativa nipponbare
aaaggggcaaagtgatgcagggagccaatttcattacacgttaatactttatacattacacagcagggctacgcaaatgaaaatacagcaattccaagcacagttttattacaacattattggaagttccaagtgctcaatgcaacgcagcagtgcatttggtggcgccggcggtaaggttttaagaacttccaagcagcttcttgatgtccttctccatgctgagtggagaagtagttggcgcatagcgctccacaacacgcccctctttgtcgaccaagaacttggagaagttccatttgatattgtcaccgaaaagaccacctttgctggacttcagaaacttgtagatgggtgcagtgttgtcaccattaacatcaaccttatcaaaaattggatactcggccttgaagcgggtgcaagcaaa

SEQ ID NO: 400972 - DNA, 438 bp, Oryza sativa nipponbare
tttttaacggaacagtggtatatgtaaattttggggagtgtttgtttacatgactgttttggtacgggttgaagctatgggcgtttatttacaccgtgagttcatctttagcttcccctctcaaatggctcatgaaatatagggttttcttgtacatgtacatgttacagatggcaagggatatcaatgcctgaatgggcgcgcgaccacttgcaaaccaatagttatgttgaggagatggtaatactggccaaattaaaactgctgatgcatagggcgcaccattgtctagtgtcaacttgaaccaaattcttcgttccatttctctagctcgtcccacttgctcttctgcaggcttggcctaatcacagtcatggctttcttgaaatcttcgtatttcaggggccgcaactgatttgcttttatagtgagaatatt

SEQ ID NO: 400973 - DNA, 428 bp, Oryza sativa nipponbare
aatatatatagccggagcttcgatgtatttcattcacatatgcctcacccaacaacatatagtcgtagcagataccactcttacatcaagtcagagagagatcaggtgaaacaaaaacaaaagcagagcacggccggtaaaatcaaaagacgatgaacaaactgggaacacacgaaacaaggtgggagacatcatcgaatcagagatgaacaattaaacaaggctatatatgacgatgacggcttagttgccaccagactcctcgcagcccgggggcttgtaggcgatgaagctgatgagctgcacctgcctgacgttgtcgaagccgatgatactgacgaatgcatcagggtacgccttcttggcctcctcgagctccttgagcacctgggtggcgtcagtgcacccgaacatgggcagcttccaca

SEQ ID NO: 400974 - DNA, 438 bp, Oryza sativa nipponbare
aagcacttgacaagcaattaagcgtagtggatggaccataattaagatcgagaccatgagatagctagaacactgctgctaccatgagatagtttatccccctgtagtactgtacatcagaaattcaccactcaactcaccccctcacccatgcatccagatccatgcatgcaggaaacaattaccacaacacacacagtaagtctgaatctcatcacatccatctctctctctctcctccccccaattcattaacatcttatacatgcatactccacaaaaaaaaaaagaagaaacaagaagagaacatcttccatcgcccaatcatcggtttcaccagcctgaactcatcaagctccttgagatgccctggccctgatgaaatcgatcacacgctcagcctgacaacgtctggatgatggtgttgtgccacgggtc

SEQ ID NO: 400975 - DNA, 440 bp, Oryza sativa nipponbare
tagtaaaaaggtaaactcttcataataatattattgggacgttatagctgatgtcttttgatcacactgcgatcaaattatgcatcataggcagtacaactccgcgtcaggaaaaagtagaggagatatatttcttgttattacttaatacagcattcacatatatcgaaccatccggtacgtacgtagtagtactccacgcgttcacatcgatgatcggggacgatatcctcaggtagtacttatgcaaaagcgttggcgtaaactgacgaactgaacggacggacggtcggatttagggctcccataagtccaagttgccggagacgaagtcgtagtggccgccgacgagcttgagggtgccgttggcgatcccctccttgacgaacgggtaggtcttgaggttctccagggattggttcacggcctccttctccaag

SEQ ID NO: 400976 - DNA, 441 bp, Oryza sativa nipponbare
actcaggtagcaaatatttctcagccacaaatgcaggacttggtccttcctatcagaagatcagaatgaacaggttttcaaattcatctcccaactcgacgataatttacacgtacatttaacacattcttccacccttctcaaactcctcccttcttcttcccgggtaagattaaaattaacttgaggccagccagcgtcgccggcggcgagatgtttacaggctgggcgtcctctcggcggcgccggagatgacggtgagcaggttgttgccgaaggggtcgctgaggtgcttggagaggttctcgacggggccctcgccggtgacgtaggcctggatgaagaaccccagcatggagaacatggccagccgcccgttcttgatctccttcaccttcagcagcgccgcctggtccgggtcgctcgccagccccagcgggt

SEQ ID NO: 400977 - DNA, 448 bp, Oryza sativa nipponbare
caaagtctaaatgatatttttgaacttccttaacggaggggagttacatacagcacaagaagcatcttgcactagataattgcgcacagctgaacataattctgcagtccagttcttcagtaaatctagtgaaagtcagatacagaagaaagttgcttaagggaggtgtatggctggagggcagattcattggaccatcggatcagggttcccagctgcaagtatgtccagcaacgagttctggggctccagctcttcatgccacagttgtagtttgtctccagggtgaaatttcctcgaaacaccatctgcgtttatagtgacggtacgaacaacccctccactagcaccatcacgggctatagcaagggaaactaccttaaccacaaacttctcagcttcttcctgggacatgccctccttccattcgtggtcaagcaatccatag

SEQ ID NO: 400978 - DNA, 436 bp, Oryza sativa nipponbare
aaccaaaacataggaggtttcatttcttcttgtagggtagtgtagcatctttccttctttcaccattacataagcttaagcaataacagataacaaatcctcctcctcctctaggtaaaatattcaaacacaatacccttataagtacttattattaggaaagtagcgtgcatgggcataaatggcagcggggggcaggttaagaatcacaatgctgagcagcgaggaaacaaaacaccataatgggacagagcaaaagcctccgaaagggagcttttaggcagaaggcttctcccacttgaggggcttcaccacctcccaggtgaagtctgggtcgtcccttccgaagtgaccgtaagccgccgtcttgaggtagcgtccgttgccgcctttcttgaggtcaaggttgatgatgatcatgccaggcctgaagtcg

SEQ ID NO: 400979 - DNA, 436 bp, Oryza sativa nipponbare
ataaatcgctctagtaactaagtactccattgaaaagcaaaacaggaagattttaaatctgtgataacctctcgattgacaaaacgtgaatacatcatccaaacacattggtctatgatctaaaacccctgcaaagagcaagcaaactacttttattcaactgtagttcctcatttttcccccttcggtagtatgcctatggaaatgaaaaaggtctaacgctcatttatcttacacaactttcgaaagagccatgacgttgaagttcattgagtcagggttggacgcaattctggctttgatgacttttgcagcatcctgtaacaaagtatctggtgatgaagggccatgacatattggttgcgattttcgtccatcaagctcataaagttcaccatcaacacaagagaaacatacaaagtgctcgttcacctca

SEQ ID NO: 400980 - DNA, 443 bp, Oryza sativa nipponbare
acacgaacaaagatccaatttcaacaatttaagttttgcaagataaagtaataaatatattggaggagcaccaagttctaccacagatactgattagtcaagggtgccctagggtaaagggaaccaaccacatgtatacagacaaataattcaagcggtagtcatttaaactcccttccactgccaatatctccagtttgttcttatcaagcaaatggcatttgattaaggctaaagcatgacgggttattacatcacgagaggcattgggttttatgcaccgctggcatacaggcgagtccactcctttgctgtttcaacagcttctgcttcattggctttccagtgctttgcaatgttatcagagagaggatcatcagggtttggtgcacttaggagtgcctggatactcaaaagaactgtccgaatctgaagggctgggc

SEQ ID NO: 400981 - DNA, 440 bp, Oryza sativa nipponbare
  unsure (1)..(440): unsure at all n locations
ttataattaattcacaacaccatatttcattgatcagggtgagaacctgcacagaaatacacactaccggtacagatctcaccctctctccaatactcgtacatccatccacgcggtccacacgaatacgtacatctatacggtacacgtacgtacatctactgcaccgngtacacacacgcacactctcctgcagagacgcgcatcgtcgtcaacctagctagcttagctgaaggcgatgcgtcgccatggcagcacggcggcggcggcgctcacttgccggggacgaagttggtggcgtaggcccaggcgttgttgttgacggggtcggcgaggtggtcggcgaggttctcgagggggcccttgccggtgacgatggcctggacgaagaagccgaacatggagaacatggcgaggcggccgttcttgatctccttcac

SEQ ID NO: 400982 - DNA, 412 bp, Oryza sativa nipponbare
agaatcatacttaagtgcttgctgatacaagatgggcatttatgttaaaatgaaatttccctaacctcacacatataaaactcaaaattcctatacccaacaacctattcttagcctaaattcccctgtacatttaaatgagcaaatgttctcgcgaaacaaaacctaaacgcctccccggcgctgtaaatcaaaactccatgaacaaactgggaacacacgaaaaaaggctggacacataattcaatcaaagcttaacaattaaaccaggctttttatgacgatgacggtttaattgccaccaaactcctagaaacccgggggcttgtaggccataaatctcaaaagctcccccttccttacctttgagaaacctattattcccaccaatgtttaagggaacgcttttttt

SEQ ID NO: 400983 - DNA, 442 bp, Oryza sativa nipponbare
ccaaggtacgaattatcaatcaagaaattatcaaacggtccaaatgaggaacatagataattttccagtcggacgctaactgatagggataaaacaactatcagcaatgacagattgttctatatatcctttatttgggaggtcccgtctacgtgatatcagcatctatggactgcttggatcgacaacaatttgtaccgatgctgtaaatgttcattcagtccagaatgagaactcgaatggtaatggtgatacagccaaaatgactttaaaagaagggaaatgaagcactgaagttggcaagagtatcttgtaaaaagctcagttggctgccagtcttgaccggagctccgcagcaaccgcatcaatgaactcttcagtgttcaggtaatggcttcttgtgacgtttgaagacccgtgaataagaagagcaaggtctttg

SEQ ID NO: 400984 - DNA, 425 bp, Oryza sativa nipponbare
gatcataaggcaaagctgcgagcgccgggggagtcttattactacagcttcttggcgatatgctacagtagcttcttcctcccttgcaaaaagaaacccaaaccttatctacaacgcaacacacacaccggacacagagcgctcgatcgatcgaagcagacgagacgacgatggcgaactactactaggtaagcgacaacacctaggctatacagggatacagcgcgcggcggcgacgggcggcgagacggcggcgatgatcaggcgctggccttgttggccttcttggagatggcggagcggatggatttgggcggctgcatcggcttcgcgggggcggccttcctcgccctcttggcgcgggctgggcgggcggggggaaccgccttcttcgcctccgccgacgacgcgggcttcttggcggc

SEQ ID NO: 400985 - DNA, 328 bp, Oryza sativa nipponbare
ccacgcgtccgggcgagaagagcgtctacttcgacctcgaggacatcggcaacaccaccgggcaagtgggacctgtacggctccgacgcgccgtcgccgtacaaccctctccagagcaagttcttcgagacgttcgcggggcccttcaccaagagggggctcctgctcaagttcctgctgctcggcggcggatcgctggtggcctacgtcagcgcgtcggcgtcgtcatgacctgctttcgatcaagaagggcccgcagctgtcgtcgacgcccgggccacgctgtaagatctaaattaaatttcttggtttttgcctcaccttcttc

SEQ ID NO: 400986 - DNA, 127 bp, Oryza sativa nipponbare
ccacgcgtccggtgagagtgaggtgcagaaaaatttgagctgaagctgaggatggcaacatccatgatcacctcgccgctggtggcgccggcccggccaagggccttcgtccatctcccgcggggat

SEQ ID NO: 400987 - DNA, 387 bp, Oryza sativa nipponbare
ccacgcgtccgttctgctttactcagacctggacgttttgacagacaggtaagtgttgatgttcctgatgtacgcggaaggacagagattcttaaggtgcacggtagcaacacgaagttcgatactgatgtctctcttgaagtcatagcaatgagaacacctggctttagtggagcagacttggcaaatcttctaaatgaagcagccatattagcgggccgacgtggtcggacagcaatttcctcaaaggagattgatgattcaattgacagaatagtggctggtatggaaggaactgtgatgacagatgggaagagcaaaagtcttgttgcttaccatgaagttgggcatgcaatttgtggaactttgacgcctggccacgaccct

SEQ ID NO: 400988 - DNA, 160 bp, Oryza sativa nipponbare
  unsure (1)..(160): unsure at all n locations
ccacgcgtccggnaggtaggggaggaagaaggcgtggaggaggattccaagtacatggtgttctcgtgcgccgacgctcgcgtgtgcccgtcggtgaccatggtgcttttttcccttttttgtcttntatgtccgcaacatcgccaacattgtcccagct

SEQ ID NO: 400989 - DNA, 422 bp, Oryza sativa nipponbare
ccacgcgtccgaatttatggactagttgtggcactggcgcttttatttgcgaacccttttgtttaatgctaaaaaagaaaacgagtcctttagattagatactttcttctttttttagtaaataggtatttgcttctgcaattccaattatatcaatactttactcctaatttattactcctagagttttctatttatggggacagacaataccccaccccaggaatagctgatttgaggatgatcaatttagaggatatgttcgccgtcttgcttcccgccctttgtttagggcagaggaaagtatttttccttttattttaggaattttgggaacatttcaacaaaggaggtctttcacaggtcaaacgagatctaagacttaatctaaaagaaattactaaattgaatctatttctatt

SEQ ID NO: 400990 - DNA, 277 bp, Oryza sativa nipponbare
ccacgcgtccgacttacggactagttgtggcactggcgcttctatttgcgaacccgtttgtttaatgctaaataagaaaacgtgtccttgagattagatactttcggctgtgtttagtaaattggtattagcttccgcaatcccaattatatcaatactttactcctaatgtattactccttgagttttctatgtatgggtgcggacaagtcccctcccctggatttgctgcatagaggatgatcaatttagagggtttgtccgccgttcttgcttt

SEQ ID NO: 400991 - DNA, 199 bp, Oryza sativa nipponbare
ccacgcgtccggtcttcccggagctcctcgcccggaacggcgtcaagttcggcgaggccgtgtggttcaaggcgggctcgcagatcgttcagcgagggcgggctcgactacctcggcaacccgagcctgatccacgcgcagagcatcctcgccatctgggcggtgcaggtggtgctcatgggcgccgtcgaggggtacc

SEQ ID NO: 400992 - DNA, 368 bp, Oryza sativa nipponbare
ccacgcgtccgcggacgcgtgggcggacgcgtgggttcgccggctcctcccgctacgccaccgcggcaccgaccaccggagcgcagaagatcgtctccctcttcagcaagaagcccgccccgaagcccaagcccgccgccgtcacctcctcgagccccgacatcggcgatgagctcgccaagtggtacggccctgacaggaggatcttcttgccggagggtctcctggaccgctcagaggtgccggactacctcaacggagaggtccccggagactacggctacgacccttttggcctcagcaagaagccagaggacttctccaagtaccaggcctatgagctgatccatgccaggtgggcgatgctc

SEQ ID NO: 400993 - DNA, 239 bp, Oryza sativa nipponbare
ccacgcgtccgcccacgcgtccgaaccaacccaaccgccgccgcatcgccctcgttagaacgatggccgcgtcggcgctgcaccagaccaccagcttcctcggcaccgcccctcgccgggatgagctcgtccgccgcgtcggcgactccggggccgcataccatgcgccgaccgaagaggcgccaacattgttggccgcgcagccggcgttggacctgctcgagcggccggccgggtgc

SEQ ID NO: 400994 - DNA, 372 bp, Oryza sativa nipponbare
ccaccgtccgggagctcttcgagccgctcaaggccggccaggcacccaagtacatggtgttctcgtgcgccgactctcgcgtgtgcccgtcggtgaccatgggcctggagcccggcgaggccttcaccgtccgcaacatcgccaacatggtcccagcttactgcaagatcaagcacgctggcgtcgggtcggccatcgagtacgccgtctgcgccctcaaggtcgaactcatcgtggtgattggccacagccgctgcggtggaatcaaggccctcctctcactcaaggatggagcaccagactccttccacttcgtcgaggactgggtcaggaccggtttccccgccaagaagaagggtcagaccgagcacg

SEQ ID NO: 400995 - DNA, 304 bp, Oryza sativa nipponbare
ccacgcgtccgcgccgcagctggaccccaacacgccgtccccgatcttcggcgggagcacggggggactcctccggaaggcgcaggtggaggagttctacgtcatcacatggacgtcgcccaaggagcaggtgttcgagatgcccacgggcggcgccgtcatcatgcgcgagggccccaacctgctgaagctggccaggaaggagcagtgcctggccctgggcaccaggctccgctccaagtacaagatcaactaccagttctaccgcgtttttcccaatggcgaggtgcagtaccttcacccc

SEQ ID NO: 400996 - DNA, 423 bp, Oryza sativa nipponbare
ggtcgacccacgcgtccgaatataatagccgcgcttagcgtaactagacgaacgtactagcagaagaagaagaagaaaatgccggtgagcctgatcgcggtgggcgcccccggcgagctgtcccacccggacacggccaaggccgccgtcgccgagttcatctctatgctcatcttcgtcttcgccggatcgggatccggcatggccttcagcaagctgacggacggcggcggcacgacgccgtcggggctgatctccggctttctggcgcacgcgctggcccttgttcgtggcaggagttgttgggagccttatattttactttcgtcttctttgtacccatgtttttttttattttttctatttttttatatgtgttttaatcatccttattatttttttttttccttactattttttttt

SEQ ID NO: 400997 - DNA, 356 bp, Oryza sativa nipponbare
ccacgcgtccgcccacgcgtccgcccacgcgtccggttctccatgttcggcttcttcgtccaggccatcgtcaccggcaagggccccctcgagaacctcgccgaccacctcgccgaccccgtcaacaacaacgcctgggcctacgccaccaacttcgtccccggcaagtgagcgccgccgccgccgtgctgccatggcgacgcatcgccttcagctaagctagctaggttgacgacgatgcgcgtctctgcaggagagtgtgcgtgtgtgtacgcggtgcagtagatgtacgtacgtgtaccgtatagatgtacgtattcgtgtggaccgcgtggatggatgtacgagtattggag

SEQ ID NO: 400998 - DNA, 416 bp, Oryza sativa nipponbare
ccacgcgtccgcttcagaggaagaggaggcaccaaagccaaagccaaagaatcctcttgatctactgccaccaagcaagatgattcttgatgagtggaagaggctatactcaaacacaaaaaccaacttccgtgaaattgccattaaaggtttctgggacatgtatgacccagagggttactctctgtggttctgtgactacaagtacaacgatgagaacaccgtatcgtttgtgacgatgaacaaggtcggtgggttcctgcagcggatggatctgtgccgcaagtatgcttttggcaagatgctggtcattggctccacaccgcccttcaaggtcaagggactctggctcttccgtggtcaggacatccccaagttcgtcatggatgaggtctacgacatggagctctatgagt

SEQ ID NO: 400999 - DNA, 264 bp, Oryza sativa nipponbare
ccacgcgtccgccccggccgagttccgccgggcctacctcggcctccgcacgtcgcgccgcgccttcctgcgggggctcggcgggtccgcccacgaggcgcccgtccttcccaccgactggctccccgacgacttcgactggagagaccacggcgccgtcggtcccgtcaagaaccatggatcgtgcgggtcgtgctgtgtcttcagagcgtcgggggcgctagagggagcgaactacctggcgaccggcaaaatgacgtgctc

SEQ ID NO: 401000 - DNA, 444 bp, Oryza sativa nipponbare
ccacgcgtccgagcatctggtatggacctgaccgtcccaagtacctgggcccgttctcggagcagacgccatcgtacctgaccggagagttcccgggagactacgggtgggacacggcggggctatcggccgacccggagacgttcgcgaggaacagggagctggaggtgatccactcgcggtgggcgatgctgggggcgctgggctgcgtcttcccggagatcctgtccaagaacggggtgaagttcggggaggcggtgtggttcaaggccggcgcgcaaatcttctccgagggggggctcgactacctggggaaccccaacctggtgcacgcgcagagcatcctcgccatctgggcggtccaggtggtgctcatgggattcggcgagggctaccgcgtcggcggcgggccgctcggggagggccttgacaaggtgttcccag

SEQ ID NO: 401001 - DNA, 401 bp, Oryza sativa nipponbare
ccacgcgtccgcccacgcgtccgctcagctctcacagctcactgcatcaatggccgcggccaccatggcgctctcctccccggtgatggcccgcgcggcgccgtcgacctcctccgcgctcttcggcgaggcgcggatcaccatgcgcaagaccgccgcgaagcccaagccggcggcgtcgtcggggagcccgtggtacggcgccgaccgcgtcctctacctcggcccgctctccggcgagccgccgagctacctcaccggcgagttcccgggcgactacgggtgggacaccgcggggctctccggcgacccggagacgttcgccaagaaccgggagcgtggagtgatccactcccggtgggcgatgctgggcgcgctcggctgcgtcttcccggagcttc

SEQ ID NO: 401002 - DNA, 214 bp, Oryza sativa nipponbare
ccacgcgtccgcccacgcgtccgcccacgcgtccgcccacgcgtccgcacacacttgcacctcgtctcgctctcgcgccaagaaagcaccgcgagttcttcttcttcatcctccatggccacaaccgcgtcgctgtccgccgtcgcggcgcggccactgtccgtggcctggctcaagaagcccctgtgcgcctcgttccagcccgtgccgaggg

SEQ ID NO: 401003 - DNA, 314 bp, Oryza sativa nipponbare
ccacgcgtccgcggcaacaccctcaactacttcggcaacagcatccccatcaacctcatcgtcgccgtcgccgccgaggtcgtgctcgtcggcggcgccgagtactaccggctcatcaacggcctggatctggaggacatgctccacccaggtggcccattcgagccgctgtggctggcgagcgacccgcaccaggcggcgctggtgaacgcgaaggagatcaagaacgggcggctggccatgttctccatgctggggttcttcatccaggcctacgtcaccggcgagagccctgttgagaacctttacaagca

SEQ ID NO: 401004 - DNA, 398 bp, Oryza sativa nipponbare
ccacgcgtccggaaagcataagcaacacaagggattaactcatcactcacttagctaattaaatcttcgaccatgtcggacaagtgcggcaactgcgactgtgctgacaagagccagtgcgtgaagaaaggtaccagctatggcgtcgtcatagttgaagccgagaagagccacttcgaggaggtcgccgccggcgaggagaacggcggctgcaagtgcggcaccagctgctcctgcaccgactgcaagtgcggcaagtgaagtcacgaagcaaccgaacactcgccgccggcgagtcacctaccttaattagtccacaataaaaaccacccatatgagtgtggtttgtgtgtgtgctgattattgctgaattaaatcccggtgttatcgattaatta

SEQ ID NO: 401005 - DNA, 285 bp, Oryza sativa nipponbare
ccatcgcgtccgaaggaagagacgagaggagagagatggccactgcttatgctcccatggcgagccagctgatgaagagcagcttggtgtgctccaagccgagggggctgtctggtgcttcgctgacaaggaggccccgcttcacagtcaaggccatccagtctgagaagccaacgtaccaggtggtgcagcccatcaatggcgaccccttcatcggcagcctggagacgccggtgacctccagcccgctggtcgcctggtacctctccaacctcccggcgtacc

SEQ ID NO: 401006 - DNA, 457 bp, Oryza sativa nipponbare
ccacgcgtccgcccacgcgtccgcccacgcgtccgcccacgcgtccgcccacgcgtccggctcgaggaggccaagaaggcatatccagatgcatttgttcgcatcatcggcttcgacaacgtcaggcaggtgcagttgattagcttcatcgcctacaagcccccgggttgcgaggagtccggcggaaactaagctagttggcaagccagcaagctcactcgtgagctctatacagaggagactcgattgatctattcggttttggcagctttgaacgttcgaatcgggccaccttgcattggtttcccctttcccagtttgttgcttcagtttttttttttcatcttgtttgtgtcaacatcagctgtgtatgatgtacatatgtatgatcaacatagggtgaagagcatgcatatgtgaatgctagcaccaggctaatcatatgcacatacacatc

SEQ ID NO: 401007 - DNA, 194 bp, Oryza sativa nipponbare
ccacgcgtccgtgaagactacaagtgttcctggctaatagtacaggctatggaactcgccaatgagaatgagatgaaaatactatatgagaactacgggaagtctgacccaaaatgcgtagcagaagtgaagagcgtttacagggagcttgatcttcaagacatatttttggagtacgagtcaagagtttacaa

SEQ ID NO: 401008 - DNA, 313 bp, Oryza sativa nipponbare
ccacgcgtccggaaagcataagcaacacaagggattaactcatcactcacttagctaattaaatcttcgaccatgtcggacaagtgcggcaactgcgactgtgctgacaagagccagtgcgtgaagaaaggtaccagctatggcgtcgtcatagttgaagccgagaagagccacttcgaggaggtcgccgccggcgaggagaacggcggctgcaagtgcggcaccagctgctcctgcaccgactgcaagtgcggcaagtgaagtcacgaagcaaccgaacactcgccgccggcgagtcacctaccttaattag

SEQ ID NO: 401009 - DNA, 402 bp, Oryza sativa nipponbare
ccacgcgtccgcccacgcgtccgcccacgcgtccgagctcaaaagacacacattccaaaagcatctgtggccatctcctcctagtcctaggctcgcgtcaatggcggcgtccaccatggcactctcctcccctgccgccctcgccggcaaggcggtcgccaatgccaaggtgttcggcgagggccgcgtcacgatgcgcaagtcggcggccaagcccaagcccgccgcggcgtcggagagcccgtggtacggcgccgaccgcgtgctctacctcggcccgctctccggcgagccgccgtcctacctcacctgcgagttccccggcgactacggctgtgacaaccgccggctgtcggccgacccgggaacgttcgccaagaaccgggagcctggaggatccac

SEQ ID NO: 401010 - DNA, 440 bp, Oryza sativa nipponbare
  unsure (1)..(440): unsure at all n locations
ccacgcgtccgggacatgcaacggcaacatcgaattcaaggagttcctgggcctgatggcgcgcaagctgagggacaaggactccgaggaggagctgaaggaggcattccgcgtcttcgacaaggaccagaacggtttcatctctgccaccgagctccgccacgtgatggccaacatcggtgagcggctcaccgacgaggaggtcggcgagatgatcagcgaggccgacgtcgacggcgacgggcagatcaactacgaggagttcgtcaagtgcatgatggcccagaagaggaggaagaggatagaggagaagagggaccacgacggcggcagcatgacgaagagtgcatggcccctncgtcgcgccggcgagcaagcgtggtccagaagtgcgtgatcctgtaataattgagccagcactgagattctcatgagtcaat

SEQ ID NO: 401011 - DNA, 205 bp, Oryza sativa nipponbare
  unsure (1)..(205): unsure at all n locations
cgcgtccgcccacgcgtccggcgaatccagcagcagaagcagcagcagcagctcagccgccgccgatggcgtccacgatcatggccccaacctcccgcgtcctcgccgccaagacccccttcctcggccatccccgcccctccaatgcccccgtccgcgacatcgccgtcgtcgncaccggccgcatcaccatgagcaaggagct

SEQ ID NO: 401012 - DNA, 459 bp, Oryza sativa nipponbare
ccacgcgtccgccacgcgtccggaagtactcgagcaaagaaggagagagcttggtgagctgcagagatggccccctccgtgatggcgtcgtcggccaccaccgtcgctcccttccaggggctcaagtccaccgccggcatgcccgtcgcccgccgctccggcaactccagcttcggcaacgtcagcaatggcggcaggatcaggtgcatgcaggtgtggccgattgagggcatcaagaagttcgagaccctctcctacctgccaccgctcaccgtggaggacctcctgaagcagatcgagtacctgctccgttccaagtgggtgccctgcctcgagttcagcaaggtcggattcgtctaccgtgagaaccacagatcccccggatactacgatggcaggtactggaccatgtggaagctgcccatgttcgggtgcactgacgccacccaggtgctcaag

SEQ ID NO: 401013 - DNA, 436 bp, Oryza sativa nipponbare
ccacgcgtccgctctgacaccatcgacaacgtgaaggccaagatccaggataaggagggcatccctccagaccagcagcgcctcatcttcgccggcaagcagctcgaggatggccgcacccttgccgactataacatccagaaggagtccaccctgcaccttgtcctgcgcctccgtggtggtctctgagcgtgtgctgtggtgcagcattggacttcattatacctatgccgctcgtctgtcatatcatcgtgtcatggttgtgttgtgttctggtttagagtccctaagttgtgttgatactattatccatactagtacaatttgcttcactgtgcatcggtaccaatcgatgatattatcattctacttcaaaaaaaaaaaaaaaaaaaaaaaaaaaaaaaaaaaaaaaaaaaaaataaaaaaataataattt

SEQ ID NO: 401014 - DNA, 252 bp, Oryza sativa nipponbare
ccacgcgtccgaccactccatttctgagctcttctagtttgagtgagagagcagcagaagggagtatgtgcaagatgccgatccgcagcatcgccgtggggagccaccaggaggtgtaccacccgggtgcactcaaggcggcgttggccgagttcatctccaccctcatcttcgtcttcgccggccagggcttcggcattggcttcagcaagctgaccggcggcggtacgacgaccccccgcggtctgatcg

SEQ ID NO: 401015 - DNA, 381 bp, Oryza sativa nipponbare
ccacgcgtccgtgctcgtcccctacggcgccttcttcatccccgccgggtccgggaacgccggcggcgggcaggtcgccaaggacaagctcggcaacgacgtgctcgccgaggagtggctcaagacacacggccccaacgaccgcaccctcacccaggggctcaagggtgacccgacgtacctcgtcgtggaggccgacaagacgctggccacgtacgggatcaacgccgtgtgcacgcaccttgggtgcgtcgtgccgtggaacgccgccgagaacaagttcatctgcccctgccacggctcgcagtacaacaaccagggcagggtcgtccgtggacctgctcccctgtcgctggcattggtgcacgccgacgtcgacga

SEQ ID NO: 401016 - DNA, 259 bp, Oryza sativa nipponbare
cacgcgtccggaagaaatggagatggactttgggaagctagagtttgactttatgggaacatctgtaatatgtagaagtggcagtgctctaattctagctgatttgaagaaggtttctgtttctaaagcacgtgctattattgttttagcatccgatgaaaatgcagaccaaagtgatgcacgggctttacgtgtggtcctgagcctgactggagttaaagagggtttaaggggacatgttgttgtaaagatgagtgac

SEQ ID NO: 401017 - DNA, 493 bp, Oryza sativa nipponbare
  unsure (1)..(493): unsure at all n locations
ccacgcgtccgcccacgcgtccgatctgcttcttcttccgctacgcttgtgggcacgatgagaagggcgaccattcttgtactgctcattgcactctcatctgttattgctccccttccattggaagctctcaatgtaagaggccatctactgaaatccaagacatttcttggctccggcattcttcctgcaccctggatcagtttcaaacaagttctactatgatgtccccttccctagaggccaccttgctctcaagagctttaatgctgaagtcgtagacgagaatggcgtccctgttccgctccatgatacttacctgcatcactgggttgtggaaccatactatgctttaaagaacagtgatagcgcagacgcgcaaaagctacccaaggtgatcattgcaaggaactctgtgtgtgcaagaaaacattatgccagtactacggncctggttctgagactcgccatactgccacatgggtacctgatc

SEQ ID NO: 401018 - DNA, 444 bp, Oryza sativa nipponbare
ccacgcgtccggtctgctctggggagcggaaagaacttctcctgtcatgaaattgtctttcctgtcaagaaggccacgagtggtgggaaaccatatggatttcatggcgggtgtattggatgggcacattcttctgggttgtgaccatggcacctggaaggcatatgtatcgcgctttgtgttcctggtggtgaagtttgtcccgtcatggttgcgggacattaaactggacacgctaaagaagatagcgtctgggcttcggagttggaatgagcacgatcttgcattggctttacttgagcgaggaggacctcaggcaatctccactgtagtcgacaccttgttgtgatctttgcctcttgacatttcccacccattatctgacataggagtttttgtaatcacatttgaggccaggacttgtgtagagatgtcttcttggtc

SEQ ID NO: 401019 - DNA, 498 bp, Oryza sativa nipponbare
ccacgcgtccgtctcaagagcggtgcagggttcacaaggcaggagaaaatgggggagatcaccaatgtcatggagtaccaggccatcgcgaagcagaagcttccgaagatgatctacgactactacgcctctggagctgaggatgagtggactctcaaggagaacagggaggcattctccaggatcttgtttcgtccccgcatcctgatcgatgtctcaaagatcgacatgtccgcaactgttcttgggttcaagatatcaatgcccataatgattgctcccagtgccatgcagaagatggctcaccctgacggagagtatgcaacagccagggcagcttcagcagcaggaactataatgacactgtcatcttgggctacttcaagtgttggagaggtcgcctcaactggaccaggaatccgtttcttccagctatacgtgtacaaggacaggaatggtggtgagcagcttgtcagaagagccgagagagctgggttc

SEQ ID NO: 401020 - DNA, 346 bp, Oryza sativa nipponbare
ccacgcgtccgcccacgcgtccgctctccaagcacctcagcgaccccttcggcaacaacctgctcaccgtcatctccggcgccgccgagaggacgcccagcctgtaaacatctcgccgccggcgacgctggctggcctcaagttaattttaatcttacccgggaagaagaagggaggagtttgagaagggtggaagaatgtgttaaatgtacgtgtaaattatcgtcgagttgggagatgaatttgaaaacctgttcattctgatcttctgataggaaggaccaagtgtttggatttgtggctgagaaatatttgctacctgagtaaattgtcttgaagtggtttt

SEQ ID NO: 401021 - DNA, 397 bp, Oryza sativa nipponbare
ccacgcgtccgcccacgcgtccgcccacgcgtccgaataaatctcctccattcccccaaatccatccatcatggagttccctcatcgccaccaccaccacggccaccgcggcgacgacgacgacgacgatcgccgccgccatcccgctcccgctcccgcctacggccacgactcagcccctccgccgggtccctacggccaagcgcctcctccggctgatccctacgctcgccacccgccttcccacgactacgctcatcctcctccggcgtatgggggagggggctacggcaacggcgtccacgtttcccacgaggtctccgaccaccagaggcccacgccgcactacgggggatccgagtacatcagccccgtccaagagacccgcccttaccac

SEQ ID NO: 401022 - DNA, 430 bp, Oryza sativa nipponbare
ccacgcgtccgcactgctagcttgggaagaggaggaggagcttgagcttggagagagacaacaatggcggctcaggctcttctctctgggaggcagctgctggggaggccattgcaatcttcagtctccaggtcttcttcctccaggaaggcacccttcatggtcagggcagaggccactccccctgccaagcaaggtgctgacaggcagctgtggttcgcatccaagcagtccctgagctacctggatggcacgcttccgggagacttcgggttcgacccgctggggctatcggacccggaggggaccggtgggttcatcgagccacggtggctggcctacggcgaggtgttcaacggccggacggcgatgatgggcgtcgtctgcattgtcgccccggagctcctcggcatgcttggcctcgtccccg

SEQ ID NO: 401023 - DNA, 288 bp, Oryza sativa nipponbare
ccatcgcgtccgggcagccacacacacaccactccatttctgagctcttctagtttgagtgagagagcagcagaagggagtagtgcaagatgccgatccgcaacatcgccgtggggagccaccaggaggtgtaccacccgggtgcactcaaggcggcgttggccgagttcatctccaccctcatcttcgtcttcgccggccagggctccggcatggccttcagcaagctgaccggcggcggagcgacgacccccgccgggctgatcgcggcggcggtggcccacgcct

SEQ ID NO: 401024 - DNA, 376 bp, Oryza sativa nipponbare
ccacgcgtccgcagagaacttggaattggaatagtagcttacagcccacttggtagagggttcttttctggtggagctaaactagtggagtctatctgttcaggatgttcgcaagcatcttcctagatttcaaccagcgaatctcgagaagaatgctgaaatatttgagcgtgttaacgcaatggcagccagaaaaggatgcacaccgtcacaactcgcattggcctgggtccatcatcagggaagcgacgtatgccccatacctgggacaacaaaaatcgagaatttcaatcaaaatgtagcagctctatctgtgaagctcacccctggggaaatgactgaacttgagtcctatgccagcacagatgttgttcaa

SEQ ID NO: 401025 - DNA, 208 bp, Oryza sativa nipponbare
cgtccggtactcgagcaaagaaggagagagcttggtgagctgcagagatggccccctccgtgatggcgtcgtcggccaccaccgtcgctcccttccaggggctcaagtccaccgccggcatgcccgtcgcccgccgctccggcaactccagcttcggcaacgtcagcaatggctgcaggatcaggtgcatgcaggtgtggccgattga

SEQ ID NO: 401026 - DNA, 385 bp, Oryza sativa nipponbare
ccacgcgtccgaggaggaggagcttgagcttggagagagacaacaatggcggctcaggctcttctctctgggaggcagctgctggggaggccattgcaatcttcagtctccaggtcttcttcctccaggaaggcacccttcatggtcagggcagaggccactccccctgccaagcaaggtgctgacaggcagctgtggttcgcatccaagcagtccctgagctacctggatggcacgcttccgggagacttcgggttcgacccgctggggctatcggacccggaggggaccggtgggttcatcgagccacggtggctgcccacagcgaggggtttcaacggccggacggcgatgatgggcgtcgtcggcatggtcgccccggagc

SEQ ID NO: 401027 - DNA, 261 bp, Oryza sativa nipponbare
  unsure (1)..(261): unsure at all n locations
ccacgcgtccgcgctcgctcatcgccatctctctcagctctcacagctcactgcatcaatggccgcggccaccatggcgctctcctccccggtgatggcccgcgcggcgccgtcgacctcctccgcgctcttcggcgaggcgcggatcaccatgcgcaagaccgccgcgaagcccaagccggcggcgtcgtcggggagcccgtggtacggcgccgaccgcgtcctctacctcggcccgctctccggcgagccgncgagcta

SEQ ID NO: 401028 - DNA, 448 bp, Oryza sativa nipponbare
ccacgcgtccgcttgaagcttacacgagcgctagctaacgaaggcacagcgcgcttcgcgcgaaagatcggaagaaatgtcgaggccggccaggagcgacgcgcacctgtccccggagggggaggcggcgatggaggccgaggtgcgggagtactacgacgaggcggcgcccaagcgccactccaagccctcccgcagcgagccctccgccgtctacaccgacgcgctcgtccccgacgactcccaccccgagctcgacaggttccagcagctcgaagcccacaccgagaaattggtgtgcgagggtggcaaggcaggggatgagttcgtggagacggagtactacaaggatctcggctgcgtcggcaagcagcaccacacgactggaacagggttcatcaagatggacaaagccctcggcggacgcctcgtttcatctgtctgatga

SEQ ID NO: 401029 - DNA, 370 bp, Oryza sativa nipponbare
ccacgcgtccgcggacgcgtgggcggacgcgtgggcagccctccgctcgtcggcgtcgctcaagtctaccttcctagggcaatcctccacccgcctcgcccgcgcaccgactacgaggcgtaatgttcaggcggaggccaagggagagtggctccccggcctcccttctcccacctacctcaacggcagcttgccaggcgataacgggttcgacccgttgggtctggcggaggacccggagaacctgcggtggttcgtgcaggcggagctggtgaacgggcggtgggcgatgctgggggtggccgggatgctgctgcctgaggtgctgacaaaaatcgggttgatcgacgcgccgcagtggtacgacgcc

SEQ ID NO: 401030 - DNA, 377 bp, Oryza sativa nipponbare
ccacgcgtccgcccgagtgtcaaggaaggcggcgccgacgaggcgaggcggcgggaggacgaggaggccgccgagaaggagtcctcggcgaaggccgccgcggcgacggcggcgctgcggaccgtggtgagcgtgccggacacctgcgacctgtaccgcggcaactgggtgtacgacgaggtgaacgcgccggtgtacaaggtgtcgcagtgcgagttcctgaccgaacaggtcacctgcatgctcaacgggcgtcgctacgactcctaccagaagtggcgctggcagtcgaccgactgcgacctgccccggttcgactcgaggctgctgctggagcggctaggcaacaagcagctgatgttcgtgggtgacatcgc

SEQ ID NO: 401031 - DNA, 352 bp, Oryza sativa nipponbare
ccacgcgtccgaagaaagcatacagcatacacaagggattaactcatcactcacttatgctagatgagatggatgggccatgacattcaagcgcgtcaactgcggctgttcagacatgccccggaaacaacacaagacggtcatttggaatgggcctatgggtgtcttggaatttgacaagtttgcaggaggaaccgaggcttttgcaaagatgttggcagaccttagcggctagggtgttacaaccattattggaggaggtgattcttgtgccgctgttgtgaaggttggagtagcttatgttatgtgccacattttaacgggaggtggggctagtttggagcttttggaa

SEQ ID NO: 401032 - DNA, 302 bp, Oryza sativa nipponbare
ccacgcgtccggctaacagccagcatgttccagcatgtgctattcctgatggtcggatggatttggatatggttgcagattgagtcacctcactcagctctaccctggaatcaacacagacagccatttgacatggacctatggctgttttcgaatctgacaagtttgcagccagaactgaggctattgcaaagatgctgccataccttagcgggaagggtgttacaaccattattggaggaggcgattcctattccgctgagtgagaaggtgttagttgcacatgtaatgagccacatttc

SEQ ID NO: 401033 - DNA, 322 bp, Oryza sativa nipponbare
gtccgcggacgcgtggggcaaagaaggagagagctcagtgagctgcaaagatggccccctccgtgatggcgtcgtcggccaccaccgtcgctcccttccaggggctcaagtccaccgccggcatgcccgtggcccgccgttccggcaactccagcttcggcaacgtcagcaatggcggcaggatcaggtgcatgcaggtgtggccgattgagggcatcaagaagttcgagaccctctcgtacctgccaccgttcaccgtggaggacctcctgaagcagatcgagtacctgctccgttccaagtgggtgcccccgcctcgagt

SEQ ID NO: 401034 - DNA, 434 bp, Oryza sativa nipponbare
ccatcgcgtccggctaacagccaggttgttccagcatctgctattcctgatggttggatgggtctggatattggtccagattcagtcgcgtcattcagctctaccctggaaacaacacagacagtcatttggaatggacctatgggtgtcttcgaatttgacaagtttgcagtaggaactgaggctattgcaaagaagttggcagaccttagcggcaagggtgttacaaccattattggaggaggtgattctgttgccgctgttgagaaggtgggagttgcagatgttatgagccacatttcaacgggaggtggtgctagcttggagctgttggaaggaaaggaacttcctggagtcattgcacttgatgaagctgtcactgtggccgtatgaggctaaagttcattttgttgcatcttcttcatgtaccattc

SEQ ID NO: 401035 - DNA, 320 bp, Oryza sativa nipponbare
  unsure (1)..(320): unsure at all n locations
ttgcagcatcgaattggagccgtggcaacttatatagccataggaatagtacaattatatcaacatcataaacagggggaattaatccatggcgatccggccatgggggactagcagtacagtacagaggatttgcatggatggatcggatcaagaagaaggtgaggcatagacgaggaatttaatttagatcttgcctcgtgggccgggcgtcggcngcagctactgcccctttttgatcggaagcaggtctgacgactccgactcgctgacataggccaccacccatctcccgcccagccgcaacaacttcaccagga

SEQ ID NO: 401036 - DNA, 343 bp, Oryza sativa nipponbare
tttttagggatgaaatccttcaggatgggtttaattaattcgccatcagaaaagaaaatttctacaaatatattataatttagttacaatacttttttttttagaaacacccccgtatatgaaacttgcagtcaagccaagaacttctcgaccttctccacttcctccacgctcccgatgtacagcggcactctctgatggatctccgtaggcatgatgtcaagtatcctctggtggccatcggagcccttgccgccggcctgctcgacgatgaagctcatcggcgcgcactcgtacagcagccgcagcttgccgttcttgctcttctggtccctggggtagc

SEQ ID NO: 401037 - DNA, 504 bp, Oryza sativa nipponbare
tatctttaaaggcaagaatattgggcatgaatgacgcatgatttttatcaaaacgcttgcaaatgatatcagataagtagagtcaacaagacaaaactgtatctgccaaagcacacctccccaactccacccaattacgccattatttctgggcaaaagcaaacggcttcccattcctccccttcaccagtctcaaaccataaaccccacaacaaatcctcctaagtgacggcatataagatgatgaaaacaaagcaggatactccagagtcgtcatggcgaacttcaagttgacacttctcatgccacagccgctagtcgtgctgggcagcctagtaccggtagtgcgcgggcttgtagggaccctcaactggaacgctgatgtagtcagcctgcgacttggagagcttggtcagcctggcaccaagcttgcccaagtggagggcggccaccttctcgtcgaggtgcttgggaagaacgtacaccttcttctcgtacttgcca

SEQ ID NO: 401038 - DNA, 454 bp, Oryza sativa nipponbare
tcaagtatcaagtgtagtatatcgtcatcaggcaagtacagtgttacatagattaatcacaatgcagtttgattaagcagtgggcatcatcacatcgcattcagaggaaggctatcttagattacagatgaatatgcagacacccagcttggtgttacatacatagactggatttgggtgaaatttagccggcgagggcgctggtgttgtagacgaggagggcgccgccgccgaggagcccggcgagggtcacggcccagatcagaagcccggtggttccaccaacgtaggtgtcaccggtgggagaccattcctccggcgagtagattgggctgtagccgtcgacgtttgcgccgtacttgtcaacaaattggtacacacccttccccgtgctcttcctgccagatgcatcaatatcgactgacatgccacctccaatcccggagggcttgtc

SEQ ID NO: 401039 - DNA, 435 bp, Oryza sativa nipponbare
gcaagaaaccttttgcggctaatgacattttataattaaccaagagtaagttacatgtagtatgccaaaaaatccggccggcaaagtaaagttagtgtacaccaagaatcgaaaatatgaacatcttacagcatgttccattcctacaaaactagtgggatttaggcagggagagctgccggcgtggctgggggaacccggttctcgacagggatctccgtgaactcggagagaatcgccctgaactcgtcaccactcaatgtctccttctcaaggagcacctccacgatcttgtccatggcctcccggttgctcctgatctggctcaaagcgatctcgtaggcctcatcggacaaccgcttcacagcggtatcgatgtcctccgcgagcttctccgacatggagttccttgccatcatcctcatgatgacatcg

SEQ ID NO: 401040 - DNA, 415 bp, Oryza sativa nipponbare
tggagacacataatgcgtttagggtggggagaggacttaaatgtacgattatccccactgacagatacaactgaaaatgaactcaagaaatggagaaagaaaaatattggagggaatttaaggttgatttatttgattatttccatagctgctccattggaagcccgcgctctgcagcaacatccttgaactgcctcatcatttgggtcgccttgatggtagctcttgcattgttgagggggttcttgctcctcagctgattccccagagcattttcaaccccagccatctccagcacgaccctcacagctccacctgcaattacaccagatccagggcaagcaggcctcaacatgaccctggctgctccatagtctgcatctgctctatgcgggaaggtcgaatacttggtgag

SEQ ID NO: 401041 - DNA, 497 bp, Oryza sativa nipponbare
gctatggctacttccatggtttggttaatgtaatgagcctatcctctaccctctcttttctgtttatatttcaatataccgaaacccatataagactagataaatattaagaggactcttcctcctagataaaaatctatcgtgggcagcaaagttgtttttttatttgtatttgccctttagttaaaattttcaatttcattaagaaaaactaaatagaaaaatggaaaatgaaaatggatagaattcctacttttttcttcaaatccaaaaactttctccttttttatacataggtcgtcgattcggcattggataaaaaagggcagggtgccccttctagtaaatagttcaaaccattttatcgatatgagtgttctatatcagataaattctacattagctatttcctgtttaaagcatttggtactaatactaatatagttgtagaaagagtacccccttttgcctagacttcaagcagtttagctttaacc

SEQ ID NO: 401042 - DNA, 374 bp, Oryza sativa nipponbare
ttattgcaaaaacatcatcttctgcttcagcttcttagtgtacacaacaccaactcgatcatcatctcgtcgcactaaacccatcttccccaacccaaagacaacgaactcgctggccacaaatccatccaaccacaattaaccactgctaagctacggtcccccacttcacttgccggggacgaagttggtggcgtacgcccaggcgttgttgttgacggggtcggcgaggtggtctgcgaggttctcgagggggcccttgccggtgacgatggcctggacgaagaagccgaacatggagaacatggcgaggcggccgttcttgatctccttcaccttgagctccgcgaacgcctcggggtcatcggcgaggc

SEQ ID NO: 401043 - DNA, 410 bp, Oryza sativa nipponbare
  unsure (1)..(410): unsure at all n locations
tttcctatcagaagatcanaatgagacaggtttcaaattcatctcccaactcgaccataatttacacgtacatttaacacattcttccacccttctcaaactcctcccttcttcttcccgggtaagattaaaattaacttgaggccagccagcgtctccggcggcgagatgtttacaggctgggcgttctctcggcggcgccggagatgacggtgagcaggttgttgccgaaggggtcgctgaggtgcttggagaggttctcgacggggccctcgccggtgacgtaggcctggatgaagaaccccagcatggagaacatggccagccgcccgttcttgatctccttcaccttcagcagcgccgcctggtccgggtcgctcgccagccccagcgggtcgaatgggccacct

SEQ ID NO: 401044 - DNA, 418 bp, Oryza sativa nipponbare
gacaaaattgttcgaaattacacgcaaagacacaccgatcgatgactagaagcgcaaagaatcaacttctctctgatgacaaatgtgctactcgagctagctagactgacgtctcttcttcatcaaacagaagtggcgatggtttcagagcaagaagaagaagaagaagaagatcagattcaggcggcggcggggggcttgccgccgccgccggcgacgagcttgtcgatgaggtcggcggcgtcctggatggtggtgatgctctgggcgttgtcctcctccacggtgatcccgaactcctcctccagcgccatcacgatctccaccgtgtccagcgagtccgctcccagctccgtgaactgcgactccggcgccagcttcgcctccttccccagcgccagctgctgcttcactatct

SEQ ID NO: 401045 - DNA, 471 bp, Oryza sativa nipponbare
ttgtagatcctataataacgatggcatcgttaattcgatcatcccttggatgcggcctgcggcttacattaaatctcgatccaaagaagcaaagatgatgacagacagaaattaattaagctagaaatctcctcgatcgatcacacacacacacacaattaaggtacatacatacatgcactgctgcaactgcaactgcagggtcggtgcgtggctactacaagtgtacacatggtacgttggttggcaccatctcgatcgtgtcgttgtgctcacttgccggggacgaagttggtggcgtatgcccaggcgttgttggcgacggggtcggcgacgtggtcgaagaggttctcgatggggcccttgccggtgacgatggcctggacgaagaagccgaacatggagaacatggcgaggcggccgttcttgagctccttcaccttgagctcggcgaaggtgtcagggtcgtcg

SEQ ID NO: 401046 - DNA, 424 bp, Oryza sativa nipponbare
tagtaaaaaggtaaacggttcgtggtaatattattaagacattatagctgatgtcttttgatcacactgcgatcaaattatgcatcataggcagtacaactccgcgtcaggaaaaagtagaggagatatatttcttgttattacttaatacagcattcacatatatcgaaccatccggtacgtacgtagtagtactccacgcgttcacatcgatgatcggggacgatatcctcaggtagtacttatgcaaaagcgttggcgtaaactgacgaactgaacggacggacggtcggatttagggctcccataagtccaagttgccggagacgaagtcgtagtggccgccgactagcttgagggtgccgttggcgatcccctccttgacgaacgggtaggtcttgaggttctccagggattggttcac

SEQ ID NO: 401047 - DNA, 228 bp, Oryza sativa nipponbare
ttttcaccaaacatatgctacaatattataagaagagattatatcccaccatcgatcgattacaccatcatcaataactgaagagcagcctgacagatgattaaaattacatgtccatccacccaaaacacaagtaattaataggtcgattatgagagaagaagaagaagaagaagaagtctagatgtcgaagacgttcttgccggtgaacttgacctcgaaggggct

SEQ ID NO: 401048 - DNA, 384 bp, Oryza sativa nipponbare
  unsure (1)..(384): unsure at all n locations
tggagtaattaatattctagctagatatggatcgagacgggggacgaattcnattattgagactgggagcagacgatatgatatgatatgatcagtagtcggcggtgggcagctggtcgtgcgggcgctggccgatgaagatgatgtcgtagatgagcgcggcgatggcggcaccgacgaaggggccgagccagtagacccagtggttgtcccaaactccggtgacgacggcggggccgaaggagacggcggggttcatggaggcgccgtccaaggcgccgccggcgaggatgtttgccccgacgatgaagccgatggcgatgggggcgatgacaccgaggtcgcccttcttgggatccaccgcggtggcgtacacggtgtaga

SEQ ID NO: 401049 - DNA, 379 bp, Oryza sativa nipponbare
ttttaattaattcacaaggaccggtttcattgatcaggttcagaacctgcacagaaatacacactaccggtacagatctcaccctctctccaatactcgtacatccatccacgcggtccacactaatacttacatctatactgtacacgtacttacatctactgcaccgggtacacacactcacactctcctgcagagactcccatcgtcgtcaacctagctagcttaactgaaggcgatgcgtcgccatggcagcacggcggcggcggcgctcacttgcctgggactaagttggtggcgtaggcccaggcgttgttgttgaccgggtctgctaggtggtccgctaggttctctagggggcccttgcccgtgaccattg

SEQ ID NO: 401050 - DNA, 436 bp, Oryza sativa nipponbare
tcaaaattgcactaaacagcgggatttatttggaaacgaaaacagaggtagtactataataatagtaatttctgaacaagaaagatctctataattttaacaccggtacagtttgacccctccctatgaaacacatctccccacacacacgcatcacgcaaaacgcaccaagaacacggagaccaatggagtgacgccattggcccattggtaagcagcaagaagctgcgtcgtcggcggcgatcgtccgatcagtcctgcgacgccgactggaagatgaggaacgcggtggcgactccgaccaccccggtgagcgccagcgccaccgtcggcaccggcgacgtcagccccacgttctggagcacgcctttgccggtggtcagctcgacggtgatggcggctactaaacctagcatggctccgcggctgagccaca

SEQ ID NO: 401051 - DNA, 500 bp, Oryza sativa nipponbare
  unsure (1)..(500): unsure at all n locations
ttgagacattgcacaaaaatcaagcaggggaaaaggtataccaggtcaaataaacagcaagtaacaaaactccaccaaaaaggcaactgttttaactccgaattcaagtcctaaatagtacttttgcaactgatgattttgcttctaaacattgtgctgctcacttgaagcattttgcatccagcaagtcctcgccctcgaacggctcctggtcctcaatcatggcattgacacgctctttctgggcctcatcagagaggtcaaccttggtccactcatagagctccatgtcgtagacctcatccatgacgaacttggggatgtcctgaccacggaagagccagagtcccttgaccttgaagggcggtgtggagccaatgaccagcatcttgccaaaagcatacttgcggcacagatccatccgctgcaggaacccaccgaccttgttcatcgtcacaaacgatacggnggtctcatcgttgaacttgtagtcacagaac

SEQ ID NO: 401052 - DNA, 466 bp, Oryza sativa nipponbare
tagtaaaaatacaagttcgtgaggggcgagaatacttaaagctacctccaaatagcgtgtagcattgcgtagcaaaccaagcatataacttaggacaaacattcagttgcagcttcacatcatcgctgcttatcataactgcaataacagcgcagatggagcataaactaagtatatttcgtagttctagcttatatataatatcagaatcaccaactgtgaaccatccacaggatggtcgggggactactgatcagaatctactcctttgaggtgtggatggcagacacggtggagaccatagaatccacgccacatttgttgcggacgttggagcccctgcagatcttgtagtacccatgctctccccagttctcgccccaggagttcttgatgatccagtaggccttatcctttaggcggattggagcaaaaccagatgcgccgtagccaacgagaagaacac

SEQ ID NO: 401053 - DNA, 449 bp, Oryza sativa nipponbare
tttttgatcctataataacgatgcgcagttaattcgatcatcccttggatgccgcctgcggcttacattaaatctcgatccaaagaagcaaagatgatgacagacagaaattaattaagctagaaatctcctcgatcgatcacacacacacacacaattaaggtacatacatacatgcactgctgcaactgcaactgcagggtcggtgcgtggctactacaagtgtacacatggtacgttggttggcaccatctcgatcgtgtcgttgtgctcacttgccggggacgaagttggtggcgtatgcccaggcgttgttggcgacggggtcggcgacgtggtctaagaggttctcgatggggcccttgccggtgacgatggcctggacgaagaagccgaacatggagaacatggcgaggcggccgttcttgagctccttcaccttgagctcg

SEQ ID NO: 401054 - DNA, 383 bp, Oryza sativa nipponbare
tgggaaacgaataaaggcatggttgcaaaaacatcatcttcttcttcatcttcttagtgtacacaacaccaactcgatcatcatctcgtcgcactaaacccatcttccccaacccaaagacaacgaactcgctggccacaaatccatccaaccacaattaaccactgctaagctacggtcccccacttcacttgccggggacgaagttggtggcgtacgcccaggcgttgttgttgacggggtctgcgaggtggtcggcgaggttctcgagggggcccttgccggtgacgatggcctggacgaagaatcctaacatggagaacatggcgaggcggccgttcttgatctccttcaccttgagctccgcgaacgcctcggggtca

SEQ ID NO: 401055 - DNA, 300 bp, Oryza sativa nipponbare
gaaaaaaaccacttcaaaacaatttactcacgtaacaaatatttttaaaccacaaatccaaacacttggtccttcctatcaaaaaatcaaaatgaacaggttttcaaattcatttcccaactcgacaataatttacacttacatttaacacatttttccacccttttaaaactcctcccttttttttccctgttaaaattaaaattaactttaggccagccagcttttcctgcggcaaaatttttacaagcttggcttcctttttgcggcccctaaaataactgtgaacattttttttcc

SEQ ID NO: 401056 - DNA, 365 bp, Oryza sativa nipponbare
actaggcaaaccacacgaatagcgcgattgattaatttcactgagaataacaccggtacctcacatcacacaaattcataccttgatacacccatagtcccccaagccaccagctgcttaattaatcgataacacacgggtttaattcagcaataatcagcacacacacaaaccacactcatatgggtggtttttattgtggactaattaaggtaggtgactcccctgctgccagtgttcggttgcttcatgacttcacttgccgcacttgcagtcggtgcaggagcagctggtgcctcacttgcagccgccgttctcctcgccggcggcgacctcctctaagtggctcttctccgcttcaacta

SEQ ID NO: 401057 - DNA, 378 bp, Oryza sativa nipponbare
ctacatataagtatcgtttttggcgatgtgtacaatatatttattacgatgtgtatgtgcatatgattagcctggtgctagcattcacatatgcatgctcttcaacctatgttgatacatacatatgtacatacatacacagctgatgttgacacaaacaagatgaaaaaaaaaaactgaagcaacaaactgggaaaggggaaaccaatgcaaggtggcccgattcgaacgttcaaagctgccaaaaccgaatagatcaatcgagtctcctctgtatagagctcaccagtgagcttgctggcttgccaactagcttagtttccgccggactcctcgcaacccgggggcttgtaggccatgaagctaatcaactgcacc

SEQ ID NO: 401058 - DNA, 434 bp, Oryza sativa nipponbare
cacatactacggaagaccattctgttgcatattattagtgtcacatagcaacacaatacatatgtcttcttttacttagccacatgtgtgcatggcggtatcctctcccagttccagaagttacaattttttttgtgaacagtatcagagggcatatgcatgtcattcaatgtagcgcatcgcatcctccaactgtccaacttgccaagcggttgtgtccgaactcaagcagccactgtggaaaggtgtttctacttcttcctcctgtaaatcttcttcagaaacgacttcaaaatatcccgaattgcacggtcagtctcggcgtcgatggtcgaaaccaggtgcttgtaaactcttgactcgtactccaaaaatatgtcctgaagatcaagctccctgtaaacgctcttcacttctgctacgcattttgggtc

SEQ ID NO: 401059 - DNA, 487 bp, Oryza sativa nipponbare
tgtcaaatttgtaatcccatttgtctctgggaaaattgtaatcccatttgactgaacaccgatgtggcagccactcgtgattcagttgcccacaaataacttgcggcgcgataaaaaatatgaagaaaaactgtttggctgctactgctttcagaataatgggcgatacagctatgatcctaagctacatgcttatacattgagaataaggaaaacttgagaactcaagattcttgacgttgtctctgccggttcagtgcgatgtatacatggttccttctctgtttggtcccgatgtagttgatgctaaaagaaaccacaaaaccagtatgacttaagaagcaaatgaagcgattgcgtccatttcataacgcaggaggagcgcatcaatgaagatatccaagctctccccctccataacatcttctatggagtggtgcgtgatcccaacacgatgatcggtaacacgcccttgtggaaagttgta

SEQ ID NO: 401060 - DNA, 485 bp, Oryza sativa nipponbare
  unsure (1)..(485): unsure at all n locations
ttttnnntnnnnaaaaccacacgagtacgcgattgtttaatttcactgaaaatagcacgggtacatcacatcacacaaattcatacgttgatacacgcatagtcgccgaagcgaccagctgcttaattaatcgataacacacgggtttaattcagcaataatcagcacacacacaaaccacactcatatgggtggtttttattgtggactaattaaggtaggtgactcgccggcggcgagtgttcggttgcttcgtgacttcacttgccgcacttgcagtcggtgcaggagcagctggtgccgcacttgcagccgccgttctcctcgccggcggcgacctcctcgaagtggctcttctcggcttcaactatgacgacgccatagctggtacctttcttcacgcactggctcttgtcagcacagtcgcagttgccgcacttgtccgacatggtcgaagatttaattagctaaatgagtgatgagtt

SEQ ID NO: 401061 - DNA, 354 bp, Oryza sativa nipponbare
  unsure (1)..(354): unsure at all n locations
aacacaatgcaggtgcattgtacttctttcatcaaccaaccanataacattgttttacacaatctgaacgaacgaagcaaatattcgggtactcggaaagaggagaacgtcgcgcgtctcaccgcagcctgcatgaaagcaatggacctcaccgccgttgctcgccggagatccacactcacttgcctgggactaagttggtggcgtaggcccatgctttgttgttgaccgggtcggcgaggtggtcggccaggttctccagtggccccttgccggtgacgatggcctggactaagaaccctaacatggagaacattgcgaggcggccgttcttgatctccttcaccttgagct

SEQ ID NO: 401062 - DNA, 390 bp, Oryza sativa nipponbare
ttttaaaccagcacaaggcaccaggcatatgaagtttagctaaagatactgataaaagtcacagctaatacaaaaagagcaagatttacataaatgctgtcatttctggaaatgaggattgagtaacccagagatttcaagaaatccaacacgatcacgccctccaaatatcttcttcagtttctcgtcacacacaattatcttcttgttgttcggatcctggaggttgttgcccttgatgtgcgcccagatgatcttgagcgcctccgtcctgggcagctcctccgcgccgccgacgaactcccgcagctcggcggagatgggcttcggcttcatgatcccgctcgccgccctcttcttcttcccggacgacttcccctccgccgcccc

SEQ ID NO: 401063 - DNA, 430 bp, Oryza sativa nipponbare
gccacagcaaattaggggtaatgagaacactaggtctcgtatggatcattacaaagtacacaaatgtacaaattaaaacatcaaaagagttaactaagcttaaagcagcagctgacacataagttgcaaaccccaacttttttcagtttctgaattctggatggatcatatcagattcatcacagcatcgtacaatctgtgcaagcattggtacatcgagcgatggagagagagagtagtctacaatggcggctgggccattcacgagcccggcgtgaacttggtggcgtagacccacgcgttgttggcgacggggtctgcgaggtggtctagcaggttctccaaggggcccttgccggtgacgatggcctggacgaagaagcctaacatggagaacatggcgaggcggccattcttgatctccttgacc

SEQ ID NO: 401064 - DNA, 458 bp, Oryza sativa nipponbare
tttatttcattcacatgtgcctgacccaacaacatatagtcgtagcaaataccactcttacatcaagtcagagagagatcaggtgaaacaaaaacaaaagcagagcacggccggtaaaatcaaaagacgatgaacaaactgggaacacacgaaacaaggtgggagacatcatcgaatcagagatgaacaattaaacaaggctatatatgacgatgacggcttagttgccaccagactcctcgcagcccgggggcttgtaggcgatgaagctgatgagctgcacctgcctgacgttgtcgaagccgatgatacggacgaatgcatcagggtacgccttcttggcctcctcgagctccttgagcacctgggtggcgtcagtgcacccgaacatgggcagcttccacatggtccagtacctgccatcgtagtatccgggggatctgtggttctcacggtag

SEQ ID NO: 401065 - DNA, 451 bp, Oryza sativa nipponbare
  unsure (1)..(451): unsure at all n locations
acataagcatcaataccttataagttcaggaaataggtagccactacattgggaaaacaagtaggggaaggcaggggatcaagctcaggaattacaacaactgaagattttttatgtttttagtangtgatacagaccgggaaagccagaattgcatatctttaggagaagcttggtgcagaaactgcaactcaatcatgtccttggcttagtcggccgtccagctctgctccacaatctcgcggactttgcggttgtactcgcgcttgttctcgctgaacagtctggctgcttcggagtttgcaggggagtttgggtttggatcacagagcagggactggatagaggtcaatatcgcagcaacatcatatatagggctccattgattttgtaggatatccaagcagatacttccatctgcataaatatttgggtgaaacatccttgagac

SEQ ID NO: 401066 - DNA, 462 bp, Oryza sativa nipponbare
  unsure (1)..(462): unsure at all n locations
tttgacccagtttgatatattagtgccggagtgccacagatcatcagaaactactgatggttcatcaaaatgacacancaaactactcctatggtctgccatagttcaacaaaaaaacccaggcaacttatttgcttacatctatgcatcatcttcttcaggtccaacttgaacattcagagattgctcgtcagccatgtcggtaagcaccatggaaccgggaagctgaagcacagagcaggcttgggagctggctgttcttgctctgcaacaaggatgtagagcaggcccatgacgccggtgtgctggcggtcactgctgtagttggagactacggtcagcacctcgccatcactgaccttgactgatcccggcttcgggtagcatgttgacatgccgacgatgtagttatcttcattgccagcctcttcccccttgccataacttcgaatcgatgcacaa

SEQ ID NO: 401067 - DNA, 454 bp, Oryza sativa nipponbare
tgttttttgaaccagaggacatgtgtacacaagtcctggcctcaaatgtgattacaaaaactcctatgtcagataatgggtgggaaatgtcaagaggcaaagatcacaacaaggtgtcgactacagtggagattgcctgaggtcctcctcgctcaagtaaagccaatgcaagatcgtgctcattccaactccgaagcccagacgctatcttctttagcgtgtccagtttaatgtcccgcaaccatgacgggacaaacttcaccaccaggaacacaaagcgcgatacatatgccttccaggtgccatggtcacaacccagaagaatgtgcccatccaatacacccgccatgaaatccatatggtttcccaccactcgtggccttcttgacaggaaagacaatttcatgacaggagaagttctttccgctccccagagcagaccggacgcgtgggt

SEQ ID NO: 401068 - DNA, 358 bp, Oryza sativa nipponbare
gggaagggggaactccggtaattaaaaattaaaggagtatataaaccggttccgtaaatatcttaaggcgagatatacagatgccaaataggtgtacagtactcgaaattacaaagattataccagtataattaatcgttgggattaagagcatgaacgacccagttaccaggggtgcacggagtacgtgtgttgcttgcgcgcgtgtggatcgaccagattcttttgcaaaaattacctaattaattaatcggcgtgctctctggcgtcgtcgatattgtttattgtttggctagagttcgccggcggcggcggcggcaaagtcctcacaacctgaggaaggggcgggctaggcggt

SEQ ID NO: 401069 - DNA, 347 bp, Oryza sativa nipponbare
  unsure (1)..(347): unsure at all n locations
aaaagccactggtagacaatttactcaggtancaaatatttctcatccacaaatccaaacacttggtccttcctatcagaagatcagaatgaacaggttttcaaattcatctcccaactcgactataatttacacgtacatttaacacattcttccacccttctcaaactcctcccttcttcttcccgggtaagattaaaattaacttgaggccaaccagcgtcaccttctgcgagatgtttacaggctgggcgtcctctcggcggctcccgagatcactgttagcaagttgttgcctaaagggtctctgaggtgcttggagagcggactcttgggctgactcttgg

SEQ ID NO: 401070 - DNA, 465 bp, Oryza sativa nipponbare
tagatgaaaacaatggcactttctatacgtatctgcaaactctatcggcaggtacataatggaggagcagcctcgctatagtttagtatttgaagcaaattacaagggcaacgaaagaaaagagaattacattggctccggccaaaaaatgaaaagaaatgcagaaaagaatgttgtcgtgatcgtcatatgtatttgagcctcctccattatatcttcagttctgaaggggatgaggaccagcattcttgacaagccttcgagattccctgtgacaatggagctaagggccaaggcagcgccgccgggagggtggtggatgccgatcagacgtcgagggttactgcgggcatctcgaactcggaggtgatctcctcgatctgcttccggacgctcatgtcgatgaggctggacccgtcgcggccgtactggatggtgaagccggcgatgagctccgggtcgatg

SEQ ID NO: 401071 - DNA, 486 bp, Oryza sativa nipponbare
attcgtaccgggaccagagttttggggatcaacaacaaacattccaaacaatgagatggctggattattacagagctggaccaaacaaaacaaaacacttagctagggccagtcgagcgaccacacctgccggcccctccatcgatcagaggcgcctcttattattccataaacctccctcactcatatgtagagatagacagatagatttgatttgatcaccagggaacaatcttccagcgctggttgtcaccctcgcaccactcccagagcaccagggtggttccgtcgcgcacgccgccgtggtccttgtctccatggagcgcgtcgaagttgaggtagatgttgttcaccatcctgatgcaccgaaacccactcccaacgtccctgctctccgtccacagcacagactcgtccatgtactctggattgtagcgcaccaaacggacctgtccatccatccatccatccatgacatattatata

SEQ ID NO: 401072 - DNA, 441 bp, Oryza sativa nipponbare
  unsure (1)..(441): unsure at all n locations
attcncaccnnnaccaagttttgttgattaacaacaaacattccaaacaatnanatnnctgnattattacagagctggaccaaacaaaacaaaacacttagctagggccagtcgagcgaccacacctgccggcccctccatcgatcagagacgcctcttattataccataaacccccctcactcatatgtagagatagacagatagatttgatttgatcaccacggaacaatcttccagcgctggttgtcaccctcgcaccactcccagagcaccagggtggttccgtcccacaccccaccagggtccttgtctacatggagcgcgtcgaacttgaagtaaatgttgttcaccatactgatgcaacgaaacccacttctaacgttcctgcttttcgtccacagcacaaactcgtccatgtactctggattgtaacccacca

SEQ ID NO: 401073 - DNA, 442 bp, Oryza sativa nipponbare
agcaaatcgatccatgcgaccgtgcgtgcaaatcagttggagcacaaatttacatgttacacccacaccctacacccatgcataataatacatcgtatatacgtacgtacatacatacccctctcgatcacacgcaccatcgatcgtacaaagttgcgtacatacatacgtacacacatatacccatacccacgtacatacatacataattaaaaactcgtaattaattaaatacgtagttgatggcatctctaatggaacttgaggctggtgaggatgttgttgtggaccggatcagcgaggtgatcaagcaggttctgcacggggccaaccccggtgaagagcgcctggacggagaagccgaggaaggcgagcatggcgagcctgccattcttgatctccttgagcttgagctccttcatctccgcctcgctcttggtcc

SEQ ID NO: 401074 - DNA, 336 bp, Oryza sativa nipponbare
acagaaacaaaccaacggtttcgaaagggtccacactaacagtccgttcaacgtacaactgatccaagcaaatgaaacaggtttgatgatgcactgatgcgagaaactaaacggttgaatcggagtcggagacgaggcgatcatggacaagcggcggcggcggcgatgagcttagtagtcggtggtggggagctgctcgtgggtgtgggagatgaagaggacctcgtagatgacgccggcgaggccaccgccgatgagtgggccaacccagtacacccactgggactcccaggaccagctgacgagggccgggcctaaggagacggccgggttcat

SEQ ID NO: 401075 - DNA, 464 bp, Oryza sativa nipponbare
ttaaaaaaaaaatgtgacctcagggcttgatttattattcgcacacgtactgcgcacaaactaataaaaccacactttacaacaccactagctaggttttagacacaaacaagcataagcgatggtttaacaagagcgagcaacgcgtctgatacaatgaacacttatacaaaatctggtgtgtgctctgccatttgagctaaatttgaaccgggattttgtatttgaacatatgaaaacgtttactctgctttccaagacgacaatggaggggtctcagaatccttccaagtgccggccgtctgagcatagcggtcaccttgaacaacatctgtgctggcataggactcaagttcagtcatttccccaggggtgagcttcacagatagagctgctacattttgattgaaattctcgatttttgttgtcccaggtatggggcatacgtcgcttccctgatgatg

SEQ ID NO: 401076 - DNA, 479 bp, Oryza sativa nipponbare
tgtataaatatatatagccggagcgtccgtgtatttcattcacatatgcctcacccaacaacatatagtcgtagcagataccactcttacatcaagtcagagagagatcaggtgaaacaaaaacaaaagcagagcacggccggtaaaatcaaaagacgatgaacaaactgggaacacacgaaacaaggtgggagacatcatcgaatcagagatgaacaattaaacaaggctatatatgacgatgacggcttagttgccaccagactcctcgcagcccgggggcttgtaggcgatgaagctgatgagctgcacctgcctgacgttgtcgaagccgatgatacggacgaatgcatcagggtacgccttcttggcctcctcgagctccttgagcacctgggtggcgtcagtgcacccgaacatgggcagcttccacatggtccagtacctgccatcgtagtatcccggggatctgtggttct

SEQ ID NO: 401077 - DNA, 434 bp, Oryza sativa nipponbare
gatccatgcgaccatgggtgcggatcatttggagcacaaatttacatgttacacccacaccctacacccatgcataataatacatcgtatatacgtacgtacatacatacccctctcgatcacacgcaccatcgatcgtacaaagttgcgtacatacatacgtacacacatatacgcatacgcacgtacatacatacataattaaaaactcgtaattaattaaatacgtagttgatggcatctctaatggaacttgaggctggtgaggatgttgttgtggacgggatcagcgaggtgatcaagcaggttctgcacggggccaaccccggtgaagagcgcctggacggagaagccgaggaaggcgagcatggcgagcctgccattcttgatctccttgagcttgagctccttcatctccgcctcgctcttggtcc

SEQ ID NO: 401078 - DNA, 431 bp, Oryza sativa nipponbare
gggaaacgaataaaatcattatggcaaagacatcatcttcttcttcatcttcttagtgtacacaacaccaactcgatcatcatctcgtcgcactaaacccatcttccccaacccaaagacaacgaactcgctggccacaaatccatccaaccacaattaaccactgctaagctacggtcccccacttcacttgccggggacgaagttggtggcgtacgcccaggcgttgttgttgacggggtcggcgaggtggtcggcgaggttctcgagggggcccttgccggtgacgatggcctggacgaagaagccgaacatggagaacatggcgaggcggccgttcttgatctccttcaccttgagctccgcgaacgcctcggggtcatcggcgaggccgagcgggtcgaaggcgccgccggggtagagcgggtcga

SEQ ID NO: 401079 - DNA, 498 bp, Oryza sativa nipponbare
  unsure (1)..(498): unsure at all n locations
ttttcctctggattatggagttggaaccaaaaaacaagggccccgtacaggcantgacaattcacaaacaaggttttgcattccggccgggctgacccacacagaagcacaatttttatgtcaaacatatatggcctacaaaaaggtcaaaaccatcccataaaggccacgcagcgtgtgaaaatggaaattacaaccatcaatgtgctaatctctctccctccctcctaattccatctaatcgatcttcacattcgaatacaggagggtgtccctggtaagtggcatattcataagcaagcaaaccccaatgagagtagagacaagaagaatgatccctgtaatccatgccaaactctttctaacaagtatctcanaagaggctattgtagtgttagtttggcttgtctcttttagccatctcgaaatgtgcagtgaagatgctggacccactaaggatggtgaagcctcctttggggtattactaacccaacaatt

SEQ ID NO: 401080 - DNA, 472 bp, Oryza sativa nipponbare
tttttaataatgctggtgttatggcctgtaatactagctgcccccaaacacaaatctgtgatcgaagcacaagttcttgggagtacaacacggttaacaccacaagaaactccttgcagaacagtaaagatgcatgtgtcctatgtgaataaccaagtgtggcttctttatatgctggtggaatgcatacatctggctgtacgtgtagtcatgtagagcgcgcgttgctcagctgtcacttctgttgggcttgtctgacgccggatacaccgtgtcagctgatgggatccactcgtttgtagcaggatttcccttgcaggaggcatggcgctccgatgcatctgggtcatcagacagatgaaacgaggcgtccgccgagggcttgtccatcttgatgaaccctgttccagtcgtgtggtgctgcttgccgacgcagccgagatccttgtagtactccgtctccacgaactca

SEQ ID NO: 401081 - DNA, 442 bp, Oryza sativa nipponbare
  unsure (1)..(442): unsure at all n locations
tgagagaattcaatgttccaaagtgccggtctgaacatgaacatgctaaccatcntttgaactttccacccatccaacttgatagtacaacagagtcaacaaacaagaggggatgtactagactactagtaccataaattcgagcaggcatattgtcgttgaacaattctggtaggggaagatcgaccagggatgctcatttgcggattacaatctttaaatttgacaagcagatgctttaaatttgaaccggttagatatagcgtttcaggtactcatccatgcgggtgtactgaacctctgggtagagctgagttgcctcggcaccattgtcaccaatctcgaaatttgccaggcagccctcgtaaaagatgtggtaataatgtcctattcctacttgactagcaaaatccaaatctttcatagaagccaaaaattcatc

SEQ ID NO: 401082 - DNA, 458 bp, Oryza sativa nipponbare
  unsure (1)..(458): unsure at all n locations
tttaaatatatatagccngagctggcatagacttcattcacatatgcctcacccaacaacatatagtcntagcaaataccactcttacatcaagtcanagagagatcangtgaaacaaaaacaaaagcagagcacggccggtaaaatcaaaagacgatgaacaaactgggaacacacgaaacaaggtgggagacatcatctaatcagagatgaacaattaaacaaggctatatatgacgatgacggcttagttgccaccagactcctcgcagcccgggggcttgtaggcgatgaagctgatgagctgcacctgcctgacgttgtcgaagccgatgatacggacgaatgcatcagggtacgccttcttggcctcctcgagctccttgagcacctgggtggcgtcagtgcacccgaacatgggcagcttccacatggtccaatacctgccatcgtaatat

SEQ ID NO: 401083 - DNA, 409 bp, Oryza sativa nipponbare
  unsure (1)..(409): unsure at all n locations
ttttgggggaaacaacgtgaggtgttgataattatgtttcctgaagtaaggtatatccaacaaacacaaaatgctgggaagttattcaaacgatttccagcatctctataaaacattggtctcttacatttcgagtggttgaagaggtgcgagaaaggagtagaatatagcaagtttagaatggtacatgaagaagatgcaacaaaatgaaacttagcctcatacggccacagtgacagcttcatcaagtgcaatgactccaggaagttccttttcttccaacagctccaagctagcaccacctcccgttgaaatgtggctcataacatctgcaactcccaccttctcaacagcggcaacagaatcacctnctccaataatggttgtaacacccttgccgctaaggtct

SEQ ID NO: 401084 - DNA, 198 bp, Oryza sativa nipponbare
tcgacccacgcgtccgagaggaactgctactgatggcatgatcaaggagcttttcatttctttcaagaggactactggacataaacctcaaaggatcatatttgacagcgatggtgccatctatggtcatttttatcaagtgttggtgcatgaacttgatgccattagaaaggcttgagcattcctggaacctaacta

SEQ ID NO: 401085 - DNA, 318 bp, Oryza sativa nipponbare
cgtccgaagagttgcttgcttctgaggttctcagatgacactttcactacaagttttatcaccaccattggcattgatttcaaggttcggacagttgagcttgatggaaagcgtgtaaaattgcagatttgggatactgctggtcaagaacgtttccggacaattacaactgcctactatagaggtgctatgggcattctgcttgtttatgatgttacagacgagtcatccttcaacagtatccatcatacttgggcataccatttggtgacagagtgcaaatatatatatttttttcttaactgatgtgtagacatt

SEQ ID NO: 401086 - DNA, 98 bp, Oryza sativa nipponbare
ccacgcgtccggtccactctcacaccaaaaccagtaaaaaaatatcgtcaccttcgccggcgagatggcccaccgccgcatcatcctcctcctcgccg

SEQ ID NO: 401087 - DNA, 262 bp, Oryza sativa nipponbare
  unsure (1)..(262): unsure at all n locations
cgaatccctgtcgaccacgcgtccgctgctntgttacacatatatcatatgccagtcaactacagcctccgcagcatgatcacccacctcatgtatcatgacacgcgtcctgaacagagcgagagcgtcatcgacaccttccccaagaccacccttgccaccatcatcgacaagtacgtcagcagctgattgcatcatcatcgtcgtcttcttcctattcttcttcagctgcatcaatcaaatcagacttgatcgatcttag

SEQ ID NO: 401088 - DNA, 421 bp, Oryza sativa nipponbare
cggtcgacccacgcgtccgcacgtattacgtgcgaaaaaaaaaatcatcagcacaagatcgaggaggctttatctgaacaagggagatggcggactacgtgtatgggccggggcggaaccacctgttcgtgcctgggccggtgaacatcccggaccaggtgatccgcgccatgagccgtcagaacgaggactaccgctcgccggcggtgcccgccctcaccaagaccctgctcgaggacgtgaagcagatcttcaagaccaccaccggcacccccttcctcttacccaccaccgggacgggggcgtgggagagcgcgcttactaacacgctgtcgccgtgggacaagatcgtgtcgttcctgatcgggcagttcagcctgctgtggatcgaccagcagcaacgccttaactttaacgtgga

SEQ ID NO: 401089 - DNA, 420 bp, Oryza sativa nipponbare
tcgacccacgcgtccgcactcctctcctcctcgtctaccttacctagcagcagcagctagctagcttaattagctatagcagccatggcggcgacggcactgagcagccaggtccggttgccgatgtccctgcgggtggcgacggcgccggcgccggcgcgcgtgtcggtgctgccggcgagcaacaagctgggagacaggctgcggatgcaggcgacgtacaacgtgaagctgatcacaccggacggcgaggtggagctgcaggtgccggacgacgtgtacattctggaccaggcggaggaggaagggatcgacctgtcttacttctgtccggcgggcttctgcttcttctgcgccgggaaagaggtcttctgcgagatcgaccagtcccaccagagctttctcgacgacgaccaggtt

SEQ ID NO: 401090 - DNA, 303 bp, Oryza sativa nipponbare
  unsure (1)..(303): unsure at all n locations
acgcgtccgcggacgcgtggngcttatactaaggggcagcaactcgatgctgtgaactttgcatatgaggctggtcttcaggaaaaattccccccagcccctcttttaaaagcctaccttgaagattcaaagaagataccctcaaattcagataacctgagtactagcactggccaatctgggagcaatgccaataagaaggagcagtctgcactgcgggctgttataaagtgtgttgaggaccacaaactcgaagctgagtttccattggaggatctgcgtgagcggctgggagaactggag

SEQ ID NO: 401091 - DNA, 285 bp, Oryza sativa nipponbare
cggtcgacccacgcgtccgctcaagaagtactcgagcaaagaaggagagagctcggtgagctgcagagatggccccctccgtgatggcgtcgtcggacaccaccgtcgctccctttcaggggctcaagtccacctgcggcatgcccgtcgcccgccgctccggcaactccagcttctgcaacgtcagcaatggcggcaggatcaggtgcatgcaggtgtggccgatagagggcatcaagaagttcgagaccctctcctacctgccaccgctcaccgtggaggacc

SEQ ID NO: 401092 - DNA, 412 bp, Oryza sativa nipponbare
ggcgtcgcggcaccaccgtcgctcccttccaggggctcaagtccaccgtcggcatgcccgtcgcccgccgctccggcaactccagcttcggcaacgtcagcaatggcggcaggatcaggtgcatgcaggtgtggccgactgagggcatcaagaaagttcgagaccctctcctacctgccaccgctcaccgtggaggaccttctgaagcagatcgagtacctgctccgttccaagtgggtgccctgcctcgagttcagcaaggttcgattcgtctaccgggagaaccacagatcctccggatactacgatggcaggtactggaccatgtggaagctgccatgttctggtgcactgacgccacccaagtgcctaagggggtcgaggaggccaataaggcgtaccctgttgcatt

SEQ ID NO: 401093 - DNA, 424 bp, Oryza sativa nipponbare
tcgaattccggtcgaccacgcgtccgacacactgtcaccacaacagccaccaactcctctcaacttcttgatccggcggcggcggcaagatgttcggcggcggcggcggcggcgggaggaagccgctggactacgaggagctgaacgagaacgtgaagaaggtgcagtacgcggtgcggggggagctgtacctgcgcgccttcgagctccagaaggagggcaagaagatcatcttcaccaacgttggcaacccacacgcgctcggtcagaagccgttcacctttccccgccaggttgtggcgctgtgccaggccctctttctgctcgatgatcccaacgttgggcttatctctcccgcgacgccattgtgcgggccaagcactatcttgtcatggcaccacggtggactaggtgcttacagtga

SEQ ID NO: 401094 - DNA, 464 bp, Oryza sativa nipponbare
  unsure (1)..(464): unsure at all n locations
cgcgtccgcggacgcgtgggcggacgcgtgggcggacgcgtgggtagctggcaaattaaaattggaattagctcaattcgcggagttacaagcctttgcacaattcgcctctgctctcgataaaacaagtcagaatcaattggcaaggggccgacgattacgagaattgcttaaacaatcccaagcaaatcctcttccagtggaagagcagatagctactatttatatcggaacaagaggatatcttgattccttagaaattggacaggtaaagaaatttctggatgagttacgtaaacacctaaaagatactaaacctcaattccaagaaattatatcttctagcaagacattcaccgaggaagcggaaatccttttgaaggaagctattcaggaacanctcgaacggttttcccttcaggaacaaacgaaatatctaatccaaatgctgatcttgtttctga

SEQ ID NO: 401095 - DNA, 500 bp, Oryza sativa nipponbare
cgcgtccggcgcggtccaggtggtgctcatgggattcgtcgagggctaccgcgtcggcagcggaccgctcggcgagggcctctacaaggtgtacccaggctgcgccttcgacccgctcggcctcgccgacgaccctgacaccttcgccgagctcaaggtgaaggagctcaagaacggccgcctcgccatgttctccatgttcggcttcttcgtccaggccatcgtcaccggcaagggccccatcgagaacctcttcgaccacgtcgccgaccccgtcgccaacaacgcctgggcatacgccaccaacttcgtccccggcaagtgagcacaacgacacgatcgagatggtgccaaccaacgtaccatgtgtacacttgtagtagccacgcaccgaccctgcagttgcagttgcagcagtgcatgtatgtatgtaccttaattgtgtgtgtgtgtgtgacgatcgaggagatttctaagctaataaattctgctgtcataaa

SEQ ID NO: 401096 - DNA, 261 bp, Oryza sativa nipponbare
tccggattcccggtcgacccacgcgtccgaaccaggagatccagacggaggacatcgacctccccctcacccgcatccgccccgtcaagaaggtcgccctcgtcgtcctcaccggcgagcgcggcctctgcggcagcttcaacatcaacgtcctcaagaaggccgagacccgcatcgagggctcaagagctcggctcggtacccgtcgcagcgttgctgagggctctctcttatcgcgccttatccacggcgcctgagtgc

SEQ ID NO: 401097 - DNA, 327 bp, Oryza sativa nipponbare
gtcgaccacgcgtccgcctacacggagtctgacgcctactaagccgctatcgtcacatatagcctggattaatagttcatctctgattcgatgatacctgccaccttgcttcgtgtgtccccagtgtgttcatcgcctgtggattctaccggccgtgctctgctttagtttatgtttcacctgatctctctctgacttgatgtaagagtggtatctgctacgactatatgttgttgcgtgcggcatatgtcaatgatatatatggaagctccggctatatatatttatacacagggtacgagacgtgtgtgaaaaaaaaaaacacca

SEQ ID NO: 401098 - DNA, 450 bp, Oryza sativa nipponbare
gattccggtcgaccacgcgtccgcccacgcgtccgcccacgcgttcgcccacgcgttcgtccacgcgtccgcagaacctagactcatcagagatttcactaacagatgtgagccactactttgactcagacccgacaaagctggtgcaaggactgcgcaaggatgggcgggcaccttcctcatacatagcagatacaaccacagcaaatgcacaggtgaggacattgtcagagacagtgcgccttgatgcaaggacaaagctactgaaccctaagtggtacgaggggatgatgaaaagtggctacgagggagttagagagattgagaagcggctgacaaatactgttggatggagtgcaacattctggacaggttgacaactgggtttatgaggaggcaaatgccacattttattgagattaagttattgagaagaggcttaaggacacc

SEQ ID NO: 401099 - DNA, 111 bp, Oryza sativa nipponbare
ccacgcgtccggccggctggagcgggcggcggctgagcgacgaggaggtcggctggagcgggtgacggcgtggcagcactgtggggcgctgggcgacaacctcggccatgg

SEQ ID NO: 401100 - DNA, 458 bp, Oryza sativa nipponbare
  unsure (1)..(458): unsure at all n locations
tcgcacgcgtacgggcctaaggtgctgctcttgaggctgactggaatgctaagttcgccgagtatgagaagaagtacccagaagatgcagcgaccttgaagagcattgtctcaggggagttgcctgctggctgggctgacgctcttcctaaatacactccagagagccctgcagatgccaccaggaatctgtcacagcagtgcttaaacgcacttgctaaagttgttcctggtcttcttggaggaagtgctgatcttgcatcctccaacatgacattgcttaagatgttcggtgacttccagaaggatacgcctgaggagcgcaatgtccgatttggagtcagggagcatggaatgggcgccatttgcaacggcattgctctgcacagcccaggactcaattcatactgngctactttctttggtttcactgattacatgagagctgccatgaggatc

SEQ ID NO: 401101 - DNA, 454 bp, Oryza sativa nipponbare
tggcggcggcggcgttgctgatgacgacagacccagaacaagcatcgaccgtgcagagcagtagctgaagggagttgcctgctggctgggctgacgctcttcctaaatacactccagagagccctgcagatgccaccaggaatctgtcacagcagtgcttaaacgcacttgctaaagttgttcctggtcttcttggaggaagtgctgatcttgcatccttcaacatgacattgcttatgatgttcggtgacttccaaatggatactcctgaggagcgcaatgtccgatttggagtcagggagcatggaatgggcgccatttgcaacggcattgctttgcacaaggccagactcattccatactgggctactatctttgttttcactgatttcatgagtagctgcttgaggatctcaatcttgtgtgatgccggagttttttattgtttgaccca

SEQ ID NO: 401102 - DNA, 360 bp, Oryza sativa nipponbare
ccacgcgtccgcccacgcgttcgcctcttcgatctcatcttcgcttgcagccagccactgcaaccctaaccctgcgcaaagccctaccccccttccgccaccatgggcaaggccgacgccgacgccgagttcaaggccgccggcaagcgcaagaaggccggaggcgccggcaagcccaagcgcggcctcaccccgttcttcgccttcctggctgagttcaggccgcagtacatggagaagcacccaaacaccaagggcgtcgcagcggtgaccaaggctgccggggagaagtggcgcgctatgtcggacgaggagaaagcgcaatatgggggcaagaagccagatggcgagagcaagccc

SEQ ID NO: 401103 - DNA, 480 bp, Oryza sativa nipponbare
ccacgcgtccgcccacgcgtccgcccacgcgttcggcctgactacgcaacctgtgtgaagatctccactgatgcatccatcaaggagatgattcccccaggtgctcttgtcatgctcagccctctcattgttgggatcttctttggtgtcgagaccctctcaggactacttgctggtgctctcgtttctggtgttcagattgccatctgtgcatcaaacactggtggtgcctgggacaacgcaaagaagtacattgaggctggtgcatctgagcatgcaaggaccctgggcccgaaaggctcagactgccacaaggctgctgtgatcggcgacaccattggggatcctatgaaggacacctcacgcccctcggtcaacatcctcattaagctgatggctgtcgagtcgctcgtgtttgccccggtcttcgacacccatggaggcattctcttctagtggtttagatggtgccataggttt

SEQ ID NO: 401104 - DNA, 369 bp, Oryza sativa nipponbare
cgcgtccgacacgcgtccgctatgatgtttccatagatatgaaaagaaatgttgtatttttcaaagaccgatgttaattcatcgcacagcttacctatatctgtgccaaatttcagcatagactaaaccattgtttgcatacggcgttgcactccagtcgtgctacggcctatttgtcaatggatatttttaaacaagtttgtattgtacaaaacagtggcgaataaaaaacacttttcctatttgttatcggttaccgtcggatgacttgggtgggcggtttagaggcttcaagcttatctacgcgggcctgctgacgtcatatactttttttttgggccacctaaatctaattaactggccgttctt

SEQ ID NO: 401105 - DNA, 477 bp, Oryza sativa nipponbare
cagctcagccgccgccgatggcgtccacgatcatggccccaacctcccgcgtcctcgccgccaagacccccttcctcggccatccccgcccctccaatgcccccgtccgcgacatcgccgtcgccgccaccggccgcatcaccatgagcaaggagctgtggtacgggccggatagggtgaagtacctggggccattctcggcgcagacgccgtcgtacctgaggggcgagttcccgggcgactacgggtgggacacggcggggctctccgcggacccggaggcgttcgcgaggaacagggcgctggaggtgatccacggccggtgggcgatgctcggcgcgctgggctgcatcacgctcgaggtgctcgagaagtgggtgcgcgtcgacttcaaggagctccggtggttcaaggccggcgcccagatcttcttcgacggcggcctgactaacctggaaccccacctgggcacgccca

SEQ ID NO: 401106 - DNA, 403 bp, Oryza sativa nipponbare
ccggtcgaccacgcgtccgccagacacctgttatggatctatcacatatgctatcaccgcggcgatggcgtccacgatcatggccccaacctcccgcgtcctcgccgccaagacccccttcctcggccatccccgcccctccaatgcccccgtccgcgacatcgccgacgccgccaccgtccgcatcaccatgagcaaggagctgtggtacgggccggatagggtgaagtacctggggccattctcggcgcagacgccgtcgtacctgaggggcgagttcccgggcgactacgggcgggacacggcggggctctccgcggacctcgaggcgttcgcgaggaacagggcgctggaggtgatccacggtcggtgggcgatgctctgcctgctggctgtatactcc

SEQ ID NO: 401107 - DNA, 282 bp, Oryza sativa nipponbare
tccgaattcccggtcgacccacgcgtccgcccacgcgtccggctactggacatactctactactactagccagtaagctagctaactaactacgtggctatggcccccaccgtgatggcctcctcggccacctccgtggctccattccaagggctcaagtccaccgccgggctccccgtcagccgccgctccaccaactcgggcttcggcaacgtcagcaatggcggaggatcaagtgcatgcagtgggcatgagcatagaagtggctatgccgcacatacg

SEQ ID NO: 401108 - DNA, 431 bp, Oryza sativa nipponbare
ccacgcgtccgctcgagcaaagaaggagagagcttggtgagctgcagagatggccccctccgtgatggcgtcgtcggccaccaccgtcgctcccttccaggggctcaagtccaccgccggcatgcccgtcgcccgccgctccggcaactccagcttcggcaacgtcagcaatggcggcaggatcaggtgcatgcaggtgtggccgattgagggcatcaagaagttcgagaccctctcctacctgccaccgctcaccgtggaggacctcctgaagcagatcgagtacctgctccgttccaagtgggtgccctgcctcgagttcagcaaggtcggattcgtctaccgtgagaaccacagatcctccggatactacgatggcaggtactggaccatgtggaagctgcccatgttcgggtgcactgcgccaccca

SEQ ID NO: 401109 - DNA, 278 bp, Oryza sativa nipponbare
ccacgcgtccgccagactcctttcactttgccgaggactgggtcaggaccgctttccacgccaagaagaaggttcagaccgagcacgcatgggtggctttggatgaccaatgcgccatctcgcataatgcggccgcgaaccaatccatgcagaccctaaagacctacccgttcgaacggaggggttcgtacggaccctaggtagtgcggcactactattaaattgcacttgctataaggcttaatcgacgctggcggagtggtcggactctcgctttg

SEQ ID NO: 401110 - DNA, 336 bp, Oryza sativa nipponbare
cacgcgtccgcacccaccagcagcagcagcagtagctgagcttgagcagcagagcgaggtagacatggccgccgccaccatggccctctcgtccccggcgctggccggcaaggccgccgcgaaggtgttcggcgaggggcgcatcaccatgcgcaagtcggcggcgaagcccaagcccggcgcgtcggggagcccgtggtacggcgccgaccgcgtgctctacctcggcccggtctccggcgagccgacgagctacctgaccggcgagtttcccggcgactacgggtggaacaccgcggggctcttctgcgtcccggagacgttctgcaagaaccg

SEQ ID NO: 401111 - DNA, 415 bp, Oryza sativa nipponbare
cgcgtccggacgaggacgatcctgtgcttcttccactgttctggtggctgactttgatggtcaagtacttcatgcatgtaatataggtgattctggattcttggtgataagaaacggagaaatatatcaaaaatcaaagccaatgacttacggcttgaattttcccttgcaaattgagaagggggatgatcctttcaaacttgtacagaaatacacaattgatctacaagaaggagatgccattgtgacagcaacagatggcctttttgacaatgtctatgaggaagaaatagcagctgtcatctccaaatcattggaagccggcctcaagccttcggagattgcggagttcctggttgctagggcgaatgaagtgggcagatcggcaacctgtagaagccccttctctgacgcg

SEQ ID NO: 401112 - DNA, 536 bp, Oryza sativa nipponbare
cgcgtccggacgaagacgatcctagtgcttcttccactgttatgagcgctcactgtgatggtccaggacttgatgcatgtaatataggtgattcagaattcttggtgataagaaacagagaaatatatcaacaatcaaagccaatgacttacggcttgaattttcccttgcaaattgagaagggggatgatcctttcaaacttgtacagaaatacacaattgatctacaagaaggagatgccattgtgacagcaacagatggcctttttgacaatgtctatgaggaagaaatagcagctgtcatctccaaatcattggaagccggcctcaagccttcggagatggcggagttcctggttgctagggcgaaagaagtgcgcagatcggcaacctgtataagccccttctctgacgcgggtcttgcaggtgggtatctgggttactctgggggcacgctggatgatgtaacagttgttgtatccgctgttcggaaatctgaagttaaactataagcctctttttggctaagtgaatgc

SEQ ID NO: 401113 - DNA, 477 bp, Oryza sativa nipponbare
  unsure (1)..(477): unsure at all n locations
cggctcgaatcacagcacacccaagagagagtagtggtagttccagagcggtctgcttgcgaagttgcgatgcctgccatggccaagcccgcctcccgcgctgccaagcccgcgtcggcgccgaagaagcagaaggcaaagccctccgccgccgccggtggctcctcccacccgccttatttcgagatgatcaaggaggcgatcacggtgcttaaggagaggaccggctcgagcgcgcacgccatcgccaagtacatggaggagaagcacggtgcgtcgctgccggccaactacaagaagatgctctccatccagctgcgcgggttcgcttccaagggcaagctcgtcaaggttaaggcctnctacaagctctccgacgccgccaaggactcgcccaaggccaagcctgccgcccccgccctcaaggcagcagcgccgaagccagcgaaggacgccgncaaacccaagaaggacgcc

SEQ ID NO: 401114 - DNA, 446 bp, Oryza sativa nipponbare
cgcgtccgacaccgagtgtgttcgatcaccagtacgtgacgttcaagcacatgcaggcgcggcgccatgaacgcgctcatcatggccctctggaagggtgacatggccacctacgtcgtcggcaaggttgtcgaccagtacagcatcaacgtgcgcatgatgagcaacaactcctggaccaccaactgcctgagccccttcgagaagatcctcgaccagaagttcgtcatcatcaatgtgacgatgaccaccagctacttgtacaccggcgaccagaggctgctcgacgcgagccaccgtgacctccggcgcgcgcgtgcggcggcgctgaacatcgtgccgactgtcaccgtcgcggccaaggccgtggcgctggtgctccctaacctcaaggtgaagctcaacggtgatcgcgcttcgggtgccgactccgaacgtgttcgtgg

SEQ ID NO: 401115 - DNA, 316 bp, Oryza sativa nipponbare
  unsure (1)..(316): unsure at all n locations
cgaccacgcgtccgaccacgcgttcgtacacgcgttcgaggtgtggccgattgagggcattaagaagttcgagactctgtcgtacttgccgccattgacagtggaggaccttttgaagcagatcgagtacctgctccgatctaagtgggtgccttgcttggagttcagcaaggtcggattcgtctaccgtgagaatcacagatcacccggttactatgacggtaggtactggaccatgtggaaactgcccatgtntggatgcaccgatgccacccaagtgctcaaggagctcgaggaggcaaagaacgcataccct

SEQ ID NO: 401116 - DNA, 257 bp, Oryza sativa nipponbare
  unsure (1)..(257): unsure at all n locations
cgcgttcgggacgcgtgggctaggcagtaagctagctaactaactacgtggctatggcccccaccgtgatggcctnctcgagcagctgcgcggctgcattacaagggctcaagtccaccgccgagctccccgtcaggcgtcgattcaccaactggggcttcggcaacgtcagaaatggccgaaggatcaagtgcatgcaggtgtggccaatggagggcatcaagaagttcgagaccctatagtacctgacaccactc

SEQ ID NO: 401117 - DNA, 454 bp, Oryza sativa nipponbare
gatgaatggacgaggtcaccatggcgctctgctctgcggcgatggcccgcgctcagccgttgacctgctctgcgctctcaggagaggcgcggatcagcatgctcaagacgctgatggactcagagcaatcctgcggaacacaagcgtcggtgaacaattcattgcgaatgcgataactctgccgggtcatggggagatcatggatatgatgccagttgcagatcctgatgcagttcatgctgtacgcacctttattaataaggagcttgccctctaactcaaagatgaccttgtttcacagtgacacataacagaagttctgaagcttatacatttaaccatgatagcatggcccgtcgtgcattgaaaaacacatgccttgcttatctcgcatctctgaatgaaccggacaccactgaacttgcacttgtgaatacaagtctgctactaacat

SEQ ID NO: 401118 - DNA, 413 bp, Oryza sativa nipponbare
ccacgcgtccgctactactagccagtaagctagctaactaactacgtggctatggcccccaccgtgatggcctactcggccacctccgaggctccattgcaagggctcaagtccaccgccgggctccccgtcaggcgtcgttccaccaactcgggcttcggcagcgtcagcaatggcggaaggatcaagtgcgtgcacgcgtggccgattgagggcatcaaggagttcgagaccctatcgtacctggcaccactcacccgtggggatctttctgagcatagtcgagacctgcttccatccaaagtggtgcctagtctcgcgttcagctaggttggattcgtctaccgtgagaaccacaggtctctcgtgtactacgatggcaggtattgtaccatgtggaagctgccatgttc

SEQ ID NO: 401119 - DNA, 384 bp, Oryza sativa nipponbare
attcccggtcgaccacgcgtccgctcctgagcaagctcaggaagttcatgctgctgttcgtgattggttgaaaaccaacgtgtcacctgaggttgcttccggcattcgaattatatatggaggttctgtaaatgcagccaattgtgccgagctagcaaagaaagaagatattgacggcttccttgttggtggtgcctctttgaagggtccggattttgccactattatcaactcggtgacttacaagaaagttgcagcctgatgtaacccttctgtagaaataaatgacccagaggcagctagacggctaccacaccatattgcttgatagagatacttcgggttcaatcaccgtgcttgtttaggcacacgagggaataatgc

SEQ ID NO: 401120 - DNA, 488 bp, Oryza sativa nipponbare
tacgtccgattcccgtgtcgacccacgcgtccgcccacgcgtccgcccacgcgtccgcgccgtgaagggcctcgccggcagctccatctccggcaggaagctcgccgtcaggccgtcgccccgggcgctctgccgcaccacccgcaggccgcgcgccgccgtggtggccaagtacggcgagaagagcgtctacttcgacctcgaggacatcggcaacaccaccgggcagtgggacctgtacggctccgacgcgccgtcgccgtacaaccctctccagagcaagttcttcgagacgttcgcggtgcccttcaccaagagggggctcctgctcaagttcctgctgctcggcggcggatcgctggtggcctacgtcagcgcgtcggcgtcgccagacctgctttcgatcaagaagggcccgcagctgtcgtcgacgcccggtccacgcggcaagatctaaattaaattcctcgtctctgccttaccttctt

SEQ ID NO: 401121 - DNA, 277 bp, Oryza sativa nipponbare
gtccgccacgcgtccggcggagaggaagaagaagaagaagagaggatgggcttcgagaagacgatcctgaaagccggcaccggtcccaagcccgtcaagggccagaaggtcaccgtccactgcaccggcttcgggaaagataatgatctcgctaagaagttttggagcacaaaggacgcaggccaggagccattcagtttcaatataggccagggttcggtgatcaaaggatgggacgagggtgttatgaccatgcaagtgggtgaagttgctcgta

SEQ ID NO: 401122 - DNA, 270 bp, Oryza sativa nipponbare
cccactactacaccggagaccagaggctgctcagacacgagccaccgcgacctccggcgcgcgcgtgcggcggcgctgaacatcgtgccgacgtccaccggcgcggccaaggccgtggcgctggtgctcccgaacctcaaggggaagctcaacgggatcgcgctccgggtgccgacgccgaacgtgtccgtggtcgacctcgtggtgcaggtgttcaagaagaccctcttcgaggaggtgaaccaggcgttccgggacagcgtctccaac

SEQ ID NO: 401123 - DNA, 478 bp, Oryza sativa nipponbare
ggtcgacccacgcgtccgcccacgcgtccgatgaagcagacgagatttacaaaatctgtagcattcttggtactccgaatcagcgtacctgggctgaaggactgcagcttgcggcatctattcgttttcagtttccccagtctggaagcatacatctttcggaagtggttccctcagcaagtgaagatgcgatcagccttatttcgtggctctgctcatgggacccacaaagaaggccacagcggtggggttttgcagcatcccttctttagcatgctttacatccccttacttgattcagacaacaacggattcacacaccaccatagtgggctaagggctgggatcaaaatgctgagaattcggggccctattaaggagacagcgtatactatactggcctacacccgcaagacagtgtgtgaaaggagctgagttgatcacagggaatataattttgcaggctcaagggtaccat

SEQ ID NO: 401124 - DNA, 367 bp, Oryza sativa nipponbare
  unsure (1)..(367): unsure at all n locations
ccacgcgtccgcccaattttagccctagaacacgcacatcccggaatcggagcaagaggcctgccttgccggcggaggagaggaattgatcgcgagaagcacggtgaagtcgagcatggcgagcgcggatctgctgcggagggaggaggagttctacgcctccttgttcgactccgccaaaggtggagatgccgtcaagtcgcgtgggcagatgattgagaggaagattgaagttcttgaggacatggccgccaaggttagtaatcggagatctcgtaggtggttgaatgaccggttgctcatngaacttgtcccccgtcttcatgtggaagaaatcaaaggcctttttgctcctccaccatggggt

SEQ ID NO: 401125 - DNA, 138 bp, Oryza sativa nipponbare
tcgacccacgcgtccgcccacgcgtacgaccacgcgttcgcccacgcgttcgtgaacaccgccgaggacgagatcgtccgcctcacccgcgaggtcgtccccggcatgatcgtcaccggcatggaggtcgttcggatc

SEQ ID NO: 401126 - DNA, 523 bp, Oryza sativa nipponbare
ccacgcgtccggttcttgctccttcctcccagtgtctctcaagagcggtgcagggttcacaaggcaggagaaaatgggggagatcaccaatgtcatggagtaccaggccatcgcgaagcagaagcttccgaagatgatctacgactactacgcctctggagctgaggatgagtggactctcaaggagaacagggaggcattctccaggatcttgtttcgtccccgcatcctgatcgatgtctcaaagatcgacatgtccgcaactgttcttgggttcatgatatcaatgcccataatgattgctcccagtgccatgcagaagatggctcaccctgacggagagtatgctacagccaggtgcagctttagtagcaggaactataatgacactgtcattttgggctactataagtggttgaggaggtcgttctaactggaccaggtattcgtgtacttcagctatacgtgttcatggacaggtatgtggttgagcagttttcatgatgagctgagtgagcatggt

SEQ ID NO: 401127 - DNA, 479 bp, Oryza sativa nipponbare
tcccggtcgaccacgcgtccgagaagttctactgtgctcccacccgcgacgaccgtgtcggcgtctgcaagggtatcttccgcaccgacaacgtccccgacgaggacatcgtcaagatcgtcgacagcttcccaggccaatccatcgatttcttcggcgctcttcgtgcccgtgtttacgacgacgaggtgcgcaagtgggtgtcggacacgggtgtggagaacattggcaagaggctggtgaactcgagggagggcccaccggagttcgagcagcccaagatgacgatcgaaaagctcatggagtacggatacatgcttgtgaaggagcaggagaacgtcaagcgtgtgcagctggctgagcagtactagagcgaggctgctcttggtgacgctaacttcgacgccatgaagactggttccttctacgggtctgcgccattcagctgaataaaagatctttagctattctgattccat

SEQ ID NO: 401128 - DNA, 320 bp, Oryza sativa nipponbare
  unsure (1)..(320): unsure at all n locations
ccacgcgtccggaaaggtaccagctatggcgtcgtcatagttgaagccgagaagagccacttcgaggaggtcgacggccaccaggagaaccgcggatgtaagtgcgataccagctggttctgcaccgactgcaagtgcggcaagtgaagctacgaagcaaccgaacactcaccgccggcgagtcacctaccttaattagtccacaataaaaaccacccatatgagtgtggnttgtgtgtgtgctgattattgctgaattaaacccgtgtgttatcgctttattaaacagcatggcgcttcggccactattcgtgtatcaa

SEQ ID NO: 401129 - DNA, 253 bp, Oryza sativa nipponbare
tctctcgagccatactacttagaagaagaggctaactgcggacttgacttcgtcaatctccgacagactgtggcgtcagcgcggtcaaagggaatcactgctcgagcaatggtgattatcaacccaggaaaccctactggccaatgccttagtgaaggaaacataaaggaacttctcaaattctgcttccatgagaacttagttctgcttgctaatgaagtctatcaacagaacatttattaagatgagcgcc

SEQ ID NO: 401130 - DNA, 286 bp, Oryza sativa nipponbare
atggcgttggagacgtgcttcagagcctgggcgactctgcacgccccacagccaccgtcctccggcggcagtagggacagactcctcctctccggcgccggcagcagccagtccaagccaaggttgtccgtcgcctcgccgtcaccgctccgacctgcctcccgcttcgcctgccagtgcagcaacgtcgtcgacgaagtggtggtggcggacgagaagaactgggacagcatggtgctggggagcgaggcgccggtgctgtgtggagttctgggcaccgttgtgc

SEQ ID NO: 401131 - DNA, 460 bp, Oryza sativa nipponbare
  unsure (1)..(460): unsure at all n locations
attcccggtcgaccacgcgtccgcggacgcgtgggggggacgctcctgaaggcagcgaattcatacatgctgccgctttggtaagccaaccagcactttactccaaggatatcattgaacagcgtatgtccggtccagccatgattcatccatcagaggcagctgccaaaggttcaagctggaaagatttgtttgaacctggagtgaggcgtgcgttgttagtcggtgttggaattcaaatccttcaacagtttgctggaataaatggggttctctattacactccacaaatacttgagcaagcggnggtggcagttcttctttccaatcttggcctcagttcagcatcagcttccatcttgatcagttctctgaccaccctactgatgcttcctagcattggtttagccatgagacttatggacatctctggaagaagggttctgcttctgggcacaat

SEQ ID NO: 401132 - DNA, 396 bp, Oryza sativa nipponbare
cgcgtccgcggacgcgtgaggtggacgctcctgaaggcagcgaattcatacatgcttgccgcttggtaagccaaccagcactttacgcgaaggatatcattgaacagcgtatgtccggtccagccatgattcatccatcagaggcagctgccaaaggttcaagctggaaagattttgttgaacctggagtgaggcgtgcgttgttagtcggtgttggaattcaaatccttcaacagtttgctggaataaatggggttctttattacactccacaaatacttgtgcaagcgggggtggcagttctactttccaatcttggccttatatcagcatcagctttcattctgatcaagtctttgaccaccctactgatgcttcctagctattggtttagcc

SEQ ID NO: 401133 - DNA, 199 bp, Oryza sativa nipponbare
  unsure (1)..(199): unsure at all n locations
tcgacccacgcgtncgcccactcctccgcccacgcgttcggatagcataagcaacacaagggattaactcatcactcacttagctaattaaatcgtcgaccatgtgggacaagtgcgtcatctgtgactgttcttacatgagccagtgcttgaagataggtaccagctatggcgacgtcttacgttgaagcccataagt

SEQ ID NO: 401134 - DNA, 425 bp, Oryza sativa nipponbare
acggatgtaagtgcggcaccagctgctcctgcaccgactgcaagtgccgtccagggaagtcacgaagcaaccgaacactgttcgccggcgagtcacttaccttaattagcccacaataaaaaccacccatatgagtgtggtttgtgtgtgtgctgattattgctgaattaaacccgtgtgttatcgattaattagcagtggtgcttggtgactatctgatcaacgtatgatttggtttgttacttctatctagtaatacttcgttttttgggtgtatttatttttatattggtgcgtttaattttttctttttttaattgtttattttcttttttttcatttttttatatttttacttttattttctttatttttttttgtgtttttttttttttttttttttttttttttcttttttttattta

SEQ ID NO: 401135 - DNA, 185 bp, Oryza sativa nipponbare
tcgacccacgcgtccggcaagctgcacagagctagcgttagcttggttagttgttcttagcattctagctagctcaatggcgaaagacattgaggcgtcggcgccggagggcggcgagttctcggcgaaggactacaccgacccgccgccggcgccgttgatcgacgtggaggagctgaccagtg

SEQ ID NO: 401136 - DNA, 414 bp, Oryza sativa nipponbare
tccagaacccagaatttgttcgccagttgacatctcctgaaactttgcagcaattaatctcattccagcagtccttgatgtcacaacttggtcaacaacaagctggcccagagcgaacccaatcaggtgctggtgcaggcaatactaacctcaacaatctgatgagcatgttcagtgggctcggtgctggtggtggcctaggtgttcctagtgcacccaatgttccaccagaagagctatatgcaacacaactagctcatttccaagaaatgtgtttttttgacacacaggagaacattcgagctttgattgctacatgcggtaattgtcatgctgcggtggagcgacttcttgggaaattggctgatagactggtgtgatcgagatgttctcgacttgttatctgtagtttat

SEQ ID NO: 401137 - DNA, 323 bp, Oryza sativa nipponbare
ggggttcaagctgctgatcccgtccaagtggaaccccagcaaggagcgcgagttccccggacaggtcctccgctacgaggacaacttcgacgccaacagcaacgtctccgtcataatcaaccccaccaccaagaagaccatcaccgagttcggctcccccgaggagttcctcgcccaggtcgacttcttgcttggcaagcaggcctactccggcaagacagattccgagggtgggtttgagtcggacgcggtggcgacggcgaacatactggagagctcggcgccggtggtgggagggtagcagtactacagcgtaacggtgc

SEQ ID NO: 401138 - DNA, 426 bp, Oryza sativa nipponbare
attcccggtcgacccacgcgtccgctactactactagccagtaagctagctaactaactacgtggctatggcccccaccgtgatggcctgctcggccacctccgtggctccattccaagggctcaagtccaccgccgggctccccgtcagccgccgctccaccaactcgggcttcggcaacgtcagcaatggcggaaggatcaagtgcatgcaggtgtggccaattgagggcatcaagaagttcgagaccctatcgtacctgccaccactcaccgtggaggatcttttgaagcagatcgagtacctgcttcgatccaagtgggtgccttgcctcgagttcagcaaggttggattcgtttaccgtgagaaccacaggtcttccgggtactacgatggcaggtattggaccatgtggaagctgtccat

SEQ ID NO: 401139 - DNA, 411 bp, Oryza sativa nipponbare
ccacgcgtccgcccacgcgtccgcccacgcgtccggaaagcataagcaacacaagggattaactcatcactcacttagctaattaaatcttcgaccatgtcggacaagtgcggcaactgcgactgtgctgacaagagccagtgcgtgaagaaaggtaccagctatggcgtcgtcatagttgaagccgagaagagccacttcgaggaggtcgccgccggcgaggagaacggcggctgcaagtgcggcaccagctgcttctgcaccgactgcaagtgcggcaagtgaagtcacgaagcaaccgaacactcgccgccggcgagtcacctaccttaattagtccacaataaaaaccacccatatgagtgtggtttgtgtgtgtgctgattatagctgaattaaacccgtgtggta

SEQ ID NO: 401140 - DNA, 384 bp, Oryza sativa nipponbare
gttgaagttcgattgagtgtgatagacctttttactaggcaaaccacacgaatacacgattgattaatttcactgagaatagcacgggtacatcacatcacacaaattcatacgttgatacacgcatagtcgccgaagcgaccagctgcttaattaatcgataacacacgggtttaattcagcaataatcagcacacacacaaaccacactcatatgggtggtttttattgtggactaattaaggtaggtgactcgccggcggcgagtgttcggttgctttgtgacttcacttgccgcacttgcagtcggtgcaggagcagctggtgccgtacttgcagccgtcgttttccttgtcggcggcgacctactagaagtgggttttt

SEQ ID NO: 401141 - DNA, 394 bp, Oryza sativa nipponbare
ttagggaatgatgaggaagggaactgttcactggtgtatacatcgaggttcaagattaattaagtaaaagctgcagtaccttcacaaaattatactccttactccttagcatagagctgatcgatggagcgtataaaaatttaactttacatacagagaccaaattatatgcaataggattaatttgccgctgttccgttctgccaaactgcaggcagaaccatcgctgctgagaattgctttccttccttcggtcggtgtgcttcaaatcctggacgggatgagcggcgtcgaattctacaggtacgccgccggcgtcgtcacgcctgagccgagcttcaccgggtagccgatgtccttgagcaccatctccactccactcagggcacccatc

SEQ ID NO: 401142 - DNA, 499 bp, Oryza sativa nipponbare
aaaatcaaaagacgatgaagaaagtgggaacacacgaaacaaggtgggagacatcatcgaatcagagatgaacaattaaacaaggctatatatgacgatgacggcttagttgccaccagactcctcgcagcccgggggcttgtaggcgatgaagctgatgagctgcacctgcctgacgttgtcgaagccgatgatacggacgaatgcatcagggtacgccttcttggcctcctcgagctccttgagcacctgggtggcgtcagtgcacccgaacatgggcagcttccacatggtccagtacctgccatcgtagtatccgggggatctgtggttctcacggtagacgaatccgaccttgctgaactcgaggcagggcacccacttggaacggagcaggtactcgatctgtttcaggaggtcctccacggtgagcggtggcaggtaggagagggtctcgaacttcttgatgccctcaatcggccacacctgcatgcacctg

SEQ ID NO: 401143 - DNA, 479 bp, Oryza sativa nipponbare
  unsure (1)..(479): unsure at all n locations
gacaccaaaatgtgatatggatatgattaagcaggtgcagcaaaacgtacattaattaaacaacaacaattaaccctcgggcacgcctgtgttttgttatctcgctcaacatatacgtacgtaatactttgcttgcatagcatagggacgacgacattatattcttaattgataaactcaagaacgcatggagatggatcgagagatttataaatatggagcttgcttgattgattagatgaggtcgtcctccttgtgggtctcgatgacgacgtcggacttggggtaggcgtggcaggtgaggacccagccggcggcaacctggtcgtcgtcgaggaagctctggtcggactggtcgatctcgccggagaccaccttgccggcgcaagaggagcaggagcccgcgcggcaggagtaaggcaggtcgatcccttcctcctncgcctggtccaggatgtacacgtngtccggcacctgca

SEQ ID NO: 401144 - DNA, 351 bp, Oryza sativa nipponbare
acggaggggcttgctgatacaatatcaacatggagggtacattgccggttccatatgaacaaacataaaaacaccgaaaccccatatggccattatgccgatcctagcctagcttggcgaggacatcgccaagagcagatttggtcaacgtgtagtacttctccgcctcttcggggctcttgatcttggctgcatggtcaagcccgtcaatggtggcgaagagcttgccggtgaggtccttgaggcccttcttctcgtccttgggcttggagttgatgaccgttttgaggtcgtagcgcaagtaggaggccctgaggcggaggtcgtccctgacgaacggccactgctttt

SEQ ID NO: 401145 - DNA, 382 bp, Oryza sativa nipponbare
gatgacagacagaagttgggtaagctagaaatctcctcgatcgatcacacacacacacacaattaaggtacatacatacatgcactgctgcaactgcaactgcagggtcggtgcgtggctactacaagtgtacacatggtacgttggttggcaccatctcgatcgtgtcgttgtgctcacttgccggggacgaagttggtggcgtatgcccaggcgttgttggcgacggggtcggcgacctggtccaagaggttctcgatggggcccttgccggtgacgatggcctggacgaagaagccgaacatggagaacatggcgaggcggccgttcttgagctccttcaccttgagctcggcgaaggtgtcaaggtcgttcgcgaggc

SEQ ID NO: 401146 - DNA, 395 bp, Oryza sativa nipponbare
gggcttgctctcgccatctggcttcttgcccgcatggtgcgctttctcctcgtccgacatagcgcgccacttctccccggcagccttggtcaccgctgcgacgcccttggtgtttgggtgcttctccatgtactgcggcctgaactcagccaggaaggcgaagaacggggtgaggccgcgcttgggcttgccggcgcctccggccttcttgcgcttgccggcggccttgaactcggcgtcggcgtcggccttgcccatggtggcggaaggggggtagggctttgcggagggttagggttgcagtggctggcttggaagcggatatgagagctaataggctgactcctgggcggtcgtataggttttacccctgtgaatttcggtgccggttacct

SEQ ID NO: 401147 - DNA, 494 bp, Oryza sativa nipponbare
gagacaggtgcatggcgtgcgcgtacaataatcatcaccatcatcgtatcatccaacctacaggaaaacgcaaattcaaggtactcttgtccaaacctgtaggtggccagtgatttgctcccatcggctacaactaccagactcaaaaaaactagacacaggtatgatgctaataagcttagcatgatcgactgatggacagacagtaataacaaataggaaacggagggaactatatgtgtcaactcgatgaactctataatatatggatgatttccagcgccctcctggcaaaaataacgtcctcgtaaatctatcgtcaccatctaaaaccacttgaagaggatgcctccatgggtggcgaagaacggggcaaacacgagcgactcgacagccatcaacttgatgaggatgttgagcgaggggcctgaggtgtccttgagaggatccccaatggtgtcgccgatcacagcagccttgtggcagtctgagcc

SEQ ID NO: 401148 - DNA, 314 bp, Oryza sativa nipponbare
ttttgtagaggtaagcagggttggtgtgcttgaataagttcacattaggtcactctattggtcacccagtctaattttcatcctcagtccagaaaaccggatacaatacatccctcaactttacaaaaccgtgcagacgagatccctcggcagtattatatctggttttggatgacgtggcgcctacgtggctggtttgactagatcctcgtcccacgtggtattgacgtggcgcttccgtggcaattggatccctgaaaaataataaaaaaaacatgggacccatatgtcagctaaaaaaattaaaatgtggg

SEQ ID NO: 401149 - DNA, 375 bp, Oryza sativa nipponbare
ggacgcgtgggtttttgtttggttttttttccccaattgaatcaggctcaacttgatgaatcatctaaggagtgatccaacaaaacaaacgtaaatggaaaagcagtgcttattacaggcctaaaataccactcacgctccaatgcaggcatgcctcttccttcattattccaagctttgggcacaagaccttcatggcttcatgtatactgctccttggcatcaacgatgacaaaaactcaaaacgcgcggtttgaatcttacaggctctttgctgttgcgatgacgttctccgcggtgatgccatactcctggtagatctttccagcaggagcacttgcaccgaatttgtcgatgccaatagccttgcctttg

SEQ ID NO: 401150 - DNA, 307 bp, Oryza sativa nipponbare
gaccatccatctcctacgcgttggtgacatatatatagccggaccttccatatatctcatccacatatgcctgacccaacaacatatagtcgtagcaactcccactcttacatcaaggcacagagagatcaggtgaaacatatacaaatgccgagcacgggcggcaaaatcaaatgacgatgaacaaactgttaacacaccaaacatggtgggagacatcatcgcatcagagatgaacaattaaacaaggctatatatcacgatgacggcttatttgccaccagactcctacaagccggacgcgtgg

SEQ ID NO: 401151 - DNA, 451 bp, Oryza sativa nipponbare
tttttgcaaacccgaactgttttcagtttctgaattctggatggatcatatcagattcatcacagcatcgtacaatctgtgcaagcattggtacatcgagcgatggagagagagagtagtctacaatggcggctgggccattcacgagcccggcgtgaacttggtggcgtagacccaggcgttgttggcgacggggtcggcgaggtggtcgagcaggttctccaaggggcccttgccggtgacgatggcctggacgaagaagccgaacatggagaacatggcgaggcggccattcttgatctccttgaccttgagctcggcgaaggtgacggggtcgtcggcgaggccgagcgggtcgaagtactggccgccggggtagaggtcgttgccttcccccacccccggggagggccctttattccggtaccccttcgcacgaggcccatgagga

SEQ ID NO: 401152 - DNA, 478 bp, Oryza sativa nipponbare
tagtaaaaaggtaggactggtcataataatattattaagacattatagctgatgtcttttgatcacactgcgatcaaattatgcatcataggcagtacaactccgcgtcaggaaaaagtagaggagatatatttcttgttattacttaatacagcattcacatatatcgaaccatccggtacgtacgtagtagtactccacgcgttcacatcgatgatcggggacgatatcctcaggtagtacttatgcaaaagcgttggcgtaaactgacgaactgaacggacggacggtcggatttagggctcccataagtccaagttgccggagacgaagtcgtagtggccgccgacgagcttgagggtgccgttggcgatcccctccttgacgaacgggtaggtcttgaggttcttcagggattggttaacggcctccttctccaagatggcgcattggtcatcgaaaggcagcgaggcgtgct

SEQ ID NO: 401153 - DNA, 475 bp, Oryza sativa nipponbare
gaaacaaaaacaaaagcagggcacggccggtaaaatcaaaagacgatgaacaaactgggaacacacgaaacaaggtgggagacatcatcgaatcagagatgaacaattaaacaaggctatatatgacgatgacggcttagttgccaccagactcctcgcagcccgggggcttgtaggcgatgaagctgatgagctgcacctgcctgacgttgtcgaagccgatgatacggacgaatgcatcagggtacgccttcttggcctcctcgagctccttgagcacctgggtggcgtcagtgcacccgaacatgggcagcttccacatggtccagtacctgccatcgtagtatccgggggatctgtggttctcacggtagacgaatccgaccttgctgaacttgaggcagggcacccacttggaacggagcaggtactcgatctgcttcaggaggtcctccacggtgagcggtggcaggta

SEQ ID NO: 401154 - DNA, 502 bp, Oryza sativa nipponbare
tcagtgatgaagagaactggagtgctaaaagagtatcaacttgttttttacatcggttacatcatagtacaggtacacaatcaacaaggcatgcagtgctccatccacaattacatcccaatacaccaccaccattcacagcctactccgatcccaaaaaagagaggtaagtcgcgtcgacgaacagtcttttcatcttcctccattggcagccattgctaacactccaacacctgaagaactcctcatttgggggtgaaggcctggaagatggtggcgtggccggggtcggcgagatgggcgaagaggttgtcgatggggccggtgccggtgtactctgcctggaaccaagctcccatgacggcgagcatggcgagccgcccgttcttgatctccttggtgcgcaacttccttgatcttctccggcaagccggtgccccagccgagcgggtcaaaccacagaatatttcgaggtcccaatatacccaatgccagatagctg

SEQ ID NO: 401155 - DNA, 482 bp, Oryza sativa nipponbare
ttgagggaagagattattgcatattttttaagagcagaggccattgaaatggtacataaccaaactgtaaaataaaaatatatagcatattatatattgatatatcatcaacatagcccaaaacaaagctgcatactattattataggcagcaatccaccagcgcgatgcttgatcttagcttagttgccaccagactcctcgcaacctgggggcttgtaggcgatgaagctaatcaactgcacctgcctgacgttgtcgaagccgatgatacggacaaaggcatcggggtaggccttcttggcctcctcgagctccttgagcacctgggtggcatcggtgcagccgaacatgggcagcttccacatggtccaatacctgccatcgtagtacccgggagacctgtggttctcacggtagacgaatccaaccttgctgaactcgaggcaaggcacccacttggatcgaagcaggtactcgatc

SEQ ID NO: 401156 - DNA, 494 bp, Oryza sativa nipponbare
tacataaccaaactgtagagtagagatatatagcatattatatattgatatatcatcaacatagcccaaaacaaagctgcatactattattataggcagcaatccaccagcgcgatgcttgatcttagcttagttgccaccagactcctcgcaacctgggggcttgtaggcgatgaagctaatcaactgcacctgcctgacgttgtcgaagccgatgatacggacaaaggcatcggggtaggccttcttggcctcctcgagctccttgagcacctgggtggcatcggtgcagccgaacatgggcagcttccacatggtccaatacctgccatcgtagtacccgggagacctgtggttctcacggtagacgaatccaaccttgctgaactcgaggcaaggcacccaacttgaatcgaagcaggtactcgatctgcttcaaaagatcctccacggtgagtggtggcaggtacgatagggtctcgaacttcttgatg

SEQ ID NO: 401157 - DNA, 322 bp, Oryza sativa nipponbare
ttataattaattcacaacaccagggtggattgatcaggtggagaacctgcacagaaatacacactaccggtacagatctcaccctctctccaatactcgtacattcatccacgcggtccacacgaatacgtacatctatacggtacacgtacgtacatctactggaccgcgtacacacacgcacactctcctgcagagacgcgcattgtcgttaacctagctagcttagctgaaggcgatgcgtcgccatggcagcacggcggtgggggcgctcacttgccggggacgaagttgttggtgtaagcccaggcgtttctagttt

SEQ ID NO: 401158 - DNA, 370 bp, Oryza sativa nipponbare
ggctgaaattctgtgccagaacctggcaaccggtgtccggtagtatatacggtattacacatgaacattacacagcattgcgatttccaattgccggaagtcgataataatccgtgccggacagtgaaaagtcagatgaggtggggaagaaaagcaaagaaagaaacaagaaactgtgttgggcgctcgaaacttcgaaattttcattacaaaggatcgagaggaagaaggaagaagtctggggaaaatttttggagcgaggtggagttacaaaggcagcagcagcagcagcttttacgttctcacttccactggttggcgacgatgtcggcgaggtcgacaaccctttgcgagtatccccactcgttgt

SEQ ID NO: 401159 - DNA, 492 bp, Oryza sativa nipponbare
tttttgatatggctatatgtgctggtaatttctggcatttgggccgtatcagtttgttgacgcgcacatttcgtaaaagtgatttagatgctctaggcaaatatcacgtgccaggatgataaacaaataccagcattttgcaaaaccaaaatttcattgtcgacggattcagatatgctctaggcatcatattacatgagtacgtgtgtatagccggagatcttgcattcacgtgccctgtctcaccgtcaccgaacgatagaccgatagttgtagtagtactcttgcaacaacggcaggtcggagcgcgagagaacaattacgtgcagcttaacacggacacacaaaaaaaaaaaagaaaaagaaagaacatgcacgaaggaacgaaagcgcttaatttgccgctgacttcttgcaacccggtggcttatacgcgatgaagctgattaactgcacctgcctaacgttgtcaaagccaatgatgcgaacgaa

SEQ ID NO: 401160 - DNA, 486 bp, Oryza sativa nipponbare
  unsure (1)..(486): unsure at all n locations
agcagcaattggtcacgtgttattggtcactcactcactaacaaataataggctctcgtaacgccagccaggtctatgagaaaaaacaacacagtggcatcttgcattattccctcgtgtgccaaaacaagcacggtgattgaacacgaagtatctctatcaagcaatatggtgtggtagccgtctcgctgcctctgggtcatttatttctacagaagggttacatcaggctgcaactttcttggaagtcaccgagttgataatagtggcaaaatccggacccttcaaagaggcaccaccaacaaggaagccgncaatatcttctttctttgctagctcggcacaattggctgcatttacagaacctccatatataattcgaatgccggaagcaccctcaggtgacacgttggttttcaaccaatcacgaacagcagcatgaacttcctgagcttgctcaggagcggacgcgtgggtcgacccggg

SEQ ID NO: 401161 - DNA, 365 bp, Oryza sativa nipponbare
tgaattggatcctggacagcttatatagccataggaatagtacaattatatcaacatcataaacagggggaattaatccatggcgatccggccatgggggactagcagtacagtacagaggatttgcatggatggatcggatcaagaagaaggtgaggcagagacgaggaatttaatttagatcttgccgcgtgggccgggcgtcggcggcagctgcgggcccttcttgatcggaagcaggtctggcgacgccgacgcgctgacgtaggccaccagcgatccgccgccgagcagcaggaacttgagcaggagccccctcttggtgaagggccccgcgaacgtctcgaagaacttgctctggagag

SEQ ID NO: 401162 - DNA, 322 bp, Oryza sativa nipponbare
tttttaaaggtagtaaagagggggactcttcataataatattattaaaacattatacctgatgtcttttgatcacactgcgatcaaattatgcatcataggcagtacaactccccgtcaggaaaaagtagaggagatatatttcttgttattacttaatacagcattcacatatatcgaaccatcctgtacgtacgtagtagtactccacgcgttcacatcgatgatcggggacgatatccttatgtagtacttatgcaaaagcgttggcgtaaactgacgaactgaactgacggacggtcggatttatggctcccataaat

SEQ ID NO: 401163 - DNA, 480 bp, Oryza sativa nipponbare
aagcccatatcggtagggtatattattattaacaaaaacttgtcatgcccagctatggcttgggcgcgatctgatacacagaacaaagagaaaacataaaaaggagaaataattaatagcaagcgtcaagccggcctgcttaaaaggtgtaaaggcagctgccgtcgtcgctcctcgccgttgggtcgaagttcttggcaacagggtcggtgcaaccttccggcacaggcaggttacctgcttgctgtgctccttgccctcctcctcctatgcaggccgcctacgatgcatcgatgggatgcgaatagctagagatcttttattcagctggatggcgcagaaccgtagaaggaaccagtcttcatggcgtcggagttagcgtcaccaaaagccagcctgctcaagtactgctcagccagttgcacacgcttgacgttctcctgctcctttacaagcatgtatccggactccatgagcttt

SEQ ID NO: 401164 - DNA, 357 bp, Oryza sativa nipponbare
gttcaaatgaaaggggcaagcaataaaatgtccaacctgctacatggctacttctcagggccgacgagggtgagaagcgtgttcatgtagtaccccgacgtgtcgccgcggacgtcggcggtgaccgtggtgttgtacctgaccttgtactcctccttcaccttctacatgtacacctgcgcccgcgacacgatccctctcgtcagcatctcctcgtcggtgccaagccctagaatcgatgtccggatcaccttagcgaaatgcttcttcggcgaggtgaggcaccagagcgcggccttgagcaccgccgcgagctggtcgccgaggcggccgtctaggaccttgtcaatgcccttg

SEQ ID NO: 401165 - DNA, 379 bp, Oryza sativa nipponbare
taaacagatgtggccatcgtatgggtatatgtagcacagtttgattcctctttgctagtcaaaagatggtatcatcaatcaataatagttacagtattgattccatggagtagtaggattacaacaattaaggacgatgaagagaaaggggtggctggcgatacacatagagaggcaaagcagggggtagcttagttacaacttacaaacgaagctctgatcgatcaagtctgatttgattgatgcagctgaagaagaagaggaagaagacgacgatgatgatgcaatcagctgctgacgtacttgtcgatgatggtggcgagggtggtcttggggacggcgccgatgacgctctccttcttctcgccgttcttgaaca

SEQ ID NO: 401166 - DNA, 475 bp, Oryza sativa nipponbare
gacacagaaaatttacttggttatgaaccccaacatagtagctcaaaatcagattagcaagcttatttttgaacatccctagcagcaactactgatgaataacaacattacctaacacagtactaaataaacaagaagtggacatgaataacatgaaaatttcctactttacagctgccctgtgccagtaatgaactcttttcccttgcataaggagcatgaatagcaatcctcttctctcatttacaactcaaaaagctcctccagcctcatggtgtgatcttgcagattccaatttacagtgttatataaagattgaaagcagagttgctgaagaattaggcctttgtagcctgcatttgctttgcaccaacagcgaagaactcggtgatgacttcgagcggcatgcccttcgtctcggggaccttgaggaagacgaacacgaaggcaatcgagcaaacaactgcgtatatac

SEQ ID NO: 401167 - DNA, 401 bp, Oryza sativa nipponbare
actaggcaaaccacacgaatacgggattgattaatttcactgagaatagcacgggtacatcacatcacacaaattcatacgttgatacacgcatagtcgccgaagcgaccagctgcttaattaatcgataacacacgggtttaattcagcaataatcagcacacacacaaaccacactcatatgggtggtttttattgtggactaattaaggtaggtgactcgccggcggcgagtgttcggttgcttcgtgacttcacttgccgcacttgcagtcggtgcaggagcagctggtgccgcacttgcagccgccgttctcctcgccggcggcgacctcctcgaagtggctcttctcggcttcaactatgacgacgccatagctggtacctttccggacgcgtgg

SEQ ID NO: 401168 - DNA, 469 bp, Oryza sativa nipponbare
tacagaaaatcaatccttgcatgcgggggaaatcgatggatcgacctctctccttaacttgttcttaattctcatgtacaatcaaagaaacacacacgcacacacacatgcgtgcactgcatctctctgagcaacgaactcgattgatttgattttgattcgctagggattaaagagaagctgagatagagatttcgacgatcatgcgacgctgaaggagctggctgcgctctcgacgaacttcctggcgcccttgaaccacctcttgtcgccggcctgcgccttgcagatgtacagcttgccgtcgttgacggtggccgtgatcagctggtgcttgccgccctcgtcgccgtccgccgtcctcgtcagcaccgttacgctgtagtactggtttcctcccaccaccggcgccgagctttccaggatgttcgcccgcgccaccgggtccgactcaaacccaccctcggaa

SEQ ID NO: 401169 - DNA, 493 bp, Oryza sativa nipponbare
  unsure (1)..(493): unsure at all n locations
tttaatagtaactatgatggtcaaattcacaaattctccatatgaatattacatacatgcagaatgtgaaggaaaattaaccaaacttggaagcaccagcgggaagcaacatatggcggacatagttcaaaggaatggagaccatatgcatggatacatagtacataatagtgcagtagaatctatccacgaggcgaaatgcaggatgcgaaggctgaattcgttgatctagtgctggacagaggcggccatcttgtacgcgtatctacacttnagagccacctcgcgcgcgccgccgncgncgatctcaggcgttgctccggtaggacccgagcttggcggcgctggccctcagcacgtactggtggtaggcggcggcgatggccgcgcccatcagggggccccacccagaagatccattggtcatcccaagccttgtccttgttggagataaccgcggttcccaagctcctcgccgggttaatgccggtgc

SEQ ID NO: 401170 - DNA, 365 bp, Oryza sativa nipponbare
aattaagctagaaatctgggggggggttcatacacacacacacaattaaggtacatacatacatgcactgctgcaactgcaactgcagggtcggtgcgtggctactacaagtgtacacatggtacgttggttggcaccatctcgatcgtgtcgttgtgctcacttgccagggacgaagttggtggcgtatgcccaggccttgttggcgacggggtcggcgacgtggtcgaagaggttctcgatggggcccttgccggtgacgatggcctggacgaagaagccgaacatggagaacatggctaggcggccgttcttgagctccttcaccttgagctccgcgaaggtgtcagggtcttctgcgaggc

SEQ ID NO: 401171 - DNA, 457 bp, Oryza sativa nipponbare
aaaatatggatagccggagcttccatatatttcattcacatatgcctcacccaacaacatatagtcgtagcagataccactcttacatcaagtcagagagagatcaggtgaaacaaaaacaaaagcagagcacggccggtaaaatcaaaagacgatgaacaaactgggaacacacgaaacaaggtgggagacatcatcgaatcagagatgaacaattaaacaaggctatatatgacgatgacggcttagttgccaccagactcctcgcagcccgggggcttgtaggcgatgaagctgatgagctgcacctgcctgacgttgtcgaagccgatgatacggacgaatgcatcagggtacgccttcttggccttctcgagctccttgagcacctgggtggcgtcagtgcacccgaacatgggcagcttccacatggtccagtacctgccatcgtagtatc

SEQ ID NO: 401172 - DNA, 488 bp, Oryza sativa nipponbare
tacacaaataattaggtcagatcctatattcacaatacattcggttaaacatagaaacaaacattgcaaacaaatacttaaaaacaaacataattacgtgataccatccattttttttattgtcgacgaatttatcagatatgctctagatacatatcttgtgtgtatatagccggagctttgttttcacatatcctcacccaacgataattgtagtactcttacaataaaaccggccggagagggagggaagagattattacatatgtgttaagagcagaggccattgagatggtacataaccaaactgtaaaataaaaatatatagcatattatatattgatatatcatcaacatagcccaaaacaaagctgcatactattattataggcagcaatccaccagcgcgaagcttgatcttagcttagttgccaccagaactcttgcaacctgggggcttgtaggcgatgaagctaatcaactgcacc

SEQ ID NO: 401173 - DNA, 428 bp, Oryza sativa nipponbare
gacagacagaaattaagtaaggtagaaatctcctcgatcgatcacacacacacacacaattaaggtacatacatacatgcactgctgcaactgcaactgcagggtcggtgcgtggctactacaagtgtacacatggtacgttggttggcaccatctcgatcgtgtcgttgtgctcacttgccggggacgaagttggtggcgtatgcccaggcgttgttggcgacggggtcggcgaccgtggtcgaagaggttctcgatggggcccttgccggtgacgatggcctggacgaagaacccgacatggagacatgggaggcggcgtcttgactcttcacttgactggcaaggtcaggcgcgcaggcgacggtcagccgctggcactgcaggctgcagggcgcgcaccgagctacatcatacacactgacgca

SEQ ID NO: 401174 - DNA, 446 bp, Oryza sativa nipponbare
gggaaacgaataaaatcattggtgcaggaacatcatcttcttcttcatcttcttagtgtacacaacaccaactcgatcatcatctcgtcgcactaaacccatcttccccaacccaaagacaacgaactcgctggccacaaatccatccaaccacaattaaccactgctaagctacggtcccccacttcacttgccggggacgaagttggtggcgtacgcccaggcgttgttgttgacggggtcggcgaggtggtcggcgaggttctcgagggggcccttgccggtgacgatggcctggacgaagaagccgaacatggagaacatggcgaggcggccgttcttgatctccttcaccttgagctccgcgaacgcctcggggtcatcggcgaggccgagcgggtcgaaggcgccgccggggtagagcgggtcgacgacctcgccgagcg

SEQ ID NO: 401175 - DNA, 444 bp, Oryza sativa nipponbare
  unsure (1)..(444): unsure at all n locations
cttcgtccttttttttggattaattactaggaattacttgagcacagcggatcacaaaaaatcaatccttggatgcaggggggaaatcgatgggatcgnacctgttctcttaacttgttcttaattctcatgtacaatcaaagaaacacacacgcacacacacatgcgtgcactgcatctctctgagcaacgaactcgattgatttgattttgattcgctagggattaaagagaagctgagatagagatttcgacgatcatgcgacgctgaaggagctggctgcgctctcgacgaacttcctggcgcccttgaaccacctcttgtcgccggcctgcgccttgcagatgtacagcttgccgtcgttgacggtggccgtgatcagctggtgcttgccgccctcgtcgccgtccgccgtcctcgtcagcaccgttacgctgtagtac

SEQ ID NO: 401176 - DNA, 507 bp, Oryza sativa nipponbare
gcccgcatttgcgtaggattgataacatatctctgcatcttgtatattgttcctagcaatcggcagagcaagcctcaaacaacaccatcacaatcatattcagacagttcgggttttactgtatgactacatgatcaacacgaatcgtcgtaggtaataatcgaaagatgctaagttctacatgtgtaacacttcctctcgaatcgattccgaatcaaaatcaatcaggtggccttcctctgcttgagctcctccctgttctccctgagaatggcctccattttcttgtccacattcttgctgaaacctgggtatggctcatagccaaactgcttgttgagtatctgcaacaagatgaggaatggctccatcaagaacacctcagggagatcacccacagccggccctctcttctcgaagaggccatggccgaagaactgccaggtccagcaaaagagctgggtggcgagcgcggccttccaggcgagcgcgaacccgaggcgcgcg

SEQ ID NO: 401177 - DNA, 516 bp, Oryza sativa nipponbare
  unsure (1)..(516): unsure at all n locations
tatgacgtcgcagtgggtaagctgggatcttgtatactgtccgccctttttttttttttttttttttttttttttttttttgggtgtttggattaggaacaggattaattaaggcataagtacaccacattccacgttactaccacttcacttcacttcaccacccttaaaacacaccacgtacacacattttcggatgcaatctttaagctcaagcttttagtttgaccgcatgcggtttagctggttcaacgcccgttgcaggatgttgtaaagaacccaggcgatcgccggcgccaccacgaacagcttcagcaggccgcggttgttgccgcccttcgccgccgccgccttcgccgccagccttgccaccttctgcgccgacgacgccttgggcgggaacgcgagcccggaacccgccgccgngcccaggccgagcccggcgacgagcacctgcttcgaccgcatgcggttcatctggttcagcgccggctggaggatgttgtatagcaccca

SEQ ID NO: 401178 - DNA, 453 bp, Oryza sativa nipponbare
ttttcccaagcaacatgcgtgagattctataccagaacctggcaaccggtgtccggtagtatatacggtattacacatgaacattacacagcattgcgatttccaattgccggaagtcgataataatccgtgccggacagtgaaaagtcagatgaggtggggaagaaaagcaaagaaagaaacaagaaactgtgttgggcgctcgaaacttcgaaattctcattacaaaggatcgagaggaagaaggaagaagtctggggaaaatttttggagcgaggtggagttacaaaggcagcagcagcagcagcttctacgttctcacttccactggttggcgacgatgtcggcgaggtcgacgaccctctgcgagtatccccactcgttgtcgtaccaggcgatgaccttcaccatgtcgtcgcccatgaccatgctgagcgacgcgtcgatggtgca

SEQ ID NO: 401179 - DNA, 341 bp, Oryza sativa nipponbare
attatgttaaccacagggatacgcgattgattaatttcactgttaatttttctggtacataacatgacacaaatggtccggaaatacattcctaatctaaagagctaccacctgttcaacgaaaatttcctatgcccttaccgtgcttcagtttgggaatcccacccccttgaccaggtttgacccctgtaatttgacgggggatttaaaaagccacctacaaacgttttaccccaaataattccggataacgtttgtttcctttgttttaccggggttgttggcacaaagttacccaatgtttattcctaaaatcctcgcctggggttacctcctaaaaa

SEQ ID NO: 401180 - DNA, 420 bp, Oryza sativa nipponbare
tttttactaggcaaaccacacggatacgcgattgattaatttcactgagaatagcacgggtacatcacatcacacaaattcatacgttgatacacgcatagtcgccgaagcgaccagctgcttaattaatcgataacacacgggtttaattcagcaataatcagcacacacacaaaccacactcatatgggtggtttttattgtggactaattaaggtaggtgactcgccggcggcgagtgttcggttgcttcgtgacttcacttgccgcacttgcagtcggtgcaggagcagctggtgccgcacttgcagccgccgttctcctcgccggcggcgacctcctcgaagtggctcttctcggcttcaactatgacgacgccatagctggtacctttcttcacgcactggctcttgtcagcac

SEQ ID NO: 401181 - DNA, 438 bp, Oryza sativa nipponbare
aagcagtgggcatcatgacatggcattcagaggaaggctatcttagattacagatgaatatgcagacacccagcttggtgttacatacatagactggatttgggtgaaatttagccggcgagggcgctggtgttgtagacgaggagggcgccgccgccgaggagcccggcgagggtcacggcccagatcagaagcccggtggttccaccaacgtaggtgtcaccggtgggagaccattcctccggcgagtagattgggctgtagccgtcgacgtttgcgccgtacttgtcaacgaattggtacacacccttcccattgagaaatttaggagctggggacaagtcctgaccgtgctcttcctgccagatgcatcaatatcgactgacatgcccggacgcgtgggcggacgcgtgggcggacgcgtgggcggacgcgtgg

SEQ ID NO: 401182 - DNA, 417 bp, Oryza sativa nipponbare
  unsure (1)..(417): unsure at all n locations
ttgtgatttgcttttgattcacattttgatttctgacgaattcttttattttttgtgatgcaagtacaacaaaacccactctcacaccacaaagtcacaagagtccatgtaaaccgagagacccccttccaccgaccttacaaacttgcggtttatctaccgtgctagattcacctagcaggctagcccgatcagtactcgccctgttcctcgtcgtcgtcctcgacttcggcgccgacctcctcgtagtccttctccagcgcggcgaggtcctccctggcctcggagaactccccttcctccatcccttcgcccacgtaccagtgcacgaacgcgcgcttggcgtacatgaggtcgaactgcggtcgatccgcgagaacacctnncgcaccgccgtgttgttgctgatcatgcaca

SEQ ID NO: 401183 - DNA, 445 bp, Oryza sativa nipponbare
tttttccatagtaacaactgacaaggggaggttatttgcaacagaactacattcaactgatcacagccggcctggagttcattcctgcttgaacaacaaaggtacagagatcatactacacacccagaacactgaagcacttgccatgcaggcagtacttctcttttatgaaaagatgatacagatcagttgcaactatgttacaccaccaccatgtacaactaccggacaccgaaaaataatcctaatgcaaagctatgaggattgcaccggcgctctcaaccttgaaggttgcaccacagatctactcttcatttgcaggaacagcagtcaccttggtcttagggttctcatagcactttaagcctccaagagcattggaatagaagcaaccttgggggaaaagggcaagtgacttgccacatgatcctttaagcaggtcaat

SEQ ID NO: 401184 - DNA, 454 bp, Oryza sativa nipponbare
gccacagcagattagggataatcaaacactaggtctcgtatggatcattacaaagtacacaaatgtacaaattaaaacatcaaaagagttaactaagcttaaagcagcagctgacacataagttgcaaaccccaacttttttcagtttctgaattctggatggatcatatcagattcatcacagcatcgtacaatctgtgcaagcattggtacatcgagcgatggagagagagagtagtctacaatggcggctgggccattcacgagcccggcgtgaacttggtggcgtagacccaggcgttgttggcgacggggtcggcgaggtggtcgagcaggttctccaaggggcccttgccggtgacgatggcctggacgaagaagccgaacatggagaacatggcgaggcggccattcttgatctccttgaccttgagctcggcgaaggtgacggggt

SEQ ID NO: 401185 - DNA, 429 bp, Oryza sativa nipponbare
tatgtatgtaaatatggtatgagggtaaatcattttgaggagctagactaccgtgccttattaacaaggagatatgtaccattacatgatgattaacatataaatctgcagctacatggaattaaggtagcgcaccagaggaagaaggatgatagaagactccacttctccatggatgggaatgggatcaggtggccttgcagaactatccgcccagatcgtcgcacgcctcctcggggaacaccgtggtgggctcgtcgtaggataggcagtccctgtcgacttactccgccgccgcacgagaaacagcaacagcagccgacgatgagagcttggcctatgggtacatttgcacgttgcacgcactcgcgcccatgagggcgaacgccttcatcgcaaacaccgatatgttagagctgtaatccacct

SEQ ID NO: 401186 - DNA, 430 bp, Oryza sativa nipponbare
agcaaaaaatctaacagctttatttaggcagatccacctctctacatcatcatagtcatagtacaagaactcgacgaattcagaagaaacattggcagctacacctagagaaagaaaaatgaaaagaaaagaagatctaatatattacaagggatccttggatatatgctcatagcattgttacatcccgagcaccgagtcgcgacttgtggcgaaaacgggtgccatttccatgcttatgccattactgcttcgcctgagagtagatgaaagttccgagaatcgcaatggcggctccgagggcgttgatgggctggaccggcgtgtggaagatgatgatggaggcgacaatgacggagatccgcttcatggtgttgccgatgctgaatgtcagtggtgagatctcgtccaatgacatgtaggacacttg

SEQ ID NO: 401187 - DNA, 422 bp, Oryza sativa nipponbare
tttttatcattgttaaaactttgtcttgccattttaaattatctgcaaagtaagaaagtaacactcccaagttacaacagcacaccatccatatatccatgcaggcagcctgtttgtgcccttgtgcagatgcatttcatttatacaagtagaaggcactcaaatcagccaccacatgaacacacacatgttccatcatcgatcgatctacacatgcatcacccggtcatgcacttacaaacaaaagatctacttgaagaagtacgggaggtcgagcacgtagaggaggaagtaggcccagaggacgccggagatgccgccgaagaagaagccgccggtgaacttggcccagccgtcggcggtctgcagcttgtcggcctccttcttgcggccggtgagcgtcagcgtcggcgccgtggacg

SEQ ID NO: 401188 - DNA, 459 bp, Oryza sativa nipponbare
tttacaacagcacacggtccggatatccatgcaggcagcctgtttgtgcccttgtgcagatgcatttcatttatacaagtagaaggcactcaaatcagccaccacatgaacacacacatgttccatcatcgatcgatctacacatgcatcacccggtcatgcacttacaaacaaaagatctacttgaagaagtacgggaggtcgagcacgtagaggaggaagtaggcccagaggacgccggagatgccgccgaagaagaagccgccggtgaacttggcccagccgtcggcggtctgcagcttgtcggcctccttcttgcggccggtgagcgtcagcgtcggcgccgtggacggctcgccctcgccgaaggaggcgacgccgtacatggtgaggcagacgctgaggatggcgacaaggcctgcggcgccgagggcgccggcctggccgtgcaccggcgtg

SEQ ID NO: 401189 - DNA, 300 bp, Oryza sativa nipponbare
  unsure (1)..(300): unsure at all n locations
gggtgttcnatggagtaagtgtattatatgtatgtaaatattatattattgtaaatcattttgaggagctagactagcgtgccttattaacaaggagatatgtaccattacatgatgattaacatataaatctgtagctacatggaattaaggtagtggagcanaggaggaaggatgatagaagactccaattctccatggatgggaatgggatcaggtggccttgcagaactctccgcccagatcgtcgcacgccttctcggggaacaccgtggtgggctcgtcgtaggataggtagtc

SEQ ID NO: 401190 - DNA, 385 bp, Oryza sativa nipponbare
agcgataaggaaacactaggtcttgtatggatcattacaaagtacacaaatgtacaaattaaaacatcaaaagagttaactaagcttaaagcagcagctgacacataagttgcaaaccccaacttttttcagtttctgaattctggatggatcatatcagattcatcacagcatcgtacaatctgtgcaagcattggtacatcgagcgatggagagagagagtagtctacaatggcggctgggccattcacgagcccggcgtgaacttggtggcgtaaacccacgcgttgttggcgactgggtccgcgaggtggtcgagcaggttctccaaggggcccttgccggtgacgatggcctggacgaagaagccgaacatggagaacat

SEQ ID NO: 401191 - DNA, 491 bp, Oryza sativa nipponbare
tccacaacaaccgaagggcgggaataagactcaaagcatccaagtttttaaccgaatagaaataaacgagttttaaacgactaacatagtgcacattgcgagcagatattaacggtccatgcaacgagtgccatggccgtgggcaaaacttaacgaacgctaagatatctcaaatgcagccagcataaccaccacttcaacgatgctcatttcttcttggcggcagccttggtcaccttggcaccggttgggtccttcttctccacgttcttgatgacgccaacagccaccgtttgcctcatgtcacgcacggcaaaacgaccaagaggagggtactcagagaaggtctccacaaccatgggcttggtgggaatcatcttaaccataccagcatcaccgttcttgaggaacttgggctccttctccagctccttgccggatcgtctgtcgatcttggtcaccagctcagcaaacttgacggcaatgtgtga

SEQ ID NO: 401192 - DNA, 353 bp, Oryza sativa nipponbare
  unsure (1)..(353): unsure at all n locations
aaacatataaatattaacacccaaaaaaaacaaacccacaccatcttccaattaattacacttaacatacacactttttccaataatatcccacacaaaacacataaaactttttnatacaactaatatacttaatttacatnnatataacaaccaattaattcttggttggtgcacaaacaaaaacacttttgggatctaaattgataataaaaagcagcacttgttttgttgggcaaaaggttggcctcttatttgcacagttgcaggctttcttatatttagagccggatggcttgccatactgttatttatctgtcctgccatggtcatgaatgccttttccacatttg

SEQ ID NO: 401193 - DNA, 468 bp, Oryza sativa nipponbare
cactgaaacagggtagggcacggattgacatgcaaagattcctatagccaaaacttttccaaactactgctattattcaccgaaaccgactgctatgactgtcaccgaaaccgactgctttgacgatcggattcacatcccacagccaacaacaaatcaagtcaatagcaaacaacatgcaaccagtggcaatcatcaaatttgctggcaatcagaacagcgagatagcagaagtcgccggatttgcttagcagctccaaatcatcaaatttgctggcaatcagaacagcgagatagcaaaagtcgccggatttgcttagggggtgtttagatggggctaaaactttttagcccaagtcacatcagatgtttgaacgctaatttagagtattaaacatagactaataaaaaaactaatttcataaatgagagctaatccgcgagacgatttttttaagcctaattaat

SEQ ID NO: 401194 - DNA, 453 bp, Oryza sativa nipponbare
tgcttcgcccgaattccctttctccgcctccgcagctaaggtaaggtcgccgccaccgccatggggatggctccggtcgcgacctacccgtcctcctcctcctcctccaccctcgcgcggcctccgtgtgcggctgcggggagggcggcggcggcgggccgggcacgcgtcgcggcggccgggatgtcctcgagggcgtcctccttcgtcacgggaggggcgggggggctcgccgtggcggtggccgcgcggacgagggcggggtcgggggcggggtcgcgtgggggaggcgcgatggggtgcaagtgcctgttcgggctcggcgtcccggagctggtcgtcatcgcgggcgtcgccgcgctggtgttcggccccaagcagctgcccgagatcggccgcagcatcggcaagaccgtcaagagcttccagcaggcagccaaggagttcgaaacg

SEQ ID NO: 401195 - DNA, 308 bp, Oryza sativa nipponbare
ttttccagaatcacaagcatggatatatacgcaaaactttgcagtaaccaaatcgattcacaggccacacatacaggtagtatacagattcgtctacacacaaggttattgcagaggcaaaacacgaggtatgtatatcaaacgctctagaaaagattcatgtgatgaaatacatgatgaaccacgtatgttctcaaggtaaaattaattaatgcagtatagttttaactttgtccatcgatctcaacctgtaactgtgacgacacactggctacagtgccctcgcggacgcgtgggcggacgcgtgg

SEQ ID NO: 401196 - DNA, 496 bp, Oryza sativa nipponbare
ttagagtttaatttgagtacaagccacgacagaattaacaaattgagctaagcaacaccagctttattcaaggcacttatactgcttaccacctcctaacataggatggtgaggagtgctgctgataaacgctccacccggagtagatggacaccaagacgatcttatttgcgagctgtatagctttctggaacatatatctcccctccagcttcaccatgttgctccccactgattgttttccttgcagctgaaaactcagcactcatagcattcattccttgtatcaccgcttcctccactgtcccgtaaccatgttcatcagcatattttctaatatcctctgtgattttcatcgaacaaaactttgggccacacattgagcagaaatgtgccactttggcaccctccgatggtaatgtttcatcatggaaagacatagcggtcacaggatccagagatagagcaaattgatccaaccatctaaactcaaatc

SEQ ID NO: 401197 - DNA, 314 bp, Oryza sativa nipponbare
attcaaacgggttcgagcatctttataaaacattggtctcttacatttcgagtggttgaagaagtgcgagaaaggagtagaatatagcaagtttagaatggtacatgaagaagatgcaacaaaatgaaacttagcctcatacggccacagtgacagcttcatcaagtgcaatgactccaggaagttcctttccttccaacagctccaagctagcaccacctcccgttgaaatgtggctcataacatctgcaactcccacctttttaacagcggcaacagaatcaccttctccaataatggttgtaacacccttg

SEQ ID NO: 401198 - DNA, 319 bp, Oryza sativa nipponbare
  unsure (1)..(319): unsure at all n locations
nnnnnnnnnnnnnnnnnnnnnnnnnttggaagggggatgttcgtgaagataggcacatatatttattgtacaatgtccttttcggttgtcgaaattcaaattacattattgggggattttattattaatttacgagaaccgagggagaaacaaaagcttaaaatttaaaccatttacaggcccgttgaattttgatttatttattcaaaaattggaagctttctttccttttttcatttattgatatattaaaccgggcacgcacaaaacatttttttatttccttattgaggttggcgtaccaaaaccctttgatttt

SEQ ID NO: 401199 - DNA, 387 bp, Oryza sativa nipponbare
  unsure (1)..(387): unsure at all n locations
taaagtctatgcagtgtgcatgtgtgcagtcacagtcacactcacttagtcaaataccaagatcgatcgatcgatgtacaagtggatgcattaattcatcatcttgggtgttcttatattacaaatcaccaccatgcaagtcgccattaaccaccaacccagctttcctaatttaagtagtaatcaacaaaaggatgacctctcctctctccataccctcccagctcgctcgtcatcacaaaactaaacagcgcgcgcgaacgcacaccaacgcatcgatcccgtttgaattgcgcgcgaaagagcttaaattaagaggatgaggagaaggtgtcnaaaatggtggtgtggagcgggtcgctgaggtgggtggcccagttgttgagg

SEQ ID NO: 401200 - DNA, 465 bp, Oryza sativa nipponbare
tttaatctaacatacgcaaactgatattatcacaatgttagccgatgacaatggaaagagtaatctaggtacaagcggatcattgacggtggagacaagacattggctgcaccacaacacccaccagtggcgccaacaaggagcgctatccgttataggacgagagaaaaagtaaaacatcacgatgtgaagtgaaactgaataattctagtagacgatgatgatgatggataggctccttaggacgcccgccgcccttagcgtcttgctgctcccatcttgtccactggaaggctcactcgtcatcgtcttcatcctcttcgctgccctcgtcgtcatcctcatcattgacctcggacttggacttgtcagattcctcctcgtcgtcctcctcttcctccttggcgggtgccttcttggcagtgctctcgcccttgttgtaggcagcaatggccttgttgtact

SEQ ID NO: 401201 - DNA, 485 bp, Oryza sativa nipponbare
tttagtattagtgaagaactggtataacatatctctctcaaaagaaattattgtacttctattctactagcatgttggggagtagtgggcatacatgctccaatgagtataaatttggcagccatgttggagtacaaagtagaagacatgcatgaacacataaaccatgttcattacagttcaggagggtattgtgtgaagccataaaccatacgtacaactgaaagtattctatactgattatcatagacagattatctcacaatccatgcttaagaattacgtctgcagattccagtgatggactccctttgggctacaacggcaaatatccatcatgccttcactttgatagcgggagcacgagatggaagttgctgatagcaggaaatgagtgaggtgacgaatccaaatgcccctgttacccttggagtgatcttcttgggtgacagctgaagaagccctaccggcaccacaacatccat

SEQ ID NO: 401202 - DNA, 474 bp, Oryza sativa nipponbare
taaccaatcaagttcagaagggtctatttgcgatctcctgtttgtttgggatagttgagttttactgacgttcgagcctcacctctgacctctccaaacacagttcttcgatccccatacggccatacggtttgcctattcggtctagtcctgagttggatacagtccgtttatggtcatgccgccgtcgaccgagatcgtctggccggtgatgtaggaagcgccgggcatgcacaggaacgcgaccagcgatgacacctcttctggttctcccacgcgcttcagcgctgttcgacgcacgacgctgtcagcgaagtccttccttgccaattcatcttccacaagtgaagtcttcatgtaccatggtgcaacagaattggttcttatattgtctttcgcccactcacatgccaggttcttggccagctggttcatggcaccttttgtcatcgcatagacagagccagaacttac

SEQ ID NO: 401203 - DNA, 479 bp, Oryza sativa nipponbare
tgtttaaggttaagatcaccatcaacctgtgcaaaaacaactatgcataagcatctactacattcagcagcctgaaacataaagtccaaggcatacagactctggaagacactgaagtactatgccaaacggatcgtatttcaaaactcagctaacacctccactggtatcactaagacgaccacaacttaagccaggtgatcacttctccgccttcttaggagccgctgcattcacagcatgagctgcccctgcaggagctgatgtctctcttgggccctgagccaacctgtcctgcatactgacaatattgctgtcacagctagacttgctctaggcacgcttagactcaaactggtcagagagtgtattctctcttgccttctaagccttagactcgtggatactctccataagaacacgcttgctcttgcacatgtgacccatgaccttcatgtacatgtcatgatacatgtgct

SEQ ID NO: 401204 - DNA, 191 bp, Oryza sativa nipponbare
tttaatctccaaattcaagtatgaagtgtagtatatcatcatcatgcaagtacagtgttacatagattaatcacaatgcagtttgattaagcagtgggcatcatcacatcgcattcagaggaaagctatcttaaattacagatgaatatgcaaacacccaacttggtgttacatacatagactggatttgg

SEQ ID NO: 401205 - DNA, 476 bp, Oryza sativa nipponbare
acaacagcacaccatccatatatccatgcaggcagcctgtttgtgcccttgtgcagatgcatttcatttatacaagtagaaggcactcaaatcagccaccacatgaacacacacatgttccatcatcgatcgatctacacatgcatcacccggtcatgcacttacaaacaaaagatctacttgaagaagtacgggaggtcgagcacgtagaggaggaagtaggcccagaggacgccggagatgccgccgaagaagaagccgccggtgaacttggcccagccgtcggcggtctgcagcttgtcggcctccttcttgcggccggtgagcgtcagcgtcggcgccgtggacggctcgccctcgccgaaggaggcgacgccgtacatggtgaggcagacgctgaggatggcgacgaggcctgcggcgccgagggcgccggcctggccgtgcaccggcgtgttgcggagcgggcccgtgag

SEQ ID NO: 401206 - DNA, 342 bp, Oryza sativa nipponbare
ttttcattacaccattcatatgggtcgggttttttttcatattgtgtcttcatctcatacattctatttatacaattataagtactaagattattaaccacattaacacatacatgttccattattgatttatctaacatgcatcacccggtcatgcacttacaaacaaaaaatctacttgaaaaagtactgtatgtcgagcacgtatagtacgaagtaggcccagatgacacctgagattcctccgaagaagaagcctccgtttaacttgtcccattcatctgacgtctgcagcttgttgaccttcttcttgcagacggtgagcttcatcgttggccccaa

SEQ ID NO: 401207 - DNA, 325 bp, Oryza sativa nipponbare
  unsure (1)..(325): unsure at all n locations
tnntntttttttttttttgggggnntgtttttttttttttttttcttttttttcttttttttttttttttttttttaaaaaaaaaaaacccgggtaatttaaccctcataaattattaaacaaatttttttaaaacatttgactagtcattgcccaaaaaaacatattgtaacttccaacaaaaggcctttgattcccccccatttatggatgaaacaacatatttaatccttgaaatgggtaaaatccattaaaacaatccccaatattaactaattgccgagccatcaacaaccaactaaattcctttatcatttttttgcct

SEQ ID NO: 401208 - DNA, 483 bp, Oryza sativa nipponbare
gctggccatcccaggacaatgggggaaactgcggttccagaacacaacattgattttgtgagcacagcctattgagaccttcggtgttttgagtgtaaactttgatacatgtggttttcgtaattcatgtacatgtgtttcgtaaacctatcaccgtatattatgtcagatgatgtaaaatatggtcgagagagctcgtcggcaacgtctttcgggaaacagaaattttctgaagttgcttactcaaatgcgagcctctgtgtaccaacaagtgacgcatatcggccaccgctagcaaccagttcagcatgagtcccaagttctgctatcttgccatctgagcagacagcgatttgatgcgcattttgcacggtgctcaatctgtgcgcgatcaccagagaagtccttcccttcatcaagtgattgagagcttcctgtacaagccgttcactggtcgtatcaagtgcactggtagcctcatca

SEQ ID NO: 401209 - DNA, 500 bp, Oryza sativa nipponbare
tcacagaaaatccacggatccgaaatgttctcattgattgatagcgatatcatagaagcagcgacacgaattaagatttaaaaccaaccccaagaaggatcgcagatccaactccaccgaatcgatccaagaactccgcctaatccaaccaaaccatgggcgatctcatctcaccaacacgacacgaactcataaaaagactaacaccaccaccacctcctccttatttagggactcgacgactcaagacgactgatactggcgaaaggcgaaggggaacagcacagatctaggagagctggccgcagtcggcgatgacgaccggcttggcggtgctcccgccgcgggatcccaccttctcgatggccttgacgacgtccatgccctcgacgacgcggccgaacacgacgtgcttcccgtccagccagctgcagggcacggtgcagatgaagaactgggacccgttagtgttgggccccgcgttcgccatggacaggatg

SEQ ID NO: 401210 - DNA, 214 bp, Oryza sativa nipponbare
gaaacgcatgaattttacgggggattcctataaaaattcttcgaaaatcgtttcaaatgaggccttaacgcctcttttattgcaacatgaataaattttaccacatgaaaacttacgtgccatccaggtagctcagggactgcttggatgcgaaccacagctgcctgtcagcaccttgcttggcagggggagtggcctctgccctgaccatgaa

SEQ ID NO: 401211 - DNA, 361 bp, Oryza sativa nipponbare
tttttcgctttaaacttcttgggtggggaaacaaacgaaagggcttgctgatacaatatcaacatggagggtacattgccggttccatatgaacaaacataaaaacaccgaaaccccatatggccattatgccgatcctagcctagcttggcgaggacatcgccaaaagcagatttggtcaacgtgtagtacttcttccccttttcggggcttttgatcttggctggatgggcaaacccgtcaatggtggcgaaaagcttgccggtgaggtccttgaggcccttcttctcgtccttgggcttggagttgatgacggttttgaggtcctagcgcacgtaggaggccctgaagcggaggtcgt

SEQ ID NO: 401212 - DNA, 345 bp, Oryza sativa nipponbare
aacttaagaattaagatctcgatcacataaaaacatacagtgactgagtactggattacacgattgagttgttcagggttcagataggaaaaacatcttggggactagagatagagggaatcgacagatgcgcagcagtagcgcgcgggaaacaggacatcacgattgcgttgcatgtcgtcggctgcgcagcggcggcgcggggcttaagacctgctcttgaatgggatcgccctgatgatcacctggtggtagatggcagccagggcagcgccaacgaagggaccaacccagaagatccactgcaaaatttaaataccaaaatttggtaggaaaaactttttg

SEQ ID NO: 401213 - DNA, 479 bp, Oryza sativa nipponbare
cacatccatctcgtacccttggtataaatatatatagccggagcttccatatatttcattcacatatgcctcacccaacaacatatagtcgtagcagataccactcttacatcaagtcagagagagatcaggtgaaacaaaaacaaaagcagagcacggccggtaaaatcaaaagacgatgaacaaactgggaacacacgaaacagggtgggagacatcatcgaatcagagatgaacaattaaacaaggctatatatgacgatgacggcttagttgccaccagactcctcgcagcccgggggcttgtaggcgatgaagctgatgagctgcacctgcctgacgttgtcgaagccgatgatacggacgaatgcatgagggtacgccttcttggcctcctcgagctccttgagcacctgggtggcgtcagtgcacccgaacatgggcagcttgcacatggtccagtacctgccatcggaata

SEQ ID NO: 401214 - DNA, 110 bp, Oryza sativa nipponbare
tcgagctttttttttttttttttttttgatgacagacagaaattaattaagctagaaatctcctcgatcgatcaccacacacacacaattaaggccatacatacatgcac

SEQ ID NO: 401215 - DNA, 506 bp, Oryza sativa nipponbare
atttgggtgttcgtttccaccatcagattgatataatacacgcgaacaagcagaaacattcggcaacaatttctccaggaaaatcgcggcctatttcgtcatcatcccgagcgagcgttatttggaagagggagtctttttcagacaggcacagcctcaatggcaggagcgagtgaccaacgtcgacgtcggcgtcctagtagccaccctggatgtaggcgttgagccggttcagctcttcccggtgctcgctgaccacggcgcggacaatgtctccaatggagaccatcccaaccatgcccgtgccgtcgatcaccgggatgtgcctgatgcgcttctctgtcatcagctgcattgcttgcaggactctggtatcaggcttcaccgtgatcagctggttctcttcagtcatgatgtctccaactttagttgacttggaagatcgtccctgcactatgattttcctgaggtaatctctctcagtaacaataccagcaattgattta

SEQ ID NO: 401216 - DNA, 347 bp, Oryza sativa nipponbare
gggggaccgacagaaattaattaagcttgaaattttcttggtcggtcacccccccccccacatttaagggccattctttcattccctgttgcaactgcaactggagggtcggggcgtggtttctacaagtgtacacatggtactttggttggcaccatttcaatcgtgtcgttttgctcatttgccggggacaaaattggtggcgttttcccaagcttttttggcgacggggttggccacttggtcaaaaaggttttttatggggcccttgccggtgacaatggcctggacaaaaaaacccaacatggaaaacatggcgagggggccgttttttaactcttttacct

SEQ ID NO: 401217 - DNA, 473 bp, Oryza sativa nipponbare
atcgccatctctctcagctctcacagctcactgcatcaatggccgcggccaccatggcgctctcctccccggtgatggcccgcgcggcgccgtcgacctcctccgcgctcttcggcgaggcgcggatcaccatgcgcaagaccgccgcgaagcccaagccggcggcgtcgtcggggagcccgtggtacggcgccgaccgcgtcctctacctcggcccgctctccggcgagccgccgagctacctcaccggcgagttcccgggcgactacgggtgggacaccgcggggctctccgccgacccggagacgttcgccaagaaccgggagctggagtgatccactcccggtgggcgatgctgggcgcgctcggctgcgtcttcccggagctcctcgcccggaacggcgtcaagttcggcgaggcccggtggttcaaggcgggctcgcagatcttcaacgagggcgggctcgactacc

SEQ ID NO: 401218 - DNA, 222 bp, Oryza sativa nipponbare
  unsure (1)..(222): unsure at all n locations
tcgaccacgcgtacggcacgcgttcgtctaggcaggcaatcagcggcgaggcaccagcccaccggccggcaatggcgtccacctcctgcttcctgcaccagtcgacggcccgcgtcgacgcgcgcgtcgccttcccgttcccggcgacacggacccaccttctcgtntgccgcgcccagaagcaggacgacgccgacgtttcccgtctcgcggtgcttgcgc

SEQ ID NO: 401219 - DNA, 460 bp, Oryza sativa nipponbare
cgggtcgacccacgcgtgcgcggacgcgtgggcttgatctgatcagtcggacatggcgtcgcccatgctctccgccgtcaccgtgccactccagggaggcgggtggtgggagttctccggcctgaggagctcgtcgtcgctgccgctgcggcggaatgccacctccgacgacttcatgaacgcggtctccttcaggacccacgcggttggcacgagcggcggggcgcggcgggcgccgacggaggcgaagctgaaggtggcgatcaacgggttcggccgcatcgggcgcaacttcctgcggtgctggcacgggcgcggcgacagctcgcccctcgacgtcatcgccatcaacgacaccggaggcgtgaagcaggcgtcgcacctcctcaagtacgactccacgctcggcatcttcgacgccgacgtcaagcccgtgggcgacaacgccatctccgtcgac

SEQ ID NO: 401220 - DNA, 341 bp, Oryza sativa nipponbare
ccacgcgtccgagcatgagcaacacaagggattaactcatcactcacttagctaattaaatcttcgaccatgtcggacaagtgcggcaactgcgactgtgctccaagagccagtgcgtgaagaaaggtaccagctatggcgtcgtcatagttgaagccgagaagagccacttcgaggaggtcgccgccggcgaggagaacggcggctgcaagtgcggcaccagctgctcctgcaccgactgcaagtgcggcaagtgaagtcacgaagcatccgaacactcgccgccggcgagtcacctaccttaattagtccacaataaaaaccacccatatgagtgtggt

SEQ ID NO: 401221 - DNA, 438 bp, Oryza sativa nipponbare
ccacgcgtgcgcccacgcgtccgcccacgcgtccgcccacgcgtccgggcatgtcagtcgatattgatgcatctggcaggaagagcacgggcaggagttgtccccagctcctaaatttctcaatgggaagggtgtgtaccaattcgttgacaagtacggcgcaaacgtcgacggctacagcccaatctactcgccggaggaatggtctcccaccggtgacacctacgttggtggaaccaccgggcttctgatctgggccgtgaccctcgccgggctcctcggcggcggcgccctcctcgtctacaacaccagcgccctcgccggctaaatttcacccaaatccagtctatgtatgtaacaccaagctgggtgtctgcatattcatctgtaatctaagatagccttcctctgaatgcgatgtgatgatgcccactgctt

SEQ ID NO: 401222 - DNA, 503 bp, Oryza sativa nipponbare
agtacgtccggattccgggtcgaccacgcgtgcgcggacctgggcgacctggcaaaaaagaagagtaggaattaattaatgaatcacgtagctacctggttgggaaaggaacgagctgcagagactgggcgattcatgagctactttctgtaatgagctattatcagagttgttctgtgcaagacatgctactttctgtaatggatttggttttcgtctgtttatcccaagttaaaaaggatgttaacacaaaataccttttcgactgtccaaactcctgagttctatgagaagatagttgttcacacacttagccataattttcgcgatgctacaagacttgaacgtgtgcgcttgagattgccggttgaaccacacaatgctctggtcaaaataatatacgctggtgtaaatgctagtgatgttaacttcagcgctgggcgttaattcagtggtggtgctaaagaaactgctgcacgccttccggtggatgccggttttga

SEQ ID NO: 401223 - DNA, 233 bp, Oryza sativa nipponbare
ccacgcgtccgcccacgcgtccgtacaaggaagacgctgctaacaactttgctcgtgggcactacacagttggaagagaggtggtagatcgtggcgttgatcgactaagaaaactggcagataactgcactggtctccaaggttttctggttttcaatgctgttggtggaggaaccggctctggacttggttcattacttgtggagcgcctatcatttgattacggcaggaag

SEQ ID NO: 401224 - DNA, 385 bp, Oryza sativa nipponbare
ccacgcgtgcgcgaatccagcagcagaagcagcagcagcagctcagccgccgccgatggcgtccacgatcatggccccaacctcccgcgtcctcgcgggcaagacccccttcctcggccatccccgcccctccaatgcccccgtccgcgacatcgccgccgccgccaccggccgcatcaccatgagcaaggagctgtggtacgggccggatagggtgaagtacctggggccattctcggcgcagacgccgtcgtacctgaggggcgagttcccgggcgactacgggtgggacacggcggggctctccgcggacccggaggcgttcgcgaggaacagggcgctggagggatccacggccggtgggcgatgctcggcgcgctgggct

SEQ ID NO: 401225 - DNA, 385 bp, Oryza sativa nipponbare
ccacgcgtgcgagctaattaagcaaaagaagaagaagaagaaagaagaagaagaagatgcagaccgctgctagcagtgtcgttggattgtcggcgccggttgcccgctgctgtgaaggggcgcagcctgcagattcaggctcctcgccgtgttgcgttgcgcgttcgtgcggcggcggcggcggtggcagtggaggctgcggaggtggactacagctctaacatctcggtgtttccgatggaggcgtgcgacctcatcggcggcgaggcgtgcaacgtgcagatgtacccagaggccaagctctcatcatcggctgctgttgctgtttctcgtgcggcggctgaggaagtttacagggactacctattctacgacgagcccacca

SEQ ID NO: 401226 - DNA, 421 bp, Oryza sativa nipponbare
  unsure (1)..(421): unsure at all n locations
ccacgcgtgcgcccacgcgtccgggggagggcccgccgctgctgctcgtccacagcttcggcgcctccgtcggccactggcgcangaatattggggtgttgtctgaatcctacaccgtgtacgcgatcgatttgctcgggtttggcgcgtcggacaagcctcctggattctcctacacgatggagacatgggccgagctgatcctggacttcttggacgaggttgtgaggaggcccacggggctcgttggcaactctgtcggaagcctcgcatgcgtcattgctgcagcaaactccagcagagatcttgtccgggggcttgttctactgaattgctcgggcggcatgaacaacaaggccatcgtcgacgattggaggatcaaattgctccttcctctgctatggctgatcgacttcctgct

SEQ ID NO: 401227 - DNA, 478 bp, Oryza sativa nipponbare
ccacgcgtccgcccacgcgtccgggctgcggaggtggactacagctctaacatctcggtgtttccgatggaggcgtgcgacctcatcggcggcgaggcgtgcaacgtgcagatgtacccagaggccaagctctcatcatcggctgctgttgctgtttctcgtgcggcggcggaggaagtcgacagggactacctatcctacgacgagcccaccacggtgttccccgaggaggcgtgcgacgatctgggcggagagttctgcaaggccacctgatcccattcccatccatggagaattggagtcttctatcatccttcctcctctgctccactaccttaattccatgtagctacagatttatatgttaatcatcatgtaatggtacatatctccttgttaataaggcacgctagtctagcttctcaaaatgatttacaataatataatatttacatacatataatacacttactccatc

SEQ ID NO: 401228 - DNA, 309 bp, Oryza sativa nipponbare
ccacgcgtccgcccacgcgtccgacggcggggctctccgcggacccggaggcgttcgcgaggaacagggcgctggaggtgatccacgggcggtgggcgatgctcggcgcgctgggctgcatcacgccggaggtgctcgagaagtgggtgcgcgtcgacttcaaggagcccgtgtggttcaaggtcggcgcccagatcttctccgacggcggtctcgactacctcggcaaccccaacctggtgcacgcccagagcatcctcgccgtgctgggattacaggtcgtcctcatgggcctcgtcgagggctacc

SEQ ID NO: 401229 - DNA, 381 bp, Oryza sativa nipponbare
ccacgcgtccgcggacgcgtgggcggacgcgtgggtgaacacgcagaacgtgtccgcgccggccaaggtgttcgacgccgccgtgggcgtcctcagcaacgcgaccgccgactacgcggcggcgaactcgtccaggcggttcggcacgggggaggaagggttcaacggcagcaagatttacgggctggcgcagtgcacgccggacatggcgacggccacctgccggagctgcctggggggaatcgtcgggatgatgcccaagtatttcagcgggaagcacggcggcagggttctcggactgcggtgcaactacaggtacgagatatatcctttcttcgacggggtctcgctgttgcagttcccgggggattactgggagcg

SEQ ID NO: 401230 - DNA, 455 bp, Oryza sativa nipponbare
  unsure (1)..(455): unsure at all n locations
ccacgcgtgcgcccacgcgtccgcccacgcgtncggtcgtgttgagactggtgtcctcaagcctggtatggtggtgacctttggtcccagcggtgtgacgactgaggtcaagtcggttgagatgcaccacgaggctctccaggaggctcttcctggtgacaacgttgggttcaacgtgaagaacgttgccgtgaaggatctgaagcgtgggtacgtggcctctaactccaaggatgaccctgccaaggaggctgccagcttcacctcccaggtgatcatcatgaaccaccctgggcagatcggcaatggctacgccccagtgctggactgccacacctcacacattgccgtcaagtttgctgagctggtgaccaagatcgacagacgatccggcaaggagctggagaaggagcccaagttcctcaagaacggggatgctggtatgggtaagatga

SEQ ID NO: 401231 - DNA, 573 bp, Oryza sativa nipponbare
  unsure (1)..(573): unsure at all n locations
ccacgcgggcggccacgcgtccgggatcaggagctgcctccaggactccaaggtctgcaagaaactgcaggacaagaactgggatcggacccagggcttcaaagccgacctctccccgctcgagtccggatgctgcaagccacccagcagctgcaacttcctctacgtcagcggcacgaactggacgaaggtgcccaccaactcgtcggacccggactgcaacacgtgggtcgacgacggcacgcagctgtgctacaactgccagtcgtgcaaggccggcgcggtggcgaccctgaagcgggactggaagcgcgtcgccgtcgtctgcatcgtcttcctcgtcttcatcgtcatcgtctactccctcggctgctgcgcgttcaggaacaaccggagggacaaccgcggcgcctatcgcggtgccgcgtggaagggcggatacgcctgatttcattcgatcgatcgatncgattgcacggcgtaattgattggcatgttcatgcgatcatgtcagatatctggtcataggcttagctctgatattctagccctgtacaggcgagattattctgg

SEQ ID NO: 401232 - DNA, 256 bp, Oryza sativa nipponbare
ccacgcgtgcgggaagtcttgcctgcttctgaggtttgcggacgattcatatctggagagctatatcagtaccatcggtgttgattttgggagtggaatttttccatgtgcataagtttgcacaaatgagccttttttttttctccttaataaccctttcactccatgtttgacctgctaaaaaatccgcactgttgagcaagatgggaagacaataaagctgcaaatttgggatactggtggccaagagcgattt

SEQ ID NO: 401233 - DNA, 470 bp, Oryza sativa nipponbare
ccacgcgtccgccacgcgtccgctcacaagtcactccgtggaccacgtggagccatgatcttttacaggaagggggtgaaaggagtaaacaagcggggcaaagaggttatgtatgactttgaggacaagatcaatgctgctgtcttcccaggtctgcaaggtggaccacataatcataccattactggcttagctgttgcgcttaagcaggcaactactccggagtacagagcttatcaagagcaagttatgagtaactgtgcaaaatttgcacagagcttgacagcaaaaggctacgaacttgtctctggtgggactgacaaccatttagtgttggtaaatctcaagagcaagggcatagatggttcaagagtgggaaaggttttagaaaacgtgcacattgcagcaaacaagaacacagtttctggggatgttttagctatggtaccaggaggcatcaagatgggaac

SEQ ID NO: 401234 - DNA, 377 bp, Oryza sativa nipponbare
ccacgcgtccgcccacgcgtgcgcccacgcgtccgtatgtcatgattttgacaatgtgatgctacagtaaacttttgataattatggattaattaggctcagaaaaatcgtctcgcggattagctctcatttatgaaattagtttttttattagtctatgtttaatactctaaattagcgttcaaacatctgatgcgacttgcgctaaaaagttttagccccatctaaacaccccctaagcaaattccgcgacttttgctatctcgctgatctgatcgccagcaaattcgatgattcggagctgctaagcaaatcccgcgacttctgctatctcgctgctctgactgccagcaacattgatgatcgccactggctgc

SEQ ID NO: 401235 - DNA, 478 bp, Oryza sativa nipponbare
  unsure (1)..(478): unsure at all n locations
ccacgcgtccgccttgctactggacgcctcgagctccttctcctcgccaccgtcgctaaccgccgtctcggttggaggcgggggctggtcgccaccatcaggagactctttcttcagctccgtttcgaactccttggctgcctgctggaagctcttgacggtcttgccgatgctgcggccgatctcgggcagctgcttggggccgaacaccagcgcggcgacgcccgcgatgacgaccagctccgggacgccgagcccgaacaggcacttgcaccccatcgcgcctcccccccgcgaccccgcccccgaccccgccctcgtccgcgcggccaccgncacggcgagcccccccngccctcccgtgacgaaggaggacgccctcgaggacatcccggccgccgcgacgcgtgcccggnccgccgncancgcccttcccgtagccgcacacggaggccgcgcgagggtggaggaggaggag

SEQ ID NO: 401236 - DNA, 521 bp, Oryza sativa nipponbare
  unsure (1)..(521): unsure at all n locations
ccacgcgtgcggtggcctcgaggcgcccgcgtggattgcagtggcgctgctcgtcacttcgtctcctcctctccaccactcgtcgtcgtcggcggcgtgggcatggcgacacccgcgccgctctccggcctccgcccgcgcgctcccgctcccgctcccgcggcgcgcagtcgcctgtgcggccagtcgccgccggtcgtggccccgcggctcggggcgttcccgcggcggcgtggtggggcggcacggtgctcgccgcgcgccgaggccggggacgtggaggcgcttagggcgggggtgcggtgtacaagccgcggtcctacgacgtgctcgtctccgacgccgnccgctccctcgcctgcgccatggacgagggcaagacccgcctcgagatcgagttcccgcctctgccgagcaacatctcttcttacaagggttcctcggacgagttcatcgacgccaacatccagcttgctcttgctgttgccagaaaactaaggaactcaaggggactagatctt

SEQ ID NO: 401237 - DNA, 308 bp, Oryza sativa nipponbare
ccacgcgtgcgcccacgcgtccgcgagggcactgtagccagtgtgtcgtcacagttacaggttgagatcgatggacaaagttaaaactatactgcggtaattaattttaccttgagaacatacgtggttcatcatgtatttcatcacatgaatcttttctagagcgtttgatatacatacctcgtgttttgcctctgcaataaccttgtgtgtagacgaatctgtatactacctgtatgtgtggcctgtgaatcgatttggttactgcaaagttttgcgtatatatacatgcttgtgattctggaaaa

SEQ ID NO: 401238 - DNA, 509 bp, Oryza sativa nipponbare
ccacgcgtccgagctgggaagtctttagagatactttaatcgaacaagctgagcagggtgttgattacttcacaatccatgctggcgtgcttctgcgttacattcctcttacggcaaagagaatgaccggcatagtttcacgtggtggctctatccatgcaaaatggtgcctaacatatcataaggagaactttgcctatgagcactgggatgaaattcttgatatttgcaatcagtatgatgtggcattatccattggcgatggtttgagaccaggttctatttatgatgcaaatgatagtgctcagtttgcagaattgctgactcaaggggaactcacacgccgagcttgggcaaaagatgtgcaggtaatgaatgaaggcccagggcacattccgatgcataaaattcctgaaaacatggagaagcaactggagtgggcaatgaagcacctttctacacactggggccactgacaactgatattgcacctggttatgatcacatca

SEQ ID NO: 401239 - DNA, 472 bp, Oryza sativa nipponbare
  unsure (1)..(472): unsure at all n locations
taccgtccggattcggtcgaccacgcgtcggcgattgttgaactttcggatacagggactaaggagaagatggtattggaccaaatggtgagaaattggtatgtggatgggcaaatggtagtggtttggttcttgaaaatggtagattttacaaggaagaggagaagaatgacccagagtttgccaagaagcttgcctccttagcagatctctatgtcaatgatgcattcggaacagcccacagagcacatgcatcaactgagggagttaccaagtttttaaagccttctgtcgcaggattccttttgcagaaggagcttgactaccttgttgngagtgtttcaagccctaaacgcccatttgctgccatcgtgggtggttcaaagtgtcatccaagattgggttatcgaatcccttttggagaatgtgatatccttcttctaggtgggggatgtcttacatttacaaggac

SEQ ID NO: 401240 - DNA, 590 bp, Oryza sativa nipponbare; identical to SEQ ID NO: 387613

SEQ ID NO: 401241 - DNA, 128 bp, Oryza sativa nipponbare
ccacgcgtccgcccacgcgtccgcccacgcgtccgctaaaacgatgccaatttgtgcgtcgacccaattaaaaaaaaaaaaaaaaaaaaaaaaagggaaagagagaaaaaaaaaaaaaagagaagcat

SEQ ID NO: 401242 - DNA, 441 bp, Oryza sativa nipponbare
ccacgcgtccgccgccgccgccgacgacaccaccgttgccgttgccgcctccaccacccgccctcgaccacagccatgccgccgaagctcgacccgacccaggtggtggatgtgttcgtccgcgtgaccggcggtgaggtcggcgcggtgtcgtcgctcgcccccaagatcgggccgctcggtctctccccgaagaagatcggagaggacatcgccaaggagaccgccaaggactggaagggccttcgcgtcaccgtgaagctcaccgtccagaaccggcaggccaaggtctccgtcgtcccctccgttgcaccatggtacatgaagactttacttgtggaagagagggaccgcaagaaggtgaagaacatcaagcacagcggcaacatcagcctcgacgacgtcatcgagatcgcgaggagcatgaggcccaggtccatg

SEQ ID NO: 401243 - DNA, 365 bp, Oryza sativa nipponbare
ccacgcgtgcgccacgcgtccgcaacccacacggacacggccacaccacccaccaactgagagctgagcaggcgagcgagcggacatggcagcatcgctccaagccgcggccaccctgatgcagccggccaagctcggcggccgggcctcctccgccgcgctgccatcgcgcccgtcttcgcacgtcgccagggcgttcggcgtcgacaccggtgccgccggcaggatcacgtgctccctgcagtccgacatccgggaggtcgccaacaagtgcgccgatgccgccaagctcgccggcttcgccctcgccacctcagctctgctcgtctcgggcgccagcgcggaggcgtgccgaggaggctacc

SEQ ID NO: 401244 - DNA, 392 bp, Oryza sativa nipponbare
ccacgcgtccgcgaggctggcggacccggcgccgcagagcgggaggatcgtggcgaggttcgggttcggcggcgggaagaaggcggcggcgaagaaggcggcgaggccgtcggcgccgacgacggacaggccgctgtggttccccgggcggtggcgccggactacctggacgggtcgctcgtcggcgactacggcttcgacccgttcggcctcgggaagccggcggagtacctgcagttcgagctggactcgctggaccagaacctggccaagaacaacgccggcgagatcatcggcacccggttcgagaccggcgaggtgaagtccaccccgttccagccctacaccgaggtgttcggccttcagcgctttcccgagtgcgagctcattca

SEQ ID NO: 401245 - DNA, 410 bp, Oryza sativa nipponbare
ccacgcgtgcgcccacgcgtccgcccacgcgtccggctcaaggccgagtacaacaaggccattgctgcctacaacaagggcgagagcactgccaagaaggcacccgccaaggaggaagaggaggacgacgaggaggaatctgacaagtccaagtccgaggtcaatgatgaggatgacgacgagggcagcgaagaggatgaagacgatgacgagtgagccttccagtggacaagatgggagcagcaagacgctaagggcggcgggcgtcctaaggagcctatccatcatcatcatcgtctactagaattattcagtttcacttcacatcgtgatgttttactttttctctcgtcctataacggatagcgctccttgttggcgccactgggtgggtgttggtggtttcttca

SEQ ID NO: 401246 - DNA, 486 bp, Oryza sativa nipponbare
ccacgcgtccgcccacgcgtccggtggaagggctcggcaaacatcaggtagccgtccctcctttatccacttcgctctcttctctgcagcgctggatcctactccctggttagcaatagcaagggtaggaagatgagcacgttagatgccacgcgagcagagctcggccttgttgttctgtacttgaacaaagccgaggccagggacaagatatgcagggcgatccaatacggctcgaagtttatcagtaacgggcagcctggcacggcacaggatgtcgacaggtccaccacccttgctcgcaaagttttccggcttctcaagtgggtcaatgatctgcatggtcttatcagccctcctgctaaggggactcctcttacactggtcttgcttgggaagtccaaaaatgcgctgctctcgactttcttgttcctggaccaatttgtatggttgggaagaacagggatatacaagaacaaggagcgc

SEQ ID NO: 401247 - DNA, 506 bp, Oryza sativa nipponbare
ccacgcgtgcgcgtgaacaacgtgggaacaaacttttcaaaacaaaccactgaatactctgcagatgattactcgttcataatggccaccaatcgtgaatctgcgtatcatctgtgccaacttgctcatcctcttctcaaatcatctgggtcaggaagcgttgtcttcatatcgtcagtctctggagtggtggctgtaagttctggctctgtctatgcgatgacaaaaggtgccatgaaccagctggccaagaacctggcatgtgagtgggcgaaagacaatataagaaccaattctgttgcaccatggtacatgaagacttcacttgtggaagatgaattggcaaggaaggacttcgctgacagcgtcgtgcgtcgaacagcgctgaagcgcgtgggagaaccagaagaggtgtcatcgctggtcgcgttcctgtgcatgcccggcgcttcctacatcaccggccagacgatctcggtcgacggcggcatgaccataaacggact

SEQ ID NO: 401248 - DNA, 361 bp, Oryza sativa nipponbare
ccacgcgtccgctcgagcgcactgaggctaacgagatctacatggccaactcccgtcagatcatccgtaagttggtcatggatggattcatcatcgagaagcgccataagattcactccaggtcccgtgcacggagagcccatgacgctaagcagaacggacgtgactctggctatggtaagcgtatgggtacaagggaggctaggctccccaccaagatcctgtggatgaggaagatgtcggtgctcatgcgtttgctgttgctgtatctggacgccaacatgattgacaggcacatgctttatgacatgtacatgaagggctagggtgacatgttcaagaacaagcgtgttcttatgga

SEQ ID NO: 401249 - DNA, 462 bp, Oryza sativa nipponbare
ccacgcgtgcggtcgccgccggcgaggagaacggcggctgcaagtgcggcaccagctgctcctgcaccgactgcaagtgcggcaagtgagagtcgcgaagcaaccgaacactcgccgccggcgagtcacctaccttaattagtccacaataaaaaccacccatatgagtgtggtttgtgtgtgtgctgattattgctgaattaaacccgtgtgttatcgattaattaagcagctggtcgcttcggcgactatgcgtgtatcaacgtatgaatttgtgtgatgtgatgtacccgtgctattctcagtgaaattaatcaatcgtgtattcgggtgggttggctagtgaaaaaaaaaaaaaaaaaaaaaaaaaaaaaaaaaaaaaaaggcagaaggggggaaggtaacaaaataatataacattcgatagatctataaaaaatattataaagggggggggcgttt

SEQ ID NO: 401250 - DNA, 525 bp, Oryza sativa nipponbare
ccacgcgtgcggtagaacagtgagagtgaggtgcagaaaaatttgagctgaagctgaggatggcaacatccatgatcacctcgccgctggtggcgcgcggcccgggccaagggccttccgtccatctcccgccggggatcctccttcgccatcgtctgcagcggtgggaagaagatcaagaccgacaagccctacgggattggaggtggcatgtcagtcgatattgatgcatctggcaggaagagcacggggaagggtgtgtaccaattcgttgacaagtacggcgcaaacgtcgacggctacagcccaatctactcgccggaggaatggtctcccaccggtgacacctacgttggtggaaccaccgggcttctgatctgggccgtgaccctcgccgggctcctcggcggcggcgccctcctcgtctacaacaccagcgccctcgccggctaaatttcacccaaatccagtctatgtatgtaacaccaaagctggtgtctgcatattcatctgtaatctaagata

SEQ ID NO: 401251 - DNA, 259 bp, Oryza sativa nipponbare
aggagagagatggccactgcttatgctcccatggcgagccagctgatgaagagcagcttggtgtgctccaagccgagggggctgtctggtgcttcgctgacaaggaggccccgcttcacagtcaaggccatccagtctgagaagccaacgtaccaggtggtgcagcccatcaatggcgaccccttcatcggcagcctggagacgccggtgacctccagcccgctggtcgcctggtacctctccaacctcccggcgtacc

SEQ ID NO: 401252 - DNA, 379 bp, Oryza sativa nipponbare
ccacgcgtccgctccaccgggttgaggtgggatcgaccgtggctggtgatgaactccgcagggagagccttcacccagcgagtggagcccaagctcgcgctgattgaggtggagatgccgcaagaggcgttcactgagtggcagccaacgcctgattctcacatggttatcagagcacccggattggatccactgaagatccctcttggcgcgaaacgtgccacagttgatgatgtctctatctgggagtggtctggttctgcgtatgatgaaggagatgaggcggccgaatggttttccagttactttgggaagccgactcgactcgtacggtttaatgaagcatcagaaattagagagaccaatcctgactatgctc

SEQ ID NO: 401253 - DNA, 208 bp, Oryza sativa nipponbare
ccacgcgtccgctgagatcatgccagctatcaacaagttcttcactgagccaacaaaatgatgaacgaatttagttggttgttgattgctctgctgttacgtactattgcggattgatttaatggattttacccatttcaagcattacatatgttgtctcatccataaatcggacgacatcaaacgcctcttgttgcaagctaccata

SEQ ID NO: 401254 - DNA, 263 bp, Oryza sativa nipponbare
ccacgcgtgcgcccacgcgtccgcccacgcgtccgcccacgcgtccgaaaaagataggggcgctttactactaatggaaaaactcaattacaagggtacgattgcacatacgcatcatgaaatcgaattaattaagccaacacaaacacgtacgtacacgtgcagcaaaagtttcatgcagctgcactaccgtgctcttgtccatccatcgatctcctcctcttcacaagcaagcgcgagaggagacacctccatcgatccat

SEQ ID NO: 401255 - DNA, 496 bp, Oryza sativa nipponbare
  unsure (1)..(496): unsure at all n locations
ccacgcgtgcggcagctgtagtaatcttgcctggtctggtgacattcacctagaaggtgtccacttttcttacccactgagatctgatgtggagagcttaaatgggcttgatcttacaattgagtgtggaaaaattacagcacttgttggacctagtggtgctggaaaaagcacagtggtgcaacttcttgcacggtactatgagccaactcatggtcgcatcactgtggctggggaagacatccgtgtatttgataaaagagaatggtctcgagttgtatccttagtgaatcaggaccctgtcctattctcagtttctgtcggagaaaacatcgcttatggtcttccggatgatgttgtttccaaggatgagataataaaggccgctaaagctgccaatgctcatgaattcattgtctctcttccacagggctatgacacacttgttggtgaacgtggcagnctcctaagtgggggacagagacagagaattgta

SEQ ID NO: 401256 - DNA, 506 bp, Oryza sativa nipponbare
  unsure (1)..(506): unsure at all n locations
ccacgcgtgcgcggacgcgtgggcaatggatactggatcatcttcacaaataccaatccttgactacagtcagcttagcgaaaactacctacaagagatgcggctttctgaacgtgacaaacttgaggcagagttcaaaaaaaaaataggggatctagttgctcagattgagcacactgctccaaacctgaaagcgctcgaccaatatgaaacattgcaaaggaaggaaaaggatgttatggaaaagtttgaagcagcaagaaaagaagagctggagatagctgacaagtacaattctgtcaagcaacgaaggtatgagctgttcatggaagcctttgatcacatatcaaaaggcatagaccaaatctataaggagttaacaaaaagtcaaacacatctacttggaggaacagcatatttaaatctagaaaatggagatgagccatttttacatggaatcaagtacacagctatgcctncgacaaagcgctttagagatatgggac

SEQ ID NO: 401257 - DNA, 442 bp, Oryza sativa nipponbare
ccacgcgtgcgcccacgcgtccgcccgggcgtccggtgaaattcgcaaaaccctagcgcggcggcgatgtcgaacacgagggtgttcttcgacatgaccgtcggcggagctccggcggggcggatcgtgatggagctgtacgcgaaggacgtgccgcggacggcggagaacttccgcgcgctctgcaccggcgagaagggcgtgggcaagagcggcaagccgctgcactacaaggggagcaccttccaccgcgtgatcccggagttcatgtgccagggcggcgacttcacccgcggcaacggcacgggagggggagcgatctacggcgagaagttcgccgacgaggtgttcaagttcaagcacgacagccccggcatcctgtccatggcgaacgccgggcccaacactaacgggtcccagttcttcatctgcaccgtgccct

SEQ ID NO: 401258 - DNA, 388 bp, Oryza sativa nipponbare
ccacgcgtgcgggagaatcttgcagcatttcctatgggtctggatcaattgctggtttcttcagtgaggatagcgtgccagttggggagcttgctgtgaaaaatcagatgttcattgagacaaccagggaaccgagccttactttcatcatcgggaagtttgatggaattcttggacttggatttccggagatctctgtgggaggagcccctccaatttggcagggaatgaaagagcagcaactgatcgagaaggatgtattctccttctggctcaaccgcgatcctgatgcaccgacagggggggagttaatctttggtggtgtagacccaaatcattacaaggggagccatacatatgttcctggtacccgcaaaggctactggca

SEQ ID NO: 401259 - DNA, 335 bp, Oryza sativa nipponbare
ccacgcgtccgcccacgcgtccgcaacaatggcggctcaggctcttctctctgggaggcagctgctggggaggccattgcaatcttcagtctccaggtcttcttcctccaggaaggcacccttcatggtcagggcagaggccactccccctgccaagcaaggtgctgacaggcagctgtggttcgcatccaagcagtccctgagctacctggatggcacgtaagttttcatgtggtaaaatttattcatgttgcaataaaagaggcgttaaggcctcatttgaaacgattttcgaagaatttttataggaatcaaccgtaaaattcatgcgtttc

SEQ ID NO: 401260 - DNA, 273 bp, Oryza sativa nipponbare
  unsure (1)..(273): unsure at all n locations
ccacgcgtgcgcccacgcgtccgcccacgcgtccgggtgggttggcttctcctccccctctttaccttttcctcctcggttcggttccgtggttgtctagggtttagtgggttgagatggcggcnccggatgtcgagtaccgctgcttcgtcggccgnctcttctgggccaccgacgaccgatacctcgaggccgtcttctacacctacggtgagatcctcgactccaagatcatcaacgacagggagacggggaggccacgtgggttcgtct

SEQ ID NO: 401261 - DNA, 498 bp, Oryza sativa nipponbare
  unsure (1)..(498): unsure at all n locations
ccacgcgtccgctccactccactccactctccgttgctcgcgcggttggcgttgcgttttttcccctcgaatcgcgggggggaatccgccggtggatgcagcagaggggcctcgcgcacaaccgccgctcccgcggcttctcccgatcccgccgcgccgtcgagggcgcctaaaccacacgcctttttttttccttaaaaacgaatagatctctctcaatttcctgaaacttataataatttcaaaaacgccctagacgaggacgaggagacgatcgagatggacgccgtcgcggcgaatgggatcggcgaggtgggagagaaggcgcancggagctactgggaggagcactccaaggacctcaccgtcgaggccatgatgctcgactcccgcgccgccgacctcgacaaggaggagcgccccgaggtcctgtctgtactcccttcttacaaagggaaatcagtactggagcttggtgctggaataggacgctttact

SEQ ID NO: 401262 - DNA, 502 bp, Oryza sativa nipponbare
  unsure (1)..(502): unsure at all n locations
ccacgcgtgcgctcccaactcctctcctctccttcccactactctcgcgaggaggaaagcgaagccaagcgagagaggcttccgccgtcgccttcggcttcgccttccgatcggtcgcgaggtttcaagatggcgacgtgcacacttgcaacttcatgtgtgtccttgagcaatgctagaactcaggcctccaaggtggcggcggtcaagagcccggcatctctaagcttcttcagccaaggcatgcagtttccaagcctgaaggcctcctccaagaagcttgacgtctcggcaatggctacctacaaggttaagctcatcacaccagaagggcaagagcacgagttcgaggctccggatgacacctacatncttgatgccgccgagaccgctggagtagagcttccctactcatgccgtgctggagcatgctctacctgtgccggtaagatcgaggctgggtccgtcgaccagtcggatggatcattccctgatgatgcgc

SEQ ID NO: 401263 - DNA, 187 bp, Oryza sativa nipponbare
  unsure (1)..(187): unsure at all n locations
ccacgcgtgcggcagcagaagcagcagcagcagctcagccgccgccgatggcgtccacgatcatggccccaacctcccgcgtcctcgccgncaagaccccgtggttgggcattccccgcccttccaatgcccccgtccgggacatcgccgccgccgccaccggccgaataaccatgagcaaggagct

SEQ ID NO: 401264 - DNA, 376 bp, Oryza sativa nipponbare
  unsure (1)..(376): unsure at all n locations
ccacgcgtccgcccacgcgtccgctcgccaacccgacacgtctctcatcttcacgcaacgaacagcagcagcagctcaagctaagctaagctaaagtactacgtgttctttcgtcttcgtcggcgccggagtttgattcgtcggagctagctagcaagaggaagaagaaaatgttggccatattccagaagcaggtggcgcacgcgccggcggagctgaacagcccgcggagcagcgcggcgaagcccaagaaccccgacgagatcctcagggacttccacgccctccaccccatcgaggccttctccacctccnttcggcgcggtgccgncctcgtctgctgtggcgggcacgcccgcaatggcctctctggtta

SEQ ID NO: 401265 - DNA, 473 bp, Oryza sativa nipponbare
ccacgcgtccggcttggtgagctgcagagatggccccctccgtgatggcgtcgtcggccaccaccgtcgctcccttccaggggctcaagtccaccggcgggatgcccgtcgcccgccgctccggcaactccagcttcggcaacgtcagcaatggcggcaggatcaggtgcatgcaggtgtggccgattgagggcatcaagaagttcgagaccctctcctacctgccaccgctcaccgtggaggacctcctgaagcagatcgagtacctgctccgttccaagtgggtgccctgcctcgagttcagcaaggtcggattcgtctaccgtgagaaccacagatcccccggatactacgatggcaggtactggaccatgtggaagctgcccatgttcgggtgcactgacgccacccaggtgctcaaggagctcgaggaggccaagaaggcgtaccctgatgcattccgccgtatcatc

SEQ ID NO: 401266 - DNA, 360 bp, Oryza sativa nipponbare
ccacgcgtccgggtcggcgtcctcctcctcctcctcctcctcgcagaatgcaacgggcaattcaagctatcgggtcacatggcagtctcctcaaggctgctgttctgcgacacatcagtgctccaaaaccatctattttacctgctgtatattcacgctccatgtcagtttcatctgctcaaatagaggagagtggatttgagactgccactgtggcagatatttcgaagtctaaggggaagagtgctgatggatcttggctctggtgcactactgatgactctgtctatgatgctgtcaaatctatgacgcaacacaatgttggagctctggtgttgttaaacctggacaggataaatc

SEQ ID NO: 401267 - DNA, 422 bp, Oryza sativa nipponbare
ccacgcgtcgcgcccacgcgtccgaaccgccgccgcatcgccctcgttagaacgatggccgcgtcggcgctgcaccagaccaccagcttgctcgggagcgcccctcgccgggatgagctcgtccgccgcgtcggcgactccggtggccgcatcaccatgcgccgcaccgtcaagagcgcgccccagagcatctggtatggacctgaccgtcccaagtacctgggcccgttctcggagcagacgccatcgtacctgaccggagagttcccgggagactacgggtgggacacggcggggctatcggccgacccggagacgttcgcgaggaacagggagctggaggtgatccactcgcggtgggcgatgctgggggcgctgggctgcgtcttcccggagatcctgttcaagaacggggtgaagtt

SEQ ID NO: 401268 - DNA, 438 bp, Oryza sativa nipponbare
ccacgcgtccgctctagcacctcaccaagcagaaagctagagagctagcaatggcgcccaccgtgatggcctcgtcggccacctccgttgctcccttccaggggctcaaatccaccgccgggctccccgtcagccgccgctccaacagcgccggcctcggcagcgtcagcaacggtggaaggatcagctgtatgcaggtgtggccgattgaaggcatcaagaagtttgagaccctgtcgtacctgccaccgctcacggtcgaggacctcttgaagcagatcgagtacctgctccggtccaaatgggtgccttgcctcgagtttagtaaggtcgggttcgtctaccgtgagaaccacaggtctcctgggtactatgatggcaggtactggaccatgtggaagctgcctatgttcggatgcactgatgccacccaggtgc

SEQ ID NO: 401269 - DNA, 472 bp, Oryza sativa nipponbare
gcttgcacgcacgcaggcgccgttccgggattgcccctcgactccggcaggcgctgactatcctcaccatgtggtggaaagagctccaactccaggatcatctaagctttgcgcgagataggatggtggagatgcacttttggatgcttggagttctcttcgagcctcagtactcatatgggagaaccatgctcactaaattgttcatctttgtctcgattttcgatgacatctacgacaactacagcaccttggaagaaagcaagctgttcacagaagcaattgaaagatgggatgaggaagccgctgaagaacttccaggctacatgaagttcttctacaagaaagtactgaccaccatgaaatccatagaaactgatcttaaactccaagggaacaagcatgtcgactatgtcaaaaacctattaatcgacgctacgagatgcttttacaacgaggtgaaatggcgctc

SEQ ID NO: 401270 - DNA, 435 bp, Oryza sativa nipponbare
ccacgcgtccggacccaaaagatgtcaatgttccagttgttggtgggcatgctggagtgactatattacccctcctctcccaggtccaccccccatgctcatttaccccagatgaaatcagctatttgactaaacgcatacagaatggtggcacagaagttgttgaggcaaaggcaggagcaggctctgcaactttgtcaatggcttttgctgcagcaaaatttggtgatgcatgcttgcgagcaatgcgtggtgatgctggcgttgtggaatgttcatatgttgcatctgcggtgaccgagttgccgttctttgcaacaaaagtgaggttaggtcgtgctggagccgaagaggttctccctctggggccgttgaatgattttgagagagctggcttggagatggcaaagaaagagctgatggagagcattcaga

SEQ ID NO: 401271 - DNA, 431 bp, Oryza sativa nipponbare
  unsure (1)..(431): unsure at all n locations
ccacgcgtccggagagacactctcactgaacgaagctacctagcttaattacctagctactcgatcgatcatcagtctagatatggcggctttgaacggtaaggtggtggtggcggtgatggtggtggcgatggtgggtggcggcgccgggggcgtcggcggcgatcacgtgcgggcaggtggggtcggcgatcgcgccgtgcatctcgtacgtgacggggaggggcggcctcacccagggatgctgcaacggcgtcaaggggctgaacaacgccgcccgcaccaccgncgaccgncaggccgcctgccggtgcctcaagaccctcgccggcaccatcaagtctctcaacctcggcgccggcgccggcattcccggcaagtgcggcgtcaacgtcggcttcctcatcagcctctccactgactgcagcaag

SEQ ID NO: 401272 - DNA, 444 bp, Oryza sativa nipponbare
ccacgcgtccgcccacgcgtccggcgtcctggtggtgagaaaatctatcatgtctttgacaatcagtttcctgtagccattaaacggttgcagtttgacaaacaactggcaatggaaaatgtgaaaaagctcataacggaggctgatggataccaacctcatttaatagctccagagcaaggatatcgacggctcatagagtcttgtcttgttagtatcagaggtcctgctgaggcagctgtggatgcggtccatgcgatactcaaggaattagtgcacaaggccatcaatgaaacacatgagctgaagcagttccccactcttcgtgtggaagtaggcaatgcggcttttgagtcattggacagaatgagggatgaaagcaagaaaaacacattaaagcttgttgatatggaatgcagctacttaaccgtagatttcttcagg

SEQ ID NO: 401273 - DNA, 435 bp, Oryza sativa nipponbare
gatcgacccacgcgtccggccagacgagctgttagtgaacattgcagctgccgttggtacccacgtgaataagttcttgagttttcttcacgatgtgtcttgtgaaagaaacctgaagtactttgtgctggcaatcgctgaactgtgggctgcgactggtattgggggctgttgcaatttcttaactgtcatttacattgaatgctttagcgctcacacactgcccgtgctctacgagaagtctgaagatcaagttgatgatttactatacaatattcttggcctgctgagtgaccagtcttataaactagatcaaggtgtattgagcaagataccgaaagggaacatggagttcaagaagagcgcgtagattgtgtgcgttttaagaactgacatgatatattaactggattttgatcaatggaatgaatcaag

SEQ ID NO: 401274 - DNA, 409 bp, Oryza sativa nipponbare
ccacgcgtccgaccacacgtactacctgatcgagtacatgctgctgtccaagcgggtgcccagcatggagttcatcaaggaccgatagaactaccgagagaaccactactacgatggatactactatagcatgtactggatcatgatgaagctgtgcatgtacgcctgcactgacctcaccgagctgctgaaggagatcaaggaggacaataaggcataccctcatataatcgtctgtatcatcggctggcacaaccagatgatgatgcagatcatcaactagatcgcctacaagcacgagtgctgtgaggagtatgccggcaactaaatatatatcctcatatataggctcatttaatagttcatgattgattcgatgatgtctcccaccttgctaggtgtgttatca

SEQ ID NO: 401275 - DNA, 436 bp, Oryza sativa nipponbare
ccacgcgtccggcagggattaggattggcaattggagctagcctcttggatatcaagaaggcaacaactctagcttcagttacagtcatgacattcatgctagcaggagggttctttgtaaagagagttccaccattcatatcctggctccgctacctgtcattcaactaccacacgtacaggctactgctgaaggtgcaatatcatcctgtcccggacattctgatcaatgccatacctcttgacaacggcgtgacagaagttgtagctctggtcgcgatgatcatcggctacagggttctagcgtacatgtctctgagaagaacgaagacttcagccagctagcgaatcggtcgtcgagtgcactaacaggagtctggatttctgctaggatggcacccgttcttaccagatgattggacatagagaagtttgt

SEQ ID NO: 401276 - DNA, 431 bp, Oryza sativa nipponbare
ccacgcgtccgcggacgcgtgggcggacgcgtgggtgcaggtctgaggttcaaatatctgaccaaagtactaccccccttgccagattcagttccagaatgagacacagtaacaggtgacggaacacactgtcgtggttccatagcggttgcgtgcagagggcaagcagcttatgaagccaccccttgtttcatcagaggtgagattgagctaaaggtgatgaatttagaaacttcagtagctggcatcaactgaacttactagcaaatgctttattctgaaacctgacaagatctcaggaactaacaaaagaaaatccagtctttacgcacggacgttgggtgttcagtgagcagggcgttgcagagctaccattgctacttcagcatgaagaagcagtcagccaacaacatctgcagcaagcataggct

SEQ ID NO: 401277 - DNA, 438 bp, Oryza sativa nipponbare
ccacgcgtccggtgcgagatggaggagggcgccgacggcaagctctcccgccgctacgccgccgcgccggtgtgcaagtggctgacgcccaacgaggacggcgtctccatggccgccctcgccctcatgaaccaggacaaggtcctcatggagagctggtactaccttaaggacgcagtcctggacggcggcatcccgttcaacaaggcgtacgggatgacggcgttcgagtaccacggcacggacgcccgcttcaaccgcgtcttcaacgagggcatgaagaaccactccgtcatcatcaccaagaagctgctcgacctctacaccggcttcgacgccgcctccaccgtcgtcgacgtcggcggcggcgtgggcgccactgtggccgccgtcgtctcccgccacccgcacatccgggggatcaactacgacctcccc

SEQ ID NO: 401278 - DNA, 438 bp, Oryza sativa nipponbare
  unsure (1)..(438): unsure at all n locations
ccacgcgtccggtttctcagtatttgttgatgctgaatttctgattggtaatttctgtttcttgaagcaaattgatgaagcaaagcaggaaaagcctactcatatcaatgcttttcagttgattggaatggcttctgcccttgatctttcaggtttctttgaggaagaggatgcgtctcaaagaaagataaggttcacatcaacacattcaccaaaagatttattcgacaagattgagaatgttgtgacggagatgggattccaagtccagaggggtaatagcaagctaaaggtcatgaaaaatggcaggggttcaaagaacctcangaatccatcatcattcttggtctgtactgaggtagtcgagctcgggccatccttatatgttgtcgaattgaagaaatcccatggagatcctatattgtatagacagctatg

SEQ ID NO: 401279 - DNA, 440 bp, Oryza sativa nipponbare
ccacgcgtccggatctatccgaaagaaagtcctcttttgtcataattgggagaattattttcagcattttgggggcaatgatggctgcagtcgtaatttatactgtcatcactgatggactacctttcaggaaggacttgttgaccccgtggatggcggcaaccttaattgacttctatataaatgtcttcgcaatatcggtatgggttgctcacaaggagtcaaactggatatctactgccatctggatatgcttgttaatatgctttggaagcatcacgacatgtggctacattgtcatacaacttttccaagtgtcgtaccgagacccaatctatcatgtgctattgaactctcataacaagaagatttgaaaatatcattgaagagttatgttattcttggtatacaataatattacctcaataaatggtgtatcg

SEQ ID NO: 401280 - DNA, 439 bp, Oryza sativa nipponbare
ccacgcgtccgcccacgcgtccgctcctcgtctaccttacctagcagcagcagctagctagcttaattagctatagcagccatggcggcgacggcactgagcagccaggtccggttgccgatgtccctgcgggtggcgacggcgccggcgccggcgcgcgtgtcggtgctgccggcgagcaacaagctgggagacaggctgcggatgcaggcgacgtacaacgtgaagctgatcacaccggacggcgaggtggagctgcaggtgccggacgacgtgtacatcctggaccaggcggaggaggaagggatcgacctgccttactcctgccgcgcgggctcctgctcctcctgcgccggcaaggtggtctccggcgagatcgaccagtccgaccagagcttcctcgacgacgaccaggttgccgccggctgggtcctcacct

SEQ ID NO: 401281 - DNA, 440 bp, Oryza sativa nipponbare
ccacgcgtccgattaactaaacaaacaactataaaggcagttatagtgaaagttgcaggccgactcgcgggaaaagaaattgcacatgccaagtgcatcaaaaaaggcatactacccctccaaccaattctcgctacaattgattctagctgctatccaatttgaactatatatcgagcattatgagtaaaaatatgaatatacattgacaaagaataaccaaccctgtctccccattctgttcactattctaataaaaaatgacatgagccttattttgcctaaaatccctgaaaaaaagactaaatactacctctttctataccatttaatgaaaaatgaaaaatcttttaataaaattgctatgctaagtgcgagacttcgtaggtgactcgtagggttcaaaaaggggttcaaaaaagaattaaagaaccctacta

SEQ ID NO: 401282 - DNA, 397 bp, Oryza sativa nipponbare
gacgcgttctcaaggaagaagatggacgcgactgcccaggagctgtcggaggagaagacgctcgcttactcatgcctcaactaaaactaagcaatacccagagggacagatagtgagcgattgcccgctcccgtgtttttgaataaaagagacttttaagttccatcacatagaaactgtttatctcagaccgctgcacatcgcgagatgtggagcgcagatgccgttgctggttttactccagtgtgtattgaggctttgtactagctcccttttttttgcctggtgattcgcaggacatttgctgaaaacattgaacccatttgacatctgatggaatcatggaccagtagcaagtacattttgcgaaagcataatctgcatcgggcttgggctg

SEQ ID NO: 401283 - DNA, 436 bp, Oryza sativa nipponbare
ccacgcgtccgcggacgcgtgggcggacgcgtgggcggacgcgtgggcggacgcgtgggttcgagggaggcctcgagaacgtcatcaagaggcacaaccgcctcggcaccgccaccaggctggccgtggaggcgtgggggctcaagaactgcacgcagaaggaggagtggttcagcgacaccgtcaccgccgtcgtcgtgccgccgtacatcgacagcgccgagatcgtgaagcacgcctggaagcggtacaacctcagcctcggcctcggcctcaacaaggtcgccggcaaggtgttcaggatcggccacctcggccacctcaacgagctgcaattgatgggtgccctgagtggagtggagatggtgctcaaggacatcggctacccggtgaagctcggctccggcgtggcggcggcggcggcgtacctgtcgaa

SEQ ID NO: 401284 - DNA, 432 bp, Oryza sativa nipponbare
cgcgtccgcccacgcgtccgcccacgcgtccgcaagaagtactcgagcaaagaaggagagagcttggtgagctgcagagatggccccctccgtgatggcgtcgtcggccaccaccgtcgctcccttccaggggctcaagtccaccgccggcatgcccgtcgcccgccgctccggcaactccagcttcggcaacgtcagcaatggcggcaggatcaggtgcatgcaggtgtggccgattgagggcatcaagaagttcgagaccctctcctacctgccaccgctcaccgtggaggacctcctgaagcagatcgagtacctgctccgttccaagtgggtgccctgcctcgagttcagcaaggtcggattcgtctaccgtgagaaccacagatcccccggatactacgatggcaggtactggaccatgtggaagct

SEQ ID NO: 401285 - DNA, 430 bp, Oryza sativa nipponbare
ccacgcgtccgcccacgcgtccgggctactccttccttgctcttctctagcccaacccccaggaggccttcctcctgcttgcctcctcctcctccttgcagcagcagcagcagcagctacgcctcccatggtttcaagctgctgcagccgcagttgctgttcatcaatcggctaaccagcagaaacagcaacgggagtagcagaagaagcatttccattttgtcgctgaggtgctcttccagtggcactgacagcgcgtcttcttccgccacttcagaaagatgggttctcgagcctgcaggagacggcgattggcgtcatatcgggtaccgcgtcgcacgacccggcggcttccagatagcatccgaggcggcggtgacggtgggtcgggttcctgaacaggctgacatcgtcctgtctgtcgcaacag

SEQ ID NO: 401286 - DNA, 423 bp, Oryza sativa nipponbare
ccacgcgtccgggtaaataacactgatgcggagggaaggcttacacttgctgatgctttggtgtacgcttgtaatcaaggtgttgacaagattattgatctggcaacacttactggtgcatgtgtcgttgcacttgggcctagcattgctggaattttcacgccaagtgatgaactagctaaggaagttgctgcggcatctgagatatcaggagagaagttctggagaatgccactcgaggaaagctactgggagtcgatgaagtctggtgttgctgacatggttaacaccggtggccggcagggtggttctattactgctgcactcttcctgaaacagtttgtggatgagaaggtgcagtggatgcacattgacatggccgggccagtgtggaacgacaagaagcgggcggccaccggattc

SEQ ID NO: 401287 - DNA, 434 bp, Oryza sativa nipponbare
ccacgcgtccggagcaaataaggagagagcttggtgagctgcagagatggcccactgcgtgatggcggcgtcggccaccaccgtcgttcccttccaggggctcaagttcaccgcccgcatgcccttcgcccgccgctccagaaactccagcttcggcaactgcagcactggcagcaggatcaggtgcatgcaggtgtggccgattgaggtcatcaagatgttcgagaccctctcctacctgccaccgatcaccgtggaggacctcctgaagcagatcgagtacctgctccgtttcaagtgggtgccctgcctcgagttcagcatggtctgattcggctaccgtgagaaccacatatcccccggatactacaatggcaggtactgcaccatgtggaagctgaccatgttcgggtgcactgacactacccaggtgc

SEQ ID NO: 401288 - DNA, 441 bp, Oryza sativa nipponbare
ccacgcgtccgaaaaaaatcctattcaaatcgaaacccctctctttgatctcgtcgccgaggaattaggaggagagagagcaatggccgccgaggagggagtcgtgatcgcctgccacaacaaggacgagttcgacgcccagatgaccaaggccaaggaggccggcaaagtggtcataattgacttcactgcttcctggtgtggcccttgccgcttcatcgccccagtgttcgctgaatacgccaaaaagttccctggtgctgtcttcctgaaggttgatgttgatgagctgaaggaagttgctgaaaagtacaatgtcgaggcaatgccgaccttcctattcatcaaggatggtgctgaggctgacaaggtcgttggcgccaggaaggatgacctccagaacaccatcgtgaagcacgtcggtgccactgctgcatctgc

SEQ ID NO: 401289 - DNA, 431 bp, Oryza sativa nipponbare
ccacgcgtccgtaattaagcaaaagaagaagaagaagaaagaagaagaagaagatgcagaccgctgctagcagtgtcgttggattgtcggccgtgttgcccgctgctgtgaaggggcgcagcctgcagattcaggctcctcgccgtgttgcgttgcgcgttcgtgcggcggcggcggcggtggcagtggaggctgcggaggtggactacagctctaacatctcggtgtttccgatggaggcgtgcgacctcatcggcggcgaggcgtgcaacgtgcagatgtacccagaggccaagctctcatcatcggctgctgttgctgtttctcgtgcggcggcggaggaagtcgacagggactacctatcctacgacgagcccaccacggtgttccccgaggaggcgtgcgacgatctgggcggagagttctgcaag

SEQ ID NO: 401290 - DNA, 434 bp, Oryza sativa nipponbare
  unsure (1)..(434): unsure at all n locations
ccacgcgtccgcggactcgtgggctcaggcaggcaatcagcggcgaggcaccagcccaccggccggcaatggcgtccacctcctgcttcctccaccagtccacggcccgcgtctccgcgcgcgtcgcctccccgtccccggcgacacggacccacctcctcgtctgccgcgcccagaagcaggacgacgccgacgtctcccgccgcgcggcgctcgcgctgctggccggagcgacggcggcggtgggggtgaaggtggcgcccgccgccgcggcctacggcgaggcggcgaacgtgttcgggaagcccaagacgaacacggagttcatcgtctacagcggcgaggggttcaagcttgctgatcccctcccagtggaaccncagcaaggagcgcgagttccccggacaggtccttcgttacgaggacaacttcga

SEQ ID NO: 401291 - DNA, 413 bp, Oryza sativa nipponbare
ccacgcgtccgcccacgcgtccgccacgcgtccgcttcgatgcatacagacacgagaccacggctttgcaactacatgcgggggccgggtccccaagcatctcatagaggagaaggttatagaatgtgttcactgtggatgcagaggctgtgccagcggtgattgagatatcgtcattatcttgtttgaatctgtcaaactaagcagacataatgtttcttgagcgaaatttcggctaaaaacgtttacgaaaacgttttgtaaacccgtctaccgggtatgacgttatttaagtacctgagattgtggttacggtctgcattaatctgccgtatggtcattgcttgatcatcggcctcaacaccctgcatatgtgtattctaaagtgttttaatggaaacatctgttactcg

SEQ ID NO: 401292 - DNA, 428 bp, Oryza sativa nipponbare
ccacgcgtccgcggacgcgtggggcacaacaatgtatcgaggagcttcagtgtcctgagtactactctgagattgtgaaagaagctatcaatcttgctttggataagggtcccaacttcattgatcctcttgttaggctgctggagcatctgcacgccaagaaaattttcaagactgaggacctgaaaactggatgcttactgtatgcagccctgctggaagatattggtattgaccttcctctagctccagccttgtttggtgaagttgttgcacgactgagtttgtcgtgtggcttgagctttgaagttgttgaggagattctaaaagcagtggaggatacatacttccgcaaaggaatttttgatgctgtcatgaaaaccatgggcggaaactcttcaggtcaggctatattgagctcgcatgct

SEQ ID NO: 401293 - DNA, 423 bp, Oryza sativa nipponbare
ccacgcgtccgagcacacctaccaggacaggtgggaggggattgcatacgatatgttcgatgaccagtatgacatgaccagggtgaagggtggcgtccactaccttttgcaggctggtacgagtgatgggatcgacgaggtcgttctaagctactacgagagcgtaatcctgggtctgactacgtacgacaccgactacaacgtgtgaggcttgtacataggccatggtagagtggacaagctggctgtctacatctacatgaactaaatgacgcttgccagcatataagtgctactcatcctgggtatttgcggaggcacgggacaagccaaattctttcagtgagagctagtctttgacaagatcgggatcaaccgcatcatgatgagcgcctgatagctgcagaggggctaccccagata

SEQ ID NO: 401294 - DNA, 444 bp, Oryza sativa nipponbare
ccacgcgtccgcagtctccccctttctgaacacagcaccaccccttctgctgcatctcccacctccctctgaattgtgggcctgaggcgatggcggcgctcgccccgtccaagatgctcggcacccggctcaacttcgccggctcctcccgctacgccaccgcggcaccgaccaccggagcgcagaagatcgtctccctcttcagcaagaagcccgccccgaagcccaagcccgccgccgtcacctcctcgagccccgacatcggcgatgagctcgccaagtggtacggccctgacaggaggatcttcttgccggagggtctcctggaccgctcagaggtgccggactacctcaacggagaggtccccggagactacggctacgacccttttggcctcagcaagaagccagaggacttctccaagtaccaggcctatgagctga

SEQ ID NO: 401295 - DNA, 440 bp, Oryza sativa nipponbare
  unsure (1)..(440): unsure at all n locations
ccacgcgtccggttccaggtatcaaggtcgacaagggtcttgtgccccttgctggctccaacaacgagtcatggtgccaaggtctcgacggccttgcctcgcgcgaggcggcatactaccagcagggcgctcgcttcgccaagtggcgcactgttgtcagcatccccaacggcccatctgaactcgccgtgaaggaggctgcctggggccttgcccgctacgccgccatttctcaggacaacgggctggtgccgattgtcgagcctgagatcctcctcgacggtgagcatggcatcgacaggaccttcgaggtggcgcanaaggtgtgggcggagaccttcttctacatggccgagaacaatgtgatgttcgagggcatcctcctcaagccaagcatggtgacacccggtgccgagtgcaaggacagggccacccctgag

SEQ ID NO: 401296 - DNA, 437 bp, Oryza sativa nipponbare
ccacgcgtccgcagctctcacagctcactgcatcaatggccgcggccaccatggcgctctcctccccggtgatggcccgcgcggcgccgtcgacctcctccgcgctcttcggcgaggcgcggatcaccatgcgcaagaccgccgcgaagcccaagccggcggcgtcgtcggggagcccgtggtacggcgccgaccgcgtcctctacctcggcccgctctccggcgagccgccgagctacctcaccggcgagttcccgggcgactacgggtgggacaccgcggggctctccgccgacccggagacgttcgccaagaaccgggagctggaggtgatccactcccggtgggcgatgctgggcgcgctcggctgcgtcttcccggagctcctcgcccggaacggcgtcaagttcggcgaggcccggtggttcaaggcgggc

SEQ ID NO: 401297 - DNA, 436 bp, Oryza sativa nipponbare
ccacgcgtccgcggacgcgtgggtgcgcaagtcggcggcgaagcccaagcccgccgcgtcggggagcccgtggtacggcgccgaccgcgtgctctacctcggcccgctctccggcgagccgccgagctacctgaccggcgagttccccggcgactacgggtgggacaccgcggggctctccgccgacccggagacgttcgccaagaaccgggagctggaggtgatccactccaggtgggcgatgctcggcgcgctgggctgcgtgttcccggagctcctcgcccgcaacggcgtcaagttcggcgaggcggtgtggttcaaggcggggtcgcagatcttcagcgagggcgggctcgactacctcggcaacccgagcctgatccacgcgcagagcatcctcgccatctgggcggtccaggtggtgctcatgggcgcc

SEQ ID NO: 401298 - DNA, 436 bp, Oryza sativa nipponbare
ccacgcgtccgcgccatctctctcagctctcacagctcactgcatcaatggccgcggccaccatggcgctctcctccccggtgatggcccgcgcggcgccgtcgacctcctccgcgctcttcggcgaggcgcggatcaccatgcgcaagaccgccgcgaagcccaagccggcggcgtcgtcggggagcccgtggtacggcgccgaccgcgtcctctacctcggcccgctctccggcgagccgccgagctacctcaccggcgagttcccgggcgactacgggtgggacaccgcggggctctccgccgacccggagacgttcgccaagaaccgggagctggaggtgatccactcccggtgggcgatgctgggcgcgctcggctgcgtcttcccggagctcctcgcccggaacggcgtcaagttcggcgaggcccggtg

SEQ ID NO: 401299 - DNA, 440 bp, Oryza sativa nipponbare
ccacgcgtccgcaagaatctcgaaggatggtgctacgagtgtggagatcgtccaccgtcttctccacctccggtcaccgtcgccgttgccgaatccaccccctccgttcttggagctgattgagccatcgccgttcacccggaggttcttgccgccgccgagccgttacacgagccgccgtcatcaacctagctaccccagccatgtctagcatctcgatgattgcttaatcggtgaagaagtgatttaggtgctgacattttcctgattcaaggatttagacttagtctttgagtgatgcgggttatcgactgcttcttctaggacttgaacataatgggtaaacccctagtcggtgtgcttgtggattgggtagacaagcttccgctgttctattatttatttggccggtcggccaatgtaactaaagtagatgcttt

SEQ ID NO: 401300 - DNA, 444 bp, Oryza sativa nipponbare
ccacgcgtccgcccacgcgtccggagggatatggcagagcgcggtcacagccttgaaagcatcaaggctagtatcgaagccaggaaaccagattttgatgccttcattgatccccagaagcaatatgctgatgcagtgattgaagttctgccaacccagcttattcctgatgacaatgaaggaaaggtgctacgtgttaaattgatcatgaaagaaggtgtaaagaacttcaacccagtttacctcttcgacgaaggatcaagcatcacctgggtcccttgtggaagaaaactcacatgttcttatcctggcatcaaatttgcctatggcccagacacttactttgggcatgaggtatcagtgctggagatggatggccaatttgacagactagatgagcttatctatgttgagagccatttaagcaacctctcaaccaaattt

SEQ ID NO: 401301 - DNA, 443 bp, Oryza sativa nipponbare
ccacgcgtccgaatatagattcatacagaggaaaaggttctctattgatgcaaacgctgtacctagaggatagggatagaggaagagggaaaaatcgaaatgaaataaataaagaataaagcaaaaaaaaaataagtcgaagatagaagagcccagattccaaatgaagaaatggaaactcgaaaaggatccttctgattctcaaagaatgaggggcaaggggactgataccgagaaagatttcttcttattataagacgtgatttgatccgcatatgtttggtaaaagaacaatcttctcctttaatcataaatggaaagtgttcaattagaacatgaaaacgtgactcaattggtcttagttagtcttcgggacggagtggaagaagggcggagactctcgaacgaggaaaaggacccttcgaaagaattgaacgaggagc

SEQ ID NO: 401302 - DNA, 443 bp, Oryza sativa nipponbare
ccacgcgtccgcccacgcgtccgcccacgcgtccgcccacgcgtccgcggacgcgtgggtcgccatctctctcagctctcacagctcactgcatcaatggccgcggccaccatggcgctctcctccccggtgatggcccgcgcggcgccgtcgacctcctccgcgctcttcggcgaggcgcggatcaccatgcgcaagaccgccgcgaagcccaagccggcggcgtcgtcggggagcccgtggtacggcgccgaccgcgtcctctacctcggcccgctctccggcgagccgccgagctacctcaccggcgagttcccgggcgactacgggtgggacaccgcggggctctccgccgacccggagacgttcgccaagaaccgggagctggaggtgatccactcccggtgggcgatgctgggcgcgctcggctgcgtcttcccgga

SEQ ID NO: 401303 - DNA, 442 bp, Oryza sativa nipponbare
ccacgcgtccgcccacgcgttcggagcagggtgttgattacttcacaaaccatgctggcgtgcttcttcgttacattcctcttaccgcaaagagaatgaccggcatagtttcacgtggtggctctatccatgcaaaatggtgcctaacatatcataaggagaactttgtctatgagcactgggatgaaattctggatatttgcaatcagtatgatgtggcattatccattggcgatggtttgagaccaggttctatttatgatgcaaatgatagtgctcagtttgcagaattgctgactcaaggggaactcacacgccgagcttgggcaaaagatgtgcaggtaatgaatgaaggcccagggcacattccgatgcataaaattcctgaaaacatggagaagcaactggagtggtgcaatgaagcacctttctacacactggg

SEQ ID NO: 401304 - DNA, 438 bp, Oryza sativa nipponbare
ccacgcgtccgcccacgcgtccgcccacgcgtccgcggcgaagtgatctactgcaattcccaagtgatcagattagacaacacgaaggtgttctttggtactttccaggtgattttttgctgggaccgcatcaaggaaaacaaaataacaactggcatacttgtgaagcaccgaagtgcccccaaagactgcgattttgtggaagctctgcccaaggcatcttttgaaacgaagtttcacatgatcgtggaggattcttctttgcgcccttgcacttgcacgccctagttaaccacccccctgtaaattggtttgctgacgctaggttgctatttgcagaggcagtgaagacacacttctaaacttctccattcctgtacaggattcgtgtcctatgtaatcgtatttttggttctggacacattagttcttacattt

SEQ ID NO: 401305 - DNA, 432 bp, Oryza sativa nipponbare
ccacgcgtccgcgccggcatgcccgtcgcccgccgctccggcaactccagcttcggcaacgtcagcaatggcggcaggatcaggtgcatgcaggtgtggccgattgagggcatcaagaagttcgagaccctctcctacctgccaccgctcaccgtggaggacctcctgaagcagatcgagtacctgctccgttccaagtgggtgccctgcctcgagttcagcaaggtcggattcgtctaccgggagaaccacagatcccccggatactacgatggcaggtactggaccatgtggaagctgcccatgttcgggtgcactgacgccacccaggtgctcaaggagctcgaggaggccaagaaggcgtaccctgatgcattcgtccgtatcatcggcttcgacaacgtcaggcaggtgcagctcatcagcttcatc

SEQ ID NO: 401306 - DNA, 437 bp, Oryza sativa nipponbare
ccacgcgtccgcccacgcgtccgcccacgcgtccgggctggcctcctacgtcgccgggcagatcgatcgcacgctcagctggaaggatgtgaagtggctgcagagcatcacgtcgctgccgatcctcgtcaagggcgtcatcaccgcggaggatgcgaggctggccgtgcactccggcgcggcggggatcatcgtgtcgaaccacggcgcgcggcagctggactacgtcccggcgaccatcagcgccctggaggaggtggtcacggcggcggcggggcgcatcccggtgtacctcgacggcggcgtccgccgcggcaccgacgtcttcaaggcgctcgccctcggcgccgccggcgtcttcatcgggaggccggtggtgttcgcgctggcggcggagggggaggccggggtgaggaacgtgctgcggatgatgcggg

SEQ ID NO: 401307 - DNA, 438 bp, Oryza sativa nipponbare
ccacgcgtccgcccacgcgtccgcccacgcgtccgcgccgctccaacagcgccggcctcggcagcgtcagcaacggtggaaggatcagctgtatgcaggtgtggccgattgaaggcatcaagaagtttgagaccctgtcgtacctgccaccgctcacggtcgaggacctcttgaagcagatcgagtacctgctccggtccaaatgggtgccttgcctcgagtttagtaaggtcgggttcgtctaccgtgagaaccacaggtctcctgggtactatgatggcaggtactggactatgtggaagctgcctatgttcggatgcactgatgccacccaggtgctcaaggagctcgaggaggccaagaaggcatatccagatgcatttgttcgcatcatcggcttcgacaacgtcaggcaggtgcagttgattagcttcatcg

SEQ ID NO: 401308 - DNA, 436 bp, Oryza sativa nipponbare
ccacgcgtccgaccactgctagcttgggaagaggaggaggagcttgagcttggagagagacaacaatggcggctcaggctcttctctctgggaggcagctgctggggaggccattgcaatcttcagtctccaggtcttcttcctccaggaaggcacccttcatggtcagggcagaggccactccccctgccaagcaaggtgctgacaggcagctgtggttcgcatccaagcagtccctgagctacctggatggcacgcttccgggagacttcgggttcgacccgctggggctatcggacccggaggggaccggtgggttcatcgagccacggtggctggcctacggcgaggtgttcaacggccggacggcgatgatgggcgtcgtcggcatggtcgccccggagctcctcggcaagctgggcctcgtccccgccga

SEQ ID NO: 401309 - DNA, 92 bp, Oryza sativa nipponbare
ccacgcgtccgcggctatatacacacaagatatgtatctagagcatatctgataaattcgtcgacaataaaaaaaatggatggtatcacgta

SEQ ID NO: 401310 - DNA, 443 bp, Oryza sativa nipponbare
ccacgcgtccgcccacgcgtccgcccacgcgtccgcccaccgcgagtagcaacagcggcggtggcggcggcgacctgcgatctcgcagccgaggcagggcggcggctacctgccctaccatgagcagcaacggcaatggcggcgccctcccccaccgctagcggtggctgcggtggctcccttcgctacttccgctgggtggattcggcggcagcggtgtcctacgggtcgatggagcggcctcggcgatggcgtgtcttgagccgctggcgctcacctctcctccccatctttctcagcggtggccggtgatctcgcgaccaacgcagggcggtggctccttcccccaccgcgagcaatggcggtgccctccctgtcgtgagcggccgtggcggtgccctcgcccaccgctagcggtggcggccttccccaccgcgagcagc

SEQ ID NO: 401311 - DNA, 408 bp, Oryza sativa nipponbare
ccacgcgtccgccacgcgtccgacaagctgctgcagacgaggatcttctcctactccgacacgcagcgccaccgcctcggaccaaactacctgctgctcccgcccaacgcgcccaagtgcgcccaccacaacaaccactacgacggcttcatgaacttcatgcaccgcgacgaggaggtcgactacttcccatcccgctacgatcctgccaagcacgccccccgctaccccatcccctccgccaccctcaccggccgccgcgagaaggtggtgattgccaaggagaacaacttcaagcagccaggggagaggtaccgttcatgggatccggcaaggcaagaccggttcatcaagagatggatcgacgcactttttgaccttggcctaacccacgagatcaggagcatt

SEQ ID NO: 401312 - DNA, 431 bp, Oryza sativa nipponbare
ccacgcgtccgcgaatccaccacacggtaccctcctctctcctcctccgaccaccatggccatggccacgcaagcctccgccgccaagtgccacctcctcgccgcctgggcaccggcgaagccgcgctcatccaccctctccatgcccacctcgagggcacccacctccctcagagcggcggcggaggatcagcccgccgcggcggcgacggaggagaagaagccagcccccgcggggttcgtgccgccgcagctggaccccaacacgccgtccccgatcttcggcgggagcacggggggactcctccggaaggcgcaggtggaggagttctacgtcatcacatggacgtcgcccaaggagcaggtgttcgagatgcccacgggcggcgccgacatcatgcgcgagggccccaacctgctgaagctggcca

SEQ ID NO: 401313 - DNA, 429 bp, Oryza sativa nipponbare
ccacgcgtccgcggacgcgtgggcggacgcgtgggcaagcttcttgaagcaactggaatatccactgttccagggtcaggtttcggacaaaaagaaggggtgttccacctgaggacgaccatcctgccagctgaggaggacatgcctgccatcatgaccagcttcaagaagttcaacgacactttcatggatcagtacgatggctactccaggatgtgaaatgaaaacaagatgagcactaccccaggagaagagagaaagaatctgcctcagcgtggctgatcgagcagttataattaaaaggcactgttaattaattaattaatcaatcaatcgaaaggctaattatttgctgcaacaatctgtaactcgatctactgaaggaaaaaaaaaacttcttgtccttgaaaaaaaaaaaaaaaagggcgg

SEQ ID NO: 401314 - DNA, 435 bp, Oryza sativa nipponbare
  unsure (1)..(435): unsure at all n locations
ccacgcgtccggttcgaggaggaggaggaggaggagaagctagcggcggcggcggcaatggcgacgagcgggctgaggagctgcagcgcggtgggcgtgccnagcctgctggcgccgtcgtcgaacaggagccgcctgccggtctgcgcctacgccaccacctccgggcgcgtcaccatgtccgccgagtggatgccgggccagccacgccccgcccacctcgacggctcctctcccggtgacttcgggttcgacccgctgggcctcgccaccgtgccggagaacttcgagcggttcaaggagtcggaggtgtaccactgccggtgggccatgctcgctgtgcctggggtgttggtgccggaggcgctggggctgggcaactgggtgcaggcgcaggagtgggcggcggagcccggcggccaggccacgtacctc

SEQ ID NO: 401315 - DNA, 436 bp, Oryza sativa nipponbare
ccacgcgtccgcccacgcgtccgaatgaccaaatgatcatccatcctaagttcctaaccatcagtagtagtagtagcagcatcaactatacatgtaattgaaattgatggtggtgacaagtgtgtgtagagcagtggagtctgaaacttggtgctgtcccatttggtccagctcctactctgtgggtggagcggagctgagaaaatgccatttcacgtacttcctccgtttcacaatgtaagtaattgtaacatttctcacatttaaattgatgttaatgaatctatatagatatatatgtctagattcattaacatcaatatgaatgtgggaaatactagaatgacttatattgtgaaacggatgaagtataatttccggtttggcagctgtttggcagctccactctaatactttatgttatccatgattttga

SEQ ID NO: 401316 - DNA, 434 bp, Oryza sativa nipponbare
ccacgcgtccgaagctgacaggcgtcaccggtggagaccaagttgctgctgccatgggcatctatggccctcgcactacttacattatcgctctcaaagattgtcctggaactcatgaattccttcttcttgatgaaggaaaatggcagcatgtcaaggacaccacaaccattggagaggggaaaatgttctctactggtaacctgagggctacatttgataatcctgaatatgacaagctcatcaactactatgtcaaggagaagtacacattgcgttacactggaggaatggttcctgatgtcaaccagatcatagttaaggagaagggcatcttcaccaacgtgacgtctccgacagccaaggccaagctgaggctcctgttcgaggcggcgccgttgggtttcttgatagagaaagccggcgggtacagc

SEQ ID NO: 401317 - DNA, 444 bp, Oryza sativa nipponbare
ccacgcgtccgcccacgcgtccgcggacgcgtgggtgatgtgggaacatatacaatcaaatcaatcgatgatcctcgcaccttgaacaagacaatatacataagaccacaagataattgcctcactcataacgagctgatcgcaatgtgggaaaaactctctggaaaaagtcttacgaaattccacatacctgctgaagaatttttggctccaatgaaagatatgcaatttgcttttcaagtgggaataacacatttctaccacattttctacgagggttgcttaacaaactttgacattggtgacaatggagccgaagcaactatactgtacccagaggttcagtacacccgcattgatgaattcctgaaacgctatctgtaacggagtatacctaaattttataaatatttatgttggtttatggtttggcagcttgctttg

SEQ ID NO: 401318 - DNA, 441 bp, Oryza sativa nipponbare
ccacgcgtccgcttccatggcgacaaggatcacggcggcatccacgatggcaccgagatcgtgctgtggaagtggtgcgagggtgacaaccagcgctggaagatcctcccctggtagattccggggagggggagctgcattgcattgccatcgtcgtcgcgtctgctctgcttctactctagctaataatttgatcgatctgctaccgaaataagaccgtgttcgttcgttcgatcgatcggagtatggcagtcaatggtgtccgtccgtcctcgagtttgtgtcagtgtgtgtccttttgcgagccagtgattgctatgagatgaaacagtgggtgatgtaagtgcaggaggaggggccatatgattcagaaatctgatgcaactcatcttgctttcccctgtactctctacttttcgtatgcctaatgaatgaattatg

SEQ ID NO: 401319 - DNA, 417 bp, Oryza sativa nipponbare
ccacgcgtccggcccgtcgcccgccgctccggcaactccagcttcggcaacgtcagcaatggcggcaggatcaggtgcatgcaggtgtggccgattgagggcatcaagaagttcgagaccctctcctacctgccaccgctcaccgtggaggacctcctgaagcagatcgagtacctgctccgttccaagtgggtgccctgcctcgagttcagcaaggtcggattcgtctaccgtgagaaccacagatcccccggatactacgatggcaggtactggaccatgtggaagctgcccatgttcgggtgcactgacgccacccaggtgctcaaggagctcgaggaggccaagaaggcgtaccctgatgcattcgtccgtatcatcggcttcgacaacgtcaggcaggtgcagctcatcagc

SEQ ID NO: 401320 - DNA, 423 bp, Oryza sativa nipponbare
ccacgcgtccgtcttgcaactggtcttattttagtgtcatgttgccctggtggacaagcatcaaatgttgctacttatatatccaaaggaaatgtcgcactttcagttcttatgacaacttgttcgactattggtgctatagtgatgacaccactccttactaaactcctagctggtcaactggttcctgtcgatgctgcaggattggccatcagtacttttcaggttgttttactgccaactattgtcggagtcttggcgcatgagtattttcctaagtttactgagcgcattatatccataacaccattgattggggttctcctcaccactttgctttgtgctagtcctatcggacaagtctcaagagtgttgaaagctcaaggggtcaacttataattcccgttgctctgcttgatgttg

SEQ ID NO: 401321 - DNA, 436 bp, Oryza sativa nipponbare
ccacgcgtccgcccacgcgtccggtcggcgacgacctcaaccaccgcaacctgatggcgctggcgcggcggttcggcgacatcctcctcctccgcatgggcgtccgcaacctggtggtggtgtccagcccggacctcgccaaggaggtgctccacacccagggcgtcgagttcggctcccgcacccgcaacgtggtgttcgacatcttcaccgggaaggggcaggacatggtgttcaccgtgtacggcgaccactggcgcaagatgcggcggatcatgacggtgcccttcttcaccaacaaggtggtggcccagaaccgcgcgggttgggaggaggaggcgaggctggtggtggaggcgtccgccgcgaccccgccgcggcgaccttcggcgtggtgatccggcgaaggttgcagctgatgatgtacaacgacatg

SEQ ID NO: 401322 - DNA, 435 bp, Oryza sativa nipponbare
  unsure (1)..(435): unsure at all n locations
ccacgcgtccgtacaaacgcccacatcacacgcagaaatccgcatcaacagccagccatggcgtccacgctgaccaacgtcggcctgtctaccccggcggcggcggcgtcgtccctcgttaggccggtcgccggagctggacgcgtggtgtttccccgtgttggccgcggcgggttcgcggcggtgagggcgagcgggccggcgacgccgccggacatctcggacaagatgtcggagagcatcgacaaggcgaaggaggcgtgcgcggaggacacggcgagcggcgagtgcgcggcggcgtgggacgaggtggaggagctgagcgcggcggcnagccacgcgcgcgacaagctcaaggagacctccgacccgctcgaggcctactgcaaggacaacccggagaccgacgagtgccgcacctacgacaactgattc

SEQ ID NO: 401323 - DNA, 432 bp, Oryza sativa nipponbare
ccacgcgtccggccggagccggaggagacggcggcggcgagctgaagcttctggggacgtgggcgagcccgttcgtgcagcgggtgcgcctcgcgctgaacctcaagggcctcgcgtacgagttcatcgaggaggagatcggcggcggcaagagcgagctcctcctcgcctccaaccccgtccacaagaaggtccccgtcctcctccaccgcagcaaccccatctgcgagtcccaggtcatcgtccagtacctcgacgacgccttccccggcggcgccgccggcggcgacctcctcccctccgacccccacgcccgcgccgtcgcccgattctgggcggcgtacatcgacgccgagttcttcgcgccgtggaacaggtcgttctacacggcgtcggaggaggagaagacggcggagatggggagggcggcgg

SEQ ID NO: 401324 - DNA, 441 bp, Oryza sativa nipponbare
ccacgcgtccgcccacgcgtccgcggacgcgtgggcgacgccatccactccgacaaggcccgtggcctcctcgagatgtaccgcatcggcgagctcatcgtcaccggcagcgactactcgccgcagagcagcagtgctgacctcacgtccatcgttgagagccctacggcagcggcggcgcccgccgtgccggtgtcgaccgtcgcgctgtccaacccgcgggagaaggtgaaatgccggctcatggacaagaagagcctgtcctacaacgtgcgcctgttccggttcgcgctgccgtcgccggaccagaagctcgggctaccggtcggcaagcacgtgtacgtgtgcgcgtcgatcggcggcaagctctgcatgcgcgcgtacacgccgacgagctccgtcgacgaggcggctacatcgagctcctgatcaagatatact

SEQ ID NO: 401325 - DNA, 436 bp, Oryza sativa nipponbare
ccacgcgtccgcttcctacttcgtcttcttgctggtgtgttcgaggaggaggaggaggaggagaagctagcggcggcggcggcaatggcgacgagcgggctgaggagctgcaccgcggtgggcgtgccgagcctgctggcgccgtcgtcgaacaggagccgcctgccggtctgcgcctacgccaccacctccgggcgcgtcaccatgtccgccgagtggatgccgggccagccacgccccgcccacctcgacggctcctctcccggtgacttcgggttcgacccgctgggcctcgccaccgtgccggagaacttcgagcggttcaaggagtcggaggtgtaccactgccggtgggccatgctcgctgtgcctggggtgttggtgccggaggcgctggggctgggcaactgggtgcaggcgcaggagtgggcggcgg

SEQ ID NO: 401326 - DNA, 359 bp, Oryza sativa nipponbare
ccacgcgtccgcccacgcgtccggggggttgatgcggtgcgcgtcgacgggggcgtgcagggtggcgccgtgcgccgaggcggcgagggcctctgcaagagtggtgggaggagggacaacgaatgtgccggcagggcacgtgccggtggaggggggagcacacgagaaggatacaaaacggtaaaatgttctatacgggtaacctgcgggctacatttgataattgtgagtatgacaagttcatcaactactatgtcatggagaagttcacattgaggtacattggaggaaaggtttttggtgacaaccatatcaaaaatgaggagataggcatttttaccaacgtgacgtgtactaca

SEQ ID NO: 401327 - DNA, 437 bp, Oryza sativa nipponbare
ccacgcgtccggccacgcgtgcgaactaatcagatatctaacgggagaaattatgtctgatactctctcgcgggcggtggaagcaatcgtagttagcataggccggcgagcgagccggcacccgagatgggagacagccaggactactgctagctcaccaccttcagcccgaccgggaagctggtgcagatcgagcacgcgctgacggacgtcgggtccggccagacctccctcgggatcaaagctgctaacggagtagctattgccaccgaaaagaagacgccttctattttagcggatgaaacatcggagcaaacgattcagccgatgactccaaatattgctgctgactacagtggcatggacccagacttgcgtgctgtagtgaggaaaagacggaagcaagcacaacagcattatcgtctgtacaaggaaac

SEQ ID NO: 401328 - DNA, 440 bp, Oryza sativa nipponbare
ccacgcgtccgcccacgcgtccgaactaagtcaggtgttaggcttgtgagaggcattgtgaaggatgtacaacccaacaaattaatcctggacaatggagaagaggttccttatggtttgctggtatggtctactggagttggtccttcatcattcgttaagtcgttgccatttccaaagtcaccaggtggaaggattggggttgatgagtggttacgtgttccttctgcccgggatgtgttcgctattggggattgcagtggatttcttgaaagcacaggcaaggatgttctcccagctttagctcaggttgcagaacgacaaggcaagtatctagctcacctgcttaaccatgtcatgaaagctggaggagggcatgcgaactgggagatcgagttgatctaggtcctgcctttgtgtataagcatctggggagcatg

SEQ ID NO: 401329 - DNA, 439 bp, Oryza sativa nipponbare
ccacgcgtccgcccacgcgtccgctcgacaagcacaggcacccggcgctactactggtggacggggtgtcatcgatatgtgcgttggacttccgcatggatgagtggggagtggacgtggcgctgacgggttcgcagaaggcgctctcgctgccgacgggtctgggcatcgtgtgcgcgagccccaaggcgctggaggcgagcaagacggccaagtcggtgcgggtcttcttcgactggaaggactacctcaagttctacaagatgggcacctactggccctacaccccatccatccagctcctctacggcctccgcaccgccctcgacctcatcttcgaggaaggcctcgagaacgtcatcaagaggcacaaccgcctcggcaccgccaccaggctggccgtggaggcgtgggggctcaagaactgcacgcagaagga

SEQ ID NO: 401330 - DNA, 434 bp, Oryza sativa nipponbare
ccacgcgtccgggaggagcttgagcttggagagagacaacaatggcggctcaggctcttctctctgggaggcagctgctggggaggccattgcaatcttcagtctccaggtcttcttcctccaggaaggcacccttcatggtcagggcagaggccactccccctgccaagcaaggtgctgacaggcagctgtggttcgcatccaagcagtccctgagctacctggatggcacgcttccgggagacttcgggttcgacccgctggggctatcggacccggaggggaccggtgggttcatcgagccacggtggctggcctacggcgaggtgttcaacggccggacggcgatgatgggcgtcgtcggcatggtcgccccggagctcctcggcaagctgggcctcgtccccgccgagacggcgatccccgggttccag

SEQ ID NO: 401331 - DNA, 242 bp, Oryza sativa nipponbare
ccacgcgtccgcccacgcgtccgcaagaacggccgcctcgccatgttctccatgttcgggttcttcgtccaggccatcgtcaccggcaaggggccactggagaacctggccgaccacctcgccgaccccgtcaacaacaacgcatgggcctacgccaccaacttcgtccccggcaagtgagtgtggatctccggcgagcaacggcggtgaggtccattgctttcatgcaagctgcggtgaga

SEQ ID NO: 401332 - DNA, 397 bp, Oryza sativa nipponbare
ccacgcgtccggaagaggctggcgacgagcggcgccaacttcgcgagggcgtacaccgtcgagttcggcagctgccagttcccctacaacttcaccggctgccaggacctcgccaagcagaagaaagtcccattcatctcagatgatctcgagatcgagtgcgaggggaaggagaagtacaagtgcggatccaacgtcttctggaaatggtgatgatctgatgatgatcatcgatcgattggccagccatgaaaacattcctgtacctagaacctttgtgatatgacacaactgcatgcataattgaacgcttgtcgtgctcactgtgtatttgtatcatctgagtggagatttgtagcgaattttctctcgattcgtcgatctcactttgatttct

SEQ ID NO: 401333 - DNA, 389 bp, Oryza sativa nipponbare
ccacgcgtccgtgacaagtccaagtccgaggtcaatgatgaggatgacgacgagggcagcgaagaggatgaagacgatgacgagtgagccttccagtggacaagatgggagcagcaagacgctaagggcggcgggcgtcctaaggagcctatccatcatcatcatcgtctactagaattattcagtttcacttcacatcgtgatgttttactttttctctcgtcctataacggatagcgctccttgttggcgccactggtgggtgttgggtgcagccaatgtcttgtctccaccgtcaatgatccgcttgtacctagattactctttccattgtcatcggctaacattgtgataatatcagtttgcgtatgttagattaaattgtttct

SEQ ID NO: 401334 - DNA, 386 bp, Oryza sativa nipponbare
gttcacaacaggatgttgtctagtataggatttttattccatgatcgggaggagaaaggtttattgcaactaaagggtaataagcatttcacggtcgtttaagaatttattccacatgtataaaaacccggctaaaatcttacatgtatatgagcactatttataggacactctttacatgtatgcataactttgtccctccctacacctaacttgttcatgaaatcgacccccttttgaatgctctccatcagctctttctttgccatctccaagccagctctctcaaaatcattcaacggccccacagggagaacctcttccgctccagcactacctaacctcacttttgctgcaaagaacaagaactcagtcaccgcagatgc

SEQ ID NO: 401335 - DNA, 435 bp, Oryza sativa nipponbare
  unsure (1)..(435): unsure at all n locations
ttttagctaggtccaagtctggacaagatgcaattcatcaacgtaggattacacgtacacagagcggtgtacagagtcaagaaaattaagatagcatgcacgcacggagcgtgcaacataaagtatacnnagagatagagagaggagatganccagcgctgcattgatatgccccagctgttatttttactgtagctattattttggctagttgatcaactgcgagccagcatcgatcgatatatcgatcggtcggtccaagcaggattaatcgatctagctgaccttgctgcagtcagtggagaggctgatggggaagccgacgttgacgccgcacttgccggggatgccggcggcggcgccgaggttgagagacttgatggtgccggcgagggtcttgaggcaccggcaggcgngcctgcggtcggcggtggt

SEQ ID NO: 401336 - DNA, 531 bp, Oryza sativa nipponbare
  unsure (1)..(531): unsure at all n locations
tgtgacaaaaattaaacacgatatatgaacttggtcgtaatacaaaaagtacagcagcctggtgtctcctagatcctcaagcacaaggaacaaaagcacaaaccaaatgacacctcacnagctgcgttgatctatgaatgacctagaacggggtaaaatcagctatatatgccccaagataggggaggatcaccaactgggagtaaaggagaaacatgagtatgataagtagatgatcaggactatttggaccatgcaaccgcatcaatttctgcttgagcactccgatatagctccagcctcttcgcaagattagtcctccgttccatgacggcggggtcttcatcaagaagcttagaaagttgtttaatctctcttgctcccaattcagtaaagaagtgatcgagcagtgagcgctttgcctcccgcacttgacagtagacaatagatttcggaatagagttccttaaggttgaacataccatgttaatatatgccagaaaccgttgttcaattcgtctaagataagaa

SEQ ID NO: 401337 - DNA, 446 bp, Oryza sativa nipponbare
tgacacggaaggcaactgtctaccaatgtatgctatacccagctgagcatgagggaaattattgatctattccactgatgaaaacccacggacttatacttcaatattaaaacacacatacagtgtactcggtcttcttgaacttaatgttccaccttcgagtatattgctcaagacaccttgatcaagtgtatgatactgagcacgcaggacgcctataatattgtatgggaaatcatgaacttgatctttatacttctcgcatagcactgacagcttatgagcgctaacaaatacaatgtgaatgacagttaacaaattggaccagccaccattaacatccgcataccacataacaacgattgccagtacaaagtgctcaaaagtttctttcccaacacacatcctgaataaaactcttgaacttatttacttgggtaccaact

SEQ ID NO: 401338 - DNA, 483 bp, Oryza sativa nipponbare
aaaaaagatctatcttttcgtggcgcaatttatatatatatagttacaaacttgtctaggtccaatcatctggtaagaacgggtgccatcctagcaaaaatcagactctggtaatgcaacttcaccacaccaattccttggttgcgttaaagcttccgtcttcttaaaaacatgtaccctagaaccctgtagccgatgatcatcgcgaccagagctacaacttctgtcacgccgttgtcaagaggtatggcattgatcagaatgtccgggacaggatgatattgcaccttcagcagtagcctgtacgtgtggtagttgaatgacaggtagcggagccaggatatgaatggtggaactctctttacaaagaaccctcctgctagcatgaatgtcatgactgtaactgaagctagagttgttgcccttcttgatatccaagaggctagctccaattgccaatcctaatccctgccggacgcgtgg

SEQ ID NO: 401339 - DNA, 467 bp, Oryza sativa nipponbare
  unsure (1)..(467): unsure at all n locations
aagtaaatatatcatatattcgattatatatatatataatagcagacaggggagcgatccattagaactcagaatcaccggaattgaacatcaaaagtacaacacagcagcagcagcatcagccagcagcaaacgacatgattacccacgcttttggatgaagaacaagaagtacgagaagaagaagacgatggtcgaacaccttgatcgagctcaacaatggcgatcgatcaccaatcacctacttggtgaactcgatggcccaggcgttggcgtagatgtaggtggccttgaagccggtgaatccggcggcgcgggcgagctccctgaactccctctcgtacctctccttgccgccggggttgtgggcgagcatgatcatgtcgacgtggaacacccnctgctccctcgccgtcgcgtcggagctctccggcagcacgcactccaccaccaaccaccttccgtgc

SEQ ID NO: 401340 - DNA, 599 bp, Oryza sativa nipponbare
  unsure (1)..(599): unsure at all n locations
tacgtaacaaagcatcatccataaacacgcgtaccgtgccgtgcatgcatacagatacagacaggcactccacttattttacaaccattcacactctcacactgaaagtccaaatannaaactgacaacagacgcatgcatncgatcatatcatatgcatgatcgtccatagtcgtagattgtaaattgaacaacgaaatcaagaacaattaatcaagcagctgatcgatctctcgtatcaaatgaacatcgtcgtcttcctcacgccgtcacgctggtgctcctgaacgagctgagcgccttggcggcctcgccgcgcagcaccagcttgtggtacgccgccgccaagaacgccccgatcaccggccccacccagaagatccagtggtctttccaagctgcgtgctggttgtacagcacggcggcgccgaggctcctcgccgggttgatgcccgtgccggtgatcggaatcgtcctccagcgactccgtcctctgaatctgctctgtcttgcacactcctagctcatctgatagcctctcacatagctgtctatacaatataggatctccatgggatttcttcaattcgacaacatat

SEQ ID NO: 401341 - DNA, 491 bp, Oryza sativa nipponbare
ttttaattaaaaaacacgacagataaaggagctgcaaactgcatatagtctggggcttttgtagagaaattgccaaagttatgtcattacactgagaatgatatgtatacaccgagaattccctatttgtctagacgatacaccatttattgaggtaatattattgtataccaagaataacataactcttcaatgatattttcaaatcttcttgttatgagagttcaatagcacatgatagattgggtctcggtacgacacttggaaaagttgtatgacaatgtagccacatgtcgtgatgcttccaaagcatattaacaagcatatccagatggcagtagatatccagtttgactccttgtgagcaacccataccgatattgcgaagacatttatatagaagtcaattaaggttgccgccatccacggtgtcaacaagtccttcctgaaaggtagtccatcagtgatgacagtataaattacgactgcag

SEQ ID NO: 401342 - DNA, 480 bp, Oryza sativa nipponbare
  unsure (1)..(480): unsure at all n locations
tttttagagtagaactaggatatatagcttattaattaactgttctttcaaatgcatggagtacgtatttgacagtagtatatatgacacagtaatgcatgcatatatgacaccaaaatgtgatatnnggatatgattaagcaggtgccagcaaaacgtacattaattaaacaacaacaattaaccctcgggcacgcctgtgttttgttatctcgctcaacatatacgtacgtaatactttgcttgcatagcatagggacgacgacattatattcttaattgataaactcaagaacgcatggagatggatcgagagatttataaatatggagcttgcttgattgattagatgaggtcgtcctccttgtgggtctcgatgacgacgtcggacttggggtaggcgtggcaggtgaggacccagccggcggcaacctggtcgtcgtcgaggaagctctggtcggactggtcgatctcgccgga

SEQ ID NO: 401343 - DNA, 508 bp, Oryza sativa nipponbare
  unsure (1)..(508): unsure at all n locations
ttaatctcctttttttattttactcttattgaatcgcggcaaagtattctaatggcaggaaaatttcgcgggcgaatatttactctttcctgtcttatttgttaattcataaccttatcgaaataagacaatttttttcggtttggttccgccatcccacccaatgtaagtattgcggattctatttcaagaanaatcctatccagtcataggttctgtcgttcccactgcttctcctttaatggttaggtttgaatctcgcaatggagcttccaaaaaatttctttccgagtcaatttctcagttttattaactcgggacgctctttgttattccttgaaatttgtatttcttgtttcaatcaaattacgatttccaattctctgttatttttattatattgatgctttatcacattgctttttatgatgtaattcatagaccatacatatnggaatcctatatctttcttatttctcttccctctttctatcatccttacttttat

SEQ ID NO: 401344 - DNA, 398 bp, Oryza sativa nipponbare
tgaatcatacgtaagtgcttgctgatacaatatcaacatggagggtacatggccggttccatatgaacaaacataaaaacaccgaaaccccatatggccattatgccgatcctagcctagcttggcgaggacatcgccaagagcagatttggtcaacgtgtagtacttctccgcctcttcggggctcttgatcttggctgcatggtcaagcccgtcaatggtggcgaagagcttgccggtgaggtccttgaggcccttcttctcgtccttgggcttggagttgatgacggttttgaggtcgtagcgcaggtaggaggccctgaggcggaggtcgtccctgacgaacggccactgcttcttctcgatgagcggcttgaggttgatgatgtcctgggccg

SEQ ID NO: 401345 - DNA, 451 bp, Oryza sativa nipponbare
  unsure (1)..(451): unsure at all n locations
tgaatcatacgtaagtgcttgctgatacaatatcaacatggagggtacattgccggttccatatgaacaaacataaaaacaccgaaaccccatatggccattatccgatcctagcctagcttggcgaggacatcgccaagagcagatttggtcaacgtgtagtacttctccgcctcttcggggctcttgatcttggctgcatggtcaagcccgtcaatggtggcgaagagcttgccggtgaggtccttgaggcccttcttctcgtccttgggcttggagttgatgacggttttgaggtcgtagcgcaggtaggaggccctgaggcggaggtcgtccctgacgaacggccactgcttcttctcgatgagcggcttgaggttgatgatgtcctgngccgactccttcgccctcgccgccgncttcgccggcgggagcggctgcaggtagaacc

SEQ ID NO: 401346 - DNA, 386 bp, Oryza sativa nipponbare
atccatgcaggcagcctgtttgtgcccttgtgcagatgcatttcgttggggcaagtataaggcactcaaatcagccaccacatgaacacacacatgtccatcatcgatacgatctacacatgcatcacccggtcatgcacttacaaacaaaagatctacttgaagaagtaccggaggtcgagcacgtataggaggaagtaggcccacaggactcctgagatgccgtcgaagaagaagccgccgttgaacttggcccacccgtctgcggtctgcattttgtcggcctccttattgcggtcggtgagcgtaagcgtcggcgccgtggacagctcgccctcgccgaatgaggcgacgccttacatggtgaggcaaacactgaagatggc

SEQ ID NO: 401347 - DNA, 474 bp, Oryza sativa nipponbare
  unsure (1)..(474): unsure at all n locations
tttaattaagtaaaagctgcagtaccttcacaaaattatactccttactgcttagcatagagctgatcgatggagcgtataaaaatttaactttacatacagagaccaaattatatgcaataggattaatttgccgctgttccgttctgccaaactgcaggcagaaccatcgctgctgagaattgctttccttccttcgttcgttgtgcttcagatcctggacgggatgagcggcgtcgaattcgacaggtacgccgncgncgccgccacgccggagccgagcttcaccgggtagccgatgtccttgagcaccatctccactccactcagggcacccatcaattgcagctcgttgaggtggccgaggtggccgatcctgaacaccttgccggcgaccttgttgaggccgaggccgaggctgaggttgtaccgcttccaggcgtgcttcacgatctcggcgctgtcgatgtacgg

SEQ ID NO: 401348 - DNA, 493 bp, Oryza sativa nipponbare
  unsure (1)..(493): unsure at all n locations
gtataaatatatatagccggagcttccatatatttcattcacatatgccggacggaacaacatatagtcgtagcagataccactcttacatcaagtcagagagagatcanggtgaaaccaaaaacccaaaagcagagcacggcccgnngtaaaatcaaaagacgatgagacaaactgggaaccacacgaaacaagggtgggagacatcatnncgaatcagagatgaacaattaaacaaggctatatatgacgatgacggcttagttgccaccagactcctcgcagcccgggggcttgtaggcgatgaagctgatgagctgcacctgcctgacgttgtcgaagccgatgatacggacgaatgcatcagggtacgccttcttggcctcctcgagctccttgagcacctgggtggcgtcagtgcacccgaacatgggcagcttccacatggtccagtacctgccatcgtagtatccgggggatctgtggttctcac

SEQ ID NO: 401349 - DNA, 516 bp, Oryza sativa nipponbare
  unsure (1)..(516): unsure at all n locations
gtcgaaatatttatgactcagattatcccggggcacaaatcaaaaggaagagcgtgaggccacatttgacaaaagagaaaagggagagagctacacggcacgaacagacttgtcnnctggccaaaacaaatcttgtgaatgtgatgatgatgatgatgatgantttcaaccaaaccaattcgacacctccaactgaaaaggaaacgacgatgaccagttttcttattctaaatcgcccactaaacttttgtatatcattggccctagctggccgctttgccaccaccaaactcctccgaaatcctcgtgtcatctcatcctcagggggatgagaatgcaagggaataaatgatttaagatgagttcttgagaacccactcaaccagggtggagacgccgaatccggtggccgcccgcttcttgtcgttccacactggcccggccatgtcaatgtgcatccactgcaccttctcatccacaaactgtttcaggaagagtgcagcagtaatagaacca

SEQ ID NO: 401350 - DNA, 427 bp, Oryza sativa nipponbare
ctccttaacttgaaataaatatagacggagcttccatgtattacaggcgcatatgcctaagccagcaccgtatagttgtgagcaataccattcttgataggttaggagagagatcgggttaaacaaaaacctaagctgggcacggccgctaaaatgcaaagatgaaggacatactgggaacacacgaaacacggtgggggacattatcacatcatagaggaaccattcaacacggctatatatgacaattacggcttagttgccaccagactccatcaagtcgggggggttgtaggcgatgaagctgatgagcttcacctgcctgacgttgttgaagccctggatacggacgaatgcatgagggtacgtcttcttggtcttctcgagctccttgagcacctgggtggagtcagtgcacccgaacatg

SEQ ID NO: 401351 - DNA, 237 bp, Oryza sativa nipponbare
ttaatctacaagcttgccagcatcatcatgtggtggtaattgctttaatagtcagcaaactcgtacagaatagccagatccaaattccacaaactatatatcatcatcaggaattttaaaaagagaactcggaatcgatttcgcatgatattcgaggacacccaagccaaactgacgataacgatgactaacgctaatacctactacaacaccaggtgctggcccttatttgataac

SEQ ID NO: 401352 - DNA, 602 bp, Oryza sativa nipponbare
  unsure (1)..(602): unsure at all n locations
gtatgtaaatattatattattgtaaatcattttgaggagctagactagcgtgggggattaacaaggagatatgtaccattacatgatgattaacatataaatctgagctacatnggaattaaggtgagtggagcagaggaggaaggatgatagaagactccaattctccatggatgggaatgggatcaggtggccttgcagaactctccgcccagatcgtcgcacgcctcctcggggaacaccgtggtgggctcgtcgtaggataggtagtccctgtcgacttcctccgccgccgcacgagaaacagcaacagcagccgatgatgagagcttggcctctgggtacatctgcacgttgcacgcctcgccgccgatgaggtcgcacgcctccatcggaaacaccgagatgttagagctgtagtccacctccgcagcctccactgccaccgncgncgccgncggacgaacgcgcaacgcaacacggcgaggagcctgaatctgcaggctgcgccccttcacagcagcgggcaacacggncgacattccaacgacactgctagcagcgggctgcaatctcttcctcttctttcttcttcttcttct

SEQ ID NO: 401353 - DNA, 360 bp, Oryza sativa nipponbare
ggaaacatgattaatttcttggtttacttaacacaggttcacaaagaaattatatttttgcttgcaggggagaatcgagggatcgccctttttccttaacttgtttttaattttcatgtccaatcaaagaaacacacccccccacacacatgcgtgcactgaatttttttgagaaacaaactcgattgatttgattttgattcgctggggataaaagagaacctgaaataaaaatttcaaccatcatcccaccttaaaggagctggttgtttttttaaaaaattttttggggcctttgaaccaccttttgtcgccggcctgccctttgaaaatttacaatttgccgtctttgacgggggc

SEQ ID NO: 401354 - DNA, 540 bp, Oryza sativa nipponbare
  unsure (1)..(540): unsure at all n locations
taaatatatatagccggagcttccatatatttcattcacatatgcctcagggagcaacatatagtcgtagcagataccactcttacatcaagtcagagagagacagnngtgaaacaaaaaccaaaagcacgagcactggctcggtgaaacatcaaaagaccgatgaacaaactgcggaacacactgaaacaaggtgggagacatcatcgaatcagagatgaacaattaaacaaggctatatatgacgatgacggcttagttgccaccagactcctcgcagcccgggggcttgtaggcgatgaagctgatgagctgcacctgcctgacgttgtcgaagccgatgatacggacgaatgcatcagggtacgccttcttggcctcctcgagctccttgagcacctgggtggcgtcagtgcacccgaacatgggcagcttccacatggtccagtacctgccatcgtagtatccgggggatctgtggttctcacggtagacgaatccgaccttgctgaactcgaggcagggcacccacttggaacg

SEQ ID NO: 401355 - DNA, 499 bp, Oryza sativa nipponbare
ccgatctaatagagatgagaaatccgctaatgagaagaacaccacggataagtacctagaccattagttgggaaacgaataaaatattattgcaaaaacatcatcttcttcttcatcttcttagtgtacacaacaccaactcgatcatcatctcgtcgcactaaacccatcttccccaacccaaagacaacgaactcgctggccacaaatccatccaaccacaattaaccactgctaagctacggtcccccacttcacttgccggggacgaagttggtggcgtacgcccaggcgttgttgttgacggggtcggcgaggtggtcggcgaggttctcgagggggcccttgccggtgacgatggcctggacgaagaagccgaacatggagaacatggcgaggcggccgttcttgatctccttcaccttgagctccgcgaacgcctcggggtcatcggcgaggccgagcgggtcgaaggcgccgtcggggtagagcgggtcga

SEQ ID NO: 401356 - DNA, 506 bp, Oryza sativa nipponbare
agggatcaaaatttgaccgctacaatgacacggggtattgtaaaccaacagaatactccaaaaccatagtacattgttacaaaatgtgtcgcacacgaaaagaactaataaagggacacaaaaataccacattaagccttgttcatctcaggctccagcgaattaagctgtcacccgatagcaaaatccatggcttctttctttccttcgttgtcgaaacaataatgaacactcatctgaccttgcaaaaatatacagcacaaaactggctgttgctcacatctccagtacgagagttcctctggggtgaaacacctaagctatagagaatacacgatgctgttttggctaggcacagcatccaaaaggttgatatgccaaggctgccaaggggctattatttcaaaagtttgttgcaggcgtcgattaccacagcatgcgagctcaatatagcctgacctgaagagtttccgcccatggttttcatgacagcatcaaaaattctt

SEQ ID NO: 401357 - DNA, 388 bp, Oryza sativa nipponbare
  unsure (1)..(388): unsure at all n locations
attgcagaggcaaaacacgaggtatgtatatcaaacgctctagaaaagattcatgtgatgaaatacatgatgaaccacgtatgttctcaaggtaaaattaattaatgcagtatagttttaacctttgtccaaatcgatctcaacctgtaacctgtgacgacacacnntggctacagtgccctcgaggtactagcagtatagcagtagctgtagtacgtagcagcagcagcagcaggttcactgtcttgattggattggatcggattagtagacgtagttcttgacgaacatgccctccttggcctcggcggcctcgccgtcgctggtgtacttgccgagctgcgccagcgagttggccttggcgcggaagagcagcgcgttctgcgcc

SEQ ID NO: 401358 - DNA, 439 bp, Oryza sativa nipponbare
agttgggaaacgaataaaatcattattgcaaaaacatcatcttcttcttgatgtgcttagtgtacacaacaccaactcgatcatcatctcgtcgcactaaacccatttccccaacccaaagacaacgaactcgctggccacaaatccatccaaccacaattaaccactgctaagctacggtcccccacttcacttgccggggacgaagttggtggcgtacgcccaggcgttgttgttgacggggtcggcgaggtggtcggcgaggttctcgagggggcccttgccggtgacgatggcctggacgaagaagccgaacatggagaacatggcgaggcggccgttcttgatctccttcaccttgagctccgcgaacgcctcggggtcatcggcgaggccgagcgggtcgaaagcgcctccggggtagagcgggtcgacgacc

SEQ ID NO: 401359 - DNA, 472 bp, Oryza sativa nipponbare
  unsure (1)..(472): unsure at all n locations
ataattaattcacaacaccatatttcattgatcaggttcagaacctgcgcgggggtacacactaccggtacagatctcaccctctctccaatactcgtacatcatccacgcnggtccacaacgaatacgtacatctatacggtacacgtacgtacatctactgcaccgcgtacacacacgcacactctcctgcagagacgcgcatcgtcgtcaacctagctagcttagctgaaggcgatgcgtcgccatggcagcacggcggcggcggcgctcacttgccggggacgaagttggtggcgtaggcccaggcgttgttgttgacggggtcggcgaggtggtcggcgaggttctcgagggggcccttgccggtgacgatggcctggacgaagaagccgaacatggagaacatggcgaggcggccgttcttgatctccttcaccttgagctccgcgaaggcctncgggtcgtcggc

SEQ ID NO: 401360 - DNA, 471 bp, Oryza sativa nipponbare
  unsure (1)..(471): unsure at all n locations
ataattaattcacaacaccatatttcattgatcaggttcagaacctgcacagaggtacacactaccggtacagatctcaccctctctccaatactcgtacatcatccacgcnggtccacacgaatacgtacatctatacggtacacgtacgtacatctactgcaccgcgtacacacacgcacactctcctgcagagacgcgcatcgtcgtcaacctagctagcttagctgaaggcgatgcgtcgccatggcagcacggcggcggcggcgctcacttgccggggacgaagttggtggcgtaggcccaggcgttgttgttgacggggtcggcgaggtggtcggcgaggttctcgagggggcccttgccggtgacgatggcctggacgaagaagccgaacatggagaacatggcgaggcggccgttcttgatctccttcaccttgagctccgcgaaagccttccggtcgtcggc

SEQ ID NO: 401361 - DNA, 508 bp, Oryza sativa nipponbare
ttttccaaaaagaagagttcctttttttttaaccatagttataatatcctggtggtaacaattaaacgtggaactgaaagcttaacaacgcttaaacacaaaatatactttgattaacccacgctaaatttacctctataccccccacctcaacgctacagtaattaccgacatttatgcacacctcgccgtcgccggagccggagaagacgagacagctagacctcgacgcggcagtaggtggcggtctggaacttgaggccattggcgccggggtagccgttgccgccggaggcgatgaagaaggccgggcaggtgacgaagaggtggtagtggccggagatccagctgccgaccttccaccggacgcggccgtcgatcttgacctggaggatgaggtactccgccgcgacgtccttggcgagggcgtcgccgaggtagggcgcgaaggggacgtccgggccggagagcaccggcgaccagacgtcgacgtcgccgtggccctggt

SEQ ID NO: 401362 - DNA, 509 bp, Oryza sativa nipponbare
  unsure (1)..(509): unsure at all n locations
aaaaggaaggacctattttttatagtagaaagcaaccgtatgtgtgtctacattgaaatatagaagatgtacattgaaatgtgtcaagaagagattaggagcaccctcatggagagggatttttagaagttccattgcatggtttcacaagttatgcaatgaccatcctactttcttctagctgtaatatttccaaaactagttacaagaaatgcgaggatgcccattgtcattgatatggtatggtgatgaagagattcacgaaatatgaatgtggagctcattaaacttttgccgcttcagtaggtgcaccggccctctcagcaataatctgctcatagagatctctaatcttcagtcctacgatagtttggaagagacctgttccattgttgctgccggggaagtctgcatgctttagcatntgctgtgtcacctctccataaaatttggttgagaggttgcttaaatggctttcaacatagataagctcatctagtctgtcaaat

SEQ ID NO: 401363 - DNA, 549 bp, Oryza sativa nipponbare
gtttgtttcgagaaagatatcgtccgattctccttctattgattcttttccgatcgaggtgtatggatccatgtgtctacatacctagattctgttcatggattaacaaaatgtgcaagagctctatttgcctctgccattctatgagtcgcttcctttttgcgtatggcacccccaccccctttggcagcatctactaattcggaacttaatttgaaagccatatttcgacccggacgcttttgggatgcttctaataaccaacgaatggcaagtgctcttccttgtttagatcctatttcaatcggaactttccgcgtcgatccttttttattacgtcttgtttttactcctatattgggagttactctacgtattgcttgacgtaaaaccaatagtggatttgtttctgtcttttgttgaatctttttcacggctcgatagagaatttgataagccaatgatttttttccgtctttcataatacggttaaccaccatgttaactaatcgattacgaaaaattggatcggattttgcagttcttttt

SEQ ID NO: 401364 - DNA, 532 bp, Oryza sativa nipponbare
tgggaaacgaataaaatcattattgcaaaaacatcatcttcttcttcatcttcgtgaggggacacaacaccaactcgatcatcatctcgtcgcactaaacccatcttcccaacccaaagacaacgaactcgctggccacaaatccatccaaccacaattaaccactgctaagctacggtcccccacttcacttgccggggacgaagttggtggcgtacgcccaggcgttgttgttgacggggtcggcgaggtggtcggcgaggttctcgagggggcccttgccggtgacgatggcctggacgaagaagccgaacatggagaacatggcgaggcggccgttcttgatctccttcaccttgagctccgcgaacgcctcggggtcatcggcgaggccgagcgggtcgaaggcgccgccggggtagagcgggtcgacgacctcgccgagcggcccgccggcgatgcggtacccctcgacggcgcccatgagcaccacctgcaccgcccaaatggcgaggatgctctgcgcgtggat

SEQ ID NO: 401365 - DNA, 421 bp, Oryza sativa nipponbare
ttttcacagagtataaaatatgacacggaaggatcacatataaagtttaattaggtggcggccacaacagacttaacatactgagctaaacaacaccagctttattaaggcacttatactgcttaccaccttctaacatatgatggtgaggagtcctgcttataaacgctccacccgaagtacatggacaccaagactatctgcacggagattgcattcttattaccgagctgtatagctttctggaacatatatctaccctccagcttaaccatatctctccccactgattgcattccttgcagctgaaaactcagcactcatagcattcattccttgaatcaccgcttcctacactgtcccgaaaccatgttcatcatcatataatataatatcctctgagattttcatcgaacaaaac

SEQ ID NO: 401366 - DNA, 456 bp, Oryza sativa nipponbare
ttgagaaaactacttgacagtacactttattcactatagctgtatgcacatgcgagtcgcatgcccccactggacgggtataaatgtaagaactaatgtgtccagaaccaaaaatacgattacataggacacgaatcctgtacaggaatggagaagtttagaagtgtgtcttcactgcctctgcaaatagcaacctagcgtcagcaaaccaatttacaggggggtggttaactagggcgtgcaagtgcaagggcgcaaagaagaatcctccacgatcatgtgaaacttcgtttcaaaagatgccttgggcagagcttccacaaaatcgcagactttgggggcacttcggcgcttcacaagtatgccaagtgttattatgttttacttgatgcggtcccaggaaataatcacctggaaagtgccaaagaacacctttctgcagtctaatctgatcac

SEQ ID NO: 401367 - DNA, 426 bp, Oryza sativa nipponbare
  unsure (1)..(426): unsure at all n locations
ttatatatagccggagcttccatatatttcattcacatatgcctcacccaacggcatatagtcgtagcagataccactcttacatcaagtcagagagagatcggtgaaaaaaacaaaagcagagcacggccggtaaaatcaaaagacgatgaacaaactgggaacacacgaaacaaggtgggagacatcatcgaatcagagatgaacaattaaacaaggctatatatgacgatgacggcttagttgccaccagactcctcgcagcccgggggcttgtaggcgatgaagctgatgagctgcacctgcctgacgttgtcgaagccgatgatacggacgaatgcatcagggtacgccttcttggcctnctcgagctccttgagcacctgggtggcgtcagtgcacccgaacatgggcagcttccacatg

SEQ ID NO: 401368 - DNA, 428 bp, Oryza sativa nipponbare
ttatatatagccggagcttccatatatttcattcacatatgcctcacccaacgaggatatagtcgtagcagataccactcttacatcaagtcagagagagatcaggtgaaaaaaacaaaagcagagcacggccggtaaaatcaaaagacgatgaacaaactgggaacacacgaaacaaggtgggagacatcatcgaatcagagatgaacaattaaacaaggctatatatgacgatgacggcttagttgccaccagactcctcgcagcccgggggcttgtaggcgatgaagctgatgagctgcacctgcctgacgttgtcgaagccgatgatacggacgaatgcatcagggtacgccttcttggcctcctcgagctccttgagcacctgggtggcgtcagtgcacccgaacatgggcagcttccacatg

SEQ ID NO: 401369 - DNA, 523 bp, Oryza sativa nipponbare
  unsure (1)..(523): unsure at all n locations
gaaatggaaaccagaggtatcaagtttggtctgagtatagtattacatataagtatcgcttttgacgatttgtacaatatatttattacgatgtgtatgtgcatatgattagcctggtgcttagcattcacatatgcatgnctcttcaaacctatgnttgatacccatacatatgtacnatacatacacagctagatcgttgacacaaaacannagatgaacaaaaaaaactgnaagcaacaaanctgggaaaggggaaactcaaagcaagagtggctccgaattcgaagcgttctaaagcttgccaaaaccgaatagatcaatcgagtctcctctgtatagagctcacgagtgagcttgctggcttgccaactagcttagtttccgccggactcctcgcaacccgggggcttgtaggcgatgaagctaatcaactgcacctgcctgacgttgtccaagccgatgatgcgaacaaatgcatctggatatgccttcttggccttctcgagctccttgagcacct

SEQ ID NO: 401370 - DNA, 416 bp, Oryza sativa nipponbare
  unsure (1)..(416): unsure at all n locations
ttagcaaatcgatccatgcgaccatgcgtgcaaatcagttggagcacaaagggagatgttacacccacaccctacacccatgcataataatacatcgtatatactacgtacatacatancccctctcgatcacacgcaccatcgatcgtacaaagttgcgtacatacatacgtacacacatatacgcatacgcacgtacatacatacataattaaaaactcgtaattaattaaatacgtagttgatggcatctctaatggaacttgaggctggtgaggatgttgttgtggacgggatcagcgaggtgatcaagcaggttctgcacggggccaaccccggtgaagagcgcctggacggagaagccgaggaaggcgagcatggcgagcctgccattcttgatctccttgagcttgagc

SEQ ID NO: 401371 - DNA, 92 bp, Oryza sativa nipponbare
tacgtgataccatccattttttttattgtcgacgaatttatcagatatgctctagatacatatcttgtgtgtatatagccgcggacgcgtgg

SEQ ID NO: 401372 - DNA, 403 bp, Oryza sativa nipponbare
tcagccacaaatccaaacactcggtccttcctatcagaagatcagaatgggcagggtttcaaattcatctcccaactcgacgataatttacacgtacatttaacacattcttccaccacttctcaaactcctcccttcttcttcccgggtaagattaaaattaacttgaggccagccagcgtcgccggcggcgagatgtttacaggctgggcgttctctcggcggcgccggagatgacggtgagcaggttgttgccgaaggggtcgctgaggtgcttggagaggttctcgacggagccctcgccggtgacgtaggcctggatgaagaaccccatcatggagaacatggccagccgcccgttctagatctccttcaccttcagcagcgccgcctggtccgggtc

SEQ ID NO: 401373 - DNA, 250 bp, Oryza sativa nipponbare
caataactgaaaagcagcctgacagatgattaaaattacatgtccatcgaccgaaaacacaattaattaataggtcgattatgagagaagaagaagaagaaaagaactctacatgtcgaatcacgttcttgcctgtgaacttgacctctatggggctgacgttcttgccaatgctgcagaagttctggccgacaccctgcctgccaacgttgaccttctccggatagacaccgtccttgtggtggaggta

SEQ ID NO: 401374 - DNA, 438 bp, Oryza sativa nipponbare
aaataattaatttactgtatataaattattgataaaaggtgtgctgagaataatgatgaagtatcaggagaaacgtgtcttcaggttacagattattacatgatggtggtacacgaattgtgcggtgatagaaatcatatatgtcctctttccaaaatagactcgatcgatcggtattgctagagtatgagtagcaattattatccgatagagtgaggctgaggccttccgtgactgaagcagattgcaacgctgatcgatctccttacatgctcggcttcgcgctgagacggctcgccagtttctgacccagagacctgtcagcctgagaccagtaggagagccagatgctcctgatctcgtgggtgaggcgagggtcagagagtgcgtcgatccatcttttgatgaaccggtcttgccttgccggatcccatgaac

SEQ ID NO: 401375 - DNA, 444 bp, Oryza sativa nipponbare
tcaataactgaagagcagcctgacagatgattaaaattacatgtccatccagggagaacacaagtaattaataggtcgattatgagagaagaagaagaagaagagaagtctagatgtcgaagacgttcttgccggtgaacttgacctcgatggggctgacgttcttgccgatgctgcggaagttctggccgacgccctgcctgccggcgttgaccttctccgggtagacgccgtccttggggtggaggtactgcacctcgccattggggaagacgcggtagaactggtagttgatcttgtacttggagcggagcctggtgcccagggccaggcactgctccttcctggccagcttcagcaggttggggccctcgcgcatgatggcggcgccgcccgtgggcatctcgaacacctgctccttgggcgacgtccatgtgatgacgt

SEQ ID NO: 401376 - DNA, 408 bp, Oryza sativa nipponbare
tcaaggacaagaagttttttttttccttcagtagatcgagttacagattgttgcaggaaataattagcctttcgatggattgattaattaattaattaacagtgcctttaattataacttgctcgatcagccacgctgaggcagattctttctctcttctcctggggtagtgctcatcttgttttcatttcacatcctggagtagccatcgtactgatccatgaaagtgtcgttgaacttcttgaagctggtcatgatggcaggcatgtcctcctcagctggcaggatggtcgtcctcaggtggaacaccccttctttttgtccgaaacctgaccctggaacagtggatattccagttgcttcaagaagcttgcccacgcgtccgcccacgcgtccgcggacgcgtgg

SEQ ID NO: 401377 - DNA, 383 bp, Oryza sativa nipponbare
taactaagaccagtttgatttcgtgtttgatacaaaaattaagatggacggagtgacaagagagcaccctctacttaagctttacattacaaggccaaccagcagctgcctgccggcccgaccacttgtcgtgcgcacgcgcgcgcaataatcaaccaatcacacacagtacgcacgcacataaaaaccacccatagccttcacgtacgcccggacgcacgcaccggttcgtgccaagctcaagggtagatggttctcgggatgatgatgtcgccgatgttgttgtgccacgggtccgagaggtggctggccaagttctccagagggccggtgccctgctaacaccgactgtgggacgcacaaacccacacaagccatcatgg

SEQ ID NO: 401378 - DNA, 474 bp, Oryza sativa nipponbare
tttttatatctgtggctctgtaccaaacactttcaaaatcatggataacagagagtgttagagtggagctgccaaacagctgccaaaccggaaattatacttatccgtttcacaatataagtcattctagtatttcccacattcatattgatgttaatgaatctagacatatatatctatatagattcattaacatcaatttaaatgtgagaaatgttacaattacttacattgtgaaacggaggaagtacgtgaaatggcattttctcagctccgctccacccacagagtaggagctggaccaaatgggacagcaccaagtttcagactccactgctctacacacacttgtcaccaccatcaatttcaattacatgtatagttgatgctgctactactactactgatggttaggaacttaggatggatgatcatttggtcattcggacgcgtgggcggacgcttgggtcgacc

SEQ ID NO: 401379 - DNA, 481 bp, Oryza sativa nipponbare
tacccgatcaacttgataattgtaattagtaaaacagagtatatttaagctggctgcgatgctgtacaaataccataaattcaaacaagcatggtgttattgaattctacatatatgagagaattcgactaagcaaagcaagctgccaaaccataaaccaacataaatatttataaaatttaggtatactccgttacagatagcgtttcaggaattcatcaatgcgggtgtactgaacctctgggtacagtatagttgcttcggctccattgtcaccaatgtcaaagtttgttaagcaaccctcgtagaaaatgtggtagaaatgtgttattcccacttgaaaagcaaattgcatatctttcattggagccaaaaattcttcagcaggtatgtggaatttcgtaagactatttccaaaaagtttttccaacattgctaacaactcgttttgagtgaggccaatatcttgtggtcctattta

SEQ ID NO: 401380 - DNA, 463 bp, Oryza sativa nipponbare
  unsure (1)..(463): unsure at all n locations
ttcgagacaaatgagccattcataattcattcattaggcatacgaaaagtagagaggggaggggaaagcaagatgagttgcatcagatttctgaatcatatggcccctctcctgcacttacatcacccactgtttcatctcatagcaatcactggctcgcaaaaggacacacactgacacaaactcgaggacggacggacaccattgactgccatactccgatcgatcgaacgaacgaacacggtcttatttcggtagcagatcgatcaaattattagctagagtagaagcagagcagacgcgacgacgatggcaatgcaatgcagctccccctccccggaatctaccaggggaggatcttccagcgctggttgtcaccctcgcaccacttccacagcacgatctcggtgccatcgtggatgccgncgtgatccttgtcgccatggaaacggatccttgggtc

SEQ ID NO: 401381 - DNA, 428 bp, Oryza sativa nipponbare
  unsure (1)..(428): unsure at all n locations
aatatagccggagcttccatatatttcattcacatatgcctgggcgaacaacatatagtcgtagcagataccactcttacatcaagtcagagagagatcaggtgaaaccaaaaacccaaaagcagagcancggccccggtaaaatcaaaaaagacgatgaaacaaactgggnaacacacggaaacaaaggtgggagacatctatcgaatcagagatgaacaattaaacaaggctatatatgacgatgacggcttagttgccaccagactcctcgcagcccgggggcttgtaggcgatgaagctgatgagctgcacctgcctgacgttgtcgaagccgatgatacggacgaatgcatcagggtacgccttcttggcctnctcgagctccttgagcacctgggtggcgtcagtgcacccgaacatgggca

SEQ ID NO: 401382 - DNA, 465 bp, Oryza sativa nipponbare
ttttatttgcaatgtttgggcagtatagattaccaataattaagtttgaaccaggaggataagaaaaaaaaaagttaagtaaacctacaacaacaggtgcctgcctacagaacacacacataactaccccccccccccccccccaaacaaaaatacaacctttttttagtgcaataggataacgcagcacatgattgatttgagtaggtcgatcgatcgacctaggcgtcgatgggcttgcagacgacggtggcgtgcttgaggatctggttgctgaactggccgggcttctcggtggtgtccaccttgtccatcccgggcggcggcagcaggtcgaagctctggacgaggcggccgagcgtgatcccgatgatgggcagcgcgaggatgatcccggggcagctgcggcggccgacgccgaagggcacgaagcggaagtcgttgccgtgcgccttcacgggcttt

SEQ ID NO: 401383 - DNA, 488 bp, Oryza sativa nipponbare
  unsure (1)..(488): unsure at all n locations
cctgctggaaaatttgatgatttatttcccacttatatcatcatatacagatgcggacacatgcgaaaattatcaagcagaaaagttccatacaaattcatccagacaaacaagtgtaaaaaaccttttttttcccatttcccccttgaactatccgtaaataccaccattccaccaaactcccctctgtcttctacgacaaataatcttttcaacccagtaacttataattaattacagagagattagcaaacatataatggtaagaatcagttgtcgtaggtgcggcactcgtcggtctccgggttgtccttgcagtaggcctcgagcgggtcggaggtctccttgagcttgtcgcgcgcgtggctcgccgccgcgctcagctcctccacctngtcccacgccgncgcgcactcgccgttcgccgtgtccttcgggcacgcctcctttgccctgtcgatgctctccgacatcttggccgagatgtc

SEQ ID NO: 401384 - DNA, 389 bp, Oryza sativa nipponbare
cctgctggaaaatttgatgatttatttcccacttatatcatcatatacaggggcgaacacatgcgaaaattatcaagcagaaaagttccatacaaattcatccacaaacaagtgtaaaaaaccttttttttcccatttcccccttgaactatccgtaaataccaccattccaccaaactcccctctgtcttctacgacaaataatcttttcaacccagtaacttataattaattacagagagattagcaaacatataatggtaagaatcagttgtcgtaggtgcggcactcgtcggtctccgggttgtccttgcagtaggcctcgagcgggtcggaggtctccttgagcttgtcgcgcgcgtggctcgccgccgcgctcagctcctcca

SEQ ID NO: 401385 - DNA, 477 bp, Oryza sativa nipponbare
  unsure (1)..(477): unsure at all n locations
gtcgtagtaatatctcggttttatttgctctagtatgaccaatgaaatatacatgtggattctcaaatgaaccatgtgcacaaccatccatcaatctacactctnacacttttccatggccatcgaatgcgaccgccgcgcgctactccgatgtaccggaactcgagagagctccaaactttgaattaaaatttatgcaactatgctacgtatatgtacagtttttgcagtgtcgtacactacacacgtcacgtttcagaagacgaggcaggacttgtcgaggtcatagcccatcttctccaggcccggccgcaccgtgcactcgaccatcgccggcggcccgcacacgagcgcgagcgtctcgccgtcgcccggcggcaggtgctccctgagcgtccgctcgtncaccctncccacgccgtacttccacccgtcctccggccgngccaccttgctcaccacgtaccacaccttgag

SEQ ID NO: 401386 - DNA, 140 bp, Oryza sativa nipponbare
taactaagaccagtttgatttcgtgtttgatacaaaaattaaaattgacgggatgacataagagcaccctctacttaaactttacattacaaggccaacccacacttccttgccgcccaccaattccttcccaccccccc

SEQ ID NO: 401387 - DNA, 219 bp, Oryza sativa nipponbare
ttgctctaataatctacaactatataaaattaaacatctcatcgatctagagtgggaaaatttacatgcatattattacacaaaagaaggaaaaaggagtagtagtgaagaagccaagaaacaaatgggatcaaagctaataaaagagagcctcccaaaagcaaagcaagaaggtgagcgagctagaacagccacactagcacacgacacaacgcacgc

SEQ ID NO: 401388 - DNA, 408 bp, Oryza sativa nipponbare
tgaagggaccagtgaaatctgagcggaaactaacatgataataacttacgacaggaggagctaaacattataggtgtgggggtaacgccagtggtgtgcattatagcattgctcactctgcaggtacattcaggtacgtgaaagaccggaaaaagagtaactccttcataacaacactactagcattacataaacacagaaaaacgtttgatccttttcacacatgtcactacgccgaaggataatggggtgaatatcttaggcggacttgaccatggcggcactgatgataaacatgaattcaggcttacatgaaacaccacctactagaaaacaatcaacatcaggctaggcttccaaatccttgaattacggaccaatcacggaacctccatagaaaagccttgg

SEQ ID NO: 401389 - DNA, 426 bp, Oryza sativa nipponbare
  unsure (1)..(426): unsure at all n locations
ttttgttttgatagtgttatttaagaaaaaaattctgtggaaattacacatatggggcgaaaaaaaagaagtgggaaaggatgcactgtactgttcatcgttcagatatctacnaaacaggcactctaaatacggcttaatgtcacggcccaaataaccagtgtggtcagcccagttgatnagccacatataaacctgttcctccagctaacaacacgagtcaggtatgctgagcgccagatgaaccagctcacaaatcctgcaagagatatccctttcgattccttgctttgcctcagatcgactagagctttgtatcttccgacagttgccatgctccccagatgcttatacacaaaggcaggacctagatcaacgtctatctcacagttcgcatgccctactacagcttttatgacatgcata

SEQ ID NO: 401390 - DNA, 396 bp, Oryza sativa nipponbare
agaaatcaaagtgagatcgacgaatcgagagaaaattcgctacaaatctcgactgggatgatacaaatacacagtgagcacgacaagcgttcaattatgcatgcagtgtgtcatatcacaaaggttctaggtacaggaatgttttcatggctggccaatcgatcgatgatcatcatcagatcatcaccatttccagaagacgttggatccgcacttgtacttctccttcccctcgcactcgatctcgagatcatctgagatgaatgggactttcttctgcttggcgaggtcctggcagccggtgaagttgtaggggaactggcagctgccgaactcgacggtgtacgccctcgcgaagttggcgccgctcgtcgccagcctcttccggacgcgtgg

SEQ ID NO: 401391 - DNA, 505 bp, Oryza sativa nipponbare
ccacgcgtccggagagagcttggtgagctgcagagatggccccctccgtgatggcgtcgtcggccaccaccgtcgctcccttccaggggctcaagtccaccgccggcatgcccgtcgcccgccgctccggcaactccagcttcggcaacgtcagcaatggcggcaggatcaggtgcatgcaggtgtggccgattgagggcatcaagaagttcgagaccctctcctacctgccaccgctcaccgtggaggacctcctgaagcagatcgagtacctgctccgttccaagtgggtgccctgcctcgagttcagcaaggtcggattcgtctaccgtgagaaccacagatcccccggatactacgatggcaggtactggaccatgtggaagctgcccatgttcgggtgcactgacgccacccaggtgctcaaggagctcgaggaggccaagaaggcgtaccctgatgcattcgtccgtatcatcggcttcgacaacgtcaggcaggtgca

SEQ ID NO: 401392 - DNA, 402 bp, Oryza sativa nipponbare
  unsure (1)..(402): unsure at all n locations
ccacgcgtccgcccaaccgccgccgcatcgccctcgtgagaacgatggccgcgtcggcgctgcaccagaccaccagcttcctcggcaccgcccctcgccgggatgagctcgtccgccgcgtcggcgactccggtggccgcatcaccatgcgccgcaccgtcaagagcgcgccccagagcatctggtatggacctgaccgtcccaagtacctgggcccgttctcggagcagacgccatcgtacctgaccggagagttcccgggagactacgggtgggacacggcggngctatcggccgacccggagacgttcgcgaggaacagggagctggaggtgatccactcgcggtgggcgatgctgggggcgctgggctgcgtcttcccggagatcctgtccaagaacg

SEQ ID NO: 401393 - DNA, 174 bp, Oryza sativa nipponbare
  unsure (1)..(174): unsure at all n locations
ccggagaagcccgccgccagggcattagttngaaggcncgcaaggaccccaacaagcccaagagggctccctccgctttcttcgtttttatggaggagttccgtaaggagttcaaggagaagaaccccaagaataaatctcggcgctggctgtaggaaaagcagcccgtgatag

SEQ ID NO: 401394 - DNA, 434 bp, Oryza sativa nipponbare
ccacgcgtccgcaaatcttttggctgaactgccagaggcttttggaaaccttcaacatctcaaggctttgagtgtacggaacaatggtcttacatccctaccttcagctttcttcataaaatgctcgcagctcattacacttgatctccatggcactgaaatcacaaacgacgttcttcggcaggtggacggttgggaggagtttgacgaacgtcgaaggaagaagcatcaaaagcagctcgatttccgggtgggatcatcagttgtgttcgatgaaggtgcggatgacgattacaggcgtttataaataaaatctctctttggataagattgtgtattttatgtctccagcttaatccgttggcgcaagaataacttgtatacttaagaacaaattaggagctgatggtgctactcacatcaatcctagatat

SEQ ID NO: 401395 - DNA, 524 bp, Oryza sativa nipponbare
ccacgcgtccgcccacgcgtccgcaagcgtgatatctcagactgcactgatggaagcatatggaagagccaagcagtatcgtaaggctgaagcagtgtttcgcaggatgcaaacatcaggccctgagccatcagctgtgacatatcaaatcattttgaaatcttttgttgagggtgacaaatacaaggaagctgaagctatttttgaggaccttcttaatgagaaaagagcttcttttaagcctgaccagaagatgtttcatatgatgatttatatgtacaagaaagctggcgactatgcccaggctcggaaactatttgctcagatgtcagagagaggaatccctctatcaacagtcacctttaatagtttgatgtcatttgaaacaaattacaaggaagtttcaagtatttatgatcagatgcaaagaactgcgctaaaaccagatgttgtgagctactccctgctcatcaaagcttatggaaaagctagaagggaagaagaagcattagcagtttttgaag

SEQ ID NO: 401396 - DNA, 392 bp, Oryza sativa nipponbare
ccacgcgtccgcccacgcgtccgcggacgcgtgggttttaagtaattgatcttactgaggtctagtattttagttggtgcccctgcaaacaggactgtggcagttcaggatctaatgacatggaaaagaaacaccacatgcaaactggcataatattaataccctcgtatgaatctagaacttgcaccgggtgaatatcaagttcaggataaataggtgtcgaacactatcatgattctcatgtttgttctctactgcatcaaggagctgtgcacgctaaggaagatctgacctgtgcacatgtatctgacagactatgcagaggcggagagttacttgaccggatactagccaagaaagatagccgttatagcgagaaagatgctgcagta

SEQ ID NO: 401397 - DNA, 470 bp, Oryza sativa nipponbare
ccacgcgtccgattccttggagaagaagaaggaggaggaggagatcgagcagccgctgacgctcgtcgtctacctcccgatctgatccgaggagcgaagcgaacaggggcaagatgcattcgacgaatctgctgctggaggagcccatcaggatggcatccatcctggagccatccaagccgagctttttcccggcgatgaccaagatcgtggggacgctgggtcccaagtcgcgcgccgtcgacaccatctcctcctgcctcaaggccggcatgtcggttgccaggttcgatttctcgtggggagacgctgagtaccaccaggaaaccctcgaaaacctcaagctcgccatcaagtccaccaagaagctctgtagctcgagataaaaaaaaatggcgatcgaacgaacgaacaaatggcgtatgtattgtctgatctttgatataaatatttatcaatgaatgtatcaa

SEQ ID NO: 401398 - DNA, 466 bp, Oryza sativa nipponbare
  unsure (1)..(466): unsure at all n locations
ccacgcgtccgcccacgcgtccggcgctacttctcggcgccggtgatcgcgttcggggtgttcctcctcctcgtctccctcgcgggcctcgtcggcgcctgctgccgcgtcaactgcctcctctggttctacctcgtcgccatgttcgtcctcatcgtcgtcctcttctgcttcaccgtcttcgccttcgtcgtcaccaacaagggcgccggcgaggccgtctccggcagagggtacaaggagtacaggctcggcgactactccaactggctgcagaagcggatggagaacagcaagaactggaacaggatcaggagctgcctccaggactccaaggtctgcaggaaactgcaggacaagaactgngatcggacccagttcttcaaagccgacctctccccgctcgagtccggatgctgcaagccacccagcagctgcaacttcctctacgtcagcggcacgaact

SEQ ID NO: 401399 - DNA, 279 bp, Oryza sativa nipponbare
  unsure (1)..(279): unsure at all n locations
ccacgcgtccgccccgctccactctcaggcaggcaatcagcggcgaggcaccagcccaccggccggcaatggcgtccacctcctgcttcctccaccagtccacggcccgcgtcgccgcgcgcgtcgcctccccgtccccggcgacacggacccacctcctcgtctgccgcgcccagaagcaggacgacgccgacgtctcccgccgcgcggcgctcgcgctgctggccggagcgacggcggcggtgggggtgaaggnggcncccgccgncgnggnctacg

SEQ ID NO: 401400 - DNA, 515 bp, Oryza sativa nipponbare
ccacgcgtccgcccacgcgtccggaagtactcgagcaaagaaggagagagcttggtgagctgcagagatggccccctccgtgatggcgtcgtcggccaccaccgtcgctcccttccaggggctcaagtccaccgccggcatgcccgtcgcccgccgctccggcaactccagcttcggcaacgtcagcaatggcggcaggatcaggtgcatgcaggtgtggccgattgagggcatcaagaagttcgagaccctctcctacctgccaccgctcaccgtggaggacctcctgaagcagatcgagtacctgctccgttccaagtgggtgccctgcctcgagttcagcaaggtcggattcgtctaccgtgagaaccacagatcccccggatactacgatggcaggtactggaccatgtggaagctgcccatgttcgggtgcactgacgccacccaggtgctcaaggagctcgaggaggccaagaaggcgtaccctgatgcattcgtccgtatcatcggct

SEQ ID NO: 401401 - DNA, 499 bp, Oryza sativa nipponbare
ccacgcgtccgcggacgcgtgggcagctcctctcatgagtgggtcaagaatgatggctctgtggccacaattggaattacagaccatgctcagggccatctgggagaggtggtgttcgtggagctgccgcaggcgggggcgaaggtgagccagggaggtgcattcggcaacgtggagagtgtgaaggccaccagcgacatcaactgccccatctccggtgaggtcgtcgaggttaacgacaagctctctgagacacccggcctgattaactcaagcccgtacgaggacggatggatgatcaaggtgaagccgagcagcccgtcggagctggacgccctgctggacccggccaagtacaccaagcactgcgaggaggaagacgctcactaggctcttcctctctggtttttttcttcccattttgtcactccgacctaatttctccctgttgcaacaactgctctggatccgtatacgattaataactgaatcttcaggc

SEQ ID NO: 401402 - DNA, 488 bp, Oryza sativa nipponbare
ccacgcgtccggttcggctcccccgaggagttcctcgcccaggtcgacttcttgcttggcaagcaggcctactccggcaagacagattccgagggtgggtttgagtcggacgcggtggcgacggcgaacatcctggagagctcggcgccggtggtgggagggaagcagtactacagcgtaacggtgctgacgaggacggcggacggcgacgagggcggcaagcaccagctgatcacggccaccgtcaacgacggcaagctgtacatctgcaaggcgcaggccggcgacaagaggtggttcaagggcgccaggaagttcgtcgagagcgcagccagctccttcagcgtcgcatgatcgtcgaaatctctatctcagcttctctttaatccctagcgaatcaaaatcaaatcaatcgagttcgttgctcagagagatgcagtgcacgcatgtgtgtgtgcgtgtgtgtttctttgattgacatgagaatt

SEQ ID NO: 401403 - DNA, 532 bp, Oryza sativa nipponbare
ccacgcgtccgcccacgcgtccgcgtggaggacctcctgaagcagatcgagtacctgctccgttccaagtgggtgccctgcctcgagttcagcaaggtcggattcgtctaccgtgagaaccacagatcccccggatactacgatggcaggtactggaccatgtggaagctgcccatgttcgggtgcactgacgccacccaggtgctcaaggagctcgaggaggccaagaaggcgtaccctgatgcattcgtccgtatcatcggcttcgacaacgtcaggcaggtgcagctcatcagcttcatcgcctacaagcccccgggctgcgaggagtctggtggcaactaagccgtcatcgtcatatatagccttgtttaattgttcatctctgattcgatgatgtctcccaccttgtttcgtgtgttcccagtttgttcatcgtcttttgattttaccggccgtgctctgcttttgtttttgtttcacctgatctctctctgacttgatgtaagaatggtatctgctacgactatat

SEQ ID NO: 401404 - DNA, 486 bp, Oryza sativa nipponbare
ccacgcgtccgcaaggaagagctacacccagtcatctgttgttcgctttgtgcagatatggcggcaggagcatatggctagtttctaccggtctgaagcggatgcagcgctaggcgattacctcacagagtctccgtcaaatccaggagctggtgacatcctcatgggatttcttgggtctgtcatcatatcgcatgcattttcaatgttcaatcagagaaagcttgtaaggaggcatgcagcggaaattttcacatcaatcgctgtggcatcaacattctcgttatattcaactgccatcctaggacgagtggtagagctagagccaatattgaccatatcaatattgcccaggtgtataaccgtggcattagctttgagggtagtttctctctttgaaggtgtaaatacttcagtaaccgcagcggtggttgtccttacggggctgatcggcgcaaattttgcgcaagcagtgatggacaagct

SEQ ID NO: 401405 - DNA, 455 bp, Oryza sativa nipponbare
  unsure (1)..(455): unsure at all n locations
ccacgcgtccggccatgaacaagctggaggtgctcaagccatggacgctcaccttctccttcggccgtgccctgcagcagagcaccatcaagaagtggggcggcaagaaggagaacgtcgccgccgctcaggctgccttcctcgcccggtgcaaggccaactccgaggccacgctcggaagtacggcggcgccgccggcgacgccgccacgtccgagagcttgtacgtcaagggctacacctactagaattcgtcccaatcactgggtggcgcctatgcggccgtgcctatgacagtagtagggtctcggtccaatccgcgtggcccacgtggcggtgcggattgcatcaagattcgtgcggatatacatgtgttcctttctgctgtatactctcgattctctgcttccttcccctctagctcttatattntaacaaaagctgcgtctaaatgtt

SEQ ID NO: 401406 - DNA, 601 bp, Oryza sativa nipponbare
  unsure (1)..(601): unsure at all n locations
ccacgcgtccgcccacgcgtccgaaagaaggagagagcttggtgagctgcagagatggccccctccgtgatggcgtcgtcggccaccaccgtcgctcccttccaggggctcaagtccaccgccggcatgcccgtcgcccgccgctccggcaactccagcttcggcaacgtcagcaatggcggcaggatcaggtgcatgcaggtgtggccgattgagggcatcaagaagttcgagaccctctcctacctgccaccgctcaccgtggaggacctcctgaagcagatcgagtacctgctccgttccaagtgggtgccctgcctcgagttcagcaaggtcggattcgtctaccgtgagaaccacagatcccccggatactacgatggcaggtactggaccatgtggaagctgcccatgttcgggtgcactgacgccacccaggtgctcaaggagctcgaggaggccaagaaggcgtaccctgatgcattcgtccgtatcatcggcttcgacaacgtcaggcaggtgcagctcatcagctttatcgcctacaagcccccgggctgcgaggagtctggtggcaactaagcccgcatcgncatatata

SEQ ID NO: 401407 - DNA, 507 bp, Oryza sativa nipponbare
  unsure (1)..(507): unsure at all n locations
ccacgcgtccgcccacgcgtccgcccacgcgtccgcccacgcgtccgcccacgcgtccgcccacgcgtccgcccaactctagcaaagatgcttctcatgggagaacagctggagtgccttgatgaagtactgaccattgtgtcaatgctctcggtgccctcagtcttctttcgtcccaaagatcgagcagaggagagtgatgcagcaagggagaaattttttgttccagaatctgatcatttaactcttctgaatgtctacctgcaatggaagtcgaaccaatatcgtggagactggtgtaatgaccacttcctccatgtcaagggtctccgaaaggctcgagaagtaaggtcacagctattggacatactgaaaaccctgaagatcccactgacatcatgccatatggaatgggatgtggtgagaaaagccatctgctctgcatacttccataatgccgcgaggttgaagggtgtcggngagtatgtgaactggcggaacgggatg

SEQ ID NO: 401408 - DNA, 421 bp, Oryza sativa nipponbare
ccacgcgtccggccatctctctcagctctcacagctcactgcatcaatggccgcggccaccatggcgctctcctccccggtgatggcccgcgcggcgccgtcgacctcctccgcgctcttcggcgaggcgcggatcaccatgcgcaagaccgccgcgaagcccaagccggcggcgtcgtcggggagcccgtggtacggcgccgaccgcgtcctctacctcggcccgctctccggcgagccgccgagctacctcaccggcgagttcccgggcgactacgggtgggacaccgcggggctctccgccgacccggagacgttcgccaagaaccgggagctggaggtgatccactcccggtgggcgatgctgggcgcgctcggctgcgtcttcccggagctcctcgcccggaacggcgtcaagttc

SEQ ID NO: 401409 - DNA, 244 bp, Oryza sativa nipponbare
ccacgcgtccggtcactgtggccgtatgaggctaagtttcattttgttgcatcttcttcatgtaccattctaaacttgctatattctactcctttctcgcacctcttcaaccactcgaaatgtaagagaccaatgttttatagagatgctggaaatcgtttgaataacttcccagcattttgtgtttgttggatataccttacctcaggaaacataattatcaataccttacgttgtttccccc

SEQ ID NO: 401410 - DNA, 624 bp, Oryza sativa nipponbare
  unsure (1)..(624): unsure at all n locations
ccacgcgtccgggcgctgccgaatcaggggaccgtggattaccccagcttcaagctggtcatcgtcggcgatggcgggactggtaaaactacatttgtgaagaggcatctcactggagagtttgaaaagaaatatgagccaaccattggtgtcgaagttcaccctctagattttaccaccaactgtggtaagatccgcttctactgctgggacactgctggacaagagaagtttggtggacttagggatggatactatatccatggtcaatgtgcgataattatgtttgatgtcacttcaaggctgacttacaagaatgttccaacatggcatagggacttgtgcagggtgtgtgaaaacatccccattgtcctgtgtggtaacaaggttgatgtgaagaacaggcaggttaaagccaagcaggtcacattccacaggaagaagaatctccagtactatgaaatttctgccaagagcaactacaactntgagaagcccttcctttatcttgcaaggaagcttgctggtgacccgacccctgctttcngtgaagctgttgctcttaaacctccggaaggtcccattgacctggcaatgcagaaacagcatgaggctgggcttgcg

SEQ ID NO: 401411 - DNA, 434 bp, Oryza sativa nipponbare
ccacgcgtccgacacaccccaccagcagcagcagcagtagctgagcttgaagcacgcagtagcgaggtagacatggcgcgtcgccaccatggccctctcgtacccggcgctggccgacaaggccgccgcgaaggtgttcggcgaggggcgcatcaccatgcgcaagtcggcggcgaagcccaagcccgccgcgtcggtgagcccgtggtacggcgccgaccgcgtgctctacctcggcccgctctccggcgagccgtcgagctacctgaccggcgagttccccggcgactacgggtgggacaccgcggggctctccgccgacccggagacgttcgccaagaaccgggagctggaggtgatccactccaggtgggcgatgctcggcgcgctgggctgcgtgttcccggagctcctcgcccgcaacggcgtcaagt

SEQ ID NO: 401412 - DNA, 446 bp, Oryza sativa nipponbare
  unsure (1)..(446): unsure at all n locations
ccacgcgtccggaaagcataagcaacacaagggatgtaactcatcactcacttagctaattaaatcttcgaccatgtcggacaagtgcggcaactgcgactgtgctgacaagagccagtgcgtgaagaaaggtaccagctatggcgtcgtcatagttgaagccgagaagagcccttcgaggaggtcgccgccggcgaggagaacggcggctgcaagtgcggcaccagctgctcctgcaccgactgcaagtgcggcaagtgaagtcacgaagcaaccgaacactcgccgccggcgagtcacctaccttaattagtccacaataaaaaccacccatatgagtgtgngtttgtgtgtgtgctgattattgctgaattaaacccgtgtgttatcgattaattaagcagctggtcgcttcggcgactatgcctgtatcaacgtatgaattt

SEQ ID NO: 401413 - DNA, 519 bp, Oryza sativa nipponbare
  unsure (1)..(519): unsure at all n locations
ccacgcgtccgcggacgcgtgggcgcggaagagaacgagaatatcacggctattaagacctcggaatccaggggtgatgaagaccaaatcctcgagcgttctcagcaactccttcccaatcctcctcctcatcttcctcgcggcggcagcatccgttccccagatcgccatgtcggccgagcagccggagcaggcggcccccgcggcgcaggaggcgaccgtgcagatcgtctacctggaccgccccgcggacgccgaccccgaggagttccacatccgcaccctcgcccccgtcctcggcagcgaggagaaggcaaaggaggcggtgctctaccactacaagcacgccgcaagcggtttctctgcaaaacttactccccagcaggtcgaggagctcaagaagcaaccaggtgttcttcaggttgtaccaagccagacataccagctccatggacccggngctggcactggcacaatgaacacctttagtcttgtgtagtgtaccggcctagctgataa

SEQ ID NO: 401414 - DNA, 141 bp, Oryza sativa nipponbare
gcgtccgcacgagctcaaaagacacacattccaaaagcatctgtggccatctcctcctagtcctaggctcgcgtcaatggcggcgtccaccatggcactctcctcccctgccgtcctcgccgtcacgatggatcttgacga

SEQ ID NO: 401415 - DNA, 465 bp, Oryza sativa nipponbare
  unsure (1)..(465): unsure at all n locations
ccacgcgtccgcccacgcgtccgatcagagatcaggtagaacagtgagagtgaggtgcagaaaaatttgagctgaagctgaggatggcaacatccatgatcacctcgccgctggtggcgccggcccgggccaagggccttccgtccatctcccgccggggatcctccttcgccatcgtctgcagcggtgggaagaagatcaagaccgacaagccctacgggattggaggtggcatgtcagtcgatattgatgcatctggcaggaagagcacggggaagggtgtgtaccaattcgttgacaagtacggcgcaaacgtcgacggctacagcccaatctactcgccggaggaatggtctcccaccggtgacacctacgttggtggaaccaccgggcttctgatctgggccgggaccctcgccgggctcctcggcggcggcgccctcctngtctacaacaccagcgccc

SEQ ID NO: 401416 - DNA, 591 bp, Oryza sativa nipponbare
  unsure (1)..(591): unsure at all n locations
ccacgcgtccgcccacgcgtccgtggcaatgcgaagcaatgagcaaagagcggtcctcaggtttaggccgctctgatgccattaggccaccatgtccatttccctcgcattcggaggactgcccttattcttacactcgccagtgcaaccacgatggacccatctttgtgattatgcttgaacatgataagatgtctgtccaagagcttcctgcgaactcaactgtagtcgatctgatggagagagtgggggccaatagtccaagatgcagcccttacagcttcccactgaaagaggaattgcgcccgagggttaaccacaagcccataagtgaccctaaccggaaactgtgcatgggagatgtggtggagctgacgcctgcgctcccacacaagtcgctaactgagtatcgggaagagatccagcgcatgtatgaacgaggcgggtttgccctcgccaccacccgngacggtccggcaagctgacggtgtcacgactaccatgttaacctcctgttggacaatgccctcaacctccatttgcttccttgtatatatcccagatactaattcttgcaggagagagccaaat

SEQ ID NO: 401417 - DNA, 503 bp, Oryza sativa nipponbare
ccacgcgtccgatgccttcctccttattccacacggatgtaacatacatagagttcttggatagggtacactcttctgagatgaagttgagagctaagggcatgtgggaagtcccacacccatggcttaatatcatcattccaagaagcatgatccataaatttgcgaaggaggtctttgggaaaatcctgaaagacagtaacaatggtcccatattactctatccagtgaacaaatccaggtaacaagctttgtctctgaatcacagataccatggagatgcatcattaagtgaataaccattcttgttaatcatttcatgcagatgggacaacagaacatcagtagtcataccagatgaggaagttttctacctggtggcattcctatcctcagcacttggcccccataacatcaaacatacattggacctgaactacaggataatagagttctctgacaaggcaggtattggagtgaagcagtatctcccaaactatacc

SEQ ID NO: 401418 - DNA, 184 bp, Oryza sativa nipponbare
  unsure (1)..(184): unsure at all n locations
ccacgcgtccgggggagtacatcggcatgaggatcgantgcgacgcgtgcgaggccgcggcggccacggtggtgtgctgcgcggacgaggcggcgctgtgcgcgcgctgcgacgtcnagatccacgccgncaacaagctcgccagcaagcaccagcgcctnccgctcgacgccgcgctccccgc

SEQ ID NO: 401419 - DNA, 499 bp, Oryza sativa nipponbare
ccacgcgtccgcccacgcgtccgcggacgcgtgggtcccgatccacccctcccgccgccgccaccgccaccgccgccgccgccggccggcgagagagacaggatgtacgggtgggagatgctctcgttcaacatccacgacggcttcctggaggccatcgtgcgggggaaccggtcgggcctcctcaccgccgccgactacaacaacctctgccagtgcgagaacctcgacgacgtcaagatgcacctcaccgccaccgagtacggcccctacctccagaacgaaccttcacccctgcacacaactacaattgtggagaagtgcactcttaaactggttgatgagtacaaacacatgatgtgccaggcgactgaaccactatccacattcttacagtatataacgtatggccacatgatcgacaatgttgtacttattgttaccggaacattgcatgagagagatgttaatggactattggagaattgccatcattggg

SEQ ID NO: 401420 - DNA, 448 bp, Oryza sativa nipponbare
  unsure (1)..(448): unsure at all n locations
ccacgcgtccgcctgcctcgagttcagcaaggtcggattcgtctaccgtgagaaccacagatcccccggatactacgatggcaggtactggaccatgtggaagctgcccatgttcgggtgcactgacgccacccaggtgctcaaggagctcgaggaggccaagaaggcgtaccctgatgcattcgtccgtatcatcggcttcgacaacgtcaggcaggtgcagctcatcagcttcatcgcctacaagcccccgggctgcgaggagtctggtggcaactaagccgtcatcgtcatatatagccttgtttaattgttcatctctgattcgatgatgtctcccaccttgtttcgtgtgttcccagtttgttcatcgtcttttgattttaccggccgtgctctgcttttgtttttgtttcaaaaaannnnnnnnnnnnnnnnnnnnnnnngg

SEQ ID NO: 401421 - DNA, 434 bp, Oryza sativa nipponbare
  unsure (1)..(434): unsure at all n locations
ccacgcgtccgcccacgcgtccgcagcagcagcagcagtagctgagcttgaagcagcagagcgaggtagacatggccgccgccaccatggccctctcgtccccggcgctggccggcaaggccgccgcgaaagtgttcggcgaggggcgcatcaccatgcgcaagtcggcggcgaagcccaagcccgccgcgtcggggagcccgtggtacggcgccgaccgcgtgctctacctcggcccgctctccggcgagccgccgagctacctgaccggcgagttccccggcgactacgggtgggacaccgcggngctctccgccgacccggagacgttcgccaagaaccgngagctggaggtgatccactccaggtgggcgatgctcggcgcgctgggctgcgtgntcccggagctcctcgcccgaaacggcgtaaagttc

SEQ ID NO: 401422 - DNA, 489 bp, Oryza sativa nipponbare
  unsure (1)..(489): unsure at all n locations
ccacgcgtccgagctaattaagcaaaagaagaagaagaagaaagaagaagaagaagatgcagaccgctgctagcagtgtcgttggattgtcggccgtgttgcccgctgctgtgaaggggcgcagcctgcagattcaggctcctcgccgtgttgcgttgcgcgttcgtgcggcggcggcggcggtggcagtggaggctgcggaggtggactacagctctaacatctcggtgtttccgatggaggcgtgcgacctcatcggcggcgaggcgtgcaacgtgcagatgtacccagaggccaagctctcatcatcggctgctgttgctgtttctcgtgcggcggcggaggaagtcgacagggactacctatcctacgacgagcccaccacggggttccccgaggaggcgtgcgacnatctgggcggagagttttgcaaggccacctgatccctttcccatncatgggggattggngtcttttatcattctttct

SEQ ID NO: 401423 - DNA, 459 bp, Oryza sativa nipponbare
  unsure (1)..(459): unsure at all n locations
ccacgcgtccgcccacgcgtccgcgctcatcgccatctctctcagctctcacagctcactgcatcaatggccgcggccaccatggcgctctcctccccggtgatggcccgcgcggcgccgtcgacctcctccgcgctcttcggcgaggcgcggatcaccatgcgcaagaccgccgcgaagcccaagccggcggcgtcgtcggggagcccgtggtacggcgccgaccgcgtcctctacctcggcccgctctccggcgagccgccgagctacctcaccggcgagttcccgggcgactacgggtgggacaccgcggggctctccgccgacccggagacgttcgccaagaaccgggagctggaggtgatccactcccggtgggcgatgctgggcgcgctcggctgcgtnttcccggagcttctcgccccgaacggcgtnatgttcggcgtggccgggtggttc

SEQ ID NO: 401424 - DNA, 566 bp, Oryza sativa nipponbare
ccacgcgtccgcccacgcgtccgccgaccgcgtcctcgacgagctcgaggaggctctgctggtgtcggattttggccccaagatttcgttccggatcgtggacactctacgcgaggaaatccgcgatggcaagctcaagtctggggctgagataaaggaagcgctgaaaaggtgtattcttgaactgctgacgagcaaaggcggcaatccggagctgcagctcggtttcagaaagccggcagttatcatgattgtgggagtgaatggaggtggaaagactacctcattaggaaaacttgcttacagattcaagaatgaaggagtgaaggtattgatggcagcaggtgataccttcagagcagcagctcgtgaccagctagaagtttgggcagagagaacaggttcagagattgttatcgataatgataagaaagcaaaacctgcatcagttctctcgcaggcagtgaagcgcgggaagcgtgaaggatttgatcttgttctttgcgacacgtcaggacgacttcatacaaattatgggctgatggaagaattggtttcctgcaaga

SEQ ID NO: 401425 - DNA, 479 bp, Oryza sativa nipponbare
  unsure (1)..(479): unsure at all n locations
ccacgcgtccgcaggttcattgggtcatggatggtcataaaaataaaggaacctagttgcgtgtaccagtggagactgcaggcagagatagctatgagagcagatgggaaaccaggaatgtctgatgaggaggtcatggattttgtgtcgcgctacctaccagcataccacgcatatttgcccactctatataaagagggaccaaacggctcgaacccagaccacctgctggtcgttgacatagacgaaaagaggaatcctatgtggggtagatgagccctgaatgtacattgctgaaagaaaatggatcttctgacccaatggtggagtttgggatatctgatctttctgagaccacatattccaagcaagcaccactggcctcttgtttcttgtggcttgaacaagtactaaacgtgtaaaactttgatgtatacgaaatcttgctattacttataaggaaatnggaatcccaattc

SEQ ID NO: 401426 - DNA, 519 bp, Oryza sativa nipponbare
ccacgcgtccgcccacgcgtccggtcacttccatctcattctcctaattgtcatcactagcttctagctagcttaattaattaattagccatggcggaggagaagcaccaccaccacctgttccaccacaagaaggacgacgagccggccaccggagtagactcctacggcgagggcgtctacacgtcggagacggtgaccaccgaggtggtcgccggcggccaggacgagtacgagaggtacaagaaggaggagaagcagcacaagcacaagcagcacctcggcgaggccggcgccctcgccgccggcgccttcgccctgtatgagaagcacgaggcgaagaaggacccggagaacgcgcacaggcacaagacacggaggagatcgcggccacggcggcggtcggcgccggcggctacgccttccacgagcaccacgagaagaagaaggaccacaagagcgccgaggagtccaccggcgagaagaagcaccacctcttcggctgatcgacctcatcac

SEQ ID NO: 401427 - DNA, 457 bp, Oryza sativa nipponbare
  unsure (1)..(457): unsure at all n locations
cccgcgtccgcccacgcgtccgcccacgcgtcctccgcacgcgtccgcccacgcgtccgcggacgcgtgggctgctagcttgggaagaggaggaggagcttgagcttggagagagacaacaatggcggctcaggctcttctctctgggaggcagctgctggggaggccattgcaatcttcagtctccaggtcttcttcctccaggaaggcacccttcatggtcagggcagaggccactccccctgccaagcaaggtgctgacaggcagctgtggttcgcatccaagcagtccctgagctacctggatggcacgcttccgggagacttcgggttcgacccgctggggctatcggacccggaggggaccggtgggttcatcgagccacggtggctggcctacggcgaggtgttcaacggncggacggtgatgatgggccgttgtcggcttgtcgccccc

SEQ ID NO: 401428 - DNA, 566 bp, Oryza sativa nipponbare
  unsure (1)..(566): unsure at all n locations
ccacgcgtccggcagcagcagcagtagctgagcttgaagcagcagagcgaggtagacatggccgccgccaccatggccctctcgtccccggcgctggccggcaaggccgccgcgaaggtgttcggcgaggggcgcatcaccatgcgcaagtcggcggcgaagcccaagcccgccgcgtcggggagcccgtggtacggcgccgaccgcgtgctctacctcggcccgctctccggcgagccgccgagctacctgaccggcgagttccccggcgactacgggtgggacaccgcggggctctccgccgacccggagacgttcgccaagaaccgggagctggaggtgatccactccaggtgggcgatgctcggcgcgctgggctgcgtgttcccggagctcctcgcccgcaacggcgtcaagttcggcgaggcggtgtggttcaaggcggngtcgcagaatcttagcgagggcggcctcgactacctcggcaacccgagcctgatccacgcccagagcatcctcgccatctggggcgnccaggtggngctcatgggcgccgttgaggggta

SEQ ID NO: 401429 - DNA, 363 bp, Oryza sativa nipponbare
ccacgcgtccgcggacgcgtgggcggcccctcgcgaagccgatgcagccgcccaaatccatccgctccgccatctccaagaaggccaacaaggccagcgcctgatcatcgccgccgtctcgccgcccgtcgccgccgcgcgctgtatccctgtatagcctaggtgttgtcgcttacctagtagtagttcgccatcgtcgtctcgtctgcttcgatcgatcgagcgctctgtgtccggtgtgtgtgttgcgttgtagataaggtttgggtttctttttgcaagggaggaagaagctactgtagcatatcgccaagaagctgtagtaataagatgatctggcgctcgcagctttgccttatgatc

SEQ ID NO: 401430 - DNA, 546 bp, Oryza sativa nipponbare
ccacgcgtccgcggacgcgtgggcggacgcgtgggaaattatggaagatccttggtttagagtaggtcttaattcagatctacttaacaagaccataccaacagataaagttgataaagttgtgcatgttgacatggattcaacatttggtaatttaagcaacaatataaatgaaggaaaacaagaagcagaaaatcttactagcttgaatgcttttgatattatttctctttcatcaggatttgatctttctgctatgtttgaagatgaaaacagcaaagaggaatcaaaatttacatccactaacacagctacgacaatcaccaaaaagcttgaggatgttgcgaagaatttacgattaaaattcttgaagaaaaatggtggtttgttaaagatggaaggatcaaaacctggaaggaaaggtgtaatgtccatcaatgctgaaatatttcagatcacaccagattttcatttagtggaatttacgaagataaatggtgatacacttgagtatcaaaaggtcaaacaagagatgagaccagcact

SEQ ID NO: 401431 - DNA, 503 bp, Oryza sativa nipponbare
ccacgcgtccggaaggaccccgagaagaagaagtaccccggcggcgccttcgaccccctcggcttctccaaggaccccgtcaagttcgaggagtacaagctcaaggagatcaagaacgggcgattggccatgctggcttttgtgggtttctgcgtccaacagtcggcgtacccgggcaccggcccactggagaacctggccagccacctctcggacccgtggcacaacaacatcggcgacatcatcatcccgagaaccatctacccttgagcttggcacgaaccggtgcgtgcgtccgggcgtacgtgaaggctatgggtggtttttatgtgcgtgcgtactgtgtgtgattggttgattattgcgcgcgcgtgcgcacgcagtggtcggccggcaggcagctgctggttggccttgtaatgtaaagcttaagtagagggtgctctcttgtgaatccgtccatcttaatttttggatcaaacacgaaatcaaactggtcttag

SEQ ID NO: 401432 - DNA, 503 bp, Oryza sativa nipponbare
  unsure (1)..(503): unsure at all n locations
ccacgcgtccgcacaggcacacagacatggccgccgtgaacacagtgtcgtcgctgccctgtagcaaagctggcgccgccgtagccgggggagctccgaggccgtcgacctgctccgtattctaccctcctcgttgctggtccaagcgaagcagcggtaatggcgtgcgggcgcaggcgtcgacgacggagacgaccgcagcgccggctgcggaggtgactactaaggtggagaaggtgtcgaagaagcaggtggatggcgtggtgacgaacaagtacaggcccaaggagccgtacacggggcggtgcctcctgaacacgaggatcaccggcgacgacgcccccggtgagacgtggcacatggtgttcagcaccgacggcgagatcccctaccgcgaggggcagtccatcggcgtcatccccgacggcatcgacaagaacggcaagccccaaaagctccgnctctactccatcgccagcagcgccatcggggacttcgccgac

SEQ ID NO: 401433 - DNA, 540 bp, Oryza sativa nipponbare
  unsure (1)..(540): unsure at all n locations
ccacgcgtccgcggacgcgtgggcggacgcgtnnggcantgtgcaggtcttcttcctccaggaaggcacccttcatggtcagggcagaggccactccccctgccaagcaaggtgctgacaggcagctgtggttcgcatccaagcagtccctgagctacctggatggcacgcttccgggagacttcgggtgcgacccgctggggctatcggacccggaggggaccggtgggttcatcgagccacggtggctggcctacggcgaggtgttcaacggccggacggcgatgatgggcgtcgtcggcatggtcgccccggagctcctcggcaagctgggcctcgtccccgccgagacggcgatcccgtggttccagaccggcgtgatcccccccgcgggcacctacacctactgggccgacccttacactctcttcgtcttcgagctcgccctcgtcggcttcgccgagcaccggcgcttccaggactggtacacgccgggctccatggggaagcagtacttcctcgggctcgagaagtacctcg

SEQ ID NO: 401434 - DNA, 547 bp, Oryza sativa nipponbare
ccacgcgtccgccacgcgtccgccacgcgtccgcccacgcgtccgcccacgcgtccgccacgcgtccgcccacgcgtccgcccacgcgtccgtactggacatactctactactactagccagtaagctagctaactaactacgtggctatggcccccaccgtgatggcctcctcggccacctccgtggctccattccaagggctcaagtccaccgccgggctccccgtcagccgccgctccaccaactcgggcttcggcaacgtcagcaatggcggaaggatcaagtgcatgcaggtgtggccaattgagggcatcaagaagttcgagaccctatcgtacctgccaccactcaccgtggaggatcttttgaagcagatcgagtacctgcttcgatccaagtgggtgccttgcctcgagttcagcaaggttggattcgtctaccgtgagaaccacaggtctccccggtactacgatggcaggtattggaccatgtggaaggctgccatgttcggctgcaccgatgccacccaggtgctaaaggagctc

SEQ ID NO: 401435 - DNA, 522 bp, Oryza sativa nipponbare
ccacgcgtccgccacgcgtccgcccacgcgtccgggcagatgattatggcttcaagtcttgaactgaggcagaaagcactagatcgccttttgccttatcagaggtctgactttgaaggcatcttccgtgcaatggatgggcttccggtaactattagactcttggatcctccacttcatgagttccttccagaaggccatgttgaggatatggtgcgtgagctatgctctgaaactggagcagctcaggatgatgtccttgcaagagtagaaaaactttccgaagtaaatccaatgcttggtttccgtgggtgcaggcttggtatatcataccctgaattgactgaaatgcaagcccgtgccatctttgaagctgctataaccatgaccaaccagggtattcaagtctttccggagataatggttccccttgttggaactcctcaggaattggggcatcaagtggatgttatccggcaaattgccaacaaggtgttcacagacatgggaaaaactattggc

SEQ ID NO: 401436 - DNA, 530 bp, Oryza sativa nipponbare
  unsure (1)..(530): unsure at all n locations
ccacgcgtccgcccacgcgtccgcccacgcgtccgcccacgcgtccgctccaaccccccctgcgccattgccggccacactcctcttcctcctccatcgccaagaaccaccacgagcaatggcgtcgctgtccatggccacaacgctgccgtcgctggccggcgccgcaccggcggcgaggaagaggagcggcgtgacgtacgtggaggggatgaacgcgtacagcgggctcaaggcgctcaacaaggtgaccctgctcggcgtgcgcaagaccgccgactactcgttcgccaaggtggtggccaagctgagccccgccggcgggaagagccgcggcggcgcgttcggngcgcagtgcaacgccgccggtgagatattcaggatcgccgtcatcatgaacgggctcgtgctcgtcggcgtcgccgncggcttcgggctgctccgggtggaggcggccgncggggngtcggggttgtgggcccccgtcgagccatagcgggcggggcccagccagccatgggtggtttgcc

SEQ ID NO: 401437 - DNA, 595 bp, Oryza sativa nipponbare
  unsure (1)..(595): unsure at all n locations
ccacgcgtccgcaagtggaacgagtaatatgaaattctctctgaatggttgtgttatcattggtactcttgatggagctaatgttgagataagagaggaagtgggacaagaaaatttcttcctttttggtgccaaggcagatcaagttgctgggctgaggaaggatagagagaatggcttgttcaaaccagacccacgttttgaagaagccaagcagcttataaggagtggtgcttttggcacctatgactatgctcccctcttggattctcttgaaggaaattctggatttggtcgtggtgattatttcctcgttggctatgatttcccaagctatattgatgcacaggcccaggttgatgaagcctacaaggataaaaaaatggatcaagatgtctatactgaacacagctggaagtggcaaattcagcagcgaccgtactatcgctcagtatgcaaaggaaatatggngcattactgctagccctgtctcctaaatacgagatgcaccaagacgaagctcatcaagatggacgctatanttatgcataataaggattagataacgatccacggngaataacactttgcttcg

SEQ ID NO: 401438 - DNA, 405 bp, Oryza sativa nipponbare
ccacgcgtccgcccacgcgtccgccacgcgtcgcgagagaccaacccaaccgccgccgcatcgccctcgttagaacgatggccgcgtcggcgctgcaccagaccaccagcttcctcggcaccgcccctcgccgggatgagctcgtccgccgcgtcggcgactccggtggccgcatcaccatgcgccgcaccgtcaagagcgcgccccagagcatctggtatggacctgaccgtcccaagtacctgggcccgttctcggagcagacgccatcgtacctgaccggagagttcccgggagactacgggtgggacacggcggggctatcggccgacccggagacgttcgcgaggaacagggagctggaggtgatccactcgcggtgggcgatgctgggggcgctgggct

SEQ ID NO: 401439 - DNA, 512 bp, Oryza sativa nipponbare
  unsure (1)..(512): unsure at all n locations
ccacgcgtccgcggacgcgtgggcggacacgggcagaccacccaccaactgagagctgagcaggcgagcgagcggacatggcagcatcgctccaagccgcggccaccctgatgcagccggccaagctcggcggccgggcctcctccgccgcgctgccatcgcgcccgtcttcgcacgtcgccagggcgttcggcgtcgacaccggtgccgccggcaggatcacgtgctccctgcagtccgacatccgggaggtcgccaacaagtgcgccgatgccgccaagctcgccggcttcgccctcgccacctcagctctgctcgtctcgggcgccagcgcggagggcgtgccgaggaggcttaccttcgacgagattcagagtaagacgtacatggaggtgaagggaaccggcacggcgaaccagtgcccgacggtggagggcggcgtcnactccttcgccttcaaggccgggaagtacaacatgaagaagttctgcctggagccgacgtccttcacc

SEQ ID NO: 401440 - DNA, 491 bp, Oryza sativa nipponbare
  unsure (1)..(491): unsure at all n locations
ccacgcgtccgcaaaaaaccaacccaaccgccgccgcatcgccctcgttagaacgatggccgcgtcggcgctgcaccagaccaccagcttcctcggcaccgcccctcgccgggatgagctcgtccgccgcgtcggcgactccggtggccgcatcaccatgcgccgcaccgtcaagagcgcgccccagagcatctggtatggacctgaccgtcccaagtacctgggcccgttctcggagcagacgccatcgtacctgaccggagagttcccgggagactacgggtgggacacggcggggctatcggccgacccggagacgttcgcgaggaacagggagctggaggtgatccactcgcggtgggcgatgctgggggcgctgggctgcgtcttcccggagatcctgtccaagaacggngtgaagttcggggaggcggnggtggttcaaggccggcacgcagatcttctccgagggggggctcgactacctgggg

SEQ ID NO: 401441 - DNA, 510 bp, Oryza sativa nipponbare
  unsure (1)..(510): unsure at all n locations
ccacgcgtccgcaaaaagctctcgcctttctctctggtagcttcgccttgctctccagcttctgcttttgctgccgcccatggccgatccggccgccgaggagaccgtccccgcgccgccgccaaccccggcggtcgaccccgccgagggtgcctcggacgcgccgcagccggtcgagctgcccgccgacaccgccgccgcctcgccggagaaggtgtcgtcgccaccaccggagccggcgccggcggtgaggagccgggggttcaggctgctcggggaggacacctccgtgcacaaggctcttgggggcggtaaaactgctgatgtactattatggaaagacaagaagacatncgctgtagtgattggtggtgcaactgtcatatggatcttgtttgaagtgcttgattaccattttttgactctggttttccatgtgatgattggtgccttgggcattttggtcctgtgggcaaaagctaccacaattataaagaagagtncaccaga

SEQ ID NO: 401442 - DNA, 535 bp, Oryza sativa nipponbare
ccacgcgtccggaccaactcatggaagggtaccctagcaatgaggatagggatgcaatcttcaaagcatatataacagcgttaaacgaagaccctgagcaatacagagctgacgcacaaaagatggaagagtgggctcgttcccagaatggtaattctttagttgagttttcatccaaagatggagaaatagaggccattctgaaagatatttcagaaagggcccagggtaagggaagcttcagctacagccggttctttgcagttggcttgttccgtttgcttgagcttgcaaatgcaacagagccaaccatactagacaagctttgcgctgctctaaacatcaacaaaagaagtgtcgacagggatctcgatgtttaccggaacatactctccaaattggtccaggctaaggaacttctcaaggaatacgtggaaagggaaaagaagaagagagaggaaagatcagagaccccaaaatcgaatgaagctggtacgaaatttgacgggagtctcaattccatgaggcattaact

SEQ ID NO: 401443 - DNA, 606 bp, Oryza sativa nipponbare
ccacgcgtccgaagagatgcattataccaaagtttgccaccgactgtaaaatcgtccttgcgttctaaggtgaattcatttgtggtcaatgaagaggttactgctgctcaaatcaaggctgaaatggagaagactttgcggtggcttgtcccaattgcaaataacaccaccaaggctcaccatggttttggttgggttggagagtgggcaaatacagggtcagaagtgaactgcaaaccaacaggacaaatggacctgacccgaattgagacactgtaccatgctgacaaagaaaagaccgaaacacatatcctcgagcttgttgcatggcttcatcatcttattagtcgatctaaatccgctaatggcgagcggtctcccatcaaatctcctgttcgatcgcctacacaaaggggccatacaatcacattatctccaaacaaagccagcagcaattcatcacctcttcttacccaagaagatcaagatatgctaagggatgtcaagtacaggaaattcatccctggtataagcaaaagccaagagttcgagactaagtccagacatagcaagcaaagcaggttgagcaaaagtaatagtcactca

SEQ ID NO: 401444 - DNA, 468 bp, Oryza sativa nipponbare
ccacgcgtccgcccacgcgtccggcagcagcagcagtagctgagcttgaagcagcagagcgaggtagacatggccgccgccaccatggccctctcgtccccggcgctggccggcaaggccgccgcgaaggtgttcggcgaggggcgcatcaccatgcgcaagtcggcggcgaagcccaagcccgccgcgtcggggagcccgtggtacggcgccgaccgcgtgctctacctcggcccgctctccggcgagccgccgagctacctgaccggcgagttccccggcgactacgggtgggacaccgcggggctctccgccgacccggagacgttcgccaagaaccgggagctggaggtgatccactccaggtgggcgatgctcggcgcgctgggctgcgtgttcccggagctcctcgcccgcaacggcgtcaagttcggcgaggcggtgtgggtcaaggcggggtcgcagatc

SEQ ID NO: 401445 - DNA, 426 bp, Oryza sativa nipponbare
  unsure (1)..(426): unsure at all n locations
ccacgcgtccggcagtagctgagcttgaagcagcagagcgaggtagacatggccgccgccaccatggccctctcgtccccggcgctggccggcaaggccgccgcgaaggtgttcggcgaggggcgcatcaccatgcgcaagtcggcggcgaagcccaagcccgccgcgtcggggagcccgtggtacggcgccgaccgcgtgctctacctcggcccgctctccggcgagccgccgagctacctgaccggcgagttccccggcgactacgggtgggacaccgcggggctctccgccgacccggagacgttcgccaagaaccgggagctggaggtgatccactccaggtgggcgatgctcggcgcgctgggctgcgtgttcccggagctcctcgcccgcaacggcgtcaagttcggcgaggcggngtgg

SEQ ID NO: 401446 - DNA, 481 bp, Oryza sativa nipponbare
ccacgcgtccgcaaggacgagttcttcctcgactccaagtccaccatcggcgtcgagttccagacccgcaccctctccctccaccgcaagcgcgtcaaggcccagatctgggacaccgccggccaagaacggtacagggcggtgacgagcgcgtactaccgcggcgcgctgggcgccatggtggtgtacgacatcacgcggcggcggacgttcgagaacgtggcgcggtgggtggaggagctccgggcgcacgccgatggctccaccgtggtggcgctgatcgggaacaaggccgacatgccggcgggccggcgcgaggtcgccgccgacgaggccgcgcggttcgcggaggagcaggggctcttcttctccgaggcgtccgcgctgtcgggcgacaacgtggaccgcgccttcctcacgctgctcgaggagatcttcgccgtcgtgtcgcgcagggcgctggagctcgacgaggcacggc

SEQ ID NO: 401447 - DNA, 482 bp, Oryza sativa nipponbare
  unsure (1)..(482): unsure at all n locations
ccacgcgtccgcggacgcgtgggcggacgcgtgnggtngcgcgtgggcgagggcaagcagaccgaccaggacaggtggaagggtctcgcctacgacatctccgatgaccagcaggacatcaccagggggaagggtttcgtcgactcccttttccaggctcccacgggtgatggcacccacgaggccgtgctcagctcctacgagtacctcagccagggtctcagaacgtacgacttcgacaacaccatgggaggcttctacatcgcccctgctttcatggacaagctcgtcgtccacatctccaagaacttcatgaccctccccaacatcaaggtcccactcatcctgggtatctggggaggcaagggtcagggaaaatccttccagtgtgagctcgtcttcgccaagatggggatcaaccccatcatgatgagcgcccgagagctggagagcggcaacgcccgagagcccgcgaagctgat

SEQ ID NO: 401448 - DNA, 550 bp, Oryza sativa nipponbare
cccacgcgtcgggcgatttcgactctcatggaggccaggggctcgccgagtacccgcaccagggcgccgacaagcggccgcggaagcggccccgcctcgcctgggatgtcgcgcccccgctgttccagccccccaaggcaattcctatgctatattgcgggcaggaactaatcaatggaaattttgcgagcgcttttctgccaccgccaccaatctattatacaggaccaccacgcaatctttcgcctccctggaggccagatgacaaggatggacactatgttttcgcagttggggagaaccttacaccaagatatagaatacttagcaagatgggtgaagggacttttggacaagtcttagagtgctgggacttggaacaccaagagacagtggctatcaaaattgtgcgctcccttcagaaatatcgagaggctgctatgattgaaattgatgtgcttcaaaggcttgggaagcatgattttactggtagccgctgtgtgcaatacggaattgggttgactattcgaatcatatatgtataagattt

SEQ ID NO: 401449 - DNA, 472 bp, Oryza sativa nipponbare
  unsure (1)..(472): unsure at all n locations
ccacgcgtccgcggacgcgtgggcggacgcgtnnggttcgggttcttcgtccaggccatcgtcaccggcaagggccccatcgagaacctcttcgaccacgtcgccgaccccgtcgccaacaacgcctgggcatacgccaccaacttcgtccccggcaagtgagcacaacgacacgatcgagatggtgccaaccaacgtaccatgtgtacacttgtagtagccacgcaccgaccctgcagttgcagttgcagcagtgcatgtatgtatgtaccttaattgtgtgtgtgtgtgtgatcgatcgaggagatttctagcttaattaatttctgtctgtcatcatctttgcttctttggatcgagatttaatgtaagccgcaggccgcatccaagggatgatcgaattaatgatgtatcgttattataggatctacaacgaagccagctaaaacgatgccaatttgtgcgtcgaccc

SEQ ID NO: 401450 - DNA, 612 bp, Oryza sativa nipponbare
ccacgcgtccgctactggacatactctactactactagccagtaagctagctaactaactacgtggctatggcccccaccgtgatggcctcctcggccacctccgtggctccattccaagggctcaagtccaccgccgggctccccgtcagccgccgctccaccaactcgggcttcggcaacgtcagcaatggcggaaggatcaagtgcatgcaggtgtggccaattgagggcatcaagaagttcgagaccctatcgtacctgccaccactcaccgtggaggatcttttgaagcagatcgagtacctgcttcgatccaagtgggtgccttgcctcgagttcagcaaggttggattcgtctaccgtgagaaccacaggtctcccgggtactacgatggcaggtattggaccatgtggaagctgcccatgttcggctgcaccgatgccacccaggtgctcaaggagctcgaggaggccaagaaggcctaccccgatgcctttgtccgtatcatcggcttcgacaacgtcaggcaggtgcagttgattagcttcatcgcctacaagcccccaggttgcgaggagtctggtggcaactaagctaagatcaagcatc

SEQ ID NO: 401451 - DNA, 554 bp, Oryza sativa nipponbare
ccacgcgtccgccacgcgtccgcggacgcgtgggcggacgcgtgggcgccgagaagtacaagtccgaggatgaagagcacaaaaagaaagttgacgccaagaattccctggagaactatgcttacaacatgaggaacactatccaagacgagaagattgcttccaagctgccagctgacgacaagaaaaagattgaggacgcggtcgagcaggcgatccagtggctggacaacaaccagctcgctgaggttgaagagttcgaagacaagatgaaggagctggagggcctgtgcaacccaattattgccaagatgtaccagggtgctggtgccgacatgggtggtggaatggacgatgatgctccggctgctggtgggagtggtgctggccctaagattgaggaggtcgactaaatcaatacaccttcgtatatgtgatgagaaaaatattgatcatacaccttttgttttcaaatcccaggtggcaatcataccacttgggctactcgtactttctgttaactaaagacttattatcacctgatgcttgggttt

SEQ ID NO: 401452 - DNA, 487 bp, Oryza sativa nipponbare
  unsure (1)..(487): unsure at all n locations
ccacgcgtccgcccaagcgtacgatgagagagtgggtgcactgcaacagctagtgtcaccatttgggaagactgacactgcttctgttcttcaggaggcctcatggtacatcaagtttcttcaccagcagctctaggttcttagctccccttacatgcgtgctcctccgatgcctggcgctgcgcctgaggatccccaccactacagcctgaggaaccgtggcctctgcctggttccagtggaccagactctgcagctgacgcagagcaacggcgccgacctgtgggcgccggcgaacacgaccaggcgcaggtgaacggaggaaccggcctggaggctcgggggtctaagaggcctagaggaggaggggagcactnttgtctgggggcggtgtagagttccaacttccaagtgtctgacccgattcatcaaatctcctaacanagcaaaaactaataagcaaaccgtgtttcactctcgtcggatc

SEQ ID NO: 401453 - DNA, 419 bp, Oryza sativa nipponbare
ttaattcgatcatccggtgggggcggcctgcggcttacattaaatctcgatccaaagaagcaaagatgatgacagacagaaattaattaagctagaaatctcctcgatcgatcacacacacacacacaattaaggtacatacatacatgcactgctgcaactgcaactgcagggtcggtgcgtggctactacaagtgtacacatggtacgttggttggcaccatctcgatcgtgtcgttgtgctcacttgccggggacgaagttggtggcgtatgcccaggcgttgttggcgacggggtcggcgacgtggtcgaagaggttctcgatggggcccttgccggtgacgatggcctggacgaagaagccgaacatggagaacatggcgaggcggccgttcttgagctccttcaccttgagct

SEQ ID NO: 401454 - DNA, 398 bp, Oryza sativa nipponbare
ttttaatctaacatacgcaaagtgatattatcacaatgttagccgatgacaatggaaagagtaatctaggtacaagcggatcattgacggtggagacaagacattggctgcaccacaacacccaccagtggcgccaacaaggagcgctatccgttataggacgagagaaaaagtaaaacatcacgatgtgaagtgaaactgaataattctagtagacgatgatgatgatggataggctccttaggacgcccgccgcccttagcgtcttgctgctcccatcttgtccactggaaggctcactcgtcatcgtcttcatcctcttcgctgccctcgtcgtcatcctcatcattgacctcggacttggacttgtcagattcctcctcgtcggcctcctcttc

SEQ ID NO: 401455 - DNA, 361 bp, Oryza sativa nipponbare
ggaaacaaaaaaacctacggtttaaccttttatttcactacccaatgggggtttttttaacctttcccttacgggactactttgtttttggccacccaagagtttttacccttgcaggggggtccttgcttatttaaacgggatttcacgtgcccaatgcttcttgggtaaaagcgtaagctagggattctttccgtttctggactttaaccatttagggggcggcactaaacccttttgcctaacaaaacaactctttttttgttttcccacaaccccgttttcacggtttaggctgctcccatttccctcgcccttactacgggaaacgctttagctttcttttcctcgggctaataaa

SEQ ID NO: 401456 - DNA, 424 bp, Oryza sativa nipponbare
  unsure (1)..(424): unsure at all n locations
aaatcaatccttgcatgcaggggaaatcgatggatcgacctctctccttaacttgttcttaattctcatgtacaatcaaagaaacacacacgcacacacacatgcgtgcactgcatctctctgagcaacgaactcgattgatttgattttgattcgctagggattaaagagaagctgagatagagatttcgacgatcatgcgacgctgaaggagctggctgcgctctcgacgaacttcctggcgcccttgaaccacctnttgtcgccggcctgcgccttgcagatgtacagcttgccgtcgttgacggtggccgtgatcagctggtgcttgccgccctcgtcgccgtccgccgtcctcgtcagcaccgttacgctgtagtactgcttncctcccaccaccggcgccgagctctccaggatgttc

SEQ ID NO: 401457 - DNA, 416 bp, Oryza sativa nipponbare
ttgaaacaaaaacaaaagcagagcacggccggtaaaatcaaaagacgatgaacaaactgggaacacacgaaacaaggtgggagacatcatcgaatcagagatgaacaattaaacaaggctatatatgacgatgacggcttagttgccaccagactcctcgcagcccgggggcttgtaggcgatgaagctgatgagctgcacctgcctgacgttgtcgaagccgatgatacggacgaatgcatcagggtacgccttcttggcctcctcgagctccttgagcacctgggtggcgtcagtgcacccgaacatgggcagcttccacatggtccagtacctgccatcgtagtatccgggggatctgtggttctcacggtagacgaatccgaccttgctgaactcgaggcagggcacccact

SEQ ID NO: 401458 - DNA, 389 bp, Oryza sativa nipponbare
aagcatagataaatagatagacgcaccagaagttcagagaaccaactgaacacatggcaaagcctgaagattcagttattaatcgtatacggatacagagcagttgttgcaacagggagaaattaggtcggagtgacaaaatgggaagaaaaaaaacagagaggaagagcctagtgagcgtcttcctcctcgcagtgcttggagtacttggccgggtccagcaaggcgtccagctccgacgggctgctcggcttcaccttgatcatccacccgtcctcgtacgggcttgagttaatcaggccgggtgtctcagagagcttgtcgttaacctcgacgacctcaccggagatgggggagttgatgtccctggtggccttcacactctccac

SEQ ID NO: 401459 - DNA, 386 bp, Oryza sativa nipponbare
agatacaaaaatgaaacatgggtaattactaggattacttaacacacggatcacagaaaatcaatccttgcatgcaggggaaatcgatggatcgacctctctccttaacttgttcttaattctcatgtacaatcaaagaaacacacacgcacacacacatgcgtgcactgcatctctctgagcaacgaactcgattgatttgattttgattcgctagggattaaagagaagctgagatagagatttcgacgatcatgcgacgctgaaggagctggctgcgctctcgacgaacttcctggcgcccttgaaccacctcttgtcgccggcctgcgccttgcagatgtacagcttgccgtcgttgacggtggccgtgatcagctggtgct

SEQ ID NO: 401460 - DNA, 419 bp, Oryza sativa nipponbare
tccacatccgtctgggaccctttgtataaatatatatagccggagcttccatatatttcattcacatatgcctcacccaacaacatatagtcgtagcagataccactcttacatcaagtcagagagagatcaggtgaaacaaaaacaaaagcagagcacggccggtaaaatcaaaagacgatgaacaaactgggaacacacgaaacagggtgggagacatcatcgaatcagagatgaacaattaaacaaggctatatatgacgatgacggcttagttgccaccagactcctcgcagcccgggggcttgtaggcgatgaagctgatgagctgcacctgcctgacgttgtcgaagccgatgatacggacgaatgcatcagggtacgccttcttggcctcctcgagctccttgagcacctgg

SEQ ID NO: 401461 - DNA, 424 bp, Oryza sativa nipponbare
tattatatgtatgtaaatattggatgaggggaaatcattttgaggagctagactagcgtgccttattaacaaggagatatgtaccattacatgatgattaacatataaatctgtagctacatggaattaaggtagtgcagcatatgaggaaggatgatagaagactccaattctccatggatgggaatgggatcaggtggccttgcggaactgtccggccagatcggaatacgcctcctcagagaacaccgtgttggactcattctaggataaaaagtccctggttacttactccgacgcctcacgagaaacaaaaacaaaagtctatcatgacagcttgggctatgaatacatctgggcgttgcacgccttgacggcgatgaggttggacgcctacatcgaaaacaccgggttgtttgaggtg

SEQ ID NO: 401462 - DNA, 350 bp, Oryza sativa nipponbare
gggggaaggatatatagccggagcttccatatatttcattcacatatgcctcacccaacaacatatagtcgtagcagataccactcttacatcaagtcagagagagatcaggtgaaacaaaaacaaaagcagagcacggccggtaaaatcaaaagacgatgaacaaactgggaacacacgaaacaaggggggagacatcatcgaatcagagatgaacaattaaacaaggctatatatgacgatgacggcttagttgccaccagactccttgcagcccgggggcttgtaggcgatgaaactgatgagctgcacctgcctgacgttgtcgaagccgatgatacggacgaatg

SEQ ID NO: 401463 - DNA, 431 bp, Oryza sativa nipponbare
gggaaacgaataaaatcattatggcaaggacatcatcttcttcttcatcttcttagtgtacacaacaccaactcgatcatcatctcgtcgcactaaacccatcttccccaacccaaagacaacgaactcgctggccacaaatccatccaaccacaattaaccactgctaagctacggtcccccacttcacttgccggggacgaagttggtggcgtacgcccaggcgttgttgttgacggggtcggcgaggtggtcggcgaggttctcgagggggcccttgccggtgacgatggcctggacgaagaagccgaacatggagaacatggcgaggcggccgttcttgatctccttcaccttgagctccgcgaacgcctcggggtcatcggcgaggccgagcgggtcgaaggcgccgccggggtagagcgggtcga

SEQ ID NO: 401464 - DNA, 401 bp, Oryza sativa nipponbare
aaataaataccagctcgatgagacaaatagtttaagcataaccatagaagtaacacagcagtgttaaaaaagagccaacaaattcatggcagcaacatgtaacaccacacatcaaaagttttcaacccatcaggcacgcaggaaacgtccacattccacagacaagctaacactagcatgcattggcctaattcagactcttatgaagagactcaggctgaagcatgatagactcatgatcctctctactcgatcagatcgtcatcgtcatctgggagaggttgtgctgctgcagccgcaagctcagcctcatgctgttgctgcattgccaggtcaatgggaacttccggaggtttaagagcaacagcttcaacgaaatgcaggttcgggtcaccagcaag

SEQ ID NO: 401465 - DNA, 418 bp, Oryza sativa nipponbare
ttataattaattcacaacaccggattggattgatcagggtcagaacctgcacagaaatacacactaccggttcagatctgaccctttcttcaatactcgtacattcatccacgcggtccacacgaatacgtacatctatacggtacacgtacgtacatttactgcaccgagtacacacacgcacactctactgcagagacgcgcattgtcgtcaacctagctagcttagctgaaggcgatgcgtcgccatggcagcacggcggcggcggcgctcacttgccggggacgaagttggtggcgtaggcccaggcgttgctgttgacggggtcggcgaggtggtcggcgaggttatcgcgggggcccttgccgctgacgatggtctggaccaagaagccttacatggagaacatggcgaggg

SEQ ID NO: 401466 - DNA, 426 bp, Oryza sativa nipponbare
caagtatcaagtgtagtgtatgatcatcatgcaagtacagtgttacatagattaatcacaatgcagtttgattaagcagtgggcatcatcacatcgcattcagaggaaggctatcttagattacagatgaatatgcagacacccagcttggtgttacatacatagactggatttgggtgaaatttagccggcgagggcgctggtgttgtagacgaggagggcgccgccgccgaggagcccggcgagggtcacggcccagatcagaagcccggtggttccaccaacgtaggggtcaccggtgggagaccattcctacggcgagtggattgggctgtagccgtcgacgtttgcgccgtacttgtcaacgaatgggtacacacccttgcccgggctcttcctggcagatgcatgaatatcgactgacat

SEQ ID NO: 401467 - DNA, 352 bp, Oryza sativa nipponbare
  unsure (1)..(352): unsure at all n locations
ttttattncaaaaacagcancgttttaaaaataatattagcccacacaacaccaacttnatcattattttgtcncactaaacccatttttcccaacccaaaaacaacgaactcgcttgccacaaatccattcaaccacaattaaccactgctaatctaccgtcccccacttcacttaccgttgacgaaattagtgacgtacgcccaatcattattctttaccggttcagccaaattatcatcaaaattctttaaagagcccttgcccattactatatcctctacgaaaaagcccaacatttataacatatcgaagcatccgttctttatctccttcaccttaagctaccaaa

SEQ ID NO: 401468 - DNA, 416 bp, Oryza sativa nipponbare
agcaaactttcgtcagggcatgggacatcatagttcatgcccaacaccatgctgataagtattgggcccaaattgtcttacaattacatacgcccacagtaagatgtacttagcacacttagtacaaccgagatggcagtgttctttgcatacatacaaaattacatcacttgcatagcattactgttacataacaacatctcatccaagatcaggaacgatgaagaagtcctcgtcgtcatcgggtatctccacccgtggcttcttgctttggcgtgcaccgctcgccttgtagagccccatgttgctcgctggctgcggcgaggcgaagagctcaggcacctccgccgccgtgctgcctcccttggccggcgactggacatggaacaggtcgatgtcatcgagccactccagat

SEQ ID NO: 401469 - DNA, 387 bp, Oryza sativa nipponbare
gaaggaaaaagaaaagcagagcacggccggtaaaatcaaaagacgatgaacaaactgggaacacacgaaacaaggtgggagacatcatcgaatcagagatgaacaattaaacaaggctatatatgacgatgacggtttatttgccaccagacttcttgcagcccgggggcttgtaggcgatgaagctgatgagctgcacctgcctgacgttgtcgaagccgatgatacggacgaatgcatcagggtacgcctttttggccttctcgagctccttgagcacctgggtggcgtcagtgcacccgaacatgggcagcttccacatggtccagtacctgccatcgtagtatccgggggatctgtggttctcacggtagacgaatccgacct

SEQ ID NO: 401470 - DNA, 408 bp, Oryza sativa nipponbare
  unsure (1)..(408): unsure at all n locations
ttaattaattcacaacaccatgggtgattgatcaggttcagaacctgcacagaaatacacactaccggtacagatctcaccctctctccaatactcgtacatccatccacgcggtccacacgaatacgtacatctatacggtacacgtacgtacatctactgcaccgngtacacacacgcacactctcctgcagagacgcgcatcgtcgtcaacctagctagcttagctgaaggcgatgcgtcgccatggcagcacggcggcggcggcgctcacttgccggggacgaagttggtggcgtaggcccaggcgttgttgttgacggggtcggcgaggtggtcggcgaggttctcgagggggcccttgccggtgacgatggcctggacgaagaagccgaacatggagaacat

SEQ ID NO: 401471 - DNA, 415 bp, Oryza sativa nipponbare
gtatgtaaatattatattatgggaaaggattttgaggagctagactagcgtgccttattaacaaggagatatgtaccattacatgatgattaacatataaatctgtagctacatggaattaaggtagtggagcagaggaggaaggatgatagaagactccaattctccatggatgggaatgggatcaggtggccttgcagaactctccgcccagatcgtcgcacgcctcctcggggaacaccgtggtgggctcgtcgtaggataggtagtccctgtcgacttcctccgccgccgcacgagaaacagcaacagcagccgatgatgagagcttggcctctgggtacatctgcacgttgcacgcctcgccgccgatgaggtcgcacgcctccatcggaaacaccgagatgttagagct

SEQ ID NO: 401472 - DNA, 426 bp, Oryza sativa nipponbare
ttttattgcaaaaacagcatcgggcttcttcatcttcttagtgtacacaacaccaactcgatcatcatctcgtcgcactaaacccatcttccccaacccaaagacaacgaactcgctggccacaaatccatccaaccacaattaaccactgctaagctacggtcccccacttcacttgccggggacgaagttggtggcgtacgcccaggcgttgttgttgacggggtcggcgaggtggtcggcgaggttctcgagggggcccttgccggtgacgatggcctggacgaagaagccgaacatggagaacatggcgaggcggccgttcttgatctccttcaccttgagctccgcgaacgcctcggggtcatcggcgaggccgagcgggtcgaaggcgccgcctgggtagagcgggtcgacgacctcccc

SEQ ID NO: 401473 - DNA, 422 bp, Oryza sativa nipponbare
ggaggggccgaaattttgcttctaatttcctagcatgttagcaaatatatattacatgaaaggatggacacatagtgaaattgtcacaggagtgaaaaaccagaatgatgtacaagtaagcaaacatgctctctccgaaacttcaaattctccatctcaaaaaacaaagcgtcctagctcaaggaaaaatggcttcaacaaatgcctcagcatcaaaaggctgaagatcctccatcccttcaccaacaccaataaactttactggaattccaagttcatctacaacgctaaccacacaaccaccacgagcagttccatcaagctttgttaggacgaatcctgtgactccaacaacatcattgaactccctcgcttgttgtagcatattcaagccagtcgtgccatccagaaccagcaagatc

SEQ ID NO: 401474 - DNA, 444 bp, Oryza sativa nipponbare
gaattgggattccgatggcctgataagtaatagcaagatttcgtatacatcaaagttttacacgtttagtacttgttcaagccacaagaaacaagaggccagtggtgcttgcttggaatatgtggtctcagaaagatcagatatcccaaactccaccattgggtcagaagatccattttctttcagcaatgtacattcagggctcatctaccccacataggattcctcttttcgtctatgtcaacgaccagcaggtggtctgggttcgagccgtttggtccctctttatatagagtgggcaaatatgcgtggtatgctggtaggtagcgcgacacaaaatccatgacctcctcatcagacattcctggtttcccatctgctctcatagctatctctgcctgcagtctccactggtacacgcaactaggttcctttatttttatg

SEQ ID NO: 401475 - DNA, 446 bp, Oryza sativa nipponbare
agcaaatcgatccatgcgaccgtgcgtgcaaatcagttggagcacaaatttacatgttacacccacaccctacacccatgcataataatacatcgtatatacgtacgtacatacatacccctctcgatcacacgcaccatcgatcgtacaaagttgcgtacatacatacgtacacacatatacgcatacgcacgtacatacatacataattaaaaactcgtaattaattaaatacgtagttgatggcatctctaatggaacttgaggctggtgaggatgttgttgtggacgggatcagcgaggtgatcaagcaggttctgcacggggccaaccccggtgaagagcgcctggacggagaagccgaggaaggcgagcatggcgagcctgccattcttgatctccttgagcttgagctccttcatctccggcttgcttttggtccccaa

SEQ ID NO: 401476 - DNA, 428 bp, Oryza sativa nipponbare
ttttaattcacaacacgatatgtcattgatcaggttcagaacctgcacagaaatacacactaccggtacagatctcaccctctctccaatactcgtacatccatccacgcggtccacacgaatacgtacatctatacggtacacgtacgtacatctactgcaccgggtacacacacgcacactctcctgcagagacgcgcatcgtcgtcaacctagctagcttagctgaaggcgatgcgtcgccatggcagcacggcggcggcggcgctcacttgccggggacgaagttggtggcgtaggcccaggcgttgttgttgacggggtcggcgaggtggtcggcgaggttctcgagggggcccttgccggtgacgatggcctggacgaagaagccgaacatggagaacatggcgaggcggccggtcttgatc

SEQ ID NO: 401477 - DNA, 352 bp, Oryza sativa nipponbare
  unsure (1)..(352): unsure at all n locations
acatcttataatggtaggccactttatattctactattttttttttttttttttatttttngaaacaaaaagaaaactttcaacccccaaatcattttatatccacatttctcatgcatacttcaaaaaaaactttttcctcccttacaaaaaaaaaccaaaactttatttacaacccaacaaacacaccggacacaaagcgctttttcgatcaaaacaaacaaaaccaccatggcaaactactactaggtaacccacaacccctaggctttacagggatacaaccccccggggaaaccggccggaaaaccgcggcaaaaatcaacccctgccctttttgccctttttggaa

SEQ ID NO: 401478 - DNA, 439 bp, Oryza sativa nipponbare
gaataaaacatgttttcaattgaatcgtcaatacaattatcgtttcatactgaacacatgataatgaaaaatcaaatgacaaacttttttagaaaagtacattattgattactaatagcacatacaacacatcaacacattgccacaatctctactgtcatttcacttgtcaaaatatttaacattaagactgttcgttcaatgattgtggttgtggctgctcaccttgccaagcccatacaatatcctttagtgctggtctcatctcttgtttgaccttttgatactcaagtgtatcaccatttatcttcgtaaattccactaaatgaaaatctggtgtgatctgaaatatttcagcattgatggacattacacctttccttccaggttttgatccttccatctttaacaaaccaccatttttcttcaagaattttaa

SEQ ID NO: 401479 - DNA, 447 bp, Oryza sativa nipponbare
gtctgaatattcagggaaggcgagtccaaggctccttttcgccatgcataaactaaaccaacaactaggataagcacgaaaatgaaagcttcgataaaaacggatatacccaatacgtcgaaactcattgcccaagggtagagaaagaccgtttccacatcaaaaacaacaaaaactagcgcaaacatgtaatagcgtattcggaattgtaaccaagccccccccatgggttctatacccgattcataactagaaagcttctctggtccttcacgaaccggagctaaaagtgctgaaatccaaaatgctaaaataggaataaggcttgctattattagaaatgcccaaaaaatatcatattcgtaaagcagaaacataaatgtactcccattaatgtggaataggcggaactgaattagtcaattcaagtcagcattggcaatttat

SEQ ID NO: 401480 - DNA, 400 bp, Oryza sativa nipponbare
ttttacagcagaaaatgggaaggcactttatagtcgacgaatcgtcagtataatatctacatgcatctcatcagatgagatcagatcgagtacaacaagatggcgtatgcaggttgcgcatgcatgcatgaaaatcgagataaaaagggattaattaattattaacatatatatatccatcagtagacttccacattccattgctccgacttcttcagctgcttcttgtagtcaagccagtcgatgcctacatacagtatataatgcaagaaagaaagtaattaggaatcgaatagagatggagattaaaagaagtactagtacagtaccgtcttttgcagcgaggtcgatcatgatgtcgtcgatgcctttctccatgcccttgaggccgcacatgtag

SEQ ID NO: 401481 - DNA, 390 bp, Oryza sativa nipponbare
gggaaacgaataaaatgattagggcaaaaacatcatcttcttcttcatcttcttagtgtacacaacaccaactcgatcatcatctcgtcgcactaaacccatcttccccaacccaaagacaacgaactcgctggccacaaatccatccaaccacaattaaccactgctaagctacggtcccccacttcacttgccggggacgaagttggtggcgtacgcccaggcgttgttgttgacggggtcggcgaggtggtcggcgaggttctcgagggggcccttgccggtgacgatggcctggacgaagaagccggacatggagaacatggcgaggcggccgttcttgatctccttcaccttgagctccgcgaacgcctcggggtcatcggcgag

SEQ ID NO: 401482 - DNA, 360 bp, Oryza sativa nipponbare
  unsure (1)..(360): unsure at all n locations
gaatcatacntaagggggtggggatacaatatcaacatggagggtacattgccggttccatatgaacaaacataaaaacaccgaaaccccatatggccattatgccgatcctagcctagcttggcgaggacatcgccaagagcagatttggtcaacgtgtagtacttctccgcctcttcggggctcttgatcttggctgcatggtcaagcccgtcaatggtggcgaaaagcttgccggtgaggtccttgaggcccttcttctcgtccttgggcttggagttgatgacggttttgaggtcccagcgcaggtaggaggccctgaggcggaggtcgaccctgacagaacggccactgcttatt

SEQ ID NO: 401483 - DNA, 437 bp, Oryza sativa nipponbare
acgtgataccatccattttttgtattggcgacgaatttatcagatatgctctcgatacatatcttgtgtgtatatagccggagctttgttttcacatatcctcacccaacgataattgtagtactcttacaataaaaccggccggagagggagggaagagattattacatatgtgttaagagcagaggccattgagatggtacataaccaaactgtaaaataaaaatatatagcatattatatattgatatatcatcaacatagcccaaaacaaagctgcatactattattataggcagcaatccaccagcgcgatgcttgatcttagcttagttgccaccagactcctcgcaacctgggggcttgtaggcgatgaagctaatcaactgcacctgcctgacgttgtcgaagccgatgatacggacaaaggcattggg

SEQ ID NO: 401484 - DNA, 404 bp, Oryza sativa nipponbare
aaagaagaagatgcagggacggggatgataggtaatcaccacctttattcgattcttcgtcgtcatcgctgtttggtacattaccatggcagtccaggcgaaattttcagaaacctcccaccccttgggctacctggcgaacatgcatactacatacaacggggcctttgacaggcagcaaagtttcacccatcccagggcatggatttaatattctttacccggtgcaccaacagcaggcgaactgggtggcggtaaagagaagggcgtcatcatcagaggagcacctgagctgcagctagcctagcaattgggaccctgaaaggcgaacaagaaacatagtccagcccagccttcgcaaagaaagcgactgacagaggctctccaccatgttcaccacagat

SEQ ID NO: 401485 - DNA, 424 bp, Oryza sativa nipponbare
tttatacatcgaggttgaagaggaattaagtaaaagctgcagtaccttcacaaaattatactccttactccttagcatagagctgatcgatggagcgtataaaaatttaactttacatacagagaccaaattatatgcaataggattaatttgccgctgttccgttctgccaaactgcaggcagaaccatcgctgctgagaattgctttccttccttcgttcgttgtgcttcagatcctggacgggatgagcggcgtcgaattcgacaggtacgccgccgccgccgccacgccggagccgagcttcaccgggtagccgatgtccttgagcaccatctccactccactcagggcacccatcaattgcagctcgttgaggtggccgaggtggccgatcctgaacaccttgccggcgaccttgttga

SEQ ID NO: 401486 - DNA, 454 bp, Oryza sativa nipponbare
accaaaaatttgaatcgttttgttttgtgacggaagattccatccagtacatctcacaagtaccttgttccagaccaaatacatatatattagcataaagcaaaagagggttgcgttttccagcgcacttcaaagtgccagcttcactcgttgctgggttctccgcgctccagcttacaacggaagcaagtgttattcaccgtggatcgttatctaatccttattattgcataatatagcgtccatcttgatgagcttcgtcttggtgcatctcgtatttaggagacagggctagcagtaatgccccatatttcctttgcatactgagcgatagtacggtcgctgctgaatttgccacttccagctgtgttcagtatagacatcttgatccatttttttatccttgtaggcttcatcaacctgggcctgtgcatcaatatagcttgggaaatca

SEQ ID NO: 401487 - DNA, 629 bp, Oryza sativa nipponbare
ttagatgcaaaatctggaacgggaaattaccacatctcatgccaacagaataagtggtttgatagtgtcgatctagcttaagcgacacagaacctgtcatgctcatattcacattccactaacaagctggaaatcccatgaaaaatacaaagctggaaacccctaaataaataagctggaaagataatctaaataaacattactgtagcacatcgacacaaatgtatttgctgtgcccttgccaaacacacttaagaaactgatgaagtcaagctcatgtttcatttctgggggtgccagcctcttccgttgtggttgaatttggcccttcgatcgctgctctgaccgcttctgattgttcaggaccgtttattatataatttgctgttgaagcacccctggcggccatgtgctctatgaaatggatctcatcttcatgggtgctcacgaacctggttaagttccttcaatggaatattaaggatcctatcgatttttgcttgatgtttcaggaaaaacgggccgatataccttctatatacatgctttgctccactgtttgaaggaaactggagccagacaagaatagcaaacttcacgtgataatagaaaggaacactggccaatac

SEQ ID NO: 401488 - DNA, 424 bp, Oryza sativa nipponbare
tttataataacgatgcgagcaggaattcgatcatcccttggatgcggcctgcggcttacattaaatctcgatccaaagaagcaaagatgatgacagacagaaattaattaagctagaaatctcctcgatcgatcacacacacacacacaattaagggacatacatacatgcactgctgcaactgcaactgcagggtcggtgcgtggctactacaagtgtacacatggtacgttggttggcaccatctcgatcgtgtcgttgtgctcacttgccggggacgaagttggtggcgtatgcccaggcgttgttggcgacggggtcggcgacgtggtcgaagaggttctcgatggggcccttgccggtgacgatggcctggacgaagaagccgaacatggagaacatggcgaggcggccgttcttgagc

SEQ ID NO: 401489 - DNA, 409 bp, Oryza sativa nipponbare
cgatcatcccttgggtgcggcctgcggcttacattaaatctccatccaaagaagcaaagatgatgacagacagaaattaattaagctagaaatctcctcgatcgagcacacacacacacacaattaaggtacatacatacatgcactgctgcaactgcaactgcagggccggtgcgtggctactacaagtgtacacatggtacgttggttggcaccatctcgatcgtgtcggtgtgctcacttgccggggacgaagttggtggcgtatgcccaggcgttgtatggcagacggggtcggcgacgtggtcgaagaggttctcgatggggcccttgccggtgacgatggcctggacgaataagccgaacatggagaacatggcgaggcggccgttcttgagctccttcacct

SEQ ID NO: 401490 - DNA, 430 bp, Oryza sativa nipponbare
tcatgaacaagggtttatcatgtgttatcacggatatctacaggcagcttcagtagcagaaacgtagcattcagtcacgtttagatattttagatacaggcttcaagatagaatgaacatgaactggcatcactgaagcacacagcagcgaagccagcaaaccacccatcaagcagaacgaacattcagctgctaccgtcagtaggacgcgacgcagttgggtacacctgagaactcgcaaacccgacaaaagacgccacccttccgaatcgagtccccttgcgcaacttattctagttcttctttggcttcaccgggcccctgggtatcttgctcaaaaccttggcatccagcacctcatagtgcttgcaggcctcagagtgagcccttccagcaaagtggtcgaccttatcctggtacttgtcataca

SEQ ID NO: 401491 - DNA, 412 bp, Oryza sativa nipponbare
  unsure (1)..(412): unsure at all n locations
taattaattcacaacaggatggttcattgatcaggttcagaacctgcacagaaatacacactaccggtacagatctcaccctctctccaatactcgtacatccatccacgcggtccacacgaatacgtacatctatacggtacacgtacgtacatctactgcaccgngtacacacacgcacactctcctgcagagacgcgcatcgtcgtcaacctagctagcttagctgaaggcgatgcgtcgccatggcagcacggcggcggcggcgctcacttgccggggacgaagttggtggcgtaggcccaggcgttgttgttgacggggtcggcgaggtggtcggcgaggttctcgagggggcccttgccggtgacgatggcctggacgaagaagccgaacatggagaacatggcga

SEQ ID NO: 401492 - DNA, 319 bp, Oryza sativa nipponbare
acagcgctcgccctttttttttgttgaatctaaaccaggggtgggttcggaacaccatatttcattgatccaggtcaaaacctgcacagaaatacacactaccgggacagatcttaccctgtatgcaatactcgtacattcatccacgcggaacacacgaatacgtgcatatatacggtacacgtgcggacatctacctggccgagtgcacacacttactctttggtgtagagacgatgatggaagccaacctaactaggttagctgaaggcgatgcgtcgtcatggcagcacagcggcggcggcgctcatttgccggg

SEQ ID NO: 401493 - DNA, 415 bp, Oryza sativa nipponbare
gaagaatctaaaccatttcttggcaatcaccaaatttacaatgttttacatgcctaatccttctctataattgacaagaacgcgaggtgaaatgatgtgaatgtgtaataatcgatatgtcgaaacaaaaacattacacgagcgaacatccagtctctgtgtgtcgctcacgagcaggagcactgcgagctcttcttcatggcgctggtctccatgatggagccgacgtccagcgtggtccccttcagcgacagcacctcgccgccgccggcgccgccgtcgcgcatccgccgtgcctcgtcgagctccagcgccctgcgcgacacgacggcgaagatctcctcgagcagcgtgaggaaggcgcggtccacgttgtcgcccgacagcgcggacgcctcggagaagaagagcccct

SEQ ID NO: 401494 - DNA, 408 bp, Oryza sativa nipponbare
agcccatatcggtatgttatattattattaacaaaaacttgtcatgcccagctatggcttgggcgcgatctgatacacagaacaaagagaaaacataaaaaggagaaataattaatagcaagcgtcaagccggcctgcttaaaaggtgtaaaggcagctgccgtcgtcgctcctcgccgttgggtcgaagttcttggcaacagggtcggtgcaaccttccggcacaggcaggttacctgcttgctgtgctccttgccctcctcctcctatgcaggccgcctacgatgcatcgatgggatgcgaatagctagagatcttttattcagctggatggcgcagaaccgtagaaggaaccagtcttcatggcgtcggagttagcgtcaccaagagcagcctcgctcaagtact

SEQ ID NO: 401495 - DNA, 328 bp, Oryza sativa nipponbare
  unsure (1)..(328): unsure at all n locations
accccatatcgccatgctatattattaaaaacaaaaactcctcattcccanctatggctttggctcgatctgatacacagaacaaacagaaaacataaaaaataacaaattttaattgcaagcgtcaagcccacctacttaaaaagtgtaaaaacatctgccgtcttcgctcctcaccgttgagtcaaaattcttggcaacaaggtctatgcaaccttccggcacaagcaggttacctgcttgctgtgctccttgccctcctcctcctatgcaagccccctacgattcatcaatgggatgccaatttctagagatcttttattcaact

SEQ ID NO: 401496 - DNA, 425 bp, Oryza sativa nipponbare
acgtgataccatccattttttggattggcgacgaatttatcagatatgctctagatacatatcttgcgtgtatatagccggagctttgttttcacatatcctcacccaacgataattgtagtactcttacaataaaaccggccggagagggagggaagagattattacatatgtgttaagagcagaggccattgagatggtacataaccaaactgtaaaataaaaatatatagcatattatgtattggtatatcatcaacatagcccaaaacaaagctgcatactattattataggcagcaatccaccagcgcgatgcttgatcttagcttagttgccaccagactcctcgcaacctgggggcttgtaggcgatgaagctaatcaactgcacctgcctgacgttgtcgaagccgatgatacggac

SEQ ID NO: 401497 - DNA, 425 bp, Oryza sativa nipponbare
tttttaaatatatatagccggggcttccatatatttcattcacatatgcctcacccaacaacatatagtcgtagcagataccactcttacatcaagtcagagagagatcaggtgaaacaaaaacaaaagcagagcacggccggtaaaatcaaaagacgatgaacaaactgggaacacacgaaacaaggtgggagacatcatcgaatcagagatgaacaattaaacaaggctatatatgacgatgacggcttagttgccaccagactcctcgcagcccgggggcttgtaggcgatgaagctgatgagctgcacctgcctgacgttgtcgaagccgatgatacggacgaatgcatcagggtacgccttcttggcctcctcgagctccttgagcacctgggtggcgtcagtgcacccgaacatgggca

SEQ ID NO: 401498 - DNA, 415 bp, Oryza sativa nipponbare
tataaaaagttcatgaaatttaataagatagactatgataatataagacactttacaaatatgtaagtctaaattcgatctacacatgaaaaaataaaaataacaaattttatctgcgatgtacgggtacaattaactatctaattttgttaattttgtttctctagttgtagatagtcttgcatgtttgtgtttaaacttatatcatcacaattaatgttacaattttttttcaataactatctgagtcgctagtaaatgatgggtgccataacacctaggtgtagaaaaatacttatccttagttgtcaccttgctagtaatatctatatgtcgccgttggccttgttctcttccgatgtccttttgtccttcccttcgtcttcaccggtggtcggtgcctgctctttgggtt

SEQ ID NO: 401499 - DNA, 411 bp, Oryza sativa nipponbare
ttaaaacatttaaagcatattgaacatgtaaaacatatttaagtaaccgggggccaaacccacctagcataatcaattgcaattgtaatacagcagtaaaacaaaaggggtaattctgccgcggccacctggtaaaaactgaaacatcatcacattactgaatgtctgttcgaatctgagactagaagtccaaactcaagcatcaggtgataataagtctttagttaacagaaagtacgagtagcccaagtggtatgattgccaactgggatttgaaaacaaaaggtgtatgatcaatatttttctcatcacatatacgaaggtgtattgatttagtcgacctcctcaatcttagggccagcaccactcccaccagcagccggagcatcatcgtccattccaccacccatg

SEQ ID NO: 401500 - DNA, 418 bp, Oryza sativa nipponbare
  unsure (1)..(418): unsure at all n locations
ccacgcgtccgcccacgcgtccgcgctcgctcatcgccatctctctcagctctcacagctcactgcatcaatggccgcggccaccatggcgctctcctccccggtgatggcccgcgcggcgccgtcgacctcctccgcgctcttcggcgaggcgcggatcaccatgcgcaagaccgccgcgaagcccaagccggcggcgtcgtcggggagcccgtggtacggcgccgaccgcgtcctctacctcggcccgctctccggcgagccgccgagctacctcaccggcgagttcccgggcgactacgggtgggacaccgcggngctctccgccgacccggagacgttcgccaagaaccgggagctggaggtgatccactcccggggggcgatgctgggcgcgctcggctgcgtctttccggag

SEQ ID NO: 401501 - DNA, 599 bp, Oryza sativa nipponbare
  unsure (1)..(599): unsure at all n locations
ccacgcgtccgctcgctttgctgctgctcctcccgggggtccttcggctgctgatcggattcgcggcgtcccaggctagggatccgggcggtggcggcgatgggcggcggcggcggcgcggaggaggagctgacggcgcaggagacggcgctctacgaccgccagatccgcgtctggggcgttgacgcccagaagaggctaagtaaagctcatgtgctcgtgtgcggcatgaatggtactactactgagttctgcaagaatattgttctagcaggagttggcagtttatccttgatggatgatcatttagtcacagaggatgatctcaatgcaaatttcttaattcctcatgatgagagcatatantggtggtagatcacgagctgaggtttgctgtgagtccctgaaagatttcaatccaatggtccgagttgcagtcgaaaagggtgatccatcattaattgatggagaattccttgacaagtttgacataattggagttagctgtgcgcctattaaaacaaagttgttaattaacgacaactgccggaagagaagcaagcatattgcattctacgccattgagtgcaaggattcct

SEQ ID NO: 401502 - DNA, 436 bp, Oryza sativa nipponbare
ccacgcgtccggcataagcaacacaagggattaactcatcactcacttagctaattaaatcttcgaccatgtcggacaagtgcggcaactgcgactgtgctgacaagagccagtgcgtgaagaaaggtaccagctatggcgtcgtcatagttgaagccgagaagagccacttcgaggaggtcgccgccggcgaggagaacggcggctgcaagtgcggcaccagctgctcctgcaccgactgcaagtgcggcaagtgaagtcacgaagcaaccgaacactcgccgccggcgagtcacctaccttaattagtccacaataaaaaccacccatatgagtgtggtttgtgtgtgtgctgattattgctgaattaaacccgtgtgttatcgattaattaagcagctggtcgcttcggcgactatgcgtgtatcaacgtatg

SEQ ID NO: 401503 - DNA, 498 bp, Oryza sativa nipponbare
ccacgcgtccgcccacgcgtccgggagaagacgcagatcaacattgtggtcattggccacgtcgactccggcaagtcgaccaccacgggccatctgatctacaagcttggaggtatcgacaagcgtgtgattgagaggttcgagaaggaagccgctgagatgaacaagaggtccttcaagtacgcgtgggtgcttgacaagctcaaggccgagcgtgagagaggtatcaccatcgatatcgccctgtggaagttcgagaccaccaagtactactgcacggtcatcgatgcccctggtcaccgtgacttcatcaagaacatgatcacgggtacctcccaggctgactgtgccgtgctcatcattgactccaccactggtggttttgaggctggtatctccaaggatggccagacccgtgagcacgctcttcttgctttcactcttggagtgaagcagatgatctgctgcttgaacaagatggatgccaccactcccaag

SEQ ID NO: 401504 - DNA, 580 bp, Oryza sativa nipponbare
  unsure (1)..(580): unsure at all n locations
ccacgcgtccgcccacgcgtccgcccacgcgtccgccctacaatatggggtcaaaaagccaaaaaaataagtgattcgtttttagcccttataaaaagaaaacggattcttgaacctctttcacgctcatgtcacgtcgaggtactgcagaaaaaagaactgcaaaatccgatccaatttttcgtaatcgattagttaacatggtggttaaccgtattatgaaagacggaaaaaaatcattggcttatcaaattctctatcgagccgtgaaaaagattcaacaaaagacagaaacaaatccactattggttttacgtcaagcaatacgtagagtaactcccaatataggagtaaaaacaagacgtaataaaaaaggatcgacgcggaaagttccgattgaaataggatctaaacaaggaagagcacttgccattcgttggttattagaagcatcccaaaagcgtccgggtcgaaatatggctttcaaattaagttccgaattagtagatgctgccaaaggggntgggnggtgccatacgcanaaaggaagcgactcatagaatggcagaggcaaatagag

SEQ ID NO: 401505 - DNA, 402 bp, Oryza sativa nipponbare
  unsure (1)..(402): unsure at all n locations
ccacgcgtccgcccacgcgtccggaacgatggccgcgtcggcgctgcaccagaccaccagcttcctcggcaccgcccctcgccgggatgagctcgtccgccgcgtcggcgactccggtggccgcatcaccatgcgccgcaccgtcaagagcgcgccccagagcatctggtatggacctgaccgtcccaagtacctgggcccgttctcggagcagacgccatcgtacctgaccggagagttcccgggagactacgggtgggacacggcggggctatcggccgacccggagacgttcgcgaggaacagggagctggaggtgatccactcgcggtgggcgatgctgggggcgctgggctgcgtcttcccggagatcctgtccaagaacggngtgaagtttcggga

SEQ ID NO: 401506 - DNA, 650 bp, Oryza sativa nipponbare
  unsure (1)..(650): unsure at all n locations
ccacgcgtccgcagagatcaggtagaacagtgagagtgaggtgcagaaaaatttgagctgaagctgaggatggcaacatccatgatcacctcgccgctggtggcgccggcccgggccaagggccttccgtccatctcccgccggggatcctccttcgccatcgtctgcagcggtgggaagaagatcaagaccgacaagccctacgggattggaggtggcatgtcagtcgatattgatgcatctggcaggaagagcacggggaagggtgtgtaccaattcgttgacaagtacggcgcaaacgtcgacggctacagcccaatctactcgccggaggaatggtctcccaccggtgacacctacgttggtggaaccaccgggcttctgatctgggccgtgaccctcgccgggctcctcggcggcggcgccctcctcgtctacaacaccagcgccctcgccggctaaatttcacccaaatccagtctatgtatgtaacaccaagctgggtgtctgcatattcatctgtaatctaagatagccttcctctgaatgccatgtgatgatggccactggttaatcaaactggattgtgattaatcatgtacactgtactttgcatgatgatgtatactacactttgtacttgaattngg

SEQ ID NO: 401507 - DNA, 556 bp, Oryza sativa nipponbare
ccacgcgtccggttcttcgaggagcacgacgactacaagttcaacggcctggcgtggctcttcctcggggtgcccaccagcagcacgctgctgtacagggaggagttcgagcggatgaaggagatcgcgccggagaggttccggctggacttcgcggtgagccgggagcagacgaacgcggcgggggagaagatgtacatccagacgcggatggcggagtacaaggacgagctgtgggagctgctcaagaaggacaacacctacgtctacatgtgcggcctcaagggcatggagaaaggcatcgacgacatcatgatcgacctcgctgcaaaagacggcatcgactggcttgactacaagaagcagctgaagaagtcggagcaatggaatggtggaagtctactgatggatatatatatgttaataattaattaatccctttttatctcgattttcatgcatgcatgcgcaacctgcatacgccatcttggtgtactcgatctgatctcatctgatgagatgcatgtagatattatactgacgattcgtcgactat

SEQ ID NO: 401508 - DNA, 396 bp, Oryza sativa nipponbare
ccacgcgtccgcccacgcgtccggcggcggagagggacgccgactcgatccaggcgctgctgaattcgttccccaaggaccagctcgttgagctgctcagcgccgcggcgctcagccacgaggacgtgctcacggccgtccaccgcgcggccgacgccgacccggcgctgcggaagatcttcgtccacggcctcggctgggacgccaccgcggagaccctcaccgaggcgttcagcgcctacggcgagatcgaggacctcagggtcgtcaccgaccgcgccacgggcaagtgcaagggctacggtttcatcctcttcagccgccggtccggcgcccgcgcggcgctccgtgagccccagaagaagattggcaaccggaccacggcctgccagctcg

SEQ ID NO: 401509 - DNA, 303 bp, Oryza sativa nipponbare
  unsure (1)..(303): unsure at all n locations
cgcctgcggtaccgtccggatcccggtcgaccacgcgtccgacacgcgtccgcgtcttcttgctggtgtgttcgaggaggaggaggaggaggagaagctagcggcggcggcggcaatggcgacgagcgggctgaggagcntgcagcgcggtggcgtgccgagcctngctggcgccgcgncgaacaggagccgcctgccggnctgcgcctacgccaccagctgcgggcgcgtcaccatgtccgccgagtggatgccgggccagccacgccctcgccaccttgacggattctctcccggtgactt

SEQ ID NO: 401510 - DNA, 342 bp, Oryza sativa nipponbare
ccacgcgtccggcataagcaacacaagggattaactcatcactcacttagctaattaaatcttcgaccatgtcggacaagtgcggcaactgcgactgtgctgacaagagccagtgcgtgaagaaaggtaccagctatggcgtcgtcatagttgaagccgagaagagccacttcgaggaggtcgccgccggcgaggagaacggcggctgcaagtgcggcaccagctgctcctgcaccgactgcaagtgcggcaagtgaagtcacgaagcaaccgaacactcgccgccggcgagtcacctaccttaattagtccacaataaaaaccacccatatgagtgtgggt

SEQ ID NO: 401511 - DNA, 422 bp, Oryza sativa nipponbare
  unsure (1)..(422): unsure at all n locations
ccacgcgtccgggaagaaatatgtcccagatctattgatagttgtatctcctgtctacatttggttggctttcatgtccttgcaggcacacaaagaagaaaggtttctttatccaatttacccattgatatgtgttgcagctgcagctgttattgacacctttccagattttttccatgacaaatattcatctgaacagtctatctttgaaaagatagcaaagggcctgcggcctttgatccttggcttcattttgtgtgcttcccacagccgaacattctccatgttgaatggatatggtgcccctattcagatctaccagcatctggaacatcatgaagatactgngcctggttctgttctctgngttgggagtgaatggcaccgctatccatcatcgntcttcataccctcctatatta

SEQ ID NO: 401512 - DNA, 466 bp, Oryza sativa nipponbare
  unsure (1)..(466): unsure at all n locations
ccacgcgtccgcaaaaaaccaacccaaccgccgccgcatcgccctcgttagaacgatggccgcgtcggcgctgcaccagaccaccagcttcctcggcaccgcccctcgccgggatgagctcgtccgccgcgtcggcgactccggtggccgcatcaccatgcgccgcaccgtcaagagcgcgccccagagcatctggtatggacctgaccgtcccaagtacctgggcccgttctcggagcagacgccatcgtacctgaccggagagttcccgggagactacgggtgggacacggcggggctatcggccgacccggagacgttcgcgaggaacagggagctggaggtgatccactcgcggtgggcgatgctgggggcgctgggctgcgtcttcccggagatcctgtccaagaacggngtgaagttcggggaggcggngtggttcaaggcccgcgcgcagatcttctcc

SEQ ID NO: 401513 - DNA, 479 bp, Oryza sativa nipponbare
  unsure (1)..(479): unsure at all n locations
ccacgcgtccgcagctgcaaggagaaggagaaggtaggctccagccatggcttcccagctctccgccgccacatccgtgccgcagttccatggcctccggacctactcctctcctaggtccatggtgacgctgccatcgttgaggatgagcaagaagaggtcccagggcatccggtgcgactacatcggctcagccaccaacgttatcatggtgacgacgacgacgctgatgctgttcgcggggaggttcgggctggcgccgtcggcgaacaggaagtcgacggcggggctgaagctggaggcgcgcgactccggcctgcagaccggcgaccccgccgggttcacgctcgccgacacgctggcctgcggcgccgncngccacatcatgggcgtcnggggcggcctcggcctcaagaacatcngcggcctggaccagatcatcggctaatcaaactcattaaggtggggacacgcgtcat

SEQ ID NO: 401514 - DNA, 438 bp, Oryza sativa nipponbare
  unsure (1)..(438): unsure at all n locations
ccacgcgtccgccgcatcgtccgcctgccccctccctcggcgaccttccgcgtcgctgacctcctcggcggccggggtctctgcaacggcgaggtcggcatccgcaaggagctcgcctccgactcccccgccgcgccgccatccaccaccacttcttccgacgagcccgcggagtcgccaccgccgccgccggctgcgtccggggtggacccggacgcgttcgacaaggagatgatgggcctcaccggcggattccccggcggcgaggtcggcctcaaggacttcgtcgccaagaacccgcctccccccaagccggcgcacaggaaaggtctcgccgccgccgccacggtggagcggccgagggcgccggagctgccgctgttnctncccgggatggnggggctcgtaaagaaccccaacaacgcctacnaaatgtac

SEQ ID NO: 401515 - DNA, 404 bp, Oryza sativa nipponbare
  unsure (1)..(404): unsure at all n locations
ccacgcgtccgctgatgcattcgtccgtatcatcggcttcgacaacgtcaggcaggtgcagctcatcagcttcatcgcctacaagcccccgggctgcgaggagtctggtggcaactaagccgtcatcgtcatatatagccttgtttaattgttcatctctgattcgatgatgtctcccaccttgtttcgtgtgttcccagtttgttcatcgtcttttgattttaccggccgtgctctgcttttgtttttgtttcacctgatctctctctgacttgatgtaagagtggtatctgctacgactatatgttgttgggtgaggcatatgtgaatgaaatatatggaagctccggctatatataaaaaaaaaaaaaaaaaaaaaaaaaaaanannannnnnaannnggg

SEQ ID NO: 401516 - DNA, 473 bp, Oryza sativa nipponbare
  unsure (1)..(473): unsure at all n locations
ccacgcgtccgcccacgcgtccgcccacgcgtccggagaaaacagccgcttgttcagcgggaggcatccacgagcatgaatgataacgagggcggattctcatggctgacagctctgggattcggtttccttaccttcaactccgggatggcgatctaccggtccgatggcgatcgtggatcggtggcgttcgtattaacatcgtacatcgatctcgtgctgctcttcgcgtgcctccgtctcttcgagaaagcgccgagggactctgcccgccgggaatggctcaaggtctttgtatggggactgacgacgttgctcacggtgatgttctcgtacaaggtggcggcaatcatgccgccggtggtcgccgtgatcgtctgggcgatggcatttgccacaatcggtggtgggttctacgccttcttcgtgcaccaggacanggcttgtcagctagagcaggccaacagatagat

SEQ ID NO: 401517 - DNA, 452 bp, Oryza sativa nipponbare
ccagcgtccggattgcgatacggtttgctgaattgcatgatacatccctcagaatggctgcgaaaggtgtgattaagaaagttgtggactgggaagaatcacgatctttcttctataagagattacggaggaggatctctgaggatgttcttgcaaaagaaattagagctgtagcaggtgagcagttttcccaccaaccagcaatcgagctgatcaagaaatggtattcagcttcacatgcagctgaatgggatgatgacgatgcttttgttgcttggatggataaccctgaaaactacaaggattatattcaatatcttaaggctcaaagagtatcccaatccctctcaagtctttcagattccagctcagatttgcaagccctgccacagggtctttccatgttactagataagatggatccctctagaagagctcaacttggtgaagaa

SEQ ID NO: 401518 - DNA, 520 bp, Oryza sativa nipponbare
ccacgcgtccgcggacgcgtgggcggacgcgtgggcggacgcgtgggctccgacgaccaccggagtcggagagcatcaagaatcgacgacgatcgatcatggccatccccaccatcctgggcagtctgaagctcacgccatccccaccctccgccacgccggtgcgctcctccgcctcctcctccctgcatttccacctcgccaacgccggcgccgccgcgctcgtcgcggcctcgctcctcgtcgccgacccggccctggcattcaagggaggaggcccgtacgggcagcaggtgacacgggggcaggacctcaccggcaaggacttcagtggccagacgctcatcaggcaggacttcaagacgtctatactgaggcaggcgaacttcaaaggcgcgaagctgctcggcgcgagcttctttgatgcagatctgacaggtgctgatctctctgatgctgatcttagaggtgcagatttctcactggcaaatgtatcgaagggaaatctgccaatgccaac

SEQ ID NO: 401519 - DNA, 448 bp, Oryza sativa nipponbare
ccacgcgtccggagactattataaagtttataaaggcccttgggttgaatgatatagatgctgcaaatgtgcacaatggagattgctaaacgcattgatcgcaatgctggtgtaggacaacagcaggcatttgaaaagcttatatttgtaacaaatcttgtgtttcgggatgcatatgaatacctacttccatggaaacgtcttttcggggttcaatgaatctcagatagaacgatgttatgagggaaagtgccaagagtttatatgcatcattgctcaagtctattgggagaggtcttgacataggcacattaattgaagtaaggagatcacaactagcatataaactttctgatgagattgcttctgagatgttcagggagcatgcaaagaagttagttgaagaaaacatttcaacagccttgaacaacttgaataaccgaacaca

SEQ ID NO: 401520 - DNA, 536 bp, Oryza sativa nipponbare
ccacgcgtccgtgagaatttccttaaagtctcatatagtgatctagctcaagccacaagaaacttctcggaggctaaccttattggcaaaggaagctatggtacggtgtacagaggtaagttgaaggaatgtaagttggaagtagccgtgaaggtttttgaccttgagatgcgaggtgccgaaagaagcttcatatcggaatgtgaagctctcagaagcattcaacatagaaatcttcttccaatcataactgcatgctcgaccgtggacagtacgggcaacgttttcaaagctttagtttacgagtacatgcctaatggcaacttggacacttggatacatgacaaagagggtgggaaagctcccggacgtttgggtttaagacaaacaattagcatatgtgttaacatagccgatgcactggactatttacaccatgaatgcggaagaacaactatccattgtgatttgaaacccagcaatatacttttagctgatgacatgaatgctcttttgggagattttggcattgcaag

SEQ ID NO: 401521 - DNA, 444 bp, Oryza sativa nipponbare
  unsure (1)..(444): unsure at all n locations
ccacgcgtccgcgaagcgagaagcctcttttggatctatccattcgggtcaccgtggcagttcggtaattttggcggagaggaggaggaggacgacgacgacgacgacgtgatgggtctcctcgacaagctgtgggacgacaccgtcgcggggccccgccccgacaccggcctcggccgcctccgcaagcacgccgccgcccgccccgccgccgtcaagatcaacgacccgacaggggacgcggcgatggtggccgtcccgccgacgacgccggccggggcggaggaggcgccggtgaaggtgacgcgcagcatcatgatcaagcgccccgcggggtacccggcgtcgccgaggagcgcggncagcacgccgccggccttccccgccggatccacccttcccatctcgccgttcgccggcgccggtggtcgcttcagaaggaaa

SEQ ID NO: 401522 - DNA, 445 bp, Oryza sativa nipponbare
ccacgcgtccgccagttctaccgcgtcttccccaatggcgaggtgcagtacctccaccccaaggacggcgtctacccggagaaggtcaacgccggcaggcagggcgtcggccagaacttccgcagcatcggcaagaacgtcagccccatcgaggtcaagttcaccggcaagaacgtcttcgacatctagacttcttcttcttcttcttcttctctcataatcgacctattaattacttgtgttttgggtggatggacatgtaattttaatcatctgtcaggctgctcttcagttattgatgatggtgtaatcgatcgatggtgggatataatctcttcttataatattgtagtatatgtttggtgaattttgatgcgtgttcattaacgtgttaattattgtgacttaattcacatgatcaaacaatcggaattcatcataaaaa

SEQ ID NO: 401523 - DNA, 437 bp, Oryza sativa nipponbare
  unsure (1)..(437): unsure at all n locations
ccacgcgtccgcgcttcgcttcctcccctctctaagccggggaagctaagccatggcgtccgtcaccgcccgcaccccggtcgcagccctccgctcgtcggcgtcgctcaagtctaccttcctagggcaatcctccacccgcctcgcccgcgcaccgactacgaggcgtaatgttcgggcggaggccaagggagagtggctccccggcctcccttctcccacctacctcaacggcagcttgccaggcgataacgggttcgacccgttgggtctggcggaggacccggagaacctgcggtggttcgtgcaggcggagctggtgaacgggcggtgggcgatgctgggggtggccgggatgctgctgcctgaggtgctgacgaagatcggnttgatcgacgcgccgcagtggtacgacgccggcaaggccacctacttcg

SEQ ID NO: 401524 - DNA, 549 bp, Oryza sativa nipponbare
ccacgcgtccgagtagagaaggtatcaagtgacgagtccgataagcttcttaagatggaagagactttgcatcagcgtgtcattggtcaagatgaggctgtgaaagccataagtcgctccatccgccgtgctcgtgtgggcctcaagaacccgaacaggccgattgcaagcttcattttcgcaggtccaaccggtgttggtaaatccgagctcgcaaaagcacttgcagcatattactttggatctgaggaggccatgatcaggcttgatatgagtgaattcatggagaggcacactgtatccaagttgattggttcacccccagggtatgttgggtacacggagggtggacagctgactgaggcagttcgacgcaggccatacacagtcgtgcttttcgacgagatcgaaaaggcgcatccagatgtattcaacatgatgctccagatcttggaagatggaaggctgactgacagcaagggaagaacagtggacttcaagaacacacttctcataatgacttcgaacgtcggaagcagcgtcatcgag

SEQ ID NO: 401525 - DNA, 527 bp, Oryza sativa nipponbare
  unsure (1)..(527): unsure at all n locations
ccacgcgtccgcccacgcgtccgcccacgcgtgcgcgcaggcgtgcgcattgttacacatgcatggggctctgaattttatataggcaggcattgtacaaacatagctaggcaatgaattgatcagctatataatgtgaataaatttcaccctcatagatagcaacatggtgagaactgacatttacaagcatatatatatattgtcagtcataaaacggtttgtactatgcgtactatacagccgcataagtttctactaaaatgagcagttgctgattattgatgtagcataccgcagttgctcatatataatgtgaataaatgagcactgcagtgtggaagttacagtaccagcctaccggttaccaccaacgtgcattagttagagccaacaaatgatttccctacaatagaagtactccctctggaattttttaatgtacgacgccgntgactttttgacaaacgtttgatatttcgtcttattcaaaaaaaatatgtaattataatttattttattatgac

SEQ ID NO: 401526 - DNA, 511 bp, Oryza sativa nipponbare
  unsure (1)..(511): unsure at all n locations
ccacgcgtccgcttcattgatgaaattgatgccgtcgggaggcagcgtggtgctgggctcggagggggaaatgatgagagggagcagaccattaaccagctcttgactgagatggatggatttgccggcaatagcggtgtcattgtgctcgccgcgacaaacaggcctgatgtgctcgacgcggctcttcttcgccctgggaggttcgatcggcaggtcaccgtagacaggccggatgtcgccgggcgtgtcaagattcttgaggttcactcgagaggaaaggctctggcaaaagatgtcgactttgagaaaattgcccggagaacccctggtttcactggagctgatcttcaaaacttgatgaatgaggctgctattcttgctgctcgtcgtgatctgaaggagattagcaaggatgagatctctgatgctttggagaggatcattgctgngcctgagaagaaaatgctgttgtttcagaagagaagaggagacttgtgcttaccatgag

SEQ ID NO: 401527 - DNA, 553 bp, Oryza sativa nipponbare
ccagcgtccggacaggagtagtgttgcctctgttgtctcggctgcagataagggaggtgccacccatgttgatatagcgtgtgaccaagacttagtaaagcttgctctggagcttacttcccttccgatttgtgtctcctccgtagatccttcagcattccgttctgcggtagaagctggagcaaagatgattgagattggaaactatgattctttttatgacacaggcatcgaattctcttctgagaagctgaccaaggagacaagggaaatgcttccagatataacactgtccgtaacagttccacatacactgagcctcctagatcaggtaagacttgcagagctactcgaagaggaaggcgctgatatcatccaaactgaaggagggaagtgttctagtccaacaaagcctggagtgcttggattaattgaaaaggcaacaccaactttggccgctgcatactccatctctcgggctgtcacaattccagtgatgtgtgcatctgggctaagctcagtgactgcaccaatggcagtaactgcaggagct

SEQ ID NO: 401528 - DNA, 490 bp, Oryza sativa nipponbare
ccacgcgtccgcccacgcgtccgcccacgcgtcctcgcaggcgtccggggtaaattgagctttgtgtgcggttttgaggggagtacatcggcatgaggatccagtgcgacgcgtgcgaggccgcggcggccacggtggtgtgctgcgcggacgaggcggcgctgtgcgcgcgctgcgacgtcgagatccaggccgccaacaagctcgccagcaagcaccagcgcctcccgctcgacgccgcgctccccgccgccctcccgcgctgcgacgtctgccaggagaaggcggcgttcatcttctgcgtggaggacagggcgctcttctgccgggactgcgacgagcccatccacgtcccggggacgctctccggcaaccaccagcgctacctcaccaccggcattcgcgtcgggttcagctccgtctggagcgccaacgccgaccaccttcccgccggcagggcccaaggggaacttcaagccgccggcaagcg

SEQ ID NO: 401529 - DNA, 503 bp, Oryza sativa nipponbare
  unsure (1)..(503): unsure at all n locations
ccacgcgtccgaaccaacccaaccgccgccgcatcggcctcgttagaacgatggccgcgtcggcgctgcaccagaccaccagcttcctcggcaccgcccctcgccgggatgagctcgtccgccgcgtcggcgactccggtggccgcatcaccatgcgccgcaccgtcaagagcgcgccccagagcatctggtatggacctgaccgtcccaagtacctgggcccgttctcggagcagacgccatcgtacctgaccggagagttcccgggagactacgggtgggacacggcggggctatcggccgacccggagacgttcgcgaggaacagggagctggaggtgatccactcgcggtgggcgatgctgggggcgctgggctgcgtcttcccggagatcctgtccaagaacggngtgaagttcggngaggcggtgtggttcaaggncgncgcgcagatcttntccgagggggggctcgactacctggggaaccccaacctggggcac

SEQ ID NO: 401530 - DNA, 489 bp, Oryza sativa nipponbare
ccagcgtccggaaaggaagagacgagaggagagagatggccactgcttatgctcccatggcgagccagctgatgaagagcagcttggtgtgctccaagccgagggggctgtctggtgcttcgctgacaaggaggccccgcttcacagtcaaggccatccagtctgagaagccaacgtaccaggtggtgcagcccatcaatggcgaccccttcatcggcagcctggagacgccggtgacctccagcccgctggtcgcctggtacctctccaacctcccggcgtaccgcaccgccgtcagcccgctgctccgcggcatcgaggtcggcctcgcccacggctacctcctcgtcgggcccttcgcgctcaccggcccgctccgaaacacgccggtgcacgggcaggccggcgccctcggcgccgcaggccctcgcgccatcctcagcgtctggctcaccatgtacgggggtcccttcttcggcgagggcgagc

SEQ ID NO: 401531 - DNA, 483 bp, Oryza sativa nipponbare
ccacgcgtccgcccacgcgtccgcccacgcgtccgcgccgacccggagacgttcgccaagaaccgggagctggaggtgatccactcccggtgggcgatgctgggcgcgctcggctgcgtcttcccggagctcctcgcccggaacggcgtcaagttcggcgaggccgtgtggttcaaggcgggctcgcagatcttcagcgagggcgggctcgactacctcggcaacccgagcctgatccacgcgcagagcatcctcgccatctgggcggtgcaggtggtgctcatgggcgccgtcgaggggtaccgcatcgccggcgggccgctcggcgaggtcgtcgacccgctctaccccggcggcgccttcgacccgctcggcctcgccgatgaccccgaggcgttcgcggagctcaaggggaaggagatcaagaacggccgcctcgccatgttctccatgttcggcttcttcgtccaggccatcgtcacc

SEQ ID NO: 401532 - DNA, 542 bp, Oryza sativa nipponbare
  unsure (1)..(542): unsure at all n locations
ccacgcgtccgtgatctttgaacagtggaatcaagaagagggaacagtggattgacggcttgtgaggttctcctgttccaccatgaggacatgggtattccctatgagattgcaaagattggcattcggcagggaatgtgggggtgtgtaaagagaatcgaacctggacttcgggcctatcagaaagcgagagctgctggggagccattgtctcagagtgccttgatggcgcatatcaataccaaggtcggtgacaattttgttcgtggattggaatccaacgacgatcagtcagatattgtggaagcagaagagaaacccgcgaaaaaccgagtagcaaggttccttgtgctcggtggagctgttgctctggcttgcactcttgatcaagggctgttgaccaaggctctcatcttcggtgttgcacggaaatntgtagggcagaggaacacattgtagccttacctgatctctggcactaatcctttgagccaatctggttattggatgaacacttgcccattcactgtcttggcatggag

SEQ ID NO: 401533 - DNA, 457 bp, Oryza sativa nipponbare
ccacgcgtccgcggacgcgtgggcggacgcgtgggcggacgcgtgggcaaaccagagatccaaaagaatccgtcgaggccacagattgttccagagtttttgttttcctcttctccccttcgcgttagcgagcatgtgtcccggaggcagatacgcgggcctcgacgtccccgcctgcgcggcggcgggagacctgaggccggcgttcgacgtgctggacgcggaccgcgacggtcgcatcagccgggaggacctcaagtcgttctacgccagcggcgcggccaccagcgagcggttcgacgacgaggacatcgccgccatgatcgccgcagccgacgtggacaacgacgggttcgtgcagtacgacgagttcgagcgcctggtggggcgcgccgccgcgggggcggggtgccggcccgcgaaggaggacgtgcttcgggtgatggaccgggacggg

SEQ ID NO: 401534 - DNA, 583 bp, Oryza sativa nipponbare
  unsure (1)..(583): unsure at all n locations
ccagcgtccgcgaaactcagctgcaaggagaaggagaaggtaggctccagccatggcttcccagctctccgccgccacatccgtgccgcagttccatggcctccggacctactcctctcctaggtccatggtgacgctgccatcgttgaggatgagcaagaagaggtcccagggcatccggtgcgactacatcggctcagccaccaacgttatcatggtgacgacgacgacgctgatgctgttcgcggggaggttcgggctggcgccgtcggcgaacaggaagtcgacggcggggctgaagctggaggcgcgcgactccggcctgcagaccggcgaccccgccgggttcacgctcgccgacacgctggcctgcggcgccgtcggccacatcatgggcgtcggcgtcngcctcggcctcaagaacatcggcgtcctggaccagatcatcggctaatcaaattcattaagctagtcacacgaatcaatacttctatgtgtaatccgtgcatgagtgcctgtgtgatggacgatgtaatgatcatgtaaattgtgcgtggaatcagtgcttatctagcttaatttt

SEQ ID NO: 401535 - DNA, 476 bp, Oryza sativa nipponbare
  unsure (1)..(476): unsure at all n locations
ccacgcgtccgcccacgcgtccgcccacgcgtccgcccacgcgtccgggaggccttcctcctgcttgtcactgccgcctccttgcagcagcagctacgcctccaatggggcgaagctgcagcagccgcggctgcagttcgtcagtcagctaaccagcagaaacagcaacgggagtggcagaagaagcatttccattttgtcgctgaggtgctcttccagtggcactgacagcgcgtcttcttccgccacttcagaaagatgggttcttgagcctgcaggagacggcgattggcgtcatatcgggtaccgcgtcgcacgacccggcggcttccagatagcatccgaggcggcggtgacggtgggtcgtgttcctgaacaggctgacatcggcctgtctggcgcaccagtntctgggacgcacgcacggntggagaagaagaggggagcctgttggtaacagactggagagcacgaat

SEQ ID NO: 401536 - DNA, 436 bp, Oryza sativa nipponbare
  unsure (1)..(436): unsure at all n locations
ccacgcgtccggtgacgatcttgccgacgctggtgatcaacaatgtgcagtaccggggcaaattggagagcacttcggttctcaaggcgatttgtgctggattcaaggagtccactgagcctgatgtctgcctgacaccagaaatggagactgacgagtgcctgaacaacaatggcggctgctggcgagacgagaagaccaacatcactgcctgcaaggacactttcaggggaagaatttgccagtgccctgtagttgatggtgttcagtaccaaggagacggctacacccactgcanagcggtcggaccagggcggtgcgcgatgaacaacggtggctgctggaaggggacgagagacggcaagacgttctctgcttgctcggattcagacttgagtgggtgcaagtgcccacctgggttcaagggcgacggcct

SEQ ID NO: 401537 - DNA, 625 bp, Oryza sativa nipponbare
  unsure (1)..(625): unsure at all n locations
ccacgcgtccggcatctgcataccctaccttacctggtcctactactgctcgcctcgcttacttactaccctcctgctcctaacaacaacaacaacaacaacaacaacaacaaggaagctctatcgggaaagaaataggaggaagaaggattaaggaaggaaagcaaagcaagcattaattaaaggaaattaggaaggatgtcagactgggggccggtggtgatcgcggtggtgctgttcgtgctgctctcgccggggctgctcatccagctccccgggaggcaccacttcgtcgagttcggcaacctgcacaccagcgccatgtccatcgtcgtccactccatcatctacttcgccctcatcaccctctttgtcatcgtcatcggagtacacatcaccaccgattaatttttacttcttctttagtttcttcatttctgcagttcgtctgccctgccctctgtaatctctatcttcttctttcttgctcatcctgtcttctcccctcctccatatatatcctacctcatattaattctactatctacatggngcttncttgatgttcagcacatcaaaccatgcataaaccaagactggtttaaattattactggtttctacta

SEQ ID NO: 401538 - DNA, 540 bp, Oryza sativa nipponbare
  unsure (1)..(540): unsure at all n locations
ccacgcgtccgggattttgcagctgctcccctgatccggttcagataggctcttcttgacaggatcaccatgtctgcctttgtgggaaaatacgcagatgagctgatcaagacggccaagtacatcgcgacgccggggaagggcatcctcgccgccgacgagtcgacgggcaccatcggcaagcgcctggccagcatcaacgtggagaacgtggagcccaaccgccaggcgctccgggagctcctcttcacgacgcccggcgcgttccagtacctctccggcgtcatcctcttcgaggagacgctctaccagagcacggccgccggcacgccgttcgtcgacgtgctcaaggccggcggcgtcgggccggngatcaaggnggacaagggcaccgnggacatcgccggcaccaacggcgagaccaccacccagggcctcgactccctgggcgcgcgctgcgccaagtactacgaggccggcgcccgcttcgccaagtggcgggccgggctcaagatcggcgccgccggcgagccggccgag

SEQ ID NO: 401539 - DNA, 531 bp, Oryza sativa nipponbare
ccacgcgtccgagcagcagcagcagtagctgagcttgaagcagcagagcgaggtagacatggccgccgccaccatggccctctcgtccccggcgctggccggcaaggccgccgcgaaggtgttcggcgaggggcgcatcaccatgcgcaagtcggcggcgaagcccaagcccgccgcgtcggggagcccgtggtacggcgccgaccgcgtgctctacctcggcccgctctccggcgagccgccgagctacctgaccggcgagttccccggcgactacgggtgggacaccgcggggctctccgccgacccggagacgttcgccaagaaccgggagctggaggtgatccactccaggtgggcgatgctcggcgcgctgggctgcgtgttcccggagctcctcgcccgcaacggcgtcaagttcggcgaggcggtgtggttcaaggcggggtcgcagatcttcagcgagggcgggctcgactacctcggcaacccgagcctgatccacgcgcagagcatcctcgccatctgggc

SEQ ID NO: 401540 - DNA, 524 bp, Oryza sativa nipponbare
  unsure (1)..(524): unsure at all n locations
ccacgcgtccgggtactgcaagaacaactccgacgggacatgggccgtcgtcgatgtctctctcgacagcctccgccccagccctgtccagaaatgccggcgcaggccgtctggctgcctcatccaagaaatgcccaatggctactccaaggtgacatgggtggagcatgtggaggtggacgacagctcggtgcacaacatctacaagccattggtgaactccggcctcgcattcggcgcgaaacggtgggtcggcacgctggaccggcaatgcgagcgcctcgccagcgccatggccagcaacatccccaatggcgaccttggagtgattacaagcgtggaggggaggaagagcatgttgaagctggcggagaggatggtggcgagcttctgcggcggcgtgacggcgtcggtggcgcaccagtggacgacgctgtcgggcagcggggcggaggacgtgcgcgtcatgacgaggaagagcggngacgaccccggcaggccaccgggcatcgtgcttaacgccg

SEQ ID NO: 401541 - DNA, 556 bp, Oryza sativa nipponbare
ccacgcgtccggccaaatggtggcgctgcttcgctcgtgccgccgcctgatcccgcacctgtccgcctgcgccgccgccgcgccgtcgtcgtcatcgtcgtgcgctcctcgggctaggccgatctcgcggggactgcggctgctgccggtggtgctcgcaatggcggggtacagcagcggctccgccgcggaggggaggaggctgctgttcaggcagctgttcgagaaggagagctccacctacacctacctcctcgccgacgtcggggaccccgagaaacccgccgtgttgattgaccctgtggacagaacagttgatagagatctcaatcttatcaaggagttgggcttgaagctagtctatgctatgaatacccatgtgcatgctgatcatgtcactggaacaggattaataaagactaagttacctggagtaaagtccgtgattgcaaaagtaagcaaagcaaaagcagaccattttattgagcatggggacaaaatatacttcggtaacctcttccttgagggacgatctactcctggccatactgctggc

SEQ ID NO: 401542 - DNA, 533 bp, Oryza sativa nipponbare
  unsure (1)..(533): unsure at all n locations
ccacgcgtccgcgcaacagctacaaacgcccacatcacacgcagaaatccgcatcaacagccagccatggcgtccacgctgaccaacgtcggcctgtctaccccggcggcggcggcgtcgtccctcgttaggccggtcgccggagctggacgcgtggtgtttccccgtgttggccgcggcgggttcgcggcggtgagggcgagcgggccggcgacgccgccggacatctcggacaagatgtcggagagcatcgacaaggcgaaggaggcgtgcgcggaggacacggcgagcggcgagtgcgcggcggcgtgggacgaggtggaggagctgagcgcggcggcgagccacgcgcgcgacaagctcaaggagacctccgacccgctcgaggcctactgcagggacaacccggagaccgacgagtgccgcacctacgacaactgattcttaccattatatgttngctaatctctctgnaataattataagttactgggttgaaaagattattttgtcgagaagacagaggggagttt

SEQ ID NO: 401543 - DNA, 553 bp, Oryza sativa nipponbare
ccacgcgtccgagaaagcataagcaacacaagggattaactcatcactcacttagctaattaaatctttgaccatgtcggacacgtgcggcaactgcgactgtgctgacaagagccagtgcgtgaagaaaggtaccagctatggcgtcgtcatagttgaagccgagaagagccacttcgaggaggtcgccgacgacgaggagaacggcggctgcaagtgcggcaccagctgctcctgcaccgactgcaagtgcggcaagtgaagtcacgaagcaaccgaacactcgccggcgcagagtcacctaccttaattagtacacaataaaaaccacccatatgagtgtggattgagtgtgggctgattattgctgaattaaacccgggtgttatcgattaattaagcagctggtcgcttcggcgactatgcgtgtatcaacgcatgaattagcgtgatgagatgtacccgtgctattctcagtgctattaatcaatcgtgtattcgtgtgggttgcctagtaaaaaggtctatcatactcaatcgaactctaacaaaa

SEQ ID NO: 401544 - DNA, 446 bp, Oryza sativa nipponbare
  unsure (1)..(446): unsure at all n locations
ccacgcgtccgcccacgcgtccgcccacgcgtccgcccacgcgtccgcccacgcgtccgcccacgcgtccgcccacgcgtccgggaatcgcgcgcgcggcggagagaaattaatcgatcgatcgatcgatccgattccggccggccatggcagctgctgctccggcgacggcggcggtgcggcgcatgaagctgggctcgcagggtctggaggtctcggcgcaggggctgggctgcatgggcatgtccgccttctacgggccacccaagccggaggccgacatggttgcgctcatccaccacgccgtcgccgccggcgtcacccacctcgacacctccgacatgtacggcccccacaccaacgagctcctcctcggcaaggctctgcagggcggcgtgagggagaaggtggaggtggccacgaagntcgccggctcggncgccgac

SEQ ID NO: 401545 - DNA, 557 bp, Oryza sativa nipponbare
ccacgcgtccgcccacgcgtccggaacaaggagcgtgcacctgacatgtacaagctcagtgcatacttcttggccagaacgactaagtgatctgacactggaccttttccttacagtcatatttatggtgattggctacttcatggcaggcctcagagcaactgccgcacatttctttattagcatgttgaccgtcttcctcagcatcattgctgttcagggattaggattggcacttggagctagcctcttggatatcaagaaggcaacaactctagcttcagttacagtcatgacattcatgctagcaggagggttctttgtaaagagagttccaccattcatatcctggctccgctacctgtcattcaactaccacacgtacaggctactgctgaaggtgcaatatcatcctgtcccggacattctgatcaatgccatacctattgacaacggcgtgacagaagttgtagctctggtcgcgatgatcatcggctacagggttctagcgtacatgtctctgagaagaacgaagacttcagccagctagcgaatcg

SEQ ID NO: 401546 - DNA, 522 bp, Oryza sativa nipponbare
ccacgcgtccgccacgcgtccgcccgcgcctgctccaacgtctccgtcctcttcggctgcctcggcatcgccttcaagttcgccgagatggactacgtcgccaaggttgatgatttgctggaggcatccaagtcaatctcaaaattgcctgagatggttgagttggacattcagaagggcaccgtcaggcaagctgggagccatactaggaatatgctgagggttaagcgtgggattgatatggttaaaattctgtttgagcaaatactggttacagagggcaactccttaagggatgcagcatctaaggcttatgctcaggtttttgctcctcaccatgggtgggccataaggaaagccgttgctgctggaatgtacgcccttccctcaaaatcgcagctcctgaagaaattgaatgaagatgaaaattcggcaaaggttcaaatgcagactttcatcagagcatctggaccagtaattctctacgttgaagatctgtttacctcaaggaatttaggcatg

SEQ ID NO: 401547 - DNA, 483 bp, Oryza sativa nipponbare
ccacgcgtccgatcgccatctctctcagctctcacagctcactgcatcaatggccgcggccaccatggcgctctcctccccggtgatggcccgcgcggcgccgtcgacctcctccgcgctcttcggcgaggcgcggatcaccatgcgcaagaccgccgcgaagcccaagccggcggcgtcgtcggggagcccgtggtacggcgccgaccgcgtcctctacctcggcccgctctccggcgagccgccgagctacctcaccggcgagttcccgggcgactacgggtgggacaccgcggggctctccgccgacccggagacgttcgccaagaaccgggagctggaggtgatccactcccggtgggcgatgctgggcgcgctcggctgcgtcttcccggagctcctcgcccggaacggcgtcaagttcggcgaggccgtgtggttcaaggcggcctcgcaaatcttcagcgagggcgggctcgacta

SEQ ID NO: 401548 - DNA, 512 bp, Oryza sativa nipponbare
ccacgcgtccgcccacgcgtccggcgccaccacccagcttcccccatggcatcggcggcggcgagatccggcctccgctcgctggcggcgcgcgccaaggcgaccgccgcccccgcggcgaggcgccgcatgtcctcctccgcccacgacgacgcccatgagacggccaagtgggagaagatcacctacgcggggatcgtcacctgcaccctgctggcggcgtacaacctctccaagggccacccccacttcgacgagccgccggcgtacccctatctgcacatccgtaacaaggagttcccatggggacccgatggcctatttgagaacaagcaccattaagtactgaacagcgcaccatcagaagcccagtgaatgcttaagaaaaattctctggttgttccagtgattcttgttttcagtgaaacctatttttcttgcaacaaagaaataagaatgacaaaactcttgtgttgataatcaggatttaactgtgttggtagttgttacct

SEQ ID NO: 401549 - DNA, 217 bp, Oryza sativa nipponbare
ccacgcgtccgcccacgcgtgcgcaaattcttgcacaggcgcagctcgagccatggccggagtgagcaccagcgtggtcggcctcaagcccgccgcggcggtgccgtagtcggccgcctcgccggtgccgaagcgcgtgcacgtcgctgtgccgcccaaggaggagcagggcggtggcaggcgcgccgtgctgctgggtctcgacgccttgttcgtc

SEQ ID NO: 401550 - DNA, 398 bp, Oryza sativa nipponbare
ccacgcgtccgcaattcccctctccgtcttcccagatctgcttcttgcccaccattcctctcttccttccttctcatgatttctgcgccttctgtggggatcgccttcgcgcccaagccgccaccggcagcggcggttgggtcgtaccgggcaaggaaggtccggtgcgcggtggccgtggctcctgcgccggcgccggcggggacgctgtacgacgtgctggggctgcgtgccggcgccacggtgcgggagatcaaggcggcgtaccggcgcctcgcgcgggagcggcaccccgacgtggccgccagcgccggggccgacgacttcgtcaggctccacgacgcctacgccacgctctccgaccccgacagccgcgcgcgctacgaccgcgacggtcg

SEQ ID NO: 401551 - DNA, 600 bp, Oryza sativa nipponbare
ccacgcgtccgcccacgcgtccgccggagtaccaggtgtaccccatcttcaagtactttgagaactggtgccaggatgagaaccgtcacggtgatttcttctccgcgctgctcaaggcgcagccgcagttcctcaacgactggaaggccaagctctggtcacggttcttctgcctctcggtgtatgtgaccatgtacctaaatgattgccaacgtactacattctatgaagggattggtctggacaccaaagaattcgacatgcatgtgataattgagaccaaccgcacaacagcaaggattttccccgctgttcttgacgtcgagaaccctgaattcaagaggaagttagacaggatggtggagatcaacaaaaagatcattgccataggcgagtctgacgatatccccctggtgaagaacctgaagaggattcctcacgttgccgctctggtgtctgagatcattgctgcgtacctcatgcccccaatcgagtctggctctgttgatttcgctgaattcgagccccagcttgtctactgattctggaggaagaccatctccagcttttttttccttcaaaaggaatgcttgttttttc

SEQ ID NO: 401552 - DNA, 514 bp, Oryza sativa nipponbare
ccagcgtccggaaagcataagcaacacaagggattaactcatcactcacttagctaattaaatcttcgaccatgtcggacaagtgcggcaactgcgactgtgctgacaagagccagtgcgtgaagaaaggtaccagctatggcgtcgtcatagttgaagccgagaagagccacttcgaggaggtcgccgccggcgaggagaacggcggctgcaagtgcggcaccagctgctcctgcaccgactgcaagtgcggcaagtgaagtcacgaagcaaccgaacactcgccgccggcgagtcacctaccttaattagtccacaataaaaaccacccatatgagtgtggtttgtgtgtgtgctgattattgctgaattaaacccgtgtgttatcgattaattaagcagctggtcgcttcggcgactatgcgtgtatcaacgtatgaatttgtgtgatgtgatgtacccgtgctattctcagtgaaattaatcaatcgtgtattcgtgtggtttgcctagt

SEQ ID NO: 401553 - DNA, 446 bp, Oryza sativa nipponbare
ccacgcgtccgcccacgcgtccgcccacgcgtgctcggttgcgtttggtatggaaactgcaaagtggatatgtgtaggagcgattgacataactcaattatccgttgcaggctaccttttcagtgccggcaagccttattatgccctggcactgctaggactcacaattcctcaggtggtctttcagtggcagatacttcctcaaggaccctgtgaagtatgacgtcaaataccaggcaagcgcgcaaccgttcttcgtcttgggccttctggtgacgcgccttgcaaccagccactgatgaaagcagcaatcgccctggactgtgattctgtgacagcgaagttttgggtggaagatgcagattgatgggtctctgcaactggtggtggagctagggtcagcagctatgttcgcgagtgtattagcgctcttttggcggggctgg

SEQ ID NO: 401554 - DNA, 499 bp, Oryza sativa nipponbare
  unsure (1)..(499): unsure at all n locations
ccacgcgtccgattgagaacaaaatagccctcnccttgatanggtgttttggccaaatgtagaagtgctaggcagggttgccccaacatcaaatgcctgcggttactttcttaaccttcacaaagccacagggcatccggttcttgtatgcatggtagcaggaagattcgcatatgaattcgagaggctgtggggatgaagaatccgtaaactttgtcatgtctcagctcaagaaaatgctaccaggagctactgaaccggtccagtatttggtttcaaggtggggaaccgacccgaattcgcttggttcttattcctgcgaccttgttgggaagccagctgacttgtatgaaagattctgtgctccggtgggcaacctgtttttcgctggggaggccgcctgcatcgatcactctgggtccgtgcatggagcttattcttcangcattgttgctgcagaggattgccgaaggcatctgtcgacgcagctaggcatctc

SEQ ID NO: 401555 - DNA, 572 bp, Oryza sativa nipponbare
  unsure (1)..(572): unsure at all n locations
ccacgcgtccgcccattcgtccgcggacgcgtgggttgttntggacagcagctgagcagtgcccaccagaggggaggcttcctgatgccggtccacgtgtgcccgctgatcatcttagggaggtattctacaggatgggccttgatgacaaggaaattgttgcattatctggagcacacacacttgggggggggggacctgacaggagtggctggggaaagccagaaacaaaatatactaaggatgggcctggtgaacctggagggcaatcatggacagttgaatggttgaagtttgataacagttacttcaaggacataaaagagcaaagggaccaggatcttctagtgctacccacagatgctgcattatttgaggatccgtccttcaaggtatatgccgaaaaatatgcagaggatcaggaggcattctttaaagactacgctgaagctcatgctaaactgagcgaccttggtgcaaagttcgatccacctgagggattttcactggacgatgaaccaaccgtcgaagagaaggatcctgaaccagcaccagcgccagcagcagcacca

SEQ ID NO: 401556 - DNA, 568 bp, Oryza sativa nipponbare
ccacgcgtccgcaagtgaagaagactctcctgaagcttgtgccgagtttgaacgagtacttgccaagcaagcaacaacagtacaatcggcgaagtgatctactgcaattcccaagtgatcagattagacaacaggaaggtgttctttggtactttccaggtgattttttcctgggaccgcatcaaggaaaacaaaataacaactggcatacttgtgaagcaccgaagtgcccccaaagactgcgattttgtggaagctctgcccaaggcatcttttgaaacgaagtttcacatgatcgtggaggattcttctttgcgcccttgcacttgcacgccctagttaaccacccccctgtaaattggtttgctgacgctaggttgctatttgcagaggcagtgaagacacacttctaaacttctccattcctgtacaggattcgtgtcctatgtaatcgtatttttggttctggacacattagttcttacatttatacccgtccagtgggggcatgcgagtcgcatgtgcatacagctatagtgaataaagtgtactggcaagtagttttctc

SEQ ID NO: 401557 - DNA, 519 bp, Oryza sativa nipponbare
  unsure (1)..(519): unsure at all n locations
ccacgcgtccgcccacgcgtccggtgttgaggaggtcgcctcaactggaccaggaatccgtttcttccagctatacgtgtacaaggacaggaatgtggttgagcagcttgtcagaagagccgagagagctgggttcaaggcgatcgcactgaccgtggacactccgcgactgggacgcagggaagctgacatcaagaacaggttcgttctgccaccatacttgacactgaagaatttcgaaggcctggacctcgcagagatggacaagagcaacgattccgggctggcctcctacgtcgccgggcagatcgatcgcacgctcagctggaaggatgtgaagtggctgcagagcatcacgtcgctgccgatcctcgtcaagggcgtcatcaccgcggaggatgcgaggctggccgtgcactccggcgcggcggngatcatcgtgtcgaaccacggcgcgcggcagctggactacgtcccggcgaccatcagcgccctggaggaggtgggcacggcggcggc

SEQ ID NO: 401558 - DNA, 479 bp, Oryza sativa nipponbare
ccacgcgtccggagatggccccctccgtgatggcgtcgtcggccaccaccgtcgctcccttccaggggctcaagtccaccgccggcatgcccgtcgcccgccgctccggcaactccagcttcggcaacgtcagcaatggcggcaggatcaggtgcatgcaggtgtggccgattgagggcatcaagaagttcgagaccctctcctacctgccaccgctcaccgtggaggacctcctgaagcagatcgagtacctgctccgttccaagtgggtgccctgcctcgagttcagcaaggtcggattcgtctaccgtgagaaccacagatcccccggatactacgatggcaggtactggaccatgtggaagctgcccatgttcgggtgcactgacgccacccaggtgctcaaggagctcgaggaggccaagaaggcgtaccctgatgcattcgtccgtatcatcggcttcgacaacgtcaggcag

SEQ ID NO: 401559 - DNA, 487 bp, Oryza sativa nipponbare
  unsure (1)..(487): unsure at all n locations
ccacgccgtccgaaaaccaacccaaccgccgccgcatcgccctcgttagaacgatggccgcgtcggcgctgcaccagaccaccagcttcctcggcaccgcccctcgccgggatgagctcgtccgccgcgtcggcgactccggtggccgcatcaccatgcgccgcaccgtcaagagcgcgccccagagcatctggtatggacctgaccgtcccaagtacctgggcccgttctcggagcagacgccatcgtacctgaccggagagttcccgggagactacgggtgggacacggcggggctatcggccgacccggagacgttcgcgaggaacagggagctggaggtgatccactcgcggtgggcgatgctgggggcgctgggctgcgtcttcccggagatcctgtccaagaacggngtgaagttcggngaggcggngtggntcaaggccggcgcgcagatcttctccgagggggggctcgactacctggg

SEQ ID NO: 401560 - DNA, 554 bp, Oryza sativa nipponbare
  unsure (1)..(554): unsure at all n locations
cacgcgtccggagcaaagaaggagagagcttggtgagctgcagagatggccccctccgtgatggcgtcgtcggccaccaccgtcgctcccttccaggggctcaagtccaccgccggcatgcccgtcgcccgccgctccggcaactccagcttcggcaacgtcagcaatggcggcaggatcaggtgcatgcaggtgtggccgattgagggcatcaagaagttcgagaccctctcctacctgccaccgctcaccgtggaggacctcctgaagcagatcgagtacctgctccgttccaagtgggtgccctgcctcgagttcagcaaggtcggattcgtctaccgtgagaaccacagatcccccggatactacgatggcaggtactggaccatgtggaagctgcccatgttcgggtgcactgacgccacccaggtgctcaaggagctcgaggaggccaagaaggcgtaccctgatgcattcgtccgtataatcggcttccacaacgtcaggcaggggcagctcatcagcttcatcgnctaccagcccccgggctggga

SEQ ID NO: 401561 - DNA, 627 bp, Oryza sativa nipponbare
ccacgcgtccgccacgcgtccgcccacgcgtccgcaggaagtactcgagcaaagaaggagagagcttggtgagctgcagagatggccccctccgtgatggcgtcgtcggccaccaccgtcgctcccttccaggggctcaagtccaccgccggcatgcccgtcgcccgccgctccggcaactccagcttcggcaacgtcagcaatggcggcaggatcaggtgcatgcaggtgtggccgattgagggcatcaagaagttcgagaccctctcctacctgccaccgctcaccgtggaggacctcctgaagcagatcgagtacctgctccgttccaagtgggtgccctgcctcgagttcagcaaggtcggattcgtctaccgtgagaaccacagatcccccggatactacgatggcaggtactggaccatgtggaagctgcccatgttcgggtgcactgacgccacccaggtgctcaaggagctcgaggaggccaagaaggcgtaccctgatgcattcgtccgtatcatcggcttcgacaacgtcaggcaggtgcagctcatcagcttcatcgcctacaagcccccgggctgcgaggagtctggtggcaactaagcccgcatcgtcatatat

SEQ ID NO: 401562 - DNA, 99 bp, Oryza sativa nipponbare
  unsure (1)..(99): unsure at all n locations
ttttggaaactaataaaatcattattgcaaaaacatcatcttcttcttcatcttcttntgtacacattaccaactggatcatcatctcncacactaaac

SEQ ID NO: 401563 - DNA, 414 bp, Oryza sativa nipponbare
ggaagagaatacagagcaacacatttggtctttgagtcagcacaaaacctttcctggtttcagctttgaaattgtggcacaaaatgtaaaatttctatctgataccatttctaagctggcacaacttaaataacaaatagtagagttctaagtatctctcagacttaaattgactgctaatctaatttgaagctaattaatgggtacagggattagtgaagccaggctgaatgggagtcgagcagttaactggttcagtctgaagaaaggggaggaatgtcttcagcgatccctttaccatcagcggcgtcgtaatagaagaaattcttgatcggatcacccttaccagatattgacttaatcacctcctgaccaagaatgccgccaaggattgcacatacaggaggatgttgc

SEQ ID NO: 401564 - DNA, 306 bp, Oryza sativa nipponbare
tgaccaagaaattgttgaagttcgattgagtatgatagacctggggactaggcaaaccacacgaatacacgattgattaatttcactgagaatagcacgggtacatcacatcacacaaattcatacgttgatacacgcatagtcgccgaagcgaccagctgcttaattaatcgataacacacgggtttaattcagcaataatcagcacacacacaaaccacactcatatgggtggtttttattggggactaattaaggtaggtgactccccggcggcgagtgttcggttgcttcgtgacttcactt

SEQ ID NO: 401565 - DNA, 160 bp, Oryza sativa nipponbare
  unsure (1)..(160): unsure at all n locations
aaaccgaacagaaaatagagttttaaatgactgacataatgcgcgaggcgggcagatattaacggtcaatgcatcaactaaaataaccgtcaaantaacttatactagtatctaaaagaagctagataatctcaaaatgccagatatatgtaaagcacca

SEQ ID NO: 401566 - DNA, 553 bp, Oryza sativa nipponbare
  unsure (1)..(553): unsure at all n locations
gtttgtttcgagaaagatatcgtccgattctccttctattgattcttttgcgatcgagatgtattgatccatgtgtctacatacctagattctgttcatggattaacgaaaatgtgcaagagctctatttgcctctgccattctatgagtcgcttcctttntgcgtatggcacccccaccccctttggcagcatctactaattcggaacttaatttgaaagccatatttcgacccggacgcttttgggatgcttctaataaccaacgaatggcaagtgctcttccttgtttaaatcctatttcaatcggaactttccgcgtcgatccttttttattacgtcttgtttttactcctatattgggagttactctacgtattgcttgacgtaaaaccaatagtggatttgtttctgtcttttgttgaatctttttcacggctcgatagagaaattgataagccaatgatttttttccggctttcataataccgttaaccaccatgttaactaatcgattacaaaaaaatggatcggtttttgcgagtctttttttt

SEQ ID NO: 401567 - DNA, 277 bp, Oryza sativa nipponbare
tggcatcgttttagctggcttcgttgtagatcctataataacgatacatcaggtaattgtatcattccttgaatgcggcctgcggcttacattaaatctcatccaaagaagcaaagatgatgacagacagaaattaattaagctagaaatctcctcgatcgatcacacacacacacacaattaatgtacatacatacatgcactgcttcaactgcaactgcagtgtctgtgcttggctactacaagtgtacacatggtacgttggtttgcaccatct

SEQ ID NO: 401568 - DNA, 480 bp, Oryza sativa nipponbare
tttttccaaattcaagtatcaagtgtagtatatcatcatcatgcaagtacagtgttacatagattaatcacaatgcagtttgattaagcagtgggcatcatcacatcgcattcagaggaaggctatcttagattacagatgaatatgcagacacccagcttggtgttacatacatagactggatttgggtgaaatttagccggcgagggcgctggtgttgtagacgaggagggcgccgccgccgaggagcccggcgagggtcacggcccagatcagaagcccggtggttccaccaacgtaggtgtcaccggtgggagaccattcctccggcgagtagattgggctgtagccgtcgacgtttgccccgtacttgtcaacgaattggtacacacccttccccgtgctctttctgccagatgcatcaatatcgactgacatgccacctccaatcccgtagggcttgtcggtcttgatcttttt

SEQ ID NO: 401569 - DNA, 106 bp, Oryza sativa nipponbare
tttttccaaattcaagtatcaagtgtagtatatcatcatcatgcaagtacagtgttacatagattaatcacaatgcagtttgattaagcagtgggcatcaatcaca

SEQ ID NO: 401570 - DNA, 275 bp, Oryza sativa nipponbare
aactaagaccagtttgatttcgtgtttgatacaaaaattaagagggacggagtcacaagagagcaccctctacttaagctttacattacaaggccaaccagcagctgcctgccggccgaccactgcgtgcgcacgcgcgcgcaataatcaaccaatcacacacagtacgcacgcacataaaaaccacccatagccttcacgtacgcccggacgcacgcaccggttcgtgccaagctcaagggtagatggttctcgggatgatgatgtcgccgatg

SEQ ID NO: 401571 - DNA, 173 bp, Oryza sativa nipponbare
aggcaaaccacaccaatacaccattgattaatgtcacttaaaataacacgggtacatcacatcacacaaattatacgttgatacacccatagtccccaaagcgaccagctgtttaattaatcgataacacacgggtttaattcaccaataatcagcacacacacaaaccacac

SEQ ID NO: 401572 - DNA, 418 bp, Oryza sativa nipponbare
  unsure (1)..(418): unsure at all n locations
tttttgacagacagaaattaattaagctagaaatctcctcgatggatcacgcacacacacacaattaaggtacatacatacatgcactgctngcaactgcaactgcagggtcggtgcgtggctactacaagtgtacacatggtacgttggttggcaccatctcgatcgtgtcgttgtgctcacttgccggggacgaagttggtggcgtatgcccaggcgttgttggcgacggggtcggcgacgtggtcgaagaggttctcgatggggcccttgccggtgacgatggcctggacgaagaagccgaacatggagaacatggcgaggcggccgttcttgagctccttcaccttgagctcggcgaaggtgtcagggtcgtcggcgaggccgagcgggtcgaaggcgccgcctgggtacacct

SEQ ID NO: 401573 - DNA, 260 bp, Oryza sativa nipponbare
tggttgacagaaacaaaattaagctagataagcactgattccgcgcacagtgtacatgatcattacatcgtgcatcacacaggcactcatgcatcgattacacataggagtattgattcgtgtgactagcttaatgaatttgattagccgatgatctggtccaggacgccgatgttcttgaggccgaggacgacaccgacgcccatgatgtggccgacggcgccgcaagccagcgtgtcggcgagcgtgaacccggcggg

SEQ ID NO: 401574 - DNA, 341 bp, Oryza sativa nipponbare
ttataagcaagggattatcaagtccacgaggaaaaaccaaaggcaggcaaaggacatagtgttatacggattataaagaagaaaccaccaccattcactattccacacaaagctcgatcaaccagcttaattaatttcttccacatgtacgacatgcatcctttcctaattccgtgatcaattaaagatgattctttgcagctccagctcgacaacgatccatccgaataaaaatcatttgacctcctggatctcgtccagggcgtagttgttggtcgacacgccggcgtagttcacctttggcaaaccgaaccaccactcggttagcgagtgttgggatc

SEQ ID NO: 401575 - DNA, 333 bp, Oryza sativa nipponbare
agtagttggctatattattgaacttgctcttaagcatttgcacgggtattcatgtcatgtgatcgtgtactactcctctctgacttggggaaaaaagagagaacatggcggcaatatactagtagtagtgatactattcagcaactaatttaatcagcaccctcaactctactggatctcttcctctgtctctctattggtcatcatttgcagaaaagagtctccttcgtggcgtttccagtggttgtattgaccccatcagcaattttgcagaggtattcacgctgatcgtctcgcagtggaacatcttgaaaatctgctccatatatgttg

SEQ ID NO: 401576 - DNA, 225 bp, Oryza sativa nipponbare
tttttggttttttttttttttttttttttttttttttttttgagggattgggctcatttggatacattgcaaaatcactatagttaatgattccgctcattttggatacacaacttctcgaatatgctatattctcacgacattacatccgagttggcttgctttgagcactctaatttcttcaaagtaacggcgccggaggcaccaccctgccatttaaggcca

SEQ ID NO: 401577 - DNA, 424 bp, Oryza sativa nipponbare
agaaaattttgtatctagtattaggcatttaggcctcaaaaagggaagtgtgcgtacgatgttcaaaagcttcagctttaacaactcatattcaaaagtatggtttttttactcattgcccttctgcagtctgtttaatagcacctcattttctctaatggtatgcacataaacagatacatcgtgagcaatttatttaaaccctagacaacacgaaatgattcagctatttgcttcaggtcattgtaattcctcttccattgtagcccatttgcagttacattgaacaggtagagcctgttttcagcggcagttgcagtgatgaagatatgaggtggttccagctcaaactggtagtaagttcttcctgaatactctgctgttgccatggacaaaaccttcccttcaacattttcaccgatca

SEQ ID NO: 401578 - DNA, 323 bp, Oryza sativa nipponbare
  unsure (1)..(323): unsure at all n locations
gacaagcaattaagcgtagtttatccaccataattaaaatcggggccatgggatanctagaacactgctgctaccatgagatagtttatccccctgtagtacttgtacatcnagaaattcaccactcaactcaccccctcacccatgcatccagatccatgcatgcaggaaacaattaccacaacacacacagtaagtctgaatctcatcacatccatctctctctctctcctccccccaattcattaacatcttatacatgcatactccacaaaaaaaaaaagaagaaacaagaagagaacatcttccatcgcccaatcatc

SEQ ID NO: 401579 - DNA, 462 bp, Oryza sativa nipponbare
tgcatgggaaagatgtgacaatctgacaattgattgcagctgaaacttgaggtcaggtcaacaacgccactggccaaagctacattacaaccgtcgaaacgccaattggcacctctgcattgctttgcatatatgttacgaaaggcagtagactgtgaaatgtcaagctactgcatcttttgataatattattgatcgctagagtttgtctagaagaggaggtaactagcccctaatggtgaactgttctcaagttgctagacacgttccgtgaaggcaaacccaatgcttcagcaatacttttcacctcagcgaccattgcgacgatgtcgttaagtttgttgacagcagaaccaactcccacaccggcagctcctgcagttactgccattggtgcagtcactgagcttagcccagatgcacacatcactggaattgtgacagcccgagagatggagtatg

SEQ ID NO: 401580 - DNA, 408 bp, Oryza sativa nipponbare
  unsure (1)..(408): unsure at all n locations
gcaagcaaactttcgtcatgtcatagtacatcatagttcatgggcaacacggggctgataagtattgggcccaaattgtcttacaattacatacgcccacagtaagatgtacttagcacacttagtacaaccgagatggcagtgttctttgcatacatacaaaattacatcacttgcatagcattactgttacataacaacatctcatccaagatcaggaacgatgaagaagtcctcgtcgtcatcgggtatctccacccgtggcttcttgctttggcgtgcaccgctcgccttgtagagccccatgttgctcgctggctgcggcgaggcgaaaagctcangcacctccgccggcgtgctggcttccttggccggcgactgggcattgaacaggtcgatgtcatcgag

SEQ ID NO: 401581 - DNA, 290 bp, Oryza sativa nipponbare
ttgaagcaaagatgatgacagacagaaattaattaagctagaaaggtcctgggtcgatcacacacacacacacaattaaggtacatacatacatgcactgctgcaactgcaactgcagggtcggtgcgtggctactacaagtgtacacatggtacgttggttggcaccatctcgatcgtgtcgttgtgctcacttgccggggacgaagttggtggcgtatgcccaggcgttgttggcgacggggtcggcgacttggtcgaagaggttctcgatggggcccttgccggtga

SEQ ID NO: 401582 - DNA, 177 bp, Oryza sativa nipponbare
aagaccattagttgggaaacgaataaaatcattattgcaaaggcatcagcttcttcttcatcttcttagtgtacacaacaccaactcatcatcatctcgtcgcactaaacccatcttccccaacccaaagacaacgaactcgctggccacaaatccatccaaccacaattaaccact

SEQ ID NO: 401583 - DNA, 276 bp, Oryza sativa nipponbare
  unsure (1)..(276): unsure at all n locations
gacagaaacaaaattaagctagataagcactgattccacgcacaatttacgtgatcattacatcgtccatcacacaggcactcatgcatcgattacacatanggagtattgattcgtgtgactagcttaatgaatttgattagccgatgatctggtccaggacgccaatgttcttgaggccagggacaaccccgacccccatgatgtggccgacggcgccgaaggccaccgtgtcggcgagcgtgaacccggcggggtcgccggtctgcaggccgg

SEQ ID NO: 401584 - DNA, 407 bp, Oryza sativa nipponbare
  unsure (1)..(407): unsure at all n locations
ttgaagcaaagatgatgacagacagaaattaattaagctagaagtctccgcgatcgatcacacacacacacacaattaaggtacatacatacatgcanctgctgcaactgcaactgcagggtcggtgcgtggctactacaagtgtacacatggtacgttggttggcaccatctcgatcgtgtcgttgtgctcacttgccggggacgaagttggtggcgtatgcccaggcgttgttggcgacggggtcggcgacgtggtcgaagaggttctcgatggggcccttgccggtgacgatggcctggacgaagaagccgaacatggagaacatggcgaggcggccgttcttgagctccttcaccttgagctcggcgaaggtgtcagggtcgtcggcgaggccgagcgggtcg

SEQ ID NO: 401585 - DNA, 280 bp, Oryza sativa nipponbare
  unsure (1)..(280): unsure at all n locations
aattcacaacaccatatttcattgatcaggttcagaacctgcacagaaatacacactagccgtacagatctcaccctttctccaatactcgtacatccatccacgcgggtccacaacgaatacgtacattctataccggtacaacgtacgtacattctacnntgcaccgggtacacacancgcacanctctnctgcagaagacgcgcatncgtcgtcaacctagctagcttagctgaaggcgatgcgtcgccatggcagcacggcggcggcggcgctcac

SEQ ID NO: 401586 - DNA, 440 bp, Oryza sativa nipponbare
ttatagcacaagacaagaggcaagctagcctctgtttattattattaccggtgatctcatgaagcggaaatgttcccaagtagtgccttacaaattaacaacagattatttaatgtacaacatagctgcgagcttctcgagttgaccgtgagttcacaacagcttgaaagcttcagccggaacagctcagaccttggatggtggaggatcctgaataccgcagagcaaattcgcgggcacggctacatcgatcatctttggataggccaagttcaagttgtccataattttcttgaatgtttccttatcctttgttagtcgagcattatacgcaacctcctcttcaacagtacttactgtgaaacctttgtagtcatggccaggataaagcagggtatcctttggcaatgtgaaaatctgcgaatgcaccgactcataca

SEQ ID NO: 401587 - DNA, 365 bp, Oryza sativa nipponbare
ttcctgctggaaaatttgatgatttatttcccacttatatcatgatatacgaatactaacacatgcgaaaattatcaagcacaaaagttcatacaaattcatccagacaaacaagtgtgaaaaaccttttttttcccatttcccccttgaactatccgtaaataccaccattccaccaaactcccctctgtcttctacgacaaataatctttttaacccagtaacttataattaattacagagagattagcaaacatataatggtaagaatcagttgtcgtaggtgcggcactcgtcggtctccgggttgtccttgcagtaggcctcgagcgggtcggaggtcttcttgagcttgtcgcgcgcgt

SEQ ID NO: 401588 - DNA, 316 bp, Oryza sativa nipponbare
ttgttgaagttcgattgagtatgatagacctttttactaggcaaaccacggcgaatacacgattgattaatttcactgagaatagcacgggtacatcacaatcacaacaaattcataccgttgatacaacgaatagtgcgccgaagcgaccagctgctttaattaatcgataacacacgggtttaattcagcaataatcagcacacacacaaaccacactcatatgggtggttttaattgtggactaattaaggtaggtgactcgccggcggcgagtgttcggttgcttcgtgacttcacttgccgcacttgcagt

SEQ ID NO: 401589 - DNA, 428 bp, Oryza sativa nipponbare
  unsure (1)..(428): unsure at all n locations
aaaaaaaaaatgtgacctcaaaactttatttagtattcncacacgtactgggcacaaactaataaaaccacactttacaacaccactagctaggttttagacacaaacaagcataagcgatggtttaacaagagcgagcaacgcgtctgatacaatgaacacttatacaaaatctggtgtgtgctctgccatttgagctaaatttgaaccgggattttgtatttgaacatatgaaaacgtttactctgctttccaagacgacaatggaggggtctcagaatccttccaagtgccggccgtctgagcatagcggtcaccttgaacaacatctgtgctggcataggactcaagttcaatcatttccccaggggtgagcttcacagatagagctgctacattttgattgaaattctcgatttttggtggcc

SEQ ID NO: 401590 - DNA, 424 bp, Oryza sativa nipponbare
gggaaacgaataaaatcattattgcaaaaacatcatcttcttcgtcatcgggttagtgtacacaacaccaactcgatcatcatctcgtcgcactaaacccatcttccccaacccaaagacaacgaactcgctggccacaaatccatccaaccacaattaaccactgctaagctacggtcccccacttcacttgccggggacgaagttggtggcgtacgcccaggcgttgttgttgacggggtcggcgaggtggtcggcgaggttctcgagggggcccttgccggtgacgatggcctggacgaagaagccgaacatggagaacatggcgaggcggccgttcttgatctccttcaccttgagctccgcgaacgcctcggggtcatcggcgaggccgagcgggtcgaaggcgccgtcggggtagagc

SEQ ID NO: 401591 - DNA, 458 bp, Oryza sativa nipponbare
tgctaaggaacttaagtatgaagtatcaacaaccccaaaacatcatataatgacccttgtgttggaaaactgtaacccccactgtgatgcagttcactgcacttaaatggagatcataacaaaacctttgccaaatggtacattgttgaagtctcaatactttacaaaggaacacacgaggtgcagattctgctaaccacccatcatctcaccgttcgaagcccctcaggcagaaaatatcagcattcctttttgaaggaaaaaaaagctggagatggtcttcctacagaatcagtagacaagctggggctcgaattcagcgaaatcaacagagccagactcgattgggggcatgaggtacgcagcaatgatctcagacaccagagcggcaacgtgaggaatcctcttcaggttcttcaccagggggatatcgtcagactcgcctatggcaatgatct

SEQ ID NO: 401592 - DNA, 425 bp, Oryza sativa nipponbare
  unsure (1)..(425): unsure at all n locations
actaggcaaaccacacgaatacacgattgattaatttcactgagaatagcacgggtacatcacatcacacaaattcatacgttgatacacgcatangtcgccgaagcgaaccagctgcttaattaatcgataacacacgggtttaattcagcaataatcagcacacacacaaaccacactcatatgggtggtttttattgtggactaattaaggtaggtgactcgccggcggcgagtgttcggttgcttcgtgacttcacttgccgcacttgcagtcggtgcaggagcagctggtgccgcacttgcaagcgccgttctcctcgccggcggcgacctcctcgaagtggctcttctcggcttcaactatgacgacgccatagctggtacctttcttcacgcactggctcttgtcagcacagtcgcag

SEQ ID NO: 401593 - DNA, 484 bp, Oryza sativa nipponbare
  unsure (1)..(484): unsure at all n locations
cccacacctgccgtccttttttgtttaaataccgacaaatatnnctctagaggaattactcaagaagttcagagagtactggaatccattcacatgcccatccttttacctcaatttattacggaataacgactcaaaacatggaaagagaaacacgcaaatcttagcacaggcagaacaactcaaaacactcgtcagaggaggtcatcagaccatcgctctcagctcccgagcagagacgtcaagaaggccagccctccgatcaagagcatgatgttgaggaagtagttggactgcagaggcttgtccgggctgcctccgaatccctcgtactccgccctgatcttctgcttcatcgagtccgacagctccttctttccgtaggagtatttcgcagcgacgaagggctctggttgcggtgctgcaccgttgttgtcatccgcttgcgatgatgccactgctgctcctaccgttactggtactg

SEQ ID NO: 401594 - DNA, 472 bp, Oryza sativa nipponbare
tttttgagaaaactacttgacagtacactttattcactatagctgtatggacatgcgagtcgcatgcccccactggacgggtataaatgtaagaactatgtgtccagaaccaaaaatacgattacataggacacgaatcctgtacaggaatggagaagtttagaagtgtgtcttcactgcctctgcaaatagcaacctagcgtcagcaaaccaatttacaggggggtggttaactagggcgtgcaagtgcaagggcgcaaagaagaatcctccacgatcatgtgaaacttcgtttcaaaagatgccttgggcagagcttccacaaaatcgcagtctttgggggcacttcggtgcttcacaagtatgccagttgttattttgttttccttgatgcggtcccaggaaaaaatcacctggaaagtaccaaagaacaccctcctgttggctaatctgatcactggggaattgcagt

SEQ ID NO: 401595 - DNA, 361 bp, Oryza sativa nipponbare
  unsure (1)..(361): unsure at all n locations
catgaagtaacttatatatatgtggaactccgttaattaaaaattaaaggggtatataaaccggttccgtaaatatcttaaggcgagatatacagatgcaaataggtgtacagtactcgaaattacaaagattataccagtttaattaatcgttgggattaagagcatgaacgacccagttacgaggggtgcacggagtacgtgtgttgcttgcgcgcgtgtggatcgacgagattcttttgcaaaaattacctaattaattaatcggcgtgctctctggcgtcgtcgatattgtttattgtttggctagagttcgccggcggcggcggcggcgaggtcctcacaacctgnggaaggggcg

SEQ ID NO: 401596 - DNA, 279 bp, Oryza sativa nipponbare
aaaatatatatagccggagcttccatatatttcattgacatatggctcacccaacaacatatagtcgtagcaaataccactctacatcaagtcagagagagatcaggtgaaacaaaaacaaaagcagagcacggccggtaaaatcaaaagacgatgaacaaactgggaacacacgaaacaaggtgggagacatcatcgaatcagagatgaacaattaaacaaggctatatatgacgatgacggcttagttgccaccagactcctcgcaacccgggggct

SEQ ID NO: 401597 - DNA, 185 bp, Oryza sativa nipponbare
ttccttttttttttttttttttaattaacctagaaatctcctctatcgatcacacacacacacacaatgaaggtacatacatacatgcactgctgcaactgcaactcagggtcggtgcgtggctactacaagtgtacacatgttacattggttggcaccatctcaatcgtgtcggtgggctcact

SEQ ID NO: 401598 - DNA, 424 bp, Oryza sativa nipponbare
gtataaatatatacagacggagcttccatatatttcattcacatatgcctgagccaacggcatatagtcggagcagataccactcttacatcaagtcagagagagatcaggtgaaacaaaaacaaaagcagagcacggccggtaaaatcaaaagacgatgaacaaactgggaacacacgaaacaaggtgggagacatcatcgaatcagagatgaacaattaaacaaggctatatatgacgatgacggcttagttgccaccagacttctcgcagcccgggggcttgtaggcgatgaagctgatgagctgcacctgcctgacgttgtcgaagccgatgatacggacgaatgcatcagggtacgccttcttggccttctcgagctccttgagcacctgggtggcgtcagtgcacccgaacatgggca

SEQ ID NO: 401599 - DNA, 524 bp, Oryza sativa nipponbare
ccacgcgtccgcttggggttggttcaattgaggaggtgcgtgtaacgcgtgataaaggttttggctttgtgcgttacagcacccatgaagaagctgctctagcaattcagactggtaatggacaacttattggcggtaggcagatcaagtgttcctggggaagcaagccaactccaccagggacagcatccgcgcccctaccccctccagcaccagcaccattcaatcctggcatgtcggcgaccgacctcctagcctacgagcgcaccctggcgctgagcaagatggcagcgaacccggccctgatgagtcagcacgccgccctaaagcaggctgccgccatggggatgggcgccggagccagccaggccatctacgacggcggctaccagagtgccaacgccgtcttctactagagtgacctgagtacctgaccccccatgaagcagaccaccaccattgcctggctgcctctgtatgaccaaggaggatgatgatgaccccttcacccccttatacatata

SEQ ID NO: 401600 - DNA, 402 bp, Oryza sativa nipponbare
  unsure (1)..(402): unsure at all n locations
ccacgcgtccgggaattttgcaggcggaccccttncgtccctccgctagggcgattttctactgtggggggccgcctgcaaatgggcggcgagggggcatggaattttgcaggcggcccccttgccgccctgggggagggcgattttgtactgtgctctatattttttttatataaatatcaatagggggggggctttttatattgaaaactatacaagattaaaatntccaagactggtaaaatacaattttattattttttagggcatatttggattggtaccgtacaaatattttggtagtgccaaaatataagcaagttttggcactaccaaatatttggtaaggtaaaattgcatttgatcatatttggtttgcttgcaaaatgtaaaattgtagtg

SEQ ID NO: 401601 - DNA, 457 bp, Oryza sativa nipponbare
  unsure (1)..(457): unsure at all n locations
ccacgcgtccgcggacgcgtgggctcgccgccaanagccccgtggctcggccatccccgcccctccaatgcccccgtccgcgacatcgccgccgccgccaccggccgcatcaccatgagcaaggagctgtggtacgggccggatagggtgaagtacctggggccattctcggcgcagacgccgtcgtacgggaggggcgagttcccgggcgactacgggtgggacacggcggggctctccgcggacccggaggcgttcgcgaggaacagggcgctggaggtgatccacggccggtgggcgatgctcggcgcgctgggctgcatcacgccggaggtgctcgagaagtgggtgcgcgtcgacttcaaggagcccgtgtggttcaaggccggcgcccagatcttctccgacggcggcctcgactacctnngcaaccccaacctggtgcacgcccagagca

SEQ ID NO: 401602 - DNA, 509 bp, Oryza sativa nipponbare
ccacgcgtccggcttggtgagctgcagagatggccccctccgtgatggcgtcgtcggccaccaccgtcgctcccttccaggggctcaagtccaccgccggcatgcccgtcgcccgccgctccggcaactccagcttcggcaacgtcagcaatggcggcaggatcaggtgcatgcaggtgtggccgattgagggcatcaagaagttcgagaccctctcctacctgccaccgctcaccgtggaggacctcctgaagcagatcgagtacctgctccgttccaagtgggtgccctgcctcgagttcagcaaggtcggattcgtctaccgtgagaaccacagatcccccggatactacgatggcaggtactggaccatgtggaagctgcccatgttcgggtgcactgacgccacccaggtgctcaaggagctcgaggaggccaagaaggcgtaccctgatgcattcgtccgtatcatcggcttcgacaacgtcaggcaggtgcagctcatcagc

SEQ ID NO: 401603 - DNA, 535 bp, Oryza sativa nipponbare
ccacgcgtccgagcttggtgagctgcagagatggccccctccgtgatggcgtcgtcggccaccaccgtcgctcccttccaggggctcaagtccaccgccggcatgcccgtcgcccgccgctccggcaactccagcttcggcaacgtcagcaatggcggcaggatcaggtgcatgcaggtgtggccgattgagggcatcaagaagttcgagaccctctcctacctgccaccgctcaccgtggaggacctcctgaagcagatcgagtacctgctccgttccaagtgggtgccctgcctcgagttcagcaaggtcggattcgtctaccgtgagaaccacagatcccccggatactacgatggcaggtactggaccatgtggaagctgcccatgttcgggtgcactgacgccacccaggtgctcaaggagctcgaggaggccaagaaggcgtaccctgatgcattcgtccgtatcatcggcttcgacaacgtcaggcaggtgcagctcatcagcttcatcggctacaagcccccgggct

SEQ ID NO: 401604 - DNA, 439 bp, Oryza sativa nipponbare
ccacgcgtccgcgccgaggtgacggagcgcgtcctcgccgcgtgctacaaggcgctgagcgaccaccacgtcctcctcgagggcaccctcctcaagcccaacatggtgacgccgggctccgacgccgccagggcgccgccggaggtggtcgccgagcacaccgtccgcgcgctcctccgcaccgtgccgccggcggtgccggccatcgtgttcctgtccggcgggcagagcgaggaggaggcgacgaggaacctgaacgccatgaaccaggtggcgagcaggggcaagaagccatggtcgctgaccttctccttcggccgcgcgctgcagcagagcacgctcaaggcgtgggccggcaaggcggagaacgtcggcaaggcgcaggcggcgctgctcgccccgtgcagggccaactcccaggcgacgctcggggcgtacg

SEQ ID NO: 401605 - DNA, 532 bp, Oryza sativa nipponbare
ccacgcgtccgtgctactggacatactctactactactagccagtaagctagctaactaactacgtggctatggcccccaccgtgatggcctcctcggccacctccgtggctccattccaagggctcaagtccaccgccgggctccccgtcagccgccgctccaccaactcgggcttcggcaacgtcagcaatggcggaaggatcaagtgcatgcaggtgtggccaattgagggcatcaagaagttcgagaccctatcgtacctgccaccactcaccgtggaggatcttttgaagcagatcgagtacctgcttcgatccaagtgggtgccttgcctcgagttcagcaaggttggattcgtctaccgtgagaaccacaggtctcccgggtactacgatggcaggtattggaccatgtggaagctgcccatgttcggctgcaccgatgccacccaggtgctcaaggagctcgaggaggccaagaaggcctaccccgatgcctttgtccgtatcatcggcttcgacaacgtcagg

SEQ ID NO: 401606 - DNA, 529 bp, Oryza sativa nipponbare
  unsure (1)..(529): unsure at all n locations
ccacgcgtccgctctcctcctcgtctaccttacctagcagcagcagctagctagcttaattagctatagcagccatggcggcgacggcactgagcagccaggtccggttgccgatgtccctgcgggtggcgacggcgccggcgccggcgcgcgtgtcggtgctgccggcgagcaacaagctgggagacaggctgcggatgcaggcgacgtacaacgtgaagctgatcacaccggacggcgaggtggagctgcaggtgccggacgacgtgtacatcctggaccaggcggaggaggaagggatcgacctgccttactcctgccgcgcgggctcctgctcctcctgcgccggcaaggtggtctccggcgagatcgaccagtccgaccagagcttcctngacgacgaccaggttgccggcgggtgggtcctcacctgccacgcctaccccaagtccgacgncgtcatcgagacccacaaggaggacgacctcatctaatcaatcaagcaagctccatatttataaatctctcg

SEQ ID NO: 401607 - DNA, 486 bp, Oryza sativa nipponbare
ccagcgtccggcgggctcgactacctcggcaacccgagcctgatccacgcgcagagcatcctcgccatctgggcggtccaggtggtgctcatgggcgccgtcgaggggtaccgcatcgccggcgggccgctcggcgaggtcgtcgacccgctctaccccggcggcagcttcgacccgctcggcctcgccgacgacccggaggccttcgcggagctcaaggtgaaggagatcaagaacggccgcctcgccatgttctccatgttcggcttcttcgtccaggccatcgtcaccggcaagggccccctcgagaacctcgccgaccacctcgccgaccccgtcaacaacaacgcctgggcctacgccaccaacttcgtccccggcaagtgagcgccgccgccgccgtgctgccatggcgacgcatcgccttcagctaagctagctaggttgacgacgatgcgcgtctctgcaggagagtgggcgtgtgtg

SEQ ID NO: 401608 - DNA, 490 bp, Oryza sativa nipponbare
ccacgcgtccgcacacgcgtccgcccaccgcgtacggtcgctgaccaccggcgacatgctcggccactacggcgctctacttcatccccgccgggtcgcgggaacgctggcggggggcaggtcgtcaaggacaagctcgagcaacgacgtgctcgccgaggagtggctcaagacacacggacccaacgaccgcaccctcacccaggggctcaagggtgacccgacgtacctcgtcgtggaggccgacaagacgctggccacgtacgggatcaacgccgtgtgcacgcaccttgggtgcgtcgtgccgtggaacgccgccgagaacaagttcatctgcccctgccacggctcgcagtacaacaaccagggcagggtccgccggggacctgctcccctggtaacattctcaactctgatctcttgctgaacgaaaagatccttaaatttcaagattcaatctgaactgaaccctcaaattgcaagaacttag

SEQ ID NO: 401609 - DNA, 492 bp, Oryza sativa nipponbare
cgccgctgtcgctgacgctgctgttccgccatggcgttgatgatgagccttcgcttcgcccccccagcgtccgtcgctgctccgccgccgcgacgaccacgagctgttgcctcttcggcgtcctctccggcactccaacgccgccgcccgcagaacgtccccggcgacttcttcgtcgatcaccgatgcatcgattgccagacctgccgctggatggcttcggaggtgttcaagagggtggacggaaaagccgccgtcgccgcgcagcccatctccgacgaacacaggaccaaggccctgcaggctctgctctcctgtcctacttcctccattcacaccgagaaacctgcaaaggacattcttcaagtgcaaaacatgttcccgctccccatcgacaatcatcttctccctggggttacctctgtggctatcattctcaagattcatatggagcaactttttatcttttaacccatccagatggaaacatac

SEQ ID NO: 401610 - DNA, 490 bp, Oryza sativa nipponbare
  unsure (1)..(490): unsure at all n locations
ccacgcgtccggtcttctccttcgagttgttagctccctccttattcaaccatgggtaaggagaagacgcacatcaacanttgtggtcanttggcnncacgtcgactccggcaagtncgaccccaccacgggccatctgatctacaagncttggaggtatcgacaagcgtgtgatcgagaggttcgagaaggaagccgctgagatgaacaagaggtccttcaagtacgcgtgggtgctcgacaagctcaaggccgagcgtgagagaggtatcaccattgatatcgccctgtggaagttcgagaccaccaagtactactgcacggtcatcgatgcccctggtcaccgtgacttcatcaagaacatgatcacgggtacctcccaggctgactgtgccgtgctcatcattgactccacactggtggttttggggctggtatctccaaggatggccagacccgtgagcacgctcttcttgctttcactcttgga

SEQ ID NO: 401611 - DNA, 536 bp, Oryza sativa nipponbare
ccacgcgtccgccgtgaactggccttgcggataatagcagacaacaagtactactcaatcttcaggaagcattgcagaccatcttgttatccggatgagcattacataccaacctatctgcatttgtttcatgggtccctgaatgccaacaggaccatcacatgggttgattggtcaagaggaggtccacacccagcaagatatggtgcttcaaacatcagtgaagagttcatccaggctatcaggaataacggtacacgatgcacttacaactcgaagcccacttctgtctgctatctgtttcgtaggaagtttgctcctagcgctctcgggccattgatgaacctcacttcgaccatattggacttttgagttactcaccattcttcattggcatcacgctaccggactatctccatcggcacacatactccatgaggagtagcggtacactatacatgtttgggggcatgtatcgcatgacagatggatcggagacgcctttcgatgagtcggcacccatctctgatggtgat

SEQ ID NO: 401612 - DNA, 443 bp, Oryza sativa nipponbare
ccacgcgtccgcggacgcgtgggtgcccatgttcgggtgcactgacgccacccaggtgctcaaggagctcgaggaggccaagaaggcgtaccctgatgcattcgtccgtatcatcggcttcgacaacgtcaggcaggtgcagctcatcagcttcatcgcctacaagcccccgggctgcgaggagtctggtggcaactaagccgtcatcgtcatatatagccttgtttaattgttcatctctgattcgatgatgtctcccaccttgtttcgtgtgttcccagtttgttcatcgtcttttgattttaccggccgtgctctgcttttgtttttgtttcacctgatctctctctgacttgatgtaagagtggtatctgctacgactatatgttgttgggtgaggcatatgtgaatgaaatatatggaagcttcggttatatatattt

SEQ ID NO: 401613 - DNA, 445 bp, Oryza sativa nipponbare
ccacgcgtccggtttggtgaaggagagaagtttgtgaaagctgtattttcactggcaagcaaaattgctccaagtgttattttcgtggatgaggttgatggcatgttgggtaggcgtgaaaaccctggagaacatgaagcaatgcgtaaaatgaaaaatgagtttatggtgaactgggatggtctaagaacaaaagataaagagcgtgtattagtacttgctgcaactaataggccatttgaccttgatgaggctgttgttaggaggcttcctaggcggttgatggtgaatttgccggatgcatcaaatagaagaaaaattcttagcgtgatactagctaaagaagatttggcagatgatgtcgatcttgaagctgtagctagcttgactgaagggtattctggcagtgatctcaagaatctatgtattactggtgctcatctcc

SEQ ID NO: 401614 - DNA, 610 bp, Oryza sativa nipponbare
  unsure (1)..(610): unsure at all n locations
ccacgcgtccggggacgccgaggatggctgagcagtagtcttccctggacagctcccaagaagggattcagcttgagcgatctaatcggggatggcacagatggtttgcctgtcacacttgggcttgctgcagctactggtttgggaatacttgcctacacagagatagagactgtgcttcagtttttggggtcagctgccattgtccagctagttgcaagcaaactcatatatgctgaggaccgaaagagaacccttaaacagatcgatgatttcttcaacaaaaaggttgctccaaaggagcttgttgatgaaataaaggaaatcggtcaggctctgctgccttctactggtaccaagagccaaccagcaatcacagaagctgctccagcaacagcagaagctgctccagctgccgccacagctaccgctgcaccaccggcagcaccggtagaagagaccagtacagaggcagctcctgcagagccgacacctctttcaccatatacanaattatccggatctcaaaccaccatccttcccttcgccactggcaccggctgaggcgactaaaaatgagtcggaatccgagagcgcagcgaccgaatct

SEQ ID NO: 401615 - DNA, 567 bp, Oryza sativa nipponbare
ccacgcgtccgtagatgtctgtattgtgtacatggtgagagctaaacgcgatctgatcgcactgctgtcggacgacagacaacacgcgatttgagaaagcttatatgggcaacaaatgcttgtgtttcgggatgcatatgaatacctacttccatggaaacgtcttttcggggttcatgaatctcagatagacgatgttatgagggaaagtgccaagagtttatatgcatcattgctcaagtctattgggagaggtcttgacataggcacattaattgaagtaaggagatcacaactagcatataaactttctgatgagattgcttctgagatgttcagggagcatgcaaagaagttagttgaagaaaacatttcaacagccttgaacaacttgaataaccgaacacaggttgttgaagaagtgaaaagcatcctttcatttaatggtatgcttacagtactgagcaatttcccgggagaagaaagatttgtcccgggccttgggcctattacattaggtggagacagtgatcatgaaaagagggtagagggtctaaagatgctcta

SEQ ID NO: 401616 - DNA, 503 bp, Oryza sativa nipponbare
ccagcgtccgaagaagtactcgagcaaagaaggagagagcttggtgagctgcagagatggccccctccgtgatggcgtcgtcggccaccaccgtcgctcccttccaggggctcaagtccaccgccggcatgcccgtcgcccgccgctccggcaactccagcttcggcaacgtcagcaatggcggcaggatcaggtgcatgcaggtgtggccgattgagggcatcaagaagttcgagaccctctcctacctgccaccgctcaccgtggaggacctcctgaagcagatcgagtacctgctccgttccaagtgggtgccctgcctcgagttcagcaaggtcggattcgtctaccgtgagaaccacagatcccccggatactacgatggcaggtactggaccatgtggaagctgcccatgttcgggtgcactgacgccacccaggtgctcaaggagctcgaggaggccaagaaggcgtaccctgatgcattcgtccgtatcatcggc

SEQ ID NO: 401617 - DNA, 630 bp, Oryza sativa nipponbare
  unsure (1)..(630): unsure at all n locations
ccacgcgtccgcccacgcgtccggatgacttgaagtttgtagccacccaattcaggagactccacagcaaacaactccagcatacatttagattctattcacagcaatggagaacctgggcagcttgttttatacaggcagcttggcatagatactgcagaaagaaactggaggatactttgtttgagaaggagaagaggttgcaagcggcaattgtcagtgatggttcgagttcgctcagtcttggtgcggcgctatatgcttcacgttttgctggtaatatgatgcggatcttacggagaaatgccactcgaaaggcccgtttgcaggaaagagtgcctgcaaggttattacagaagcctgcagaaccgaactttttcgctgaagatcagtaatgtccatactttgctacatgcagaaattgatgcttcagctggtaaaagttctctctcccctgctgatataccatttttcagtatatgattgaattctgtacatagatagaccatnntgttccaagccttttggtttatataagataattcgatttaccggtggatcttcatctatacaatgtatatttggggttgacatggaatgcatgtattataagcattccacttccacatt

SEQ ID NO: 401618 - DNA, 389 bp, Oryza sativa nipponbare
ccacgcgtccgccacacgcgccgtttgctcaatcaccacacgcgcacactacacgacgcactgatggagcgggcgtgcgcatcatggtgcacaccgccggcggggggctccccgggggcccagggcctcttcgttctttggcgggaggggcaggagagcatgcgcgagaccgacgcaaagcccaagccggcgcggtcggccgtgagcccgcgggacggcgccgaccgcgtactgtacctcgggccgctctgcggcgagccgccgagctaccttaccggcgagttcccgggcgactacgggtgggacaccgcggggctctccgccgacccggagacgttcgccaagaaccgggagctggaggtgatccactcccggtgggcgaagctggg

SEQ ID NO: 401619 - DNA, 462 bp, Oryza sativa nipponbare
  unsure (1)..(462): unsure at all n locations
ccacgcgtccgaccgcagcaatggcgtccctcgtcgcgcgtccagcctgtcgccgtgaagggcctcgccggcagctccatctccggcaggaagctcgccgtcaggccgtcgccccgggcgctctgccgcaccacccgcaggccgcgcgccgccgtggtggccaagtacggcgagaagagcgtctacttcgacctcgaggacatcggcaacaccaccgggcagtgggacctgtacggctccgacgcgccgtcgccgtacaaccctctccagagcaagttcttcgagacgttcgcggggcccttcaccaagagggggctcctgctcaagttcctgctgctcggcggcggatcgctggtggcctacgtcagcgcgtcggcgtcgccagacctgcttccgatcaagaagggcccgcagctgccgncgacgcccggcccacgcgggaagatctaaattaaattcctc

SEQ ID NO: 401620 - DNA, 471 bp, Oryza sativa nipponbare
ccacgcgtccggccgccagccgactcgaccagcgcccggaggcggagcacccgccgccgccgccctcgccatcgtcggcttcacccctcatcggcaacctagtgcaggttgttttctgaagatggctgacgatttgggccctcccactgtgctccagaagatacatgggcagtccatgatgttcagcaagatctcaccttattctttgatgaagaatcccgcactctacaatgccaacacttcttacagtgtgcctctgaagtcatacaatgggatggatgggaacaatgggttctcatctgtcacatctgtatccccagtctttgcttctgccccaaaggagaaaggtctttctgggtttatgattgacttcatgatgggtggaggttcagctgctgtctccaagactgctgctgctcccattgagcgaatcaagcttctcattcaaaaccaggatgaaatgatcaagag

SEQ ID NO: 401621 - DNA, 110 bp, Oryza sativa nipponbare
cgtccgggacgcgtgggcgcgcaacgaacgacgcacaatggcgctcgtctccgctcctcctcaaccaccgccgtcgcggcgctccccggcgccgccagggcctcctactt

SEQ ID NO: 401622 - DNA, 466 bp, Oryza sativa nipponbare
  unsure (1)..(466): unsure at all n locations
ccacgcgtccgtgctgaaggtgatattcagattttcagagtgagtgctcgtgtgttgtgcgatcagtgcccgcagttcgatcgatccgtgttgatctttgaaagaaagatgtcgtgctgcggaggaaactgcggctgcggatccggctgccagtgcggcagcggctgcggaggatgcaagatgtacccggagatggctgaggaggtgaccactacccagactgtcatcatgggtgttgcaccttccaagggtcatgccgaggggttggaggccggcgccgccgccggagcaggagcagagaacgggtgcaagtgcggcgacaactgcacctgcaacccctgcaactgcggcaagtgaagcaagcaacctcctgacgaaaccaaggagatggaagggcccagtactgctaagctaggagtttgatccagntacaagtgatgagttggtggcactgtaactttgtgtt

SEQ ID NO: 401623 - DNA, 449 bp, Oryza sativa nipponbare
ccacgcgtccgcccacgcgtccgggaggggagcgggggctgtggtggcggcggcaatgcggccggcgaaggcggtggcgtcgccggcgaaggaggcggccggggaggtgaacggggcggcgtcgggggggttcgcgaggcccgacgcgttcgggaggttcgggaagttcgggggcaagtacgtgcccgagacgctgatgcatgcgctcaccgagctcgaggccgcgttccatgccctcgccggcgacgaagatttccagaaagaacttgatggtattctcaaggattacgtcggccgggagaccccgctgtactttgcggagcgattgactgagcactacaagcgcgctgatggcacaggccccatgatttacctcaagagggaggatcttaaccacactggcgcccacaagatcaacaatgctgtcgctcaagtcttgcttgccaagc

SEQ ID NO: 401624 - DNA, 464 bp, Oryza sativa nipponbare
  unsure (1)..(464): unsure at all n locations
ccacgcgtccggcgacatcatcatcccgaagataccatccacccttgagcttggcacgaaccagtgtgcgtgcgtcccgacgtacgcgaagctatgcgtggttttcatgtacgcgcagaccgtagcgacacgagtggatcatggcacccgctctcccatgcatgcaccgcaccagatgattcagatgattcctccattgacacaggggcacagctggaagtactcagccatggattcaagaaaatactcttccttcgccttcatttctccaaagtctgcaatgccacttctgtcaagaacccagagtgggatggatctccaaacctgggtcagaaatcaggcctcatctcaacacttatcagcacacatttctccacagcagctctaaagcccgcgcctcgccctgccgaagtgaacatcaattcgggggngtaccctggtggcccgcctggtccagggcagac

SEQ ID NO: 401625 - DNA, 442 bp, Oryza sativa nipponbare
ccacgcgtccgcccacgcgtccgcccacgcgtccgcccacgcgtccgcggacgcgtgggctcgagcaaagaaggagagagcttggtgagctgcagagatggccccctccgtgatggcgtcgtcggccaccaccgtcgctcccttccaggggctcaagtccaccgccggcatgcccgtcgcccgccgctccggcaactccagcttcggcaacgtcagcaatggcggcaggatcaggtgcatgcaggtgtggccgattgagggcatcaagaagttcgagaccctctcctacctgccaccgctcaccgtggaggacctcctgaagcagatcgagtacctgctccgttccaagtgggtgccctgcctcgagttcagcaaggtcggattcgtctaccgtgggaaccacagatcccccggatactacgatggcaggtactggaccatg

SEQ ID NO: 401626 - DNA, 506 bp, Oryza sativa nipponbare
ccacgcgtccgagcaacacaagggattaactcatcactcacttagctaattaaatcttcgaccatgtcggacaagtgcggcaactgcgactgtgctgacaagagccagtgcgtgaagaaaggtaccagctatggcgtcgtcatagttgaagccgagaagagcacttcgaggaggtcgccgccggcgaggagaacggcggctgcaagtgcggcaccagctgctcctgcaccgactgcaagtgcggcaagtgaagtcacgaagcaaccgaacactcgccgccggcgagtcacctaccttaattagtccacaataaaaaccacccatatgagtgtggtttggtgtgtgtgctgattattgctgaattaaacccgtgtgttatcgattaattaagcagctggtcgcttcggcgactatgcgtgtatcaacgtatgaatttgtgtgatgtgatgtacccgtgctattctcagtgaaattaatcaatcgtgtattcgtgtgggttgcctagt

SEQ ID NO: 401627 - DNA, 438 bp, Oryza sativa nipponbare
  unsure (1)..(438): unsure at all n locations
ccacgcgtccgggaggtgatccactcccggtgggcgatgctgggcgcgctcggctgcgtcttcccggagctcctcgcccggaacggcgtcaagttcggcgaggccgtgtggttcaaggcgggctcgcagatcttcagcgagggcgggctcgactacctcggcaacccgagcctgatccacgcgcagagcatcctcgccatctgggcggtgcaggtggtgctcatgggcgccgtcgaggggtaccgcatcgccggcgggccgctcggcgaggtcgtcgacccgctctaccccggcggcgccttcgacccgctcggcctngccgatgaccccgaggcgtncgcggagctcaaggtgaaggagatcaagaacggccgncttggcatgttctccatgttccgcttcttcgtccaagccatcgtcaccggcaagggccccctt

SEQ ID NO: 401628 - DNA, 464 bp, Oryza sativa nipponbare
  unsure (1)..(464): unsure at all n locations
ccacgcgtccgctctgcctcaagcacctgaccattcagattgcgcgagggaccttttccccatcctatgattatttctttctggtttctttccttcacgcgtctccttccttggagactttatacttggatgtttttcaggaagatatgaggcatgaatcgattgttgaagattcttccgcacatttgaggcagctgcccgagctcagccatgaatgcctgaagagtgtggagatcatagggttcaactccgcgaagagcttggttgagctaacatgttgcattgtcaaagccgctgcctcacttgagcgtcttgtgttggacaccttagaggtggtgataggtgttctggggaaagaatgggaagaatttgtggnctgttagnaacgctgtgcttaaggaatnncgaagagctggcattggtggacgaaggtacatcgaggataaagttgcacctacaacaac

SEQ ID NO: 401629 - DNA, 463 bp, Oryza sativa nipponbare
  unsure (1)..(463): unsure at all n locations
ccatgcgtccgatgccaatggcaaactcatgctggctcaatgctgccagtgcacaaggaatctcagttgttgagcgaatctctgggaaagacaacatcctaaatcatctaagcatcccggctgcctgtttcactcatccggagatagtatggttgggctaacagagccacaagcgagagaaaaggctgataaggaaggatttgagataagtgttgttaagaccagcttcaaggcaaacacgaaggctctggctgagaatgaaggagatggacttgctaagatgatttaccggcctgacactggagaanattcttggagttcacatanttaggtttgcatgctgctgacctcatccacgaggcatcaaacgccattgccctcggaactcgtgtacaagacatcaagtttggctggtcatgcacacccaactttgtctgaggttctggatgagctcttcaaagct

SEQ ID NO: 401630 - DNA, 492 bp, Oryza sativa nipponbare
  unsure (1)..(492): unsure at all n locations
ccacgcgtccgtgccgtacaaggtgagctccgagacaggatacgtcgattatgataagctggaggagaaggccatggattttcggcccaagctcatcatctgcggcgggagcgcgtacccgcgggattgggattacgccaggttcagggccatcgcggataagtgcggcgccatgttgctctgcgacatggctcacatcagtggcctagttgccgcgcaggaggctgcaaatccttttcaatattctgatgtggttaccaccaccacccacaagagtctccgagggccaagatctggtatgatcttctacaggaagggcctgaagcctcccaagaaaggccagcctgagggcgctctgtatgactacgaggacaggatcaacttcgcagngnnttccgcgctccaagggggccctcacaaccaccaaattggtgcgctagcgggtggttnggagcagactatgtcacctggatttcaggcttatattaagca

SEQ ID NO: 401631 - DNA, 442 bp, Oryza sativa nipponbare
  unsure (1)..(442): unsure at all n locations
ccacgcgtccggccagaagcaaagatggcgatctccagcctacatgccaccacctccctgcactccccatgcaccaccaacacaagcttcaggcagaatcaggtcatcttcttcaccaccagaagcaacaggaggggtagcacaaggtacggaggagcaagaacctttcaggtttcatgctcagtcgacaagccagtggtgattggccttgcagcagactcaggatgcgggaagagcacctttatgcgccggctcaccagtngtgtttggtggtgctgcagagccacccaagggtggcaacccagactcaaacacactcatcagtgacacgacaacggtgatatgcctcgatgactaccattccttggacaggactggcaggaaggagaaaggtgtgactgccctggaccctagggcaaacgattttgatctcatgtatgag

SEQ ID NO: 401632 - DNA, 568 bp, Oryza sativa nipponbare
ccacgcgtccggcggcggcaacactgaagcaaccaaaatcttacagcggcggcagccatggcgtcgttaggagctaacagccatggccgagtcctgcacacctgcacactctccccaaagccggttacagctttgagcagaagcatggcggccattcctggacaccatgtttttcagtctccacgagctcggattgcagtgcgagctagcaccgagcgtgcgacctggctgcctgggctcgatccacctcctcacctcgacggcacattacctggcgatttcggatttgatcccctgggtctcggggaggaaccggcaaacttgaaatggtatgttcaagccgaacttgtgcactgccggtttgcgatggcaggggttgctggcatccttgcgactgatttgatacgtgtatcaggaatcaacaacctgccagtgtggtttgaagcaggtgcaacaaaattcgacttcgctaacaccacggcactcttctttgtccagcttctcttgatgggatttgctgaaaccaagaggtacatggactttatcaatccaggatcacaagcagagg

SEQ ID NO: 401633 - DNA, 408 bp, Oryza sativa nipponbare
  unsure (1)..(408): unsure at all n locations
ccatgcgtccgcacccacacattctcgaagaaggagaagaaggagaggagcagccatggcgtcgtcggtggcagcggcggcgagcacgttcctggggacgaggctggcggacccggcgccgcagagcgggaggatcgtggcgaggttcgggttcggcggcgggaagaaggcggcggcgaagaaggcggcgaggccgtcggcgccgacgacggacaggccgctgtggttccccggcgcggnggcgccggactacctggacgggtcgctcgtcggcgactacggcttcgacccgttcggcctcgggaagccggcggagtacctgcagttcgagctggacttgcttgaccagaacctggccaagaacaacgcccgcgagattatcngcacccggttcgagacccgcgaggt

SEQ ID NO: 401634 - DNA, 442 bp, Oryza sativa nipponbare
  unsure (1)..(442): unsure at all n locations
ccacgcgtccgcggacgcgtgggcggacgcgtgggcgccacctgaatttgttcatccacgcgtcgtctcttcggaggagaaaagagaattctaggaaggacatgcagctaatggaggggggaatggaatgcttttgttactgttgggttgttcttcatgggggtttttatgtctgattttttttncttgtgtggtgtngnagtttgnnngaggttantantttgttttggngatttgttgggatggatnatgatnatnttnagttgttatttttgttgntnnatggatggttggnggtttattttnntnnaagtgtttaggtgtataatagnngagagttggatggattggataatngttgtngagtgagtgttttatttgttattgaaggtngttgtgtaaatattnangtatttntgnagnnagagaggttttttttttt

SEQ ID NO: 401635 - DNA, 513 bp, Oryza sativa nipponbare
  unsure (1)..(513): unsure at all n locations
ccacgcgtccgccacgcgtccggcagcctggagacgccggtgacctccagcccgctggtcgcctggtacctctccaacctcccggcgtaccgcaccgccgtcagcccgctgctccgcggcatcgaggtcggcctcgcccacggctacctcctcgtcgggcccttcgcgctcaccggcccgctccgcaacacgccggtgcacggccaggccggcgccctcggcgccgcaggcctcgtcgccatcctcagcgtctgcctcaccatgtacggcgtcgcctccttcggcgagggcgagccgtccacggcgccgacgctgacgctcaccggccgcaagaaggaggccgacaagctgcagaccgccgacggctgggccaagttcaccggcggcttcttcttcggcggcatctccggcgtcctttgggcctacttnctnctntacgtgctcgacctcccgtacttttttaagtagatctttttgttgaagttcatgaccgggtgatgcatttgtagatcg

SEQ ID NO: 401636 - DNA, 575 bp, Oryza sativa nipponbare
ccacgcgtccgcatccttggtgccttacaatggtctgccgagagcaaccctccactttcctattggtcaagtgtcagttgaagagaggagaaacgaagcggatgagaaaatgttatccctttatggaattgcaaaatctaatttcttggatggcattcttactgcccagtacagtgaaaacgatattaatctgagatattgttataaggacaatgaactaactttaattcccagcgtgtccctgccttccaatgctgtatccttaggcttcaaaaggcggtttggtccttctgataagttgagctatcgttatgactttaccactgatgactggaatgctgtttataagcgcacagttggtaaagatttcaaagtgaaagctggttatgattctgaggtgcgagttggatgggcttcagtttgggtgggtcaagaagacggcaaggcaaagaccgcaccaatgaagacgaaacttcagctcatgcttcaagttcctcaggacaatttccgcaatcccaccttcctgttccgtgtgaagaaaagatgggatctgtagcaaatgctacattatatac

SEQ ID NO: 401637 - DNA, 469 bp, Oryza sativa nipponbare
ccacgcgtccggatcaaactctctaggaacttggggatatatagaagcaataagggagattgaacatcaaattcagatatcaggtgatgttcagtttgacgacattgttgttgcatgtggcagcggtggaaccattgctggtcttgctttaggatcaaaattgagtagcttaaaggcaaaagtccatgctttctctgtttgtgatgatcctggatatttccattcctatgttcaagacctgattgatggacttcattctgatttgcgttcacatgatttagtcaacattgaaaatgctaagggcttaggttatgccatgaacacagctgaggagcttaagtttgttaaagatatagctacagcaacaggcattgtccttgatccagtctacaggggaaaggcagcatatggaatgctgaaagacatgggtgctaatccagctaagtgggaagggcgaaaaattcttttt

SEQ ID NO: 401638 - DNA, 294 bp, Oryza sativa nipponbare
  unsure (1)..(294): unsure at all n locations
ccacgcgtccgtcaccgtcatctccggcgccgccttagtnacgcccagcctgtaaacatctcgccgccggcgacgctggctggcctcaagttaattttaatcttacccgggaagaagaagggaggagtttgagaagggtggaagaatgtgttaaatgtacgtgtaaattatcgtcgagttgggagatgaatttgaaaacctgttcattctgatcttctgataggaaggaccaagtgtttggatttgtggctgagaaatatttgctacctgagtaaattgtctcgaagtggtttt

SEQ ID NO: 401639 - DNA, 527 bp, Oryza sativa nipponbare
  unsure (1)..(527): unsure at all n locations
ccacgcgtccgcgctgggctgcgtcttcccggagatcctgtccaagacggggtgaagttcggggaggcggtgtggttcaaggccggcgcgcagatcttctccgagggggggctcgactacctggggaaccccaacctggtgcacgcgcagagcatcctcgccatctgggcggtccaggtggtgctcatgggattcgtcgagggctaccgcgtcggcggcggcccgctcggcgagggcctcgacaaggtgtacccaggcggcgccttcgacccgctcggcctcgccgacgaccctgacaccttcgccgagctcaaggtgaaggagctcaagaacggccgcctcgccatgttctccatgttcggcttcttcgtccaggccatcgtcaccggcaagggccccatcgagaacctcttcgaccacgtcgccgaccccgtcgccaacaacgcctgggcatacgccaccaacttcgtccncggcaagtgagcacaccgacacgatcgagatggtgccaaccaacgtaccatgtg

SEQ ID NO: 401640 - DNA, 436 bp, Oryza sativa nipponbare
ccacgcgtccgcccaacctggtgcacgcgcagagcatcctcgccatctgggcggtccaggtggtgctcatgggattcgtcgagggctaccgcgtcggcggcggcccgctcggcgagggcctcgacaaggtgtacccaggcggcgccttcgacccgctcggcctcgccgacgaccctgacaccttcgccgagctcaaggtgaaggagctcaagaacggccgcctcgccatgttctccatgttcggcttcttcgtccaggccatcgtcaccggcaagggccccatcgagaacctcttcgaccacgtcgccgaccccgtcgccaacaacgcctgggcatacgccaccaacttcgtccccggcaagtgagcacaacgacacgatcgagatggtgccaaccaacgtaccatgtgtacactttgtagtagccacgcaccgac

SEQ ID NO: 401641 - DNA, 209 bp, Oryza sativa nipponbare
cacgcgtccgcggacgcgtgggcggacgcgtgggcgaggccgcggcggccacggtggtgtgctgcgcggacgatggcggcgctatccgcgcactgcgattctttgattcacacgcgcagtagcatcaccagatagcaccagtacttcaatgttgacgcattcttcattcacaggatacgctactgctgagcttataactatacaaattt

SEQ ID NO: 401642 - DNA, 362 bp, Oryza sativa nipponbare
  unsure (1)..(362): unsure at all n locations
ccacgcgtccgcccacgcgtccgcccacgcgtccggttaaccacaagcccataagtgaccctaaccggaaactgtgcatgggagatgtggtggagctgacgcctgcgctcccacacaagtcgctaactgagtatcgggaagagatccagcgcatgtatgaacgaggcgggtttgccctcgccaccacccgggacggtccggcaagctgacggtgtcacgactaccatgttaacctnctgttgtacaatgccctcaacctccatttgcttccttgtatatatcccagatactaattcttgcaggagagagccaaatgaacacccncagctgaattgtcaaaggtgtggagttaggtgttcagt

SEQ ID NO: 401643 - DNA, 530 bp, Oryza sativa nipponbare
ccacgcgtccgctacctcaccatctacggcacctcctccagctccgactacgacagcctcggctgcctcaagaagttcaacgacctctccaccaaccacaacaatcagctcaagaccaagatctccgcgctccaatccaagtacaagtccgcccgcatcatgtacgccgacttctactccggcgtctacgacatggtccgcaaccccggcaactacggatttagcacggtgttcgagacgtgctgcgggtcaggcggcggcaagttcaactacaacaacaacgcgaggtgtgggatgtcaggcgcatcagcgtgctccaacccggcgtcgcatcttagctgggacggcatccacctcaccgaggcagcttacaagcagatcactgacggctggctcaacggcccgtactgtagcccggccatcctccacagctaaggcaaaatgactggaaagaacgagccattagttaatttattactttattattaagggctggtgtttattaattaagcgggaattaattaaagggg

SEQ ID NO: 401644 - DNA, 486 bp, Oryza sativa nipponbare
tcacgcgtccgtgcggttccgcgtggcgtcgtcatccgcggcgccgcccgcggcgaagcccgggacgcccaagaagcgcgggaagacggagatccaggagacgctgctgacgccgcggttctacaccacggacttcgacgagatggagcggctgttcaacgccgagatcaacaagcagctcaaccaggaggagttcgacgcgctgctgcaggagttcaagacggactataaccagacccacttcgtccgcaacccggagttcaaggccgccgccgacaagatggaggggcctctcaggcagatcttcgtcgagttcctcgagcgctcctgcaccgcggagttctccgggttcctcctctacaaggagctcggccgcaggctcaagaaaacaaacccagtggtggctgagatcttctcgctcatgtccagggatgaggcccggcacgctgggttcttgaacaaggggctggctgattttaacttggc

SEQ ID NO: 401645 - DNA, 507 bp, Oryza sativa nipponbare
ccacgcgtccgcggacgcgtgggcgccgacaacccagccaacgtgcagctccccgggatgtacaacaaggaggacaacccccgtgtccccatcatcgtcaccggcaacgacttctccacgctgtacgcgccgctcatccgtgacgggcgtatggagaagttctactgggctcccacccgcgacgaccgtgtgggcgtctgcaagggtatcttccgcaccgacaacgtccccgacgaggacatcgtcaagatcgtcgacagcttcccaggccaatccatcgatttcttcggcgctcttcgtgcccgtgtttacgacgacgaggtgcgcaagtgggtgtcggacacgggtgtggagaacattggcaagaggctggtgaactcgagggagggcccaccggagttcgagcagcccaagatgaccatcgaaaagcttatggagtacggatacatgcttgggaaggagcaggagaacgtcaagcgtgtgcagctggctgagcagtacttgagc

SEQ ID NO: 401646 - DNA, 561 bp, Oryza sativa nipponbare
ccacgcgtccgcatcagtgatcctctacaatcatcgactttcagcaaattaagatggctgctgccttctcctccaccgttggagctccggcgtccactccgaccaacttcctggggaagaagctgaagaagcaggtgacatcggcggtgaactaccatggcaagagctccaacatcaacaggttcaaggtgatggccaaggagctggacgagggcaagcagaccgaccaggacaggtggaagggtctcgcctacgacatctccgatgaccagcaggacatcaccagggggaagggtttcgtcgactcccttttccaggctcccacgggtgatggcacccacgaggccgtcctcagctcctacgagtacctcagccagggtctcagaacgtacgacttcgacaacaccatgggaggcttctacatcgcccctgctttcatggacaagctcgtcgtccacatctccaagaacttcatgaccctccccaacatcaaggtcccactcatcctgggtatctggggaggcaagggtcagggaaaatccttccagtgtgagctcgtct

SEQ ID NO: 401647 - DNA, 538 bp, Oryza sativa nipponbare
ccacgcgtccgcaatcctgaagaggacttgaaaacacagtctttagtgaagcaattgctttacaaccccaaattaagatcagcgtgcccgttaccatttgatgaagcaaaactctggcaaggtgaaaatggccctgagctaaagcaggagattcagaagcaatttagaaatatcagtgcaattatggattgtgttggatgtgagaagtgtcgattatggggaaagctccaagttcttggtctcggtactgcattgaagattcttttctctgttgatggagagaaccatttgaatcaatcactccagctgcagcgaaatgaggtcattgcactagtaaaccttctgaataggctgtcagaatctgtcaactttgtacatgaaaaaggaccatcaattgaggatgtcattaaacaacagagctcttctactgtgaaaccggtgtttcctatctgaatcgtgaaatagcgttaaactgagatgtatttacaactttgatccatactagaacaatgatgtaggtgctggggtggagcttact

SEQ ID NO: 401648 - DNA, 437 bp, Oryza sativa nipponbare
  unsure (1)..(437): unsure at all n locations
ccacgcgtccggacccggaagttggtgggtgttgtctcagattatgatctgttagcacttgactcaatatcaggaagtggactgactggcacaaacacaagcatgtttcctgaggntggatagtacttggaagacatttcgcgagatacagagactcttgagcaaaaccaatggcaaagtcatcgctgatgtgatgacttattcgcctcttgcggttcgtgaaagtaccaaccttgatgctgctacaaggttgctacttgaaaccaaatatcgcagattgcctgttgttgatagcactggtaaattggttgggatgatcacaagggggactgttgtcagagctgccctcaaaataaagaagacagctgaagaaactgcttaaattagacagtggagatgattctttataagtcatttctgggactgcaggcacttgg

SEQ ID NO: 401649 - DNA, 488 bp, Oryza sativa nipponbare
ccacgcgtccgcttctgctggagtgacattggtaacatcattagtgtcactatttagccaccgaaaagtcagagctgacactgctatgacgggagagatgactcttaggggccttgtgttgccagttggcggtgttaaggataaggtacttgcagcacatagatatggcatcaagagagtaatattgccagaaagaaacatgaaggacttggctgaggttccagcacccattctctctggcttggagattctgcttgtgaagcgcatcgaggaagtacttgaccatgcttttgaaggtggatgccctctgagaccacactccaagctatagcatcaaccaatctgaagatggcgtttgatctggtatactttcctgctggttatgtacctattttggagattcatccataaaacaaggttcagatttccatgaaagagcaactattccacgaggtagaatctcacgccaaacgcaggcttgcagcgct

SEQ ID NO: 401650 - DNA, 324 bp, Oryza sativa nipponbare
  unsure (1)..(324): unsure at all n locations
ccacgcgtccgcccaccgcacgctcaggaggagggatgtggatgtgcttgcagagtataacgttgctgccgagcctcggcaagggcgtcatgcaccgcggaggatgcgaggctgaccgtgcactccggcgcggcggcgatcatcgtgtcgaaccacggcgcgcggcagctggactacgtcccggcgaccatcagcgccctggaggaggtggtcacggcggcggcggggcgcatcccggtgtacctcgacggcgngcgccgccgcggcaccgacggnnncaaggcgctcgccctcggcgccggcggcggcttcatcgggaggccg

SEQ ID NO: 401651 - DNA, 397 bp, Oryza sativa nipponbare
  unsure (1)..(397): unsure at all n locations
ccagcgtccgggcgatgctggcgttcttggggttgctggggcagcacaacgtgacgcagaaggggcccttcgacaacctgctgcagcacctgtctgacccgtggcacaacaccatcatccagacgctgtcaggctgagcgtgtgatcgatttcatcagggccagggcatctcaaggagcttgatgagttcaggctggtgaaaccgatgattgggcgatggaagatgttctcttcttgtttcttctttttttttttgtggagtatgcatgtataagatgttaatgaattggggggaggagagagagagagatnnatgtnatnagattnanacttactgtgtgtgttgnnggaattgnttnnttgatgnttggatntggatgnatgggtgagggggtga

SEQ ID NO: 401652 - DNA, 388 bp, Oryza sativa nipponbare
  unsure (1)..(388): unsure at all n locations
cccgcgtccgggcggctacggtggcggcggcttctgctncgggggccgtggcggcggcggcggcggctacggtggcagccgtggcggcggctacggcggcgactccggcgggaactggaggaactgattggtggggcccatcgtggccagttatccttagctatccgtgtcagaatcatcttatcatggagtcgagtcgttatcgtgtccagtggctctctcgagtcgagaagccctctatccatccatccagtgttaggtgttcttcgtccgtgatgttaccatgaattgagttcgctttggttatggtgtttgaactgcttgttgctatctatcggaatgaaatgaaatacaacacaaggagaaaaaaaagagtccgaaacaaaaa

SEQ ID NO: 401653 - DNA, 460 bp, Oryza sativa nipponbare
  unsure (1)..(460): unsure at all n locations
ccacgcgtccgcacgcgtccaccgccgcgccaccctcgcnnggaccccaccatggccgccaccacctgccgcctcgccgccgcgccgctcgtcctcgcaccgctgcctcgccgccccaccacggtcgcctttgccgtcgccgccaccggcatcaagtacggtctcagggcgtcgaggggcgtggcgagggggggggccgacngcaccggcagcgagacggaggtgccggaggtcgtcaaggcagcccaggacgcgtgggccaaagttgaggacaagtacgccgtcaccgncatcggcgtcgccgcgctcgtcggcctctggactgccataggcgccatcaaggccatcgacaggcttccacttttgcccggcgtgcttgagcctcgtggaatcgggtatacagggggggttacataccggaaccttatcttccagcccgaaagggaagctcttgggagca

SEQ ID NO: 401654 - DNA, 499 bp, Oryza sativa nipponbare
ccacgcgtccggcaattcttgagctcaatcagcaacaacatctatctccttcttgcttagttaagtccttcgccctcccaagaagaagaagatgtcttgctgcggcggcaactgcggctgcggcagcggctgccagtgcggcggcggctgcggcggatgcaagatgttccctgatgtggaggccacagccaccaccaagaccttcgtcctcgctgctccatccaacaaggcgagctctggaggaatggagatggcggtggagagcggcgagaacggcggctgcggctgcaacacctgcaagtgtggcaccagctgcagcggctgctcctgctgctcctgcaactgaatctatccgtcgtcgtcgcccggctgcatgaggatttatcgtatggatgctgctactgtcgatcagagctttgatcgaggccttaatttgcttgcattagtacccagcttatatgtaggcaggccttgccttttgctctgacgcctaaataaa

SEQ ID NO: 401655 - DNA, 571 bp, Oryza sativa nipponbare
  unsure (1)..(571): unsure at all n locations
ccacgcgtccggtgcactcagcatgtccgtccttcgcgacatcttgaacagcggacaaataaactccagtaagctcatccaaggggaacaccggaatggcatccagagcccaacctaccagtgcttggcagcaagcatcatcaactggcaagccgatgtggagagatgcatagagtgggaagcccacagccgccgcgccaccgggctgacgctcgccttcctcaccgcggcggcgaaggagctcggctgcccactcacttgctgacaaggccacaccatgactgtcactgcaagcagctgctgtaggatcagcgagtaggaaaggatgacttgccggccagtttcctgagatgtgatttaagactgatattagctgatgttcccaagcatgatacggggcttgctcccaagatgtgatttttactttacttttggttaatgtgctaccgctgacattagatgttcaagcatatgaaaactgcttgtgctgtaacttgtatgtctggaacgtaaaaatctttncatatgggaaccggggaagcagaaggatatccttttctgctggggatct

SEQ ID NO: 401656 - DNA, 502 bp, Oryza sativa nipponbare
ccacgcgtccgggccgacacgaggtaagaagcccagaagccctagcgccgccgcagcagcagcagccatgggtatcgacctcgttgccggcgggaggaacaagaagacgaagcgcaccgcgccgaggtcggacgatgtctacctcaagctcctcgtcaagctgtaccgtttcctggtgaggagaaccaagagtaacttcaatgccgtgatcctcaagaggctcttcatgagcaagaccaaccgcccgccgctctccctgcgccgcctcgccaagttcatggaaggcaaggaggagaacacattgctgtgattgttggtacagtcactgatgacaagaggatccaagagattccgaaaatgaaggttactgccctgaggttcacggagacggctagggcaaggattgtcaatgctggcggcgagtgcctcaccttcgaccagcttgctctccgtgctccgcttggggagaacacgggcctcttgaggggtcccaagaatgccc

SEQ ID NO: 401657 - DNA, 539 bp, Oryza sativa nipponbare
ccacgcgtccgcggacgcgtggggtgccgcaagaaggtttggctgctggattcaaaggggttgatcgttaactcacgaaaagaatccctccaggcatttaaaaagccttgggcacatgagcatgaacctgtaacgacactgttagatgctgtccagtccatcaaacctactgtgctgattggaacatccggagttggcaaaacttttactaaagaagttattgaggccatggcttcctttaacgagcgacccgtcattttctctctgtcaaaccccacatcacactctgagtgtactgctgaagaagcatataattggagccagggtcgtgcagtatttgccagcggcagtccgtttgaccctgtggagtacaatggaaagatacatgtgccaggccagtcgaacaatgcctacattttccctggattcggcctcggtgtcgtaatctctggagctgtccgtgttcacgaggatatgcttctagctggctcggaaacactagctgatcaggccactcaggagaactttgagaagggatc

SEQ ID NO: 401658 - DNA, 396 bp, Oryza sativa nipponbare
  unsure (1)..(396): unsure at all n locations
ccacgcgtccgcccacgcgtccgggcgttcgcggagctcaaggtgaaggagatcaagaacggccgcctcgccatgttctccatgttcggcttcttcgtccaggccatcgtcaccggcaagggccccctcgagaacctcgccgaccacctcgccgaccccgtcaacaacaacgcctgggcgtacgccaccaacttcgtccccggcaagtgaagtgggggaccgtagcttagcagtggttaattgtggttggatggatttgtggccagcgagttcgttgtctttgggttggggaagatgggtttagtgcgacgagatgatgatcgagttggtgttgtgtacactaagaagatgaagaagaagatgatgtttttgcaataatgattttattcgttttnc

SEQ ID NO: 401659 - DNA, 454 bp, Oryza sativa nipponbare
gtctcgtctacctagggctttggattcatatggtgcttgaacaacttatgctcacaacaacacactttcggcgcttcacggtagtgccatatccagtagcgcgcacagtccacaacagcacacatgaaaagcggcagctcaagttatcactatcaactttcggcgctgcctgttgacataaagtgaatcacgcccacgcgtgatcgtcttgtcacatctaatgaataatgtatctcattgagttcacatatattgcagtgaaaacgacgctatataattgacaatctgaaggcaacctcttcatatcttctttcccactagcacaccacacacgaaaatggaagcctattaattggtaatacgtaatctagaattgagattatgtacaacattcttcactacaattttacattttggcagcaaaccaaatatgatcaaatgcaattttacctta

SEQ ID NO: 401660 - DNA, 385 bp, Oryza sativa nipponbare
  unsure (1)..(385): unsure at all n locations
tttttatgacaccaaaatgtgagatggatatgattaagcaggtgcagcaaaacgtacattaattaaacaacaacaattaaccctcgggcacgcctgtgttttgttatctcgctcaacatatacgtacgtaatactttgcttgcatagcatagggacgacgacattatattcttaattgataaactcaagaacgcatggagatggatcgagagatttataaatatggagcttgcttgattgattagatgaggtcgtcctccttgtgggtctcgatgacgacgtcggacttggggtaggcgtggcangtgaggacccagccggcggcaacctggtcgtcgtcgaggaagctctggtcggactggtcgatctcgccggagaccacctt

SEQ ID NO: 401661 - DNA, 431 bp, Oryza sativa nipponbare
taaatatatatagccggagcttgcatgtgtttcattcacatatgcctcacccaacaacatatagtcgtagcagataccactcttacatcaagtcagagagagatcaggtgaaacaaaaacaaaagcagagcacggccggtaaaatcaaaagacgatgaacaaactgggaacacacgaaacaaggtgggagacatcatcgaatcagagatgaacaattaaacaaggctatatatgacgatgacggcttagttgccaccagactcctcgcagcccgggggcttgtaggcgatgaagctgatgagctgcacctgcctgacgttgtcgaagccgatgatacggacgaatgcatcagggtacgccttcttggcctcctcgagctccttgagcacctgggtggcgtcagtgcacccgaacatgggcagcttccacat

SEQ ID NO: 401662 - DNA, 410 bp, Oryza sativa nipponbare
agccggagcttcgggatatgtcattcacatatgcctcacccaacaacatatagtcgtagcagataccactcttacatcaagtcagagagagatcaggtgaaacaaaaacaaaagcagagcacggccggtaaaatcaaaagacgatgaacaaactgggaacacacgaaacaaggtgggagacatcatcgaatcagagatgaacaattaaacaaggctatatatgacgatgacggcttagttgccaccagactcctcgcagcccgggggcttgtaggcgatgaagctgatgagctgcacctgcctgacgttgtcgaagccgatgatacggacgaatgcatcagggtacgccttcttggcctcctcgagctccttgagcacctgggtggcgtcagtgcacccgaacatgggca

SEQ ID NO: 401663 - DNA, 392 bp, Oryza sativa nipponbare
  unsure (1)..(392): unsure at all n locations
aattcactgttaaacancanacgaaatgacttttaattcatttcaaaattcanaaccaaaacaaaacactctctaaacaagaccaagcaaaaatcaaaatcaaatactcgacattgcgagagcatagaagcaatcgcagcttattgttacactacattataaaacaaaaatatcaattcgtcataaagcctcagtacttgtagtccttgacgtggaggttctcggagactccctctccggcggcggcgtcgccggcgtacgcgccgagcgtcgcctgggagttggccctgcagcgggcgagcagcgccgcctgcgccttgccgacgttctccgccttgccggcccacgccttgagcgtgctctgctgcaacgcgcggcccaaggagaaagtc

SEQ ID NO: 401664 - DNA, 451 bp, Oryza sativa nipponbare
acgtgataccatccatttttttgggtggcgacgaatttatcagatatgctctagatacatatcttgtgtgtatatagccggagctttgttttcacatatcctcacccaacgataattgtagtactcttacaataaaaccggccggagagggagggaagagattattacatatgtgttaagagcagaggccattgagatggtacataaccaaactgtaaaataaaaatatatagcatattatatattgatatatcatcaacatagcccaaaacaaagctgcatactattattataggcagcaatccaccagcgcgatgcttgatcttagcttagttgccaccagactcctcgcaacctgggggcttgtaggcgatgaagctaatcaactgcacctgcctgacgttgtcgaagccgatgatacggacaaaggcatcggggtaggccttttttg

SEQ ID NO: 401665 - DNA, 433 bp, Oryza sativa nipponbare
  unsure (1)..(433): unsure at all n locations
ctcnnccttttttttttttttttttttattacaccataggggtggggggggactgaaactccatttcacttttctcttttaaggaaatgtattatccagtttccgtagagtacacagtttcttggcttgaaaagaaaattatacataccgatttctttaattgcgagccaggtaaacttcaaaaaaaaatgcccattgggcaatccaatatgcccccgccctgataccatgatagtaacaaagggaaccctccaaatcccaaaggtcgtttccatatccttaaaaatgcagaaaaacattatatatatgctctagatatatatatatagccagcatccacccaagagaaaattactagattggcaaataacaaatgttgaaaaggagaggttcaggtaaggcttcatctactctatttataagggggtggagg

SEQ ID NO: 401666 - DNA, 408 bp, Oryza sativa nipponbare
  unsure (1)..(408): unsure at all n locations
ataattaattcacagcggccgtggttcattaatcaagttcanaacctncacacaaatacacactaccggtacagatctcaccttctctccaatactcntacatccatccacgcgggccacacgaatacgtacatctatactgtacacgtacgtacatctactgcaccgggtacacacacgcacactcttctgcagagacccgcatcgtcgtcaacctagctagcttatctgaaggcgattcgtcgccatggcaacactgcggcggcggcgctcactttcccgggaccaatttggtggcgtaagcccacgcctttttgttgaccgggtctgcgaagtggtcctccaggttctccagggggcccttgccggtgaccatggcctggaccaagaagcccaacatggagaaca

SEQ ID NO: 401667 - DNA, 438 bp, Oryza sativa nipponbare
tgatctgctataaaagagtatgcatcggagagattcataaccgtcaaaaagggttacttatgcagtgaaaagggtgttatgctctttcatacagtgtgacagtgtgtgtacatataatctggaaaaacaaagcgaagatggatttacagcagcgttgttgagatacagcggacttatagctacaagctgatcacacaagtgaactttgctgctgatgatgatatggatcatgctgctatagctgacgcccaccacggattgtcggcagtcctgaagtcgctctccacccacgggacgaagagaaccttgccgtcctctacttcggagtgcaccaatgccaaggactgtgtcagacacaacaatgcagctcagctgagttcagttaagtaagcaacaattcagagtcaacattaggtcagtaagcagttggaggatctt

SEQ ID NO: 401668 - DNA, 434 bp, Oryza sativa nipponbare
  unsure (1)..(434): unsure at all n locations
ggggttgggttttgcataaaggacattttcnacttgatatattgcaaatgtcgtgaagcaaaaacagtaccatcatcttccaaggatatgaagtgccactctcgctgacaaaatggcaagtgcattctttcttgccccttcattccagaatcggtcgttatttatacacaatgaaggtagagagaattataatacgctcctagcttgtgtagttagctatgagggactcgattgctgaatccttagcacgtacgtctttataatggattcgatagccatgaccaggtaaaaaccactcgaagtctaacttcaacaattttctcatgctgtccagctgcaagcccactgattgcttgctgtacataagaaagagatctaaatcatcagattcttctgattttgcaacatgatctccagtgaaaagcgcctttact

SEQ ID NO: 401669 - DNA, 451 bp, Oryza sativa nipponbare
actcaacacaaccaaggctatgcatatattgtacttcggtctcatcctttgagtcagacgacagcaaaatacatcacgaggttttcacggttatatagatcgctgttcaaaatagtacttaatagagcaggacacactgacgtcactgagcaagttgacaatacgtctggttggtgctgatggactggctagttatcactttgcatgctcctgatcatgttcaggatataaaggaacaagttgaggatgtcaaggtagagctcaacagaggcccaaatgtagtcgtcataagtgtggcgctttatcaagttctctgtgtcgtagatgatgaaacctgagaaaactaaagctccaaggccaccaaacaatgcaactggtccagagcccaatgggaagaacacctgaataaagcttatcacaacaagtaaaacaggagcagaaaacagaattg

SEQ ID NO: 401670 - DNA, 313 bp, Oryza sativa nipponbare
  unsure (1)..(313): unsure at all n locations
agcactggaagaactcgcattggggaagcgacccaaagggcaacaatagactcanagcatccaagtttttaaccgaatagaaataaacgagttttaacgacaacatagtgcacattggagcagatataacggtcatgcaacagtgcatggccggggcaaactaacgaacgctaaaatctaaatgcgccagcaaaccanacttaacgatgctatttttttggcggcaacttggtaccttggcaccgtgggtccttcttcccacgttcttgagacggcacagccaccgtttgcctatgtcacgcacggaaaacga

SEQ ID NO: 401671 - DNA, 429 bp, Oryza sativa nipponbare
tttttaaatatatatagccggagcttccatatatttcattcacatatgcctcacccaacaacatatagtcgtagcagataccactcttacatcaagtcagagagagatcaggtgaaacaaaaacaaaagcagagcacggccggtaaaatcaaaagacgatgaacaaactgggaacacacgaaacaaggtgggagacatcatcgaatcagagatgaacaattaaacaaggctatatatgacgatgacggcttagttgccaccagactcctcgcagcccgggggcttgtaggcgatgaagctgatgagctgcacctgcctgacgttgtcgaagccgatgatacggacgaatgcatcagggtacgccttcttggcctcctcgagctccttgagcacctgggtggcgtcagtgcacccgaacatgggcaccca

SEQ ID NO: 401672 - DNA, 410 bp, Oryza sativa nipponbare
ttaaatatatatagccggagctggcatatatttcattcacatatgcctcacccaacaacatatagtcgtagcagataccactcttacatcaagtcagagagagatcaggtgaaacaaaaacaaaagcagagcacggccggtaaaatcaaaagacgatgaacaaactgggaacacacgaaacaaggtgggagacatcatcgaatcagagatgaacaattaaacaaggctatatatgacgatgacggcttagttgccaccagactcctcgcagcccgggggcttgtaggcgatgaagctgatgagctgcacctgcctgacgttgtcgaagccgatgatacggacgaatgcatcagggtacgccttcttggcctcctcgagctccttgagcacctgggtggcgtcagtgcacc

SEQ ID NO: 401673 - DNA, 260 bp, Oryza sativa nipponbare
gatcaaaagaactgagcttggaaaaaacattaaacttgtttttatacatctgagacatcacaacaccggctcacacttaacatggcatgcctagatccatccacaattacctaccaatacaccactacctttcacagactacttccatccacaaaaaaacagtgatgagctgccgaccaacactttatttatcttgctccattggcaggcattgctcacactccaacacctgaacaacttctcatttgggggtgaaggcc

SEQ ID NO: 401674 - DNA, 391 bp, Oryza sativa nipponbare
  unsure (1)..(391): unsure at all n locations
tgcagcatcnaattgggtccttggcaacttatatagccataggaataatacaattatatcaacatcataaacagggggaattaatccatggcgatccggccatgggggactagcagtacagtacagaggatttgcatggatggatcggatcaagaagaaggtgaggcagagacgaagaatntaatttagatcttgccgcgtgggccgggcgtcngcggcagctgcgggcccttcttgatcggaagcaggtctggcgacgccgacgcgctgacttaggccaccagcgatccgccgccgagcagcaggaacttgagcaggagccctctcttggtgaagggccccgcgaacgtctcgaagaacttgctctggagagggttgtacggcgactgcg

SEQ ID NO: 401675 - DNA, 401 bp, Oryza sativa nipponbare
gcttatcactataatgggattgacaacaccatatttcattgatcatgctcagaacctgcacacaaatacacactaccggtgcagatctcaccctctctacaatactcgtacatccatccacactgtccacacgaatacttacatctatacggtacacgtacgtacatctactgcaccgtgtacacacacccacactctactgcagagactcgcatcgtcgtcaacctaactagcttacctgaaggcgatgcgtcgccatggcagcacagaggccgacttcttgatcgtgccagcgatggcgttcagccagcccagcgccttcagcaccaggtgcgcctccttctcgccggagatcatcatggctcccaacgtaaggcccattcttggggcgccgacgatct

SEQ ID NO: 401676 - DNA, 379 bp, Oryza sativa nipponbare
cttaaatatttcactcttggaacaggttcatcttcttattcacatcatttacatcattgcacaaaacctcactcaacataacatacagggctccatccacaattacattccaatataccaccacctttcacacactactccgattccaaaaaaaagaggtaactcccttcgacaaacagtcttttcattttcctccattggcaaccatttctaacactccaacacctgaaaaactcctcattcgtgggtcaaagcctggaaaatcctgccttcgcctgtcttccctagatccccctacaccttatccatggggcccgtccctgtgtactcttcctcgaaccaacctcccatgactgcgagcatccccagcctccccttc

SEQ ID NO: 401677 - DNA, 439 bp, Oryza sativa nipponbare
aatctccaaattcaagggtcaggggtagtatatcatcatcatgcaagtacagtgttacatagattaatcacaatgcagtttgattaagcagtgggcatcatcacatcgcattcagaggaaggctatcttagattacagatgaatatgcagacacccagcttggtgttacatacatagactggatttgggtgaaatttagccggcgagggcgctggtgttgtagacgaggagggcgccgccgccgaggagcccggcgagggtcacggcccagatcagaagcccggtggttccaccaacgtaggtgtcaccggtgggagaccattcctccggcgagtagattgggctgtagccgtcgacgtttgcgccgtacttgtcaacgaattggtacacacccttccccgtgctcttcctgccagatgcatcaatatcgactgacatg

SEQ ID NO: 401678 - DNA, 463 bp, Oryza sativa nipponbare
tttttaggataccaacggactgggtcagtttcactagatagaaagcataccacatgacacagcactgcattcttaattacgtacacaccacaagactggagaggaaggactacatcatcgtacacacgccatagatgtctcaaaacatctttattcttagcacttatttaactaggatgcatttcttcagtctcaggtcttagatcacaaactcagaggaaacacaaagttacagtgacaacaactcatcacttgtaactggatcaaactactagcttagcagtactaggcccttccatctccttggtttcgtcaggaggttgcttgcttcacttgccgcagttgcaggggttgcaggtgcagttgtcgccgcacttgcacccgttctctgctcctgctccggcggcggcgccggcctccaacccctcggcatgacccttggaaggtgcaacacccatgatga

SEQ ID NO: 401679 - DNA, 281 bp, Oryza sativa nipponbare
aactaagaccagtttgatttcgggttggatacaaaaattaagatggaccgatccacaagagagcaccctctacttaagctctacattacaaggccaaccagcagctgactgccggccgaccactgcttgcgcacgcgcgcgcaataatcaaccaatcacacacagttcgcacgcacataaaaaccacccatagccttcacgtacgcccggactcacgcaccggttcgtgccaagctcaagggtggatggttctcgggatgatgatgtctccggacgcgtgg

SEQ ID NO: 401680 - DNA, 434 bp, Oryza sativa nipponbare
  unsure (1)..(434): unsure at all n locations
ttttaaatatatatnagccgaggttcgagatatttcattcacatatgcctcacccaacaacatatagtcgtagcagataccactcttacatcaagtcagagagagatcaggtgaaacaaaaacaaaagcagagcacggccggtaaaatcaaaagacgatgaacaaactgggaacacacgaaacaaggtgggagacatcatcgaatcagagatgaacaattaaacaaggctatatatgacgatgacggcttagttgccaccagactcctcgcagcccgggggcttgtaggcgatgaagctgatgagctgcacctgcctgacgttgtcgaagccgatgatacggacgaatgcatcagggtacgccttcttggcctcctcgagctccttgagcacctgggtggcgtcagtgcacccgaacatgggcagcttccacat

SEQ ID NO: 401681 - DNA, 419 bp, Oryza sativa nipponbare
  unsure (1)..(419): unsure at all n locations
actaggcaaaccacacnaatacgcggtggattaatttcactgagaatagcacgggtacatcacatcacacaaattcatacgttgatacacgcatagtcgccgaagcgaccagctgcttaattaatcgataacacacgggtttaattcagcaataatcagcacacacacaaaccacactcatatgggtggtttttattgtggactaattaaggtaggtgactcgccggcggcgagtgttcggttgcttcgtgacttcacttgccgcacttgcagtcggtgcaggagcagctggtgccgcacttgcagccgccgttctcctcgccggcggcgacctcctcgaagtggctcttctcggcttcaactatgacgacgccatagctggtacctttcttcacgcactggctcttgtcagcacagtc

SEQ ID NO: 401682 - DNA, 427 bp, Oryza sativa nipponbare
gggaaacgaataaaatgattggggcaaaaacatcatcttcttcttcatcttcttagtgtacacaacaccaactcgatcatcatctcgtcgcactaaacccatcttccccaacccaaagacaacgaactcgctggccacaaatccatccaaccacaattaaccactgctaagctacggtcccccacttcacttgccggggacgaagttggtggcgtacgcccaggcgttgttgttgacggggtcggcgaggtggtcggcgaggttctcgagggggcccttgccggtgacgatggcctggacgaagaagccgaacatggagaacatggcgaggcggccgttcttgatctccttcaccttgagctccgcgaacgcctcggggtcatcggcgaggccgagcgggtcgaaggcgccgccggggtagagcggg

SEQ ID NO: 401683 - DNA, 467 bp, Oryza sativa nipponbare
aatgatgctagccgcggaatgtgcgcggaccaccatgctagttattattattataccacatcattacaattccagcatttaacgactgaatggcacaaccagctcaggtagacgaaagcggttagagactacccagagttcagcaaaatccatacaccacgattcacgccacagtaatcaggtttcaagggcgccaaagttcagggcaagagaaagaggacgatgtgcacgatgccgcctaatccttgtacttcatgtcggataccctgaagccaggcatctcgaatgaagtggcaaacttctccacctccgccctgaggtcctcaatgtccttgttgttctccaggccctcgttgaagtacttgagaagcttgccacgctccttctgaacatccaagcagatggtcactgcctggtgaaggaactcggcgatctgtacaaagtcctcctctaccaaaccccttgat

SEQ ID NO: 401684 - DNA, 441 bp, Oryza sativa nipponbare
gcgtagtgagttacttatgttggccacgaacattgtgaatgtgttgattgatagattaattaagatgaagaaaggaacaaaaagtttgacggtccaggatattttcaagaagaggagagggtgtggatgatatttttgttgaacgggtctgaaagatgtgtcaaaagattgtcgattggtccaacatgagtcacagatgcttgcacaataaacccaagcatagcaaccatagccaacctcccattcttgatttctttcagtttcgcttcatctgcattctctatatccttggccagtcctagtggattaaacagtggacccccagggtagcctggctgtgaacctgcaagtgcagcctcgataccaaggaatgttccttcctctgcttgtgatcctggattgataaagtccatgtacctcttggtttcagcaaatcccatc

SEQ ID NO: 401685 - DNA, 419 bp, Oryza sativa nipponbare
gttataactttattaatatcaagacatgtcaggtaaagtctatgcattgtgcatatgtgcattcacagtcacactcacttagtcaaataccaagatcgatcgatcgatgtacaagtggatgcattaattcatcatcttgggtgttcttatattacaaatcaccaccatgcaagtcgccattaaccaccaacccagctttcctaatttaagtagtaatcaacaaaaggatgacctctcctctctccataccctcccagctcgctcgtcatcacaaaactaaacagcgcgcgcgaacgcacaccaacgcatcgatcccgtttgaattgcgcgcgaaagagcttaaattaagaggatgaggagaaggtgtcgaagatggtggtgtggagcgggtcgctgaggtgggtggcccagttgttgag

SEQ ID NO: 401686 - DNA, 461 bp, Oryza sativa nipponbare
gtattaaaaactcggaatattagtgcgggcaccatgtttctatctgcataaaatctagtatatcaataagtaaaatctttctagttcgaatacgaaacctgtagactacctctgtgtacaaaagagaaagatatataacttatcaaactgacttgcttctccttgaccaatccgagcaagtgagcagcatgggtagattttcttcaacttaatttgtgcaccatgctgtgggtggagagttatcacagtgaatggtgcgtggatgtaccatggtgaaagctcaaaggagaaccgctgaaggattgtacagatagccatcttggcttccaatagtgcaaaggtctggccgatgcacattcggggaccccatccaaatggaaagaaagaggtctgatacttcgctgcgttggatatgccatcaacaaacctccctggattgaattcacctgcatcttttcccc

SEQ ID NO: 401687 - DNA, 451 bp, Oryza sativa nipponbare
  unsure (1)..(451): unsure at all n locations
ttaaaaatgtatatgcatcatagttgggtggcanaaacagcccgtgggtgaggatcagtttgacggacatcgtatttgtcgcacataagcggatcatcactctcgtaaaaaggaaaaaaagaagacctctctaactgcaaaaatacctgaatatctacacaacgacctgcaataacaaataaagcactcactcgacagcgatgatccagtccatccagctctcggctattatacacctaaacacttggagggggataaaccggcaaccatccatggagcagcaggagtaacaactgaagatgatcatgatccatcccaacaagtcgccggagcaaagtagtagcctctttcgagcttcgacaccacacgaggaaaaaaaatcagacataaaaacccccatgaagaacaacccaacagtaacaaaagcattccattcccccctccattagct

SEQ ID NO: 401688 - DNA, 440 bp, Oryza sativa nipponbare
agcaaatcgatccatgcgaccgggcgtgcaaatcagttggagcacaaatttacatgttacacccacaccctacacccatgcataataatacatcgtatatacgtacgtacatacatacccctctcgatcacacgcaccatcgatcgtacaaagttgcgtacatacatacgtacacacatatacgcatacgcacgtacatacatacataattaaaaactcgtaattaattaaatacgtagttgatggcatctctaatggaacttgaggctggtgaggatgttgttgtggacgggatcagcgaggtgatcaagcaggttctgcacggggccaaccccggtgaagagcgcctggacggagaagccgaggaaggcgagcatggcgagcctgccattcttgatctccttgagcttgagctccttcatctccgcctcgctcttggt

SEQ ID NO: 401689 - DNA, 438 bp, Oryza sativa nipponbare
ttaactaagaccaattggattgcgtgtttgatacaaaaattaagatggaccgattcacaagagagcaccctctacttaagctttacattacaaggccaaccagcagctggctgccggccgaccactgcgtgcgcacgcgcgcgcaataatcaaccaatcacacacagtacgcacgcacataaaaaccacccatagccttcacgtacgcccggacgcacgcaccggttcgtgccaagctcaagggtagatggttctcgggatgatgatgtcgccgatgttgttgtgccacgggtccgagaggtggctggccaggttctccagtgggccggtgcccgggtacgccgactgttggacgcagaaacccacaaaagccagcatggccaatcgcccgttcttgatctccttgagcttgtactcctcgaacttgacggggtcctt

SEQ ID NO: 401690 - DNA, 371 bp, Oryza sativa nipponbare
  unsure (1)..(371): unsure at all n locations
tttgttttttttttggggtnggggacaacagcacaccatccatatatccatgcaggcagcctgtttgtgcccttgtgcagatgcatttcatttatacaagtagaaggcgctcaaatcagccaccacatgaacacacacatgttccatcatcgatcgatctacacatgcatcacccggtcatgcacttacaaacaaaagatctacttgaagaagtacgggaggtcgagcacgtataggaggaagtaggcccaaaggacccccgagatgccgcccaaaaagaagccgccggtgaacttgggccagccgtcggcggtctgcaacttgtcggccttcttcttgcggccggtgagcgtcagcgtccgcgccgtgga

SEQ ID NO: 401691 - DNA, 469 bp, Oryza sativa nipponbare
aaaggggtgaacaatcttacatggaaatgaaattgcttatgtgcggaacgaacgatggccgttatgtacagcaggcagaattacatgatgagaattggaaaggcttcatggattttttttttcaagccatcctacgcagcttacaacaaaatgttggccaaatcccgagtacccaatactggtatccccatacaaatggagtatataatgtagcatatgctacagatcccatcttttcttcacacggaacaggaaggtgggattgcggaaattgtcctgaggaacttgaagcatgagctgaagtttcgtcttcattggtgcggtctttgccttgccgtcttcttgacccacccaaactgaagcccatccaactcgcacctcagaatcataaccagctttcactttgaaatctttaccaactgtgcgcttataaacagcattccagtcatcagtggtaaagtcataacga

SEQ ID NO: 401692 - DNA, 458 bp, Oryza sativa nipponbare
ttttacatcaaatgtgtgtagggctttatttccaaatggcagaaatatatgctttattctttaaatataacaaacagtgttttacattaaccatctgctttgaattttgtcgtacaaattgaggcgaatactctttttagacaatgagatgtctgaaacctctaacaacaatggaagcaattttggagcatagcaatcagaacatcttaccagttccatctttgcgtggaacagattcttcaagatccattctgcgccaactcccactcaaagatgataactcatcaaccttatcatacaaaccaagaagaccacctgtatgtacaaaaagaatttttcgcccttcccacttagctggattagcacccatgtctttcagcattccatatgctgcctttccactgtagactggatcaaggacaatgcctgttgctgtagctatatctttaacaaactta

SEQ ID NO: 401693 - DNA, 294 bp, Oryza sativa nipponbare
  unsure (1)..(294): unsure at all n locations
aaaaccacttcnagacaatttgctcaggtagcaaatatttctcagccacaaatccaaacacttggtccttcctatcagaagatcagaatgaacaggttttcaaattcatctcccaactcgacgataatttacacgtacatttaacacattcttccacccttctcaaactcctcccttcttcttcccgggtaagattaaaattaacttgaggccagccagcgtcgccggcggcgagatgtttacaggctgggcgtcctctcggcggcgccggaaatgacggtgacggacgcgtgg

SEQ ID NO: 401694 - DNA, 417 bp, Oryza sativa nipponbare
  unsure (1)..(417): unsure at all n locations
taattcgatcatcccttggatggggcctgcggcttacattaaatctcnatccaaagaagcaaagatgatgacagacagaaattaattaagctagaaatctcctcgatcgatcacacacacacacacaattaagggacatacatacatgcactgctgcaactgcaactgcagggtcggtgcgtggctactacaagtgtacacatggtacgttggttggcaccatctcgatcgtgtcgttgtgctcacttgccggggacgaagttggtggcgtatgcccaggcgttgttggcgacggggtcggcgacgtggtcgaagaggttctcgatggggcccttgccggtgacgatggcctggacgaagaagccgaacatggagaacatggcgaggcgggcgttcttgagctccttcaccttgagc

SEQ ID NO: 401695 - DNA, 370 bp, Oryza sativa nipponbare
tgatgacagacagaaattaatgaagcgagaaatctcctcgatcgatcacacacacacacacaattaaggtacatacatacatgcactgctgcaactgcaactgcagggtcggagcgtggctactacaagtgtacacatggtacgttggttggcaccatctcgatcgtgtctgttgtgctcacttgccgtagacgaagttggtggcgtatgcccaggcgttgttcgcgacatgagtcggcgacatggtctaagaggatctctatggggcccttgccggagacgatggcctggacgaagaagccgaacatggaaaacatggcctggctgtcgttcttgagctccttaaccttgagctcggcgaatgtgtcat

SEQ ID NO: 401696 - DNA, 450 bp, Oryza sativa nipponbare
aactgagtataataccggggaggattcatttgattctggaagagaaacaattatcaaattacaacagtaaccaacatttattctacagatgccatcgctttctttgcttttttggcaacgcaagtaaaccatttcaccgtcacaccacccaccatatatgccacccaaataaaaatcaagaacccaaacaattcccctttaattaattcccgcttaattaataaacaccagccttaataataaagtaataaattaactaatggctcgttctttccagtcattttgccttagctgtggaggatggccgggctacagtacgggccgttgagccagccgtcagtgatctgcttgtaagctgcctcggtgaggtggatgccgtcccagctaagatgcgacgccgggttggagcacgctgatgcgcctgacatcccacacctcgcgttgttgttg

SEQ ID NO: 401697 - DNA, 434 bp, Oryza sativa nipponbare
gccacttagggggagatcataacaaaacctttgccaaatggtacattgttgaagtctcaatactttacaaaggaacacacgaggtgcagattctgctaaccacccatcatctcaccgttcgaagcccctcaggcagaaaatatcagcattcctttttgaaggaaaaaaaagctggagatggtcttcctacagaatcagtagacaagctggggctcgaattcagcgaaatcaacagagccagactcgattgggggcatgaggtacgcagcaatgatctcagacaccagagcggcaacgtgaggaatcctcttcaggttcttcaccagggggatatcgtcagactcgcctatggcaatgatctttttgttgatctccaccatcctgtctaacttcctcttgaattcagggttctcgacgtcaagaacagcggggaa

SEQ ID NO: 401698 - DNA, 441 bp, Oryza sativa nipponbare
gatacccaaatgaaatatactgatgtatagtatagcccatatctttatattatattattattaacaaaaacttgtcatgcccagctatggcttgggcgcgatctgatacacagaacaaagagaaaacataaaaaggagaaataattaatagcaagcgtcaagccggcctgcttaaaaggtgtaaaggcagctgccgtcgtcgctcctcgccgttgggtcgaagttcttggcaacagggtcggtgcaaccttccggcacaggcaggttacctgcttgctgtgctccttgccctcctcctcctatgcaggccgcctacgatgcatcgatgggatgcgaatagctagagatcttttattcagctggatggcgcagaaccgtagaaggaaccagtcttcatggcgtcggagttagcgtcaccaagagcagcctcgctcaagtact

SEQ ID NO: 401699 - DNA, 399 bp, Oryza sativa nipponbare
atagtatagcccatatctttagagtatgttattattaacaaaaacttgtcatgcccagctatggcttgggcgcgatctgatacacagaacaaagagaaaacataaaaaggagaaataattaatagcaagcgtcaagccggcctgcttaaaaggtgtaaaggcagctgccgtcgtcgctcctcgccgttgggtcgaagttcttggcaacagggtcggtgcaaccttccggcacaggcaggttacctgcttgctgtgctccttgccctcctcctcctatgcaggccgcctacgatgcatcgatgggatgcgaatagctagagatcttttattcagctggatggcgcagaaccgtagaaggaaccagtcttcatggcgtcggagttagcgtcaccaagagca

SEQ ID NO: 401700 - DNA, 455 bp, Oryza sativa nipponbare
tgcagaactcacatctgttttggataaggggtatacagattccgaatgttgctcaaccgagatggattggcagcagcgctgcaagcctgcgtttggcgtgagattctacctcgtggaatagttgctctttcatggaaatctgaaccttgttttatggatgaatctccaaaataggtacataaccagcaggaaagtataccagatcaaacgccatcttcagattggttgatgctatagcttggagtgtggtctcagagggcatccaccttcaaaagcatggtcaagtacttcctcgatgcgcttcacaagcagaatctccaagccagagagaatgggtgctggaacctcagccaagtccttcatgtttctttctggcaatattactctcttgatgccatatctatgtgctgcaagtaccttatccttaacaccgccaactggcaacacaaggcccc

SEQ ID NO: 401701 - DNA, 349 bp, Oryza sativa nipponbare
ttatatgttgaactccggcagggaaaaaataaaggagtatataaaccgattccatcaatatcttaaggcgcgatatacagatgccaaataggtgtacagtactcgaaatgacaaagatcataccacactaattaatcggtgggattaatagcatgaacgacccagctactaggggtgcaccgagtacgtgtgttgcttgcgcgcatgtggatcgactagattcttttgcaaaaattacctaattaattaatcggcgtgctctctggcgtcgtcgatattgtttattgattggctagagttcgtcggccgcggccgcggccaggtacttacaacctggggaaggggcggg

SEQ ID NO: 401702 - DNA, 243 bp, Oryza sativa nipponbare
  unsure (1)..(243): unsure at all n locations
ttnnnnnnaaactaaagcacttggtcttacattaaaatagttatccccctttaatacttttcatcaaaaaatcaacacttaaattaaccccttaaccattcattcaaatgcattccttccggaaacaatttccacaacacacacagtaagtcttaatctcataacattcatctgtctctctcttctccccccaattcattaacatcttatacattcatactccacaaaaaaaaaaagaagaaa

SEQ ID NO: 401703 - DNA, 372 bp, Oryza sativa nipponbare
  unsure (1)..(372): unsure at all n locations
ttgggatgaaagcanaggtaggggatagtaanaagcctggcacgcatgangagatggagcangagtacatgatgagatcaccatgatgatagatgatccatccaagctagctagggatccatccaacattgatcgacacacgcacacactgacaacgacgacgacggttttatttaggcgtcagagcaaaaggcaaggcctgcctacatataagctgggtactaatgcaagcaaattaaggcctcgatcaaagctctgatcgacagtagcagcatccatacgataaatcctcatgcagccgggcgacgacgacgatagattcagttgcaggagcagcaggagcagccgctgcagctggtgccacacttgcag

SEQ ID NO: 401704 - DNA, 363 bp, Oryza sativa nipponbare
agatacaacagcagaaaaggatatacctctgcttccccggttaccatatggaaagatttttacgttacagacatacaagttacagcacaagcagttttcatatgcttgaacatctaatgtcagcggtagcacattaaccaaaagtaaagtaaaaatcacatcttgggagcaagccccgtatcatgcttgggaacatcagctaatatcagtcttaaatcacatctcaggaaactggccggcaagtcatcctttcctactcgctgatcctacagcagctgcttgcagtgacagtcatggtgtggccttgtcagcaagtgagtgggcagccgagctccttctccgccgcggtgaggaaggcgagcg

SEQ ID NO: 401705 - DNA, 421 bp, Oryza sativa nipponbare
  unsure (1)..(421): unsure at all n locations
ccaagctctaataggggggaaacaaaaaacattgtcttcttgcccacaaacgcatgtaggtaggtagaaaggatccttcaaaatatctttcagaaatgacacaattaagttttgctagtctcagtagagaagggactactaattactgtcgattgctcaaacagaacggtcgcacaatgccgatcgcaacacttgcaaacaggagctgacttagaccttgaatccacggctgttcctcctgccacgggccttctcgaacttccttcccttggagcgcacatatggcttcgtgtggctgtgcggcacaccaggagccttaccaaagtgcctgacggcctcacgggcattcttgggacccctcaagaggaccgtgttctccccaagcggagcacggagagcaagctggtcnaaagtgaggcac

SEQ ID NO: 401706 - DNA, 399 bp, Oryza sativa nipponbare
tttgggaaacgaataaaatcatgattgcaaaaacatcatcttcttcttcatcttcttagtgtacacaacaccaactcgatcatcatctcgtcgcactaaacccatcttccccaacccaaagacaacgaactcgctggccacaaatccatccaaccacaattaaccactgctaagctacggtcccccacttcacttgccggggacgaagttggtggcgtacgcccaggcgttgttgttgacggggtcggcgaggtggtcggcgaggttctcgagggggcccttgccggtgacgatggcctggacgaagaagccgaacatggagaacatggcgaggcggccgttcttgatctccttcaccttgagctccgcgaacgcccggacgcgtgggcggacgcgtgg

SEQ ID NO: 401707 - DNA, 490 bp, Oryza sativa nipponbare
  unsure (1)..(490): unsure at all n locations
ccacgcgtccgcccacgcgtccgcccacgcgtccgtgcaaatgctgaataccattatcagaaatgagagagatgggattctggttcctgttccacaatacccgctttattctgctgccatttccctctttggtggttctctcgtgccatactacttagaagaagaggctaactggggacttgacttcgtcaatctccgacagactgtggcgtcagcgcggtcaaagggaatcactgttcgagcaatggtgattatcaacccaggaaaccctactggccaatgccttagtgaaggaaacataaaggaacttctcaaattctgcttccatgagaacttagttctgcttgcagatgaagtctatcaacagaacatttatcaagatgagcgcccatttataagtgctagaanggttctgtttgacatgggtcctcctatgagcagggaagttcagctggtttctttccatactgtgtcaaaaggatattggggg

SEQ ID NO: 401708 - DNA, 369 bp, Oryza sativa nipponbare
  unsure (1)..(369): unsure at all n locations
gccagcgtccgcccacgcgtccggccagatgatcangganccagcatggcgctggacgggaacggcaaggcgggatcgagcccgtacgcgatcgccaagtacatgggggagcagcacatgggggttctcccggcgaactaccggaaggtgctcgccgtgcagctgcggaacttcgccgccaagggccgggtggtgaaggtgaaggcctcnttcaagctgtcggctgccgaggagaagaaggcgacggcggcgaaggcggccaggtccaaggcggccaagggcgtcgtcggcggcgccaagaggaagaggaccccgcgcccctccggcggcggcgncaagaagcccgcgtcgtcggcggaggcgaagaag

SEQ ID NO: 401709 - DNA, 430 bp, Oryza sativa nipponbare
gcccgcgtccggcatcatccagggttgacaagttcgtggggagtgacatcatcgtgtccccttccattctttctgcaaacttttccaagcttggcgagcaggtaaaagctgtggaggtggcaggatgtgactggattcatgttgatgtcatggatggacgttttgtgccaaatatcacaatcggacctttggttgttgatgctctgcggccagtcactgatcttccgttggatgtgcatctgatgattgtggaacctgagcaacgagttccagattttatcaaggcaggtgctgatattgttagcgttcactgtgagcaatcgtcaaccatccatctacaccgaacagtcaatcagatcaaaagtcttggagcaaaggctggagttgttttgaatcctgcaacccctctcactgggatagattatgtact

SEQ ID NO: 401710 - DNA, 461 bp, Oryza sativa nipponbare
  unsure (1)..(461): unsure at all n locations
ccacgcgtccggcagcagcagcagtagctgagcttggatcagcagagcgaggtagacatggccgccgccaccatggccctctcgtccccggcgctggccggcaaggccgccgcgaaggtgttcggcgaggggcgcatcaccatgcgcaagtcggcggcgaagcccaagcccgccgcgtcggggagcccgtgggacggcgccgaccgcgtgctctacctcggcccgctctccggcgagccgccgagctacctgaccggcgagttccccggcgactacgggtgggacaccgcggggctctccgccgacccggagacgttcgccaagaaccgggagctggaggtgatccactccaggtgggcgatgctcggggcgctggactacctatcctacgacgagcccaccacggggttccccgaggaggcgtgcgacgatctgggcggagagtnctgcanggccacctg

SEQ ID NO: 401711 - DNA, 401 bp, Oryza sativa nipponbare
  unsure (1)..(401): unsure at all n locations
ccacgcgtccgcgccatctctctcagctctcacagctcactgcatcaatggccgcggccaccatggcgctctcctccccggtgatggcccgcgcggcgccgtcgacctcctccgcgctcttcggcgaggcgcggatcaccatgcgcaagaccgccgcgaagcccaagccggcggcgtcgtcggggagcccgtggtacggcgccgaccgcgtcctctacctcggcccgctctccggcgagccgccgagctacctcaccggcgagttcccgggcgactacgggtgggacaccgcggggctctccgccgacccggagacgttcgccaagaaccgggagctggaggtgatccactcccggngggcgatgctgngcgcgctcggctgcgtcttcccggagctcctc

SEQ ID NO: 401712 - DNA, 474 bp, Oryza sativa nipponbare
ccacgcgtccgatcaaatcaagcgttggagagaggaagaaggtaagctaagcaaagcaagcaaagctagagagaaagtgacagcagcaatggcggggggcgagcttgtgctgctggacttctgggcgagcccgttcgggcagcggtgccgcatcgcgctggcggagaagaagctcccctacgactactccgagcaggagctcctcggcgccaagagcgacctcctcctccgctccaaccccatccacgccaaggtccccgtcctcctccacggcgacggagacggccgcgccgtctgcgagtccctcgccatcctcgagtacctcgacgacgccttcccggacgccacccctcgccttctcccctccggcggcgacgacccgtacgcgcgcgcccgggccaggttctgggccgactacgtcgacaagaaggggtacccggtggggacgcggctgttgaaggtcaaggggaggag

SEQ ID NO: 401713 - DNA, 491 bp, Oryza sativa nipponbare
  unsure (1)..(491): unsure at all n locations
ccacgcgtccgcggccaccatggcgctctcctccccggtgatggcccgcgcggcgccgtcgacctcctccgcgctcttcggcgaggcgcggatcaccatgcgcaagaccgccgcgaagcccaagccggcggcgtcgtcggggagcccgtggtacggcgccgaccgcgtcctctacctcggcccgctctccggcgagccgccgagctacctcaccggcgagttcccgggcgactacgggtgggacaccgcggggctctccgccgacccggagacgttcgccaagaaccgggagctggaggtgatccactcccggtgggcgatgctgggcgcgctcggctgcgtcttcccggagctcctcgcccggaacggcgtcaagttcggcgaggccgngtggttcaagggcggcttgcagatcttcagcgagggcgggctcgactaccttggcaacccgagcctgatccacgcgcagaggattcttgncattttgggcg

SEQ ID NO: 401714 - DNA, 382 bp, Oryza sativa nipponbare
  unsure (1)..(382): unsure at all n locations
ccacgcgtccgggtggatgggtcgtcgtacctnnggcanccgctgccgttctcgatctcgacgctgatctggatcgaggtgctcgtcatcggctacatcgagttccagcgcaacgcggagctggacccggagaagaggctgtacccgggggggtcctacttcgacccgctcgggttggcgtcggacccggagaagaaggagcggctgcagctggcggagatcaagcacgcccgcctcgccatggtcgccttcctcggcttcgccgtgcaggccgccgccaccggcaaggggcccctcaacaactgggccacccacctcagcgacccgctccacaccaccatctttgacaccttctnctcatcctcttaatttaagctctttc

SEQ ID NO: 401715 - DNA, 475 bp, Oryza sativa nipponbare
ccacgcgtccgccgggaggtcgccaacaagtgcgccgatgccgccaagctcgccggcttcgccctcgccacctcagctctgctcgtctcgggcgccagcgcggagggcgtgccgaggaggcttaccttcgacgagattcagagtaagacgtacatggaggtgaagggaaccggcacggcgaaccagtgcccgacggtggagggcggcgtcgactccttcgccttcaaggccggcaagtacaacatgaagaagttctgcctggagccgacgtccttcaccgttaaggcggagggcgtggccaagaacgcgccacccgagttccagaagaccaagctcatgacccgcctgacctacaccctcgacgagatcgagggcccgctcgaggtcagctccgacggaaccatcaagttcgaggggaaggacggaatcgactacgccgccgtcaccgtgcagcttgcgggaggcgagcgcgtgc

SEQ ID NO: 401716 - DNA, 280 bp, Oryza sativa nipponbare
ccacgcgtccgcccacgcgtccgccgctcgcgttcgggcccgaggcgtcggcggcgcaggaggtggcgaggctggcggcggaggcggcggcggcggagggcggcgacaaccgcggcctgctgctgctgttcgtggtggcgccggcgatcgcctgggttctctacaacatcctgcagccggcgttgaaccagctaaaccgcatgcggtcagactgagagcttgagcttgaagattgcatccgtacatgtgtgtacgtggtgtgttttgagggtggtggagt

SEQ ID NO: 401717 - DNA, 459 bp, Oryza sativa nipponbare
ccacgcgtccgtggagcacacatttcagctcaccactgctagcttgggaagaggaggaggagcttgagcttggagagagacaacaatggcggctcaggctcttctctctgggaggcagctgctggggaggccattgcaatcttcagtctccaggtcttcttcctccaggaaggcacccttcatggtcagggcagaggccactccccctgccaagcaaggtgctgacaggcagctgtggttcgcatccaagcagtccctgagctacctggatggcacgcttccgggagacttcgggttcgacccgctggggctatcggacccggaggggaccggtgggttcatcgagccacggtggctggcctacggcgaggtgttcaacggccggacggcgatgatgggcgtcgtcggcatggtcgccccggagctcctcggcaggctgggcctcgtccccgccgagac

SEQ ID NO: 401718 - DNA, 475 bp, Oryza sativa nipponbare
ccacgcgtccgtggatatttgtccatgctgtttacagatgatgcagcagttttagacgttgcccaaactggagtctgggtaatgactattctgagaagtcaatacttgatttaccaagtgatatgcaatggttttatagtaattggctgatggatttttgcagtttgtcactgtttctcaaccaataaatgctgttgcgtttgtgatggatgggctctactatggtgtttctgactttgctttcgtggcatactctacattatttgcgggagctatctcatcagcagtactgcttgtggccgctcctaagtttggtcttggtggcgtctgggctggccttactctatttatgagtttgcgagcaattgctgggttctggaggttagggagcaaaggtggaccatggaaaataatctggtctgaaactgagtaaagaaaaaagataggggtgcataattattagattaacatctta

SEQ ID NO: 401719 - DNA, 266 bp, Oryza sativa nipponbare
ccacgcgtccgcccacgcgtccgcggacgcgtgggtcagtgtccttctcgaagcatgttggaagcaactaagatatcggtcgtgacaatattagcttgttctatccagtgctctgcaataaaagtctcatctttaaatttgtaggcacatgagttatttgggaattcggacttgaatgatccttgtaatacatcaaaacacggcataattttttttaaaggagtgccaattattcatggggaatgagaatcacctattttggagtt

SEQ ID NO: 401720 - DNA, 474 bp, Oryza sativa nipponbare
  unsure (1)..(474): unsure at all n locations
nacccacgcgtccgaaaaaattttctcctcctctttctcttctctctgtgtcactgcgtgtgaggagcgtagcttagagtgagaaaataatggcgttggagacgtgcttcagagcctgggcgactctgcacgccccacagccaccgtcctccggcggcagtagggacagactcctcctctccggcgccggcagcagccagtccaagccaaggttgtccgtcgcctcgccgtcaccgctccgacctgcctcccgcttcgcctgccagtgcagcaacgtcgtcgacgaagtggtggtggcggacgagaagaactgggacagcatggtgctggggagcgaggcgccggtgctggtggagttctgggcaccgtggtgcggaccgtgcaggatgatcgcgccggtgatcgacgagctggccaaggagtacgtcggcaagatcaagtgcttgaaggggaacacggacgactcaccaaaca

SEQ ID NO: 401721 - DNA, 517 bp, Oryza sativa nipponbare
ccacgcgtccgcccacgcgtccgcccacgcgtccgcccacgcgtccgatctacatcttcaaggtcctgaagcaggtgcacccggacatcggaatctcctccaaggccatgtcgatcatgaactccttcatcaacgacatcttcgagaagctcgcgcaggaggccgcccgcctcgcccgctacaacaagaagcccaccatcacctcccgcgagatccagacctccgtccgcctcgtcctccccggcgagctcgccaagcacgccgtctccgagggcaccaaggcggtcaccaagttcaccagcaactaggcctgtctctctagggtttcgatgccatgcttctctccttccctttcccctcgtgtgcagtgtgctaggtggcagtagttgcaaacttgtgcctgctttgtaaattgtgcttgatcataatgggcagcttggatttgaagtaatagacgtgtcgagtgttatttattggtcggtggctggttcgcatcttggggttttcttttctcttt

SEQ ID NO: 401722 - DNA, 388 bp, Oryza sativa nipponbare
ccacgcgtccgagcgatcccactcctcctcctcctccccttgttcgtcgtctccgcggaatcgatcgcgccgcgcgcccacgcccttcctccctcccggatccggcgcgtaagagtaattgacctttgaagttctataagatgggtcgtggtgttagcagcgggggtggtcagagttccctgggctacctgtttggtggtggtgaagctccgaagtcagctgagaagcctgctccagttcaaaagcctgccccttcgtcctctgcagagaagctgaaagagatcccagccggtattcaaagtagtaaggcgaacaattacatgagggctgaaggtcaaaactggggaaatttccttacggaccgtccgtcaaccaaggtgcaggctgt

SEQ ID NO: 401723 - DNA, 463 bp, Oryza sativa nipponbare
  unsure (1)..(463): unsure at all n locations
ccacgcgtccgcccactgcgtccgcccacgcgtgcgggaagctctatctacgggagagaaaggaagacactagaggagagagtatcgccactgctctatgctaccatggcgagccaactgatgaagagcagcttggcgagctccaagccgagggggctgtctggtgcttcgctgacaaggaggccccgcttcacagtgaaggccatccagtctgagaagccaacgtaccaggtggtgcagcccatcaatggcgaccccttcatcggcagcctggagacgccggtgacctccagcccgctggtcgcctggtacctctccaacctcccggcgtaccgcaccgncgtcagcccgctgctccgcggcatcgaggtcggcctcgcccacggctacctcctcgtcgggcccttcgggctcaccggcccgctccggaacacgccggtgcacgggcaggccggcgccctcg

SEQ ID NO: 401724 - DNA, 450 bp, Oryza sativa nipponbare
  unsure (1)..(450): unsure at all n locations
ccagcgtccggctgcgtgcctctagcttacttggtgataaggaggaggaggagtgaggccgctcaccgcgtgggacctcctgaagcagatcgagtacctgctccgttccaagtgggtgccctgcctcgagttcagcaaggtcggattcgtctaccgtgagaaccacagatcccccggatactacgatggcaggtactggaccatgtggaagctgcccatgttcgggtgcactgacgccacccaggtgctcaaggagctcgaggaggccaagaaggcgtaccctgatgcattcgtccgtatcatcggcttcgacaacgtcaggcaggtgcagctcatcagcttcatcgcctacaagcccccgggctgcgaggagtctggtggcaactaagccgtcatcgtcatatatnagccttgttaacttgtcatctctgattcgatgatgtctcccac

SEQ ID NO: 401725 - DNA, 449 bp, Oryza sativa nipponbare
  unsure (1)..(449): unsure at all n locations
nacccacgcgtccggaaagcataagcaacacaagggattaactcatcactcacttagctaattaaatcttcgaccatgtcggacaagtgcggcaactgcgactgtgctgacaagagccagtgcgtgaagaaaggtaccagctatggcgtcgtcatagttgaagccgagaagagccacttcgaggaggtcgccgccggcgaggagaacggcggctgcaagtgcggcaccagctgctcctgcaccgactgcaagtgcggcaagtgaagtcacgaagcaaccgaacactcgccgccggcgagtcacctaccttaattagtccacaataaaaaccacccatatgagtgtggtttggtgtgtgtgctgattattgctgaattaaacccgtgtgttatcgattaattaagcagctgggcgcttcggcgactatgcgtgtatcaacgtatgaattt

SEQ ID NO: 401726 - DNA, 114 bp, Oryza sativa nipponbare
  unsure (1)..(114): unsure at all n locations
ccacgcgtccgcccacgcgtccggcgtccactccgaccaacttcctgnggaagaagctgaagaagcaggtgacatncggcggtgaactaccatgggcagagctccaacatcaac

SEQ ID NO: 401727 - DNA, 452 bp, Oryza sativa nipponbare
ccacgcgtccgagaaggagagagcttggtgagctgcagagatggccccctccgtgatggcgtcgtcggccaccaccgtcgctcccttccaggggctcaagtccaccgccggcatgcccgtcgcccgccgctccggcaactccagcttcggcaacgtcagcaatggcggcaggatcaggtgcatgcaggtgtggccgattgagggcatcaagaagttcgagaccctctcctacctgccaccgctcaccgtggaggacctcctgaagcagatcgagtacctgctccgttccaagtgggtgccctgcctcgagttcagcaaggtcggattcgtctaccgtgagaaccacagatcccccggatactacgatggcaggtactggaccatgtggaagctgcccatgttcgggtgcactgaccccacccaggtgctcaaggagctcgaggaggccaaga

SEQ ID NO: 401728 - DNA, 462 bp, Oryza sativa nipponbare
  unsure (1)..(462): unsure at all n locations
ccacgcgtccgcccacgcgtccgcgcaacagctacaaacgcccacatcacacgcagaaatccgcatcaacagccagccatggcgtccacgctgaccaacgtcggcctgtctaccccggcggcggcggcgtcgtccctcgttaggccggtcgccggagctggacgcgtggtgtttccccgtgttggccgcggcgggttcgcggcggtgagggcgagcgggccggcgacgccgccggacatctcggacaagatgtcggagagcatcgacaaggcgaaggaggcgtgcgcggaggacacggcgagcggcgagtgcgcggcggcgtgggacgaggtggaggagctgagcgcggcggcgagccacgcgcgcgacaagctcaaggagacctncgacccgctcgaggcctactgcaaggacaaccccgagaccgacgagtgccccacctacgacaactggtttttacca

SEQ ID NO: 401729 - DNA, 137 bp, Oryza sativa nipponbare
ccacgcgtccggggagctgaacaataagcatagatgcggagattcccaaataggtcaaccttttgaactgcctgctgaatccatgagcaggcatgagacaacctgtcgatactgaagcatgttagcagccagaggat

SEQ ID NO: 401730 - DNA, 495 bp, Oryza sativa nipponbare
ccacgcgtccgagttcccgggcgactacgggtgggacacggcggggctctccgcggacccggaggcgttcgcgaggaacagggcgctggaggtgatccacggccggtgggcgatgctcggcgcgctgggctgcatcacgccggaggtgctcgagaagtgggtgcgcgtcgacttcaaggagcccgtgtggttcaaggccggcgcccagatcttctccgacggcggcctcgactacctcggcaaccccaacctggtgcacgcccagagcatcctcgccgtgctgggattccaggtcgtcctcatgggcctcgtcgagggctaccgcatcaacggcctccccggcgtcggcgacggcaacgacctctaccccggcggccagtacttcgacccgctcggcctcgccgacgacccccgcaccttcgccgagctcaaggtcaaggagatcaagaatggcccgctcgccatgttctccatgttcgggttcttcgtccaggc

SEQ ID NO: 401731 - DNA, 393 bp, Oryza sativa nipponbare
gtccgcccacgcgtccgcggcgcgtggtgacgcgtgggttctccaatgtgggaagacaggactgattacgtcggttggcaacctcgctgctcctgtggaagaatggaccgttggtggaactgcattgacatcgttgatggatgttgagaggaggcacggaaagtacaagccagtgatcaagggggctatggtggaacttgacggggcaccgtttaagaagtttgcttcattgcgagatgagtggtccctcaagaaccattacatcatgcctggtcccatccagttcagtggccctggaagcaacgatgcgaaccacaccttgatgttggaactccgcgcccaggcataaagagacaccgccgtacccgcctttcccttttaaatttgttgggt

SEQ ID NO: 401732 - DNA, 457 bp, Oryza sativa nipponbare
ccacgcgtccgcccacgcgtccgcccacgcgtccgggccagcgagatctccgtctccgccgaggaggagttcaatattgagaagcttcaacttgttgaagctgagaaaaagaagatcaggcaagaatatgaacggaaagagaagcaagtcgaagttagaaagaaaattgagtactctatgcagctgaatgcttctcgcatcaaagtgcttcaagctcaggatgatttggttaattccatgaaagaggatgctacaaagcaactcctgcgtgtcagccacaaccaccatgaatacaagaaccttttgaaagaactcgtcgttcagggtttgcttcggttgaaagagccagcggtacttctccgttgccgcaaagaagaccatcatcatgtggaatctgtactgcattcagcaaagaatgaatatgcgtcaaaagcagaagttcatcacccagagatac

SEQ ID NO: 401733 - DNA, 465 bp, Oryza sativa nipponbare
  unsure (1)..(465): unsure at all n locations
ccacgcgtccggccattagccacagccgaattatgtgatgcaaatgcacatttgatcatgaatggcgagcttcgtgctctccagcccgtcttccaagtctacggaaggcggcaggttttcgccggccctatcgtgacgctgaaggtctacgaggacaatgttcttgttcgcgagttcctggaggagaagggccaaggcagggttctcgtggtcgatggtggtgggagcctgcggtgcgccattttgggtggcaaccctgtgcagcaggcgcagaacaatgggtgggctggcatcgtcgtcaatggttgcatcagggacgtggatgagatcaatggctgcgacattggtgtccgagctctgaactcgcaccctatgaaagcaaacaagaagggcatcggggagaagcatgtgcctgtgaccattgcagggaccaggatttgcgacggngagtggctctaccccgat

SEQ ID NO: 401734 - DNA, 426 bp, Oryza sativa nipponbare
ccacgcgtccgcaagaaagcataagcaacacaagggattaactcatcactcacttagctaattaaatcttcgaccatgtcggacaagtgcggcaactgcgactgtgctgacaagagccagtgcgtgaagaaaggtaccagctatggcgtcgtcatagttgaagccgagaagagcccttcgaggaggtcgccgccggcgaggagaacggcggctgcaagtgcggcaccagctgctcctgcaccgactgcaagtgcggcaagtgaagtcacgaagcaaccgaacactcgccgccggcgagtcacctaccttaattagtccacaataaaaaccacccatatgagtgtggtttggtgtgtgtgctgattattgctgaattaaacccgggtgttatcgattaattaagcaggtggtcgcttcggcgactat

SEQ ID NO: 401735 - DNA, 461 bp, Oryza sativa nipponbare
  unsure (1)..(461): unsure at all n locations
cacgcgtccgcggacgcgtgggtgaggagatggttgagttcatggagaaggttgctaagacagttgactctgaggagctcactgttgaggagcgcaaccttctatcagttgcttacaagaatgttattggtgctcgccgtgcgtcatggcgcatcatatcatccattgaacagaaggaagagagccgtggtaatgaggatcgttgcacgctcatcaaggaatacaggggaaagattgaaactgagctctccaagatctgtgatggcatcctcaagcttcttgactcccaccttgtgccttcatccactgctccagagtccaaggtcttctacctcaagatgaaaggcgactactacaggtacctcgcagagtttaagactggagctgagaggaaggatgctgctgaaaacaccatggtggcatacaaagcccctcaagatattgccctgggagagntgccc

SEQ ID NO: 401736 - DNA, 268 bp, Oryza sativa nipponbare
  unsure (1)..(268): unsure at all n locations
cccgcgtccggaaatctgtcacaacaagaagtgacacggctgcagcagcaacaaacagccctgtctcctatggttcattcaacacaatgcttctaatgggacaacagcctgaagcgccttgatgaagtactggccattgngtcaatgctctcggtgccctcagtcttatttcgtcccaaagatcgagcggaggagagtgatgcatcaagggagaaattttttgttccagaatctgatcatttaactcttctgaatggctacctgtaat

SEQ ID NO: 401737 - DNA, 409 bp, Oryza sativa nipponbare
ccacgcgtccggcaaaagaagaagaagaagaaagaagaagaagaagatgcagaccgctgctagcagtgtcgttggattgtcggccgtgttgcccgctgctgtgaaggggcgcagcctgcagattcaggctcctcgccgtgttgcgttgcgcgttcgtgcggcggcggcggcggtggcagtggaggctgcggaggtggactacagctctaacatctcggtgtttccgatggaggcgtgcgacctcatcggcggcgaggcgtgcaacgtgcagatgtacccagaggccaagctctcatcatcggctgctgttgctgtttctcgtgcggcggcggaggaagtcgacagggactacctatcctacgacgagcccaccacggtgttccccgaggaggcgtgcgacgatctgggc

SEQ ID NO: 401738 - DNA, 420 bp, Oryza sativa nipponbare
ccacgcgtccggcagcagtagctgagcttgaagcagcagagcgaggtagacatggccgccgccaccatggccctctcgtccccggcgctggccggcaaggccgccgcgaaggtgttcggcgaggggcgcatcaccatgcgcaagtcggcggcgaagcccaagcccgccgcgtcggggagcccgtggtacggcgccgaccgcgtgctctacctcggcccgctctccggcgagccgccgagctacctgaccggcgagttccccggcgactacgggtgggacaccgcggggctctccgccgacccggagacgttcgccaagaaccgggagctggaggtgatccactccaggtgggcgatgctcggcgcgctgggctgcgtgttcccggagcttctcgcccgcaacggcgtcaagttcggcgag

SEQ ID NO: 401739 - DNA, 445 bp, Oryza sativa nipponbare
ccacgcgtccggggagagagagcatctagctagggagagaaaggaagagacgagaggagagagatggccactgcttatgctcccatggcgagccagctgatgaagagcagcttggtgtgctccaagccgagggggctgtctggtgcttcgctgacaaggaggccccgcttcacagtcaaggccatccagtctgagaagccaacgtaccaggtggtgcagcccatcaatggcgaccccttcatcggcagcctggagacgccggtgacctccagcccgctggtcgcctggtacctctccaacctcccggcgtaccgcaccgccgtcagcccgctgctccgcggcatcgaggtcggcctcgcccacggctacctactcgtcgggcccttcgcgctcaccggcccgatccgcaacacgccggtgcacggccaggccggcgccctcggcg

SEQ ID NO: 401740 - DNA, 481 bp, Oryza sativa nipponbare
ccacgcgtccgccacgcgtccggaagcatacaggcggcagcgacgagccatggccacacacgcagcgctcgcggcgtcccgcattccggccaccgcccggctgcacagcaaggcggcgtccaagcagagggtggacttcgccgacttctccggactgaggccgggatcgtgctccatcagccacgccgcgagggaggcgtccttctccgatgtccttggctcgcagctcgtcgccagggctaccggagagaacgccgtgagggcgccggctgaggcgaagctcaaggttgccatcaacggcttcggccgcattggccgcaacttcctccggtgctggcacgaacgcgagaactccccgctcgaggtcgtcgtcgtcaacgacagcggaggcgtcaggaacgcatcacaccttctcaagtacgactcgatgctcggcaccttcaaggccgacgtcaagatcgtcgacgaccagaccatcagc

SEQ ID NO: 401741 - DNA, 518 bp, Oryza sativa nipponbare
  unsure (1)..(518): unsure at all n locations
ccacgcgtccggaatagatcaaatcgaatagatagaaatagtaaatttgaatggagacacctattctatgatggattttaacttaccctctattttcgtgcctttagtaggcttagtatttccggcaattgcaatggcttctttatttctttatgtgcagaaaaataagattgtctagaaccgacgggaccgaattttctcaatgtatttccacacaggatcataatacggatcttttgtagtgtaagtaatataatatggtatgttatgtggctctttctacacacaaatgcaaacccgctatggatggggattatggatgcggatataggctacgagcataaatgcatgcatatgcggaaccgggtatagcgagtttttttaagtggatcaacaaaaactttttgaatagaaagtcaatgtatctaacccattattttacaggaggatctagttggggaaggggatttnagaatcaaaaaaggaaaggncaaatcatttagcttattctctcaatt

SEQ ID NO: 401742 - DNA, 607 bp, Oryza sativa nipponbare
  unsure (1)..(607): unsure at all n locations
ccacgcgtccggacagggcgaaggaacagttatgcggtggtctctgaacattgcgaagatctcttcagtcttgtgtggaggcactggaatgagggaacagttacagagattgtggatccttctctgggcaaccactactctagaggagatatcctgaaatgcatcaacattgggcttctgtgcgtccagcaaaacccagtggaccggccgccgatgtcagcgatcatccttatgctcagtagtggcaccgtcactctgcaagcaccctacaggccggcatatatctttggcaggaacaggagctacacggaaacaatggacgttccattaccttcggggcctcattcgtcgatcactgagcttgaacctagataaagtcattggtcatctaacgatagaaatggatggggttggaattcatcggtacccggtgtctaagtctaattaagtgtcacgtctttagttgaaaattagcggttacatgcgccaccatcttactttctgttagagcatcaacgacaacctggcgtgaggcatcaaagcactaggtgcagggtctcgtacgatgacgtacgattaccaacggggagagggnttaaatgtntga

SEQ ID NO: 401743 - DNA, 370 bp, Oryza sativa nipponbare
  unsure (1)..(370): unsure at all n locations
ccacgcgtccgcaccaccaacggctgcaactctaccgggccccattttaatcctcacaataagtcccatggggcaccatctgatgatgaaagacatgtgggcgacctgggaaacatagtagccaacaaagatggtgttgcagatatcttcataaaggacctacagatttcactaagcgggcctcattccatattgggaagggcagttgttgttcatgctgattctgatgacctaggtgtgggtggtcatgaactcagtaaaacaacaggaaatgcaggagcaagaattggatgcggtatcattggacttcgatctgcagtttaacaatctatagtcatgaagcttgaggtggtggtggtntgctgttcag

SEQ ID NO: 401744 - DNA, 372 bp, Oryza sativa nipponbare
cacgcgtccgctgcagcgcggtgggcgtgccgagcctgctggcgccgtcgtcgaacaggagccgcctgccggtctgcgcctacgccaccacctccgggcgcgtcaccatgtccgccgagtggatgccgggccagccacgccccgcccacctcgacggctcctctcccggtgacttcgggttcgacccgctgggcctcgccaccgtgccggagaacttcgagcggttcaaggagtcggaggtgtaccactgccggtgggccatgctcgctgtgcctggggtgttggggccggagggcctggggctgggcaactgggtgcaggcgcaggaatgggcggcggagcccggcggccaggccacgtacctcggaaacc

SEQ ID NO: 401745 - DNA, 355 bp, Oryza sativa nipponbare
ccatgcgtccgcccacgcgtccgtggcaatgcgaagcaatgagcaaagagcggtcctcaggtttaggccgctctgatgccattaggccaccatgtccatttccctcgcattcggaggactgcccttattcttacactcgccagtgcaaccacgatggacccatctttgtgattatgcttgaacatgataagatgtctgtccaagagcttcctgcgaactcaactgtagtcgatctgatggagagagtgggggccaatagctcaagatgcatcccttacagctttccactgaaagaggaattgcgcccgagggttaaccacatgcccataagttaccctaaccggaaactgtgcat

SEQ ID NO: 401746 - DNA, 424 bp, Oryza sativa nipponbare
ccacgcgtccgccagcagcagcagcagtagctgagcttgaagcagcagagcgaggtagacatggccgccgccaccatggccctctcgtccccggcgctggccggcaaggccgccgcgaaggtgttcggcgaggggcgcatcaccatgcgcaagtcggcggcgaagcccaagcccgccgcgtcggggagcccgtggtacggcgccgaccgcgtgctctacctcggcccgctctccggcgagccgccgagctacctgaccggcgagttccccggcgactacgggtgggacaccgcggggctctccgccgacccggagacgttcgccaagaaccgggagctggaggtgatccactccaggtgggcgatgctcggcgcgctgggctgcgtgttcccggagctcctcgcccgcaacggcgtcaagttcg

SEQ ID NO: 401747 - DNA, 458 bp, Oryza sativa nipponbare
ccacgcgtccgcgcctcatccgcaacacccccgtgtgcgccgcccccgtcgcccccgccgcgatggacgccgccgtcgaccgcctcaaggatgggttcgccaagttcaagaccgagttctatgacaagaagccggagctcttcgagccgctcaaggccggccaggcacccaagtacatggtgttctcgtgcgccgactctcgcgtgtgcccgtcggtgaccatgggcctggagcccggcgaggccttcaccgtccgcaacatcgccaacatggtcccagcttactgcaagatcaagcacgctggcgtcgggtcggccatcgagtacgccgtctgcgccctcaaggtcgaactcatcgtggtgattggccacagccgctgcggtggaatcaaggccctcctctcactcaaggatggagcaccagactccttccacttcgtcgaggactgggtcaggacc

SEQ ID NO: 401748 - DNA, 435 bp, Oryza sativa nipponbare
  unsure (1)..(435): unsure at all n locations
ccacgcgtccggaggggttcgaggactacctgccggtgatggcggagaggctgggggaggaagggctgatgcaggagctcgcaagcgggttccgcctgctcatggacccggcctccgggctcatcaccttcgacagcctccgccgcaacgcgccgctgctcggcctcggcgggatgtccgacgacgacctccgggggatgctcgccgagggcgacttcgacggcgacggcgccctcagcgagatggagttctgcgtcctcatggtcaggctcagccccgacctcatggacgagcctcgccggtggctcgacgacgccgtcgcccaggcctcacagttcctctttcattagaaagttcgacatggataggattcttcttctttttttctttctttcttctttcttctcgntggtcatagcatcaggattcatcaag

SEQ ID NO: 401749 - DNA, 457 bp, Oryza sativa nipponbare
ccacgcgtccggcactcaccaagtttaatttggagcacacatttcagctcaccactgctagcttgggaagaggaggaggagcttgagcttggagagagacaacaatggcggctcaggctcttctctctgggaggcagctgctggggaggccattgcaatcttcagtctccaggtcttcttcctccaggaaggcacccttcatggtcagggcagaggccactccccctgccaagcaaggtgctgacaggcagctgtggttcgcatccaagcagtccctgagctacctggatggcacgcttccgggagacttcgggttcgacccgctggggctatcggacccggaggggaccggtgggttcatcgagccacggtggctggcctacggcgaggtgttcaacggccggacggcgatgatgggcggtcgcggcatggtcgccccggagctcctcggcaagct

SEQ ID NO: 401750 - DNA, 447 bp, Oryza sativa nipponbare
ccacgcgtccggatcaggtagaacagtgagagtgaggtgcagaaaaatttgagctgaagctgaggatggcaacatccatgatcacctcgccgctggtggcgccggcccgggccaagggccttccgtccatctcccgccggggatcctccttcgccatcgtctgcagcggtgggaagaagatcaagaccgacaagccctacgggattggaggtggcatgtcagtcgatattgatgcatctggcaggaagagcacggggaagggtgtgtaccaattcgttgacaagtacggcgcaaacgtcgacggctacagcccaatctactcgccggaggaatggtctcccaccggtgacacctacgttggtggaaccaccgggcttctgatctgggccgggaccctcgccgggctcctcggcggcggcgccctcctcgtctacaacaccagcgccc

SEQ ID NO: 401751 - DNA, 393 bp, Oryza sativa nipponbare
  unsure (1)..(393): unsure at all n locations
ccacgcgtccgcggacgcgtgggcaccggcaagggccccctcgagaacctcgccgaccacctcgccgaccccgtcaacaacaacgcctgggcctacgccaccaacttcgtccccggcaagtgagcgccgccgccgccgtgctgccatggcgacgcatcgccttcagctaagctagctaggttgacgacgatgcgcgtctctgcaggagagtgtgcgtgtgtgtacgcggtgcagtagatgtacgtacgtgtaccgtatagatgtacgtattcgtgtggaccgcgtggatggatgtacgagtattggagagagggtgagatctgtaccggnagtgtgtatttntgtgnangttntgaacntgatnaatgaaatatggtgttgtgaattnattat

SEQ ID NO: 401752 - DNA, 453 bp, Oryza sativa nipponbare
ccacgcgtccgcccacgcgtccgtgatcctctacaatcatcgactttcagcaaattaagatggctgctgccttctcctccaccgttggagctccggcgtccactccgaccaacttcctggggaagaagctgaagaagcaggtgacatcggcggtgaactaccatggcaagagctccaacatcaacaggttcaaggtgatggccaaggagctggacgagggcaagcagaccgaccaggacaggtggaagggtctcgcctacgacatctccgatgaccagcaggacatcaccagggggaagggtttcgtcgactcccttttccaggctcccacgggtgatggcacccacgaggccgtcctcagctcctacgagtacctcagccagggtctcagaacgtacgacttcgacaacaccatgggaggcttttacatcgcccctgcttttatggacaagc

SEQ ID NO: 401753 - DNA, 500 bp, Oryza sativa nipponbare
  unsure (1)..(500): unsure at all n locations
ccacgcgtccgctacttcgcgtcgtcgtcgacgctgttcgtcatcgagttcatcctgttccactacgtggagatccggcggtggcaggacatcaagaaccctggctgcgtcaaccaggaccccatcttcaagagctacagcctcccgccgcacgagtgcggctaccccggcagcgtcttcaaccccctcaacttcgagcccaccctcgaggccaaggagaaggagctcgccaacgggaggctggcgatgctggcgttcttggggttcctggtgcagcacaacgtgacgcagaaggggcccttcgacaacctgctgcagcacctgtctgacccgtggcacaacaccatcatccagacgctgtcaggctgagcgtgtgatcgatttcatcagggccagggcatctcaaggagcttgatgagttcaggctggtgaaaccgatgattgggcgatggaagatgntctcttcttggttcttctttttttttttggggagtatgcat

SEQ ID NO: 401754 - DNA, 466 bp, Oryza sativa nipponbare
ccacgcgtccgcaaagaaggagagagcttggtgagctgcagagatggccccctccgtgatggcgtcgtcggccaccaccgtcgctcccttccaggggctcaagtccaccgccggcatgcccgtcgcccgccgctccggcaactccagcttcggcaacgtcagcaatggcggcaggatcaggtgcatgcaggtgtggccgattgagggcatcaagaagttcgagaccctctcctacctgccaccgctcaccgtggaggacctcctgaagcagatcgagtacctgctccgttccaagtgggtgccctgcctcgagttcagcaaggtcggattcgtctaccgtgagaaccacagatcccccggatactacgatggcaggtactggaccatgtggaagctgcccatgttcgggtgcactgacgccacccaggtgctcaaggagctcgaggaggccaagaaggcgtaccct

SEQ ID NO: 401755 - DNA, 474 bp, Oryza sativa nipponbare
  unsure (1)..(474): unsure at all n locations
ccacgcgtccgcccacgcgtccgcccacgcgtccgcccacgcgtccgcccacgcgtccgattaatttcagagatagagtgagtgatcagttgagtgttgttgcataaacatggctgcctctgtcatggcttctctggctctgaaaccatctgcatctccattactagaacgttcgaagcttcgagggaaagggacaatggcaaggccatctttgatcatagtggccaagaaagcaaagaagattcagacatcccagccctnatgggcctgctggaggaagtggtgttcaaggaaggtgttgatgcatctggaagggtagccaagggaaagggtctttaccagttttccaacaagtatggagcaaatgttgatgggtacagcccaatatataccccagaagaatggtcttcaactggtgatgtctatgttggaggaaaggcaggtttacttctctgggcaatcactcttgctgga

SEQ ID NO: 401756 - DNA, 528 bp, Oryza sativa nipponbare
ccacgcgtccgtagcactcaccaagtttaatttggagcacacatttcagctcaccactgctagcttgggaagaggaggaggagcttgagcttggagagagacaacaatggcggctcaggctcttctctctgggaggcagctgctggggaggccattgcaatcttcagtctccaggtcttcttcctccaggaaggcacccttcatggtcagggcagaggccactccccctgccaagcaaggtgctgacaggcagctgtggttcgcatccaagcagtccctgagctacctggatggcacgcttccgggagacttcgggttcgacccgctggggctatcggacccggaggggaccggtgggttcatcgagccacggtggctggcctacggcgaggtgttcaacggccggacggcgatgatgggcgtcgtcggcatggtccccccggagctcctcggcaggctgggcctcgtccccggcgagacggcgatccccgtggttccagaccggcgtgatccccccccggggcacct

SEQ ID NO: 401757 - DNA, 414 bp, Oryza sativa nipponbare
ccacgcgtccgacaccacccaccaactgagagctgagcaggcgagcgagcggacatggcagcatcgctccaagccgcggccaccctgatgcagccggccaagctcggcggccgggcctcctccgccgcgctgccatcgcgcccgtcttcgcacgtcgccagggcgttcggcgtcgacaccggtgccgccggcaggatcacgtgctccctgcagtccgacatccgggaggtcgccaacaagtgcgccgatgccgccaagctcgccggcttcgccctcgccacctcagctctgctcgtctcgggcgccagcgcggagggcgtgccgaggaggcttaccttcgacgagattcagagtaagacgtacatggaggtgaagggaaccggcacggcgaaccagtgcccgacggtggagggc

SEQ ID NO: 401758 - DNA, 267 bp, Oryza sativa nipponbare
  unsure (1)..(267): unsure at all n locations
ccacgcgtccgcagcagttgagctctttttccactacgcactagtagtagcactctggtattctcccatggcgactgcgaccgaggaggttgccgctgcggctgctgccgccggcgaggcgccgccgccgccgccgccagcggtggtagaggaggcgaaggaggctttggaggcaccgaagccggaggaggcgccgaaggctgaggagggggaggagaagaaggcggagggngagaaggagaaggagaaggngaanaaggagaggaa

SEQ ID NO: 401759 - DNA, 527 bp, Oryza sativa nipponbare
ccacgcgtccgatgatggctctgtggccacaattggaattacagaccatgctcagggccatctgggagaggtggtgttcgtggagctgccggaggcgggggcgaaggtgagccagggaggtgcattcggcaacgtggagagtgtgaaggccaccagcgacatcaactcccccatctccggtgaggtcgtcgaggttaacgacaagctctctgagacacccggcctgattaactcaagcccgtacgaggacgggtggatgatcaaggtgaagccgagcagcccgtcggagctggacgccctgctggacccggccaagtacaccaagcactgcgaggaggaagacgctcactaggctcttcctctctgttttttttcttcccattttgtcactccgacctaatttctccctgttgcaacaactgctctgtatccgtatacgattaataactgaatcttcaggctttgccatgtgttcagttggttctctgaacttctggtgggtctatctatttatctatgcttaatta

SEQ ID NO: 401760 - DNA, 531 bp, Oryza sativa nipponbare
ccacgcgtccgattgtttgcatattgaatttgagtacagcaaaagcaagtaccatctcaaggatgtgatcgtgggaaaaatctattttcttctagtcagaataaagataaagaacatggagcttgagattcgtcggcgggaatcaacaggatctgggcctggcacatatattgagactgagacacttgcaaagtttgagttgatggatggcgctcccgtaagaggtgagtctattccggtaagactcttcttgacaccatatgagttgaccccgacttaccgcaacataaacaacaagttcaatgtcaagtactacctgaacctggttcttgttgacgaggaagaccggaggtacttcaagcagcaagagatcacaatgtaccgccttcaagaaactccgcaatcttcataaactcctgttgccttgacttggtaacgaccagaaaaacttgggtctgtctggcataggagagcaccggagtagcaacttagcatgatgcgccttcctgtatataactctccagaggagcg

SEQ ID NO: 401761 - DNA, 445 bp, Oryza sativa nipponbare
ccacgcgtccggcagcagcagcagtagctgagcttgaagcagcagagcgaggtagacatggccgccgccaccatggccctctcgtccccggcgctggccggcaaggccgccgcgaaggtgttcggcgaggggcgcatcaccatgcgcaagtcggcggcgaagcccaagcccgccgcgtcggggagcccgtggtacggcgccgaccgcgtgctctacctcggcccgctctccggcgagccgccgagctacctgaccggcgagttccccggcgactacgggtgggacaccgcggggctctccgccgacccggagacgttcgccaagaaccgggagctggaggtgatccactccaggtgggcgatgctcggcgcgctgggctgcgtgttcccggagctcctcgcccgcaacggcgtcaagttcggcgaggcgggtgtggttcaaggcg

SEQ ID NO: 401762 - DNA, 503 bp, Oryza sativa nipponbare
  unsure (1)..(503): unsure at all n locations
ccacgcgtccgctcatcgtggtgattggccacagccgctgcggtggaatcaaggccctcctctcactcaaggatggagcaccagactccttccacttcgtcgaggactgggtcaggaccggtttccccgccaagaagaaggttcagaccgagcacgcctcgctgcctttcgatgaccaatgcgccatcttggagaaggaggccgtgaaccaatccctggagaacctcaagacctacccgttcgtcaaggaggggatcgccaacggcaccctcaagctcgtcggcggccactacgacttcgtctccggcaacttggacttatgggagccctaaatccgaccgtccgtccgttcagttcgtcagtttacgccaacgcttttgcataagtactacctgaggatatcgtccccgatcatcgatgtgaacgcgtggagtactactacgtacgtaccggatggttcgatatatgtgaatgctgnattaagtaataacaagaaatatatc

SEQ ID NO: 401763 - DNA, 447 bp, Oryza sativa nipponbare
ccacgcgtccggcacaagaaagcataagcaacacaagggattaactcatcactcacttagctaattaaatcttcgaccatgtcggacaagtgcggcaactgcgactgtgctgacaagagccagtgcgtgaagaaaggtaccagctatggcgtcgtcatagttgaagccgagaagagccacttcgaggaggtcgccgccggcgaggagaacggcggctgcaagtgcggcaccagctgctcctgcaccgactgcaagtgcggcaagtgaagtcacgaagcaaccgaacactcgccgccggcgagtcacctaccttaattagtccacaataaaaaccacccatatgagtgtggttttgtgtgggtgctgattattgctgaattaaacccgtgtgttatcgattaattaagcagctggtcgcttcggcgactatgcgtgtatcaacgtatg

SEQ ID NO: 401764 - DNA, 529 bp, Oryza sativa nipponbare
ccacgcgtccgcccacgcgtccgctggacaaagagcttcgacaggtaaccaaagacaagaacgaggctgtacgtggccaagattttgaaaaggctggggaattaagagatcgggaaatggaattgaaggcccaaattacagccattattgacaagagcaaggaaatggttaaagcagagactgaatccggtgaagtcggtccccttgttactgaggcagatattcagcatatcgtgtcctcttggactggaatacctgtggagaaagtctcatctgatgagtctgaccgtctccttaagatggaggagacactccatacgcgtatcattggtcaggatgaggctgtcaaagctattagccgtgccatccgccgtgctcgtgttggcctcaagaacccaaatcggcctattgctagcttcatcttctctggaccaactggtgtcggtaaatcagagttagcaaaggctcttgcagcctactactttggctcagaagaggccatgatcagactagacatgagtgagttcat

SEQ ID NO: 401765 - DNA, 450 bp, Oryza sativa nipponbare
  unsure (1)..(450): unsure at all n locations
ccacgcgtccgcccgtcgccacctcgccccatcaccctctccctccaccacactacaccccgctccactctcaggcaggcaatcagcggcgaggcaccagcccaccggccggcaatggcgtccacctcctgcttcctccaccagtccacggcccgcgtcgccgcgcgcgtcgcctccccgtccccggcgacacggacccacctcctcgtctgccgcgcccagaagcaggacgacgccgacgtctcccgccgcgcggcgctcgcgctgctggccggagcgacggcggcggtgggggtgaaggtggcgcccgccgccgcggcctacggcgaggcggcgaacgtgttcgggaagcccaagacgaacacggagnncatcgcctacagcggcgaggggttcaagctgctgatcccgtccaagtggaaccccaacaaggagcgcgaggtccccgga

SEQ ID NO: 401766 - DNA, 634 bp, Oryza sativa nipponbare
  unsure (1)..(634): unsure at all n locations
ccacgcgtccgcccacgcgtccgggggaggagaagatgtcgagcgacggagggccggtgcttggcggcgtcgagccggtggggaacgagaacgacctccacctcgtcgacctcgcccgcttcgccgtcaccgagcacaacaagaaggccaattctctgctggagttcgagaagcttgtgagtgtgaagcagcaagttgtcgctggcactttgtactatttcacaattgaggtgaaggaaggggatgccaagaagctctatgaagctaaggtctgggagaaaccatggatggacttcaaggagctccaggagttcaagcctgtcgatgccagtgcaaatgcctaaggcccatctcgtatcctatgtgtatcaagttatcaagaagatggggaataatatggtgtggatatagctattggacatgttaattatccacatgataatatggcttggatataaggatctcacacgataataatggcttggatatataagctattaaagattttacctatgggatattttaatgggccttagccctaaataagaatggtttgcaggggttttacttccacttttgtactcaaagtccttttctttctataannccnnnntcttcnnttattactttttcc

SEQ ID NO: 401767 - DNA, 524 bp, Oryza sativa nipponbare
ccacgcgtccgcccacgcgtccggtgacgagcagctcgccgtcgatatgctcgccgacaagctcctcttcgaggctctggaatactctcatgtctgcaagtatgcgtgctccgaggaagtcccggagctgcaagacatgggtggaccagtcgatggtggtttcagtgtagcattcgaccctcttgatgggtccagcattgtcgacacgaacttcacagttggaaccatatttggtgtctggcctggtgacaagctgacaggcgtcaccggtggagaccaagttgctgctgccatgggcatctatggccctcgcactacttacattatcgctctcaaagattgtcctggaactcatgaattccttcttcttgatgaaggaaaatggcagcatgtcaaggacaccacaaccattggagaggggaaaatgttctctcctggtaacctgagggctacatttgataatcctgaatatgacaagctcatcaactactatgtcaaggagaagtacacattgcgttacactg

SEQ ID NO: 401768 - DNA, 493 bp, Oryza sativa nipponbare
ccacgcgtccggagaaaaatcccatctttggtctcctccccctccctctcgctcgcatcttccccggagatgccgccgccgccgagatgcgccgccaccaccgcccaccactccctcctcggctcgcccacctgcctcgcgcgcccgcggcggcggtgctgccccgtgcgcgccgccgtcgccgtccaggccgaggcgcaggccaaggtctcgctcatccggattggcacccgcgggagtcctcttgcactggcacaagctcatgaaacccgagacaagctgaaggctgcacactcagagttagccgaggagggggccgttgagattgtcatcattaagaccacaggagacatgatcttggacaaacccctggcagatataggtggcaagggtttattcaccaaggagatcgatgatgcacttttgcagggaaggattgacattgccggccactcgatgaaagatgttccaccatatttaccagaaggcgcga

SEQ ID NO: 401769 - DNA, 399 bp, Oryza sativa nipponbare
  unsure (1)..(399): unsure at all n locations
atcaaggacaagaagttttttgtgtccttgggtacatcgagatacagattgttccancaaataattagcctttcgattgattgattaattaattaattaacagtgccttttaattataactgctcaatcagccacgctgaggcagattctttctctcttctcctggggtagtgctcatcttgttttcatttcacatcctggagtagccatcgtactgatccatgaaagtgtcgttgaacttcttgaagctggtcatgatggcaagcatgtcctcctcagctggcaggatggtcgtcctcaggtggaacaccccttttttttgtccgaaacctgaccctggaacagtggatattccagttgcttcaagaagcttgaggcaataaaaaacatctgccgctt

SEQ ID NO: 401770 - DNA, 387 bp, Oryza sativa nipponbare
tgatcataaggcaaaggtgcgagggccagatcatcttattactacagcttcttggcgatatgctacagtagcttcttcctcccttgcaaaaagaaacccaaaccttatctacaacgcaacacacacaccggacacagagcgctcgatcgatcgaagcagacgagacgacgatggcgaactactactaggtaagcgacaacacctaggctatacagggatacagcgcgcggcggcgacgggcggcgagacggcggcgatgatcaggcgctggccttgttggccttcttggagatggcggagcggatggatttgggcggctgcatcggcttcgcgggggcggccttcctcgccctcttggcccgggctgggcgggcggggggaaccgcc

SEQ ID NO: 401771 - DNA, 350 bp, Oryza sativa nipponbare
tttttgtggataaatggcaaatggtagaaatgtaaatcattatacgatttcctaaaaaacgatatttattatgaacaatttcgtgagcacggtagtatcacatgacactgagaatatgtaatatatcttcgcggacagcgagaaaaacagtcgccctccacgttttcttattccttaaatttttccaatataacgaacaacttggcacatatcatgacaaaccgcggtactggtaaacaaaaacaacgtacacagcatactaatgtaggagcctcatgctggtacagccacaggttttaagctggtcttgattcccttgatagcttctgcatagtcttgagcccctaaaa

SEQ ID NO: 401772 - DNA, 438 bp, Oryza sativa nipponbare
  unsure (1)..(438): unsure at all n locations
ggaaggtgaatctatctttcttgtttctgaattcttttaaagtgtaaagtaatgatcggagagtacagtttacgcttgtaaacttcaaatacaaattacttgaacctgccagccggcgaaattaaacaagttattttgaacgaccttgattaattacgacaagtagttaaatgagtaaatagcagtaataataacaaccaaattaaggtgtacacacaatagcgtagctagtcgtcgatgccgtagtgcttcctgaggaggccgatgaagtcgtagatctcctccggcgagcggaggctgccggcgacgctgtcccgctccatgcaccgncgcgcccacgccgncacccgcgggcactcctnctccacgctgaacccgccgtacctcgcgaagctgtacacccacggcatcatcggcaccagcgccacgtncacaaac

SEQ ID NO: 401773 - DNA, 434 bp, Oryza sativa nipponbare
ttttggaaacgaataaaatcatgattgcggaaacatcatcttcttcttcatcttcttagtgtacacaacaccaactcgatcatcatctcgtcgcactaaacccatcttccccaacccaaagacaacgaactcgctggccacaaatccatccaaccacaattaaccactgctaagctacggtcccccacttcacttgccggggacgaagttggtggcgtacgcccaggcgttgttgttgacggggtcggcgaggtggtcggcgaggttctcgagggggcccttgccggtgacgatggcctggacgaagaagccgaacatggagaacatggcgaggcggccgttcttgatctccttcaccttgagctccgcgaacgcctcggggtcatcggcgaggccgagcgggtcgaaagcgccgccggggtagagcgggtcga

SEQ ID NO: 401774 - DNA, 410 bp, Oryza sativa nipponbare
  unsure (1)..(410): unsure at all n locations
aataccaagatcgatcgatcgatgtacaagtggatgcattaattcatcatcttgggtgttcttatattacaaatcaccaccatgcaagtcgccattaaccaccaacccagctttcctaatttaagtagtaatcaacaaaaggatgacctctcctctctccataccctcccagctcgctcgtcatcacaaaactaaacagcgcgcgcgaacgcacaccaacgcatcgatcccgtttgaattgcgcgcgaaagagcttaaattaagaggatgaggagaaggtgtcnaaaatggtggtgtggagcgggtcgctgaggtgggtggcccagttgttgaggggccccttgccggtggcggcggcctgcacggcgaagccgaggaaggcgaccatggcgaggcgggcgtgcttgatc

SEQ ID NO: 401775 - DNA, 342 bp, Oryza sativa nipponbare
  unsure (1)..(342): unsure at all n locations
ggagataacgtgatcattggatatgatcatcacttcaccanaacanannaataaacaaaagctaaaaattaaaaccatcaacanccccatcgagtttgcattactagatacacacattgcagccttccttccctctctccatgtatcgatatatcaacccggccacgcacaaaacatttgttcattccctactcgagctgcgcgtaccacaccccttggatcttgacatccttgggcaccttggcacctaggtctgtgtccaacggctgcacactctcgaagactccaatcactctcccggtctctggcttgctcttggtgacgctcaacgtgatgttgccc

SEQ ID NO: 401776 - DNA, 445 bp, Oryza sativa nipponbare
ttattggagcgtacgctaacgggaaaattcccagcatacaggaatgcggtttattcagtttcataacagtgggtatcgaaatcagatatgctcataacagataaccaaatttcagcctaagcgctttgagctccgtgagatttccagagtttggtccattcctccattgcatcagcagctttagcgaagattgcattctgcggtcccagtttctccttgacaatgctggttagttccttaacacagtcttcaacagtaactgaagtactcgatagcttcagagattcgaagaagggaagaacgacgtccatgactttcaccccttcccattctttcaagctctcgagagccttacctgcttctgcatcacttctcatcacataaggaagacctgtcttcacgccataccgtaagcgatcacacaccactttagcacacaagccat

SEQ ID NO: 401777 - DNA, 454 bp, Oryza sativa nipponbare
  unsure (1)..(454): unsure at all n locations
ttagcaatgaaagaatggggaagtatattgaattattattagtgaagcatcttattncctgcttttacaccccaatagcttatacatcccaacaaaaaatcgtaaattcaacaccggcaacaacaaaaccccaaaactcactttgttttgacactgacgccatctgttccagcgatgatcaccgaagtcgccatgtccaggaacagcccatgctcaacgacgccttccaaagctgagatctccttccctgctgccaacgcatccttgatcggcgtcttgaagtataaatcaacgatgtagtttgagttgtcggtaacgtagggtttgccgccttcatccaatctcagcttcgcctcgcatccttcatcgttaaacagatcctgcaatctcacttggttgtacttccagcagaactgcacaacctccacaggcatggctagaccactccctccta

SEQ ID NO: 401778 - DNA, 437 bp, Oryza sativa nipponbare
tcaaacagatgtggccatcatgtgtgtatgggtaacacagtttgattcctctttgctagtcaaaagatggtatcatcaatcaataatagttacagtattgattccatggagtagtaggattacaacaattaaggacgatgaagagaaaggggtggctggcgatacacatagagaggcaaagcagggggtagcttagttacaacttacaaacgaagctctgatcgatcaagtctgatttgattgatgcagctgaagaagaagaggaagaagacgacgatgatgatgcaatcagctgctgacgtacttgtcgatgatggtggcgagggtggtcttggggacggcgccgatgacgctctccttcttctcgccgttcttgaacatgaggacggtggggatgctccggatgccgtagttggtggcgatgtttggtgagtcgt

SEQ ID NO: 401779 - DNA, 312 bp, Oryza sativa nipponbare
gcaggggaaatctatggatcgagctaactccttaaaaagaaataaaatctaatatacaatcaaagaaacacacacgcacacacacatgcttgcactgcatatatatgagcaacgaactctattgattagattctgattctctagagataaaagagaacctgatatagagatatacacgatcatgctactctaaacgagctacctgccctctaaacgaactaccttgcgcccttaaaccacctatagtcgaccgactcccccttgcatatgtacatcttgccgacttagactgaggactcgatcatgtaaaac

SEQ ID NO: 401780 - DNA, 299 bp, Oryza sativa nipponbare
  unsure (1)..(299): unsure at all n locations
aaaaaaaaaaataccccgagcttccatatttttaattcacatatgcctcacccaacaacatttattcgtaacaaatcccacttttacattaagtcaaaaaaaaatcaggttaaacaaaaacaaaagccgagcccggcctgtaaaatcaaaaaacctttaacaaacttggaacccaccaaacaaggggggggacttttttcaatcagagattaacaattaaacaaggtttttttttaccatgaccgtttaattgccaccaaactcctntaaacccgggggcttttaagcaataaaactta

SEQ ID NO: 401781 - DNA, 461 bp, Oryza sativa nipponbare
  unsure (1)..(461): unsure at all n locations
actaggcaaaccacacnaatacgcgattggtgtaatttcactgagaatagcacgggtacatcacatcacacaaattcatacgttgatacacgcatagtcgccgaagcgaccagctgcttaattaatcgataacacacgggtttaattcagcaataatcagcacacacacaaaccacactcatatgggtggtttttattgtggactaattaaggtaggtgactcgccggcggcgagtgttcggttgcttcgtgacttcacttgccgcacttgcagtcggtgcaggagcagctggtgccgcacttgcagccgccgttctcctcgccggcggcgacctcctcgaagtggctcttctcggcttcaactatgacgacgccatagctggtacctttcttcacgcactggctcttgtcagcacagtcgcagttgccgcacttgtccgacatggtccaagatttaatta

SEQ ID NO: 401782 - DNA, 460 bp, Oryza sativa nipponbare
agcccatatctttatattatatgattatggacaaaaacttgtcatgcccagctatggcttgggcgcgatctgatacacagaacaaagagaaaacataaaaaggagaaataattaatagcaagcgtcaagccggcctgcttaaaaggtgtaaaggcagctgccgtcgtcgctcctcgccgttgggtcgaagttcttggcaacagggtcggtgcaaccttccggcacaggcaggttacctgcttgctgtgctccttgccctcctcctcctatgcaggccgcctacgatgcatcgatgggatgcgaatagctagagatcttttattcagctggatggcgcagaaccgtagaaggaaccagtcttcatggcgtcggagttagcgtcaccaagagcagcctcgctcaagtactgctcagccagctgcacacgcttgacgttctcctgctccttcacaaacatgta

SEQ ID NO: 401783 - DNA, 435 bp, Oryza sativa nipponbare
ataaatatatataggcggaggtgccatatatttcattcacatatgcctcacccaacaacatatagtcgtagcagataccactcttacatcaagtcagagagagatcaggtgaaacaaaaacaaaagcagagcacggccggtaaaatcaaaagacgatgaacaaactgggaacacacgaaacaaggtgggagacatcatcgaatcagagatgaacaattaaacaaggctatatatgacgatgacggcttagttgccaccagactcctcgcagcccgggggcttgtaggcgatgaagctgatgagctgcacctgcctgacgttgtcgaagccgatgatactgacgaatgcatcagggtacgccttcttggcctcctcgagctccttgagcacctgggtggcgtcagggcacccgaacatgggcagctttcacatggg

SEQ ID NO: 401784 - DNA, 362 bp, Oryza sativa nipponbare
  unsure (1)..(362): unsure at all n locations
ctnncnncctttttttttcttntcttaccaaactaactgacatatggaaaattaaaacataactttttcaccaaataccacnaaatgttcangccctaaaatacagcaatacccatacatccaacatagcaaaaatggcgaacatcacacactcagataaagctataaaaaactacggctccacgatataggctcctaatgacaaccatggcccttagtcgacctcctccatcttgctctctccggcgtcgtcctccaacggcagcatttctgcgtcaacctcaacaaactcgtcctcgtcgatgctcaagcctagcttaaacatcccgtggatcctggtcccgaaggttttggggtcctca

SEQ ID NO: 401785 - DNA, 331 bp, Oryza sativa nipponbare
gcaaagctaacatcagttattattggtacacatatttttactccacaaaaactcccaatggaaccttttattgagcactccacaaatatggagcctgcaggtcactctgcgaggttccatctcaacttttcaaaactgtaagaacaaaaaatttaaaaggtacacgtcggtatcgtcgtgtctttctatgcctcggcgccgagttccaacatcaaggtgtggttcgcatcgttgcttccagggccacttaactggatgggaccagggcttatttaatggttcttgagggaccactcattttccaatgaagcaaactttttaaacggggccc

SEQ ID NO: 401786 - DNA, 333 bp, Oryza sativa nipponbare
  unsure (1)..(333): unsure at all n locations
attgggggcctccncnataataatgaacaaataggtagtgttttacataacggatgaatactttaaacaatcaatttggcacaaacaggtgaaattccttgcagcttcaggttccaacctgccgctaattacatggaagcagcttttccccaccttaaattacatgcccaaattattccctcaccttaccaaaaaaaaacttcccgatcttccgtaattttttgcggaagacaactttcaaccttgcattaaatgttttctcacacacaatttttccattttgagaagccagcacaacacctccataacaaaaccttttattggaatcattaa

SEQ ID NO: 401787 - DNA, 410 bp, Oryza sativa nipponbare
ggttctacaaaaaaaatacaaaccctcaatttttccaactcatcatttaatttaacaatacctttttacaattttttacaatacaccaagaggggcaaaacccccactccatttatgccccaaattttcttaccgacacacacacccagagagattcacacactcaattcagtccttgagatgagaataccatcattatctgcttaaaaccactccccgtcacaaatcctggtcccttcaatggtaacaggcacatgcttctccccgatgcccttattatttgctttcatagggtgctagttcaaagctcggacaccaatttcccaaccattgatctcatccacgtccctgatgcaaccattgaccacaattccagcccacccattgtttttcgccttcttcacaaggtt

SEQ ID NO: 401788 - DNA, 415 bp, Oryza sativa nipponbare
ttagtatatcatcatcatccaggtacagtgttacatagattaatcacaatgcagtttgattaaacagtgggcatcatcacatcgcattcagaggaaggctatcttagattacagatgaatatgcagacacccagcttggtgttacatacatagactggatttgggtgaaatttaaccggcgagggcgctggtgttgtagactaggagggcgccgcctcccaggagcccggccagggtcacggcccagatcagaagcccggtggttccaccaacgtaggtgtcaccggtgggagaccattcctcccgcgagtagattgggctgtagccctcgacgtttgcgccgtacttgtcaacgaattggtacacaccctttcccgtgctctttctggcagatgcatcaatatcgactgacatg

SEQ ID NO: 401789 - DNA, 361 bp, Oryza sativa nipponbare
aattaactggcatgtgtaaatttaaaacgtaactgttttaccaaataccacgaaatgttcaggcgctaagatacggcaataccgatacatccagcatagcaaaaatggcgaagagcacagagtcagataaagctatagagaactagggctccaggagatgggggccgaatgacaaccatggcgcttagtcgacctcctccatcttgctctcgccggcgtcgtcctccagcggcggcatgtcggcgtcagcctcagcagactcgtcctcgtcgatgctcaggccgagcttgagcatccggtggatcctggtgccgaaagtgttggggtcctcaaggctgaagccggaggtcaggagggcagt

SEQ ID NO: 401790 - DNA, 421 bp, Oryza sativa nipponbare
  unsure (1)..(421): unsure at all n locations
tactaggcaaaccacacnaatagacnatgggttaatttcactgagaatagcacgggtacatcacatcacacaaattcatacgttgatacacgcatagtcgccgaagcgaccagctgcttaattaatcgataacacacgggtttaattcagcaataatcagcacacacacaaaccacactcatatgggtggtttttattgtggactaattaaggtaggtgactcgccggcggcgagtgttcggttgcttcgtgacttcacttgccgcacttgcagtcggtgcaggagcagctggtgccgcacttgcagccgccgttctcctcgccggcggcgacctcctcgaagtggctcttctcggcttcaactatgacgacgccatagctggtacctttcttcacgcactggctcttgtcagcacagtcg

SEQ ID NO: 401791 - DNA, 438 bp, Oryza sativa nipponbare
  unsure (1)..(438): unsure at all n locations
ttggcaaaatctaggggctgcgttcacttaagccaaaaagaggcttatagtttaaacttcanatttccgaacaacggatacaacaactgttacatcatccagcttgcccccagagtaacccagatacccaactgcaagagccgcgtcagagaaggggcttctacaggttgccgatctgcccacttccttcgccctagcaaccaggaactccgcaatctccgaaggcttgaggccggcttccaatgatttggagatgacagctgctatttcttcctcatagacattgtcaaaaaggccatctgttgctgtcacaatggcatctccttcttgtagatcaattgtgtatttctgtacaaggttgaaaggatcatcccccttctcaattttcaagggaaaattgaagcccgaaggcattggctttgatttttgatatatttc

SEQ ID NO: 401792 - DNA, 396 bp, Oryza sativa nipponbare
  unsure (1)..(396): unsure at all n locations
acagcagaaaatggggaaccacgttatantcnacaaatcntcantataatatctacatccatctcatcanatnaaatcanatccagtacaacaagatggcgtatgcaggttgcgcatgcatgcatgaaaatcgagataaaaagggattaattaattattaacatatatatatccatcagtagacttccacattccattgctccgacttcttcagctgcttcttgtagtcaagccagtcgatgccgtcttttgcagcgaggtcgatcatgatgtcgtcgatgcctttctccatgcccttgangccgcacatgtagacctaggtgttgtccttcttgagcagctcccacagctcgtccttgtactcccccatccgcgtctggatgtacatcttctccc

SEQ ID NO: 401793 - DNA, 427 bp, Oryza sativa nipponbare
aaacaagctaatttgagaattagttcacaacaccatatttcattgatcaagttcagaacctgcacagaaatacacactaccggtacagatctcaccctttctccaatactcgtacatccatccaccccggccacaccaatacctacatttataccggacacgtacctacatttactggaccgggtacacacacccacacttttctgcaaagacgcgcatcgtcgtcaacctagctagcttagctgaaggcgatgcgtcgccatggcagcacggcggcggcggcgctcacttgccggggacgaagttggtggcgtaggcccaggcgttgttgttgacggggtcggcgaggtggtcggcgaggttctcgagggggcccttgccggtgacgatggcctggacgaagaagccgaacatggagaacatggcg

SEQ ID NO: 401794 - DNA, 432 bp, Oryza sativa nipponbare
  unsure (1)..(432): unsure at all n locations
atatccatgcanggggcctgggggtgcccttgtgcagatgcatttcatttatacaagtagaaggcactcaaatcagccaccacatgaacacacacatgttccatcatcgatcgatctacacatgcatcacccggtcatgcacttacaaacaaaagatctacttgaagaagtacgggaggtcgagcacgtagaggaggaagtaggcccagaggacgccggagatgccgccgaagaagaagccgccggtgaacttggcccagccgtcggcggtctgcagcttgtcggcctccttcttgcggccggtgagcgtcagcgtcggcgccgtggacggctcgccctcgccgaaggaggcgacgccgtacatggtgaggcagaccctgaggatggcgaccaggcctgcggcgccgagggcgccggcctggccgtgcaccg

SEQ ID NO: 401795 - DNA, 420 bp, Oryza sativa nipponbare
  unsure (1)..(420): unsure at all n locations
ggcagccaatccgaggggagtgtatatagtatagcagttctgcccggggacagtcaatgtgtgtgcttcgttacattataggagtatatatttctgcacctacgcgagcccgtacttggacagtggtcttagttttcgtacactttgcactcgtcggtctccgggttgtccttgcagaagtcctccagtgggtcgccgctgccctgcaccgccgcgccgggccacttgctcgccaccagatgcgccagatcgaccacgcgttggctgtagccccactcgttgtcgtaccaggcgaccaccttgaccatgtcgtcgcccatgaccatggtgagcgaggcgtcnatggtggaggagacgtccgagcagcggaagtcgaccgacaccagcggcacgtcgcaaacgtcgaggatgccgctgagt

SEQ ID NO: 401796 - DNA, 444 bp, Oryza sativa nipponbare
gaaggaaaaattctataacaagggttgaggccttgtatctattcctcttttttctatactagtagaatttcattgcattgagttctttcttagatctagatggagtggaatagagaaatagaaaaaagtcctttcggatgaaaatggaagaatattacgccatatatcccacttggacaaattagaagcaattttctcttatcctcatttgttccttcctttagataaatactcaaaatccccttacaataatgcaatttcgaagggaccttttccctcgtgttgagaaaacttttcttcttccaattcttcttcattcaattcatttcaaaaaattcaattggtactcaaaatacttccattggtatgcgcaagaaataagccaattcggcagctttttgttcaatttctcgtggagtaaaaaacttctcatcagtacgagtc

SEQ ID NO: 401797 - DNA, 438 bp, Oryza sativa nipponbare
gaggaaacttttcctggatttagagaatatactccgtatgttcgttcaaaaaaagaatatactccgtaacaaagtacgtatagataactgaaggcagtgataacacgtcaaaagccattcttgaaacagtctggaatgaggagcgccaatgatttccatatctctgaacagcataccaccaccacctcaagcttcatgactatagattgttaaactgcagatcgaagtccaatgataccgcatccaattcttgctcctgcatttcctggtgttttactgagttcatgaccaccccttcctaggtcatcagaatcagcatgaacaacaactgcccttcccaatatggaatgaggcccgcttagtgaaatctgtaggtcctttatgaagatatctgcaacaccatctttggtggctactatgtttcccaggtcgcccaca

SEQ ID NO: 401798 - DNA, 451 bp, Oryza sativa nipponbare
ataattaattcacaacaccatagggcatgggtcaggttcagaacctgcacagaaatacacactaccggtacagatctcaccctctctccaatactcgtacatccatccacgcggtccacacgaatacgtacatctatacggtacacgtacgtacatctactgcaccgggtacacacacgcacactctcctgcagagacgcgcatcgtcgtcaacctagctagcttagctgaaggcgatgcgtcgccatggcagcacggcggcggcggcgctcacttgccggggacgaagttggtggcgtaggcccaggcgttgttgttgacggggtcggcgaggtggtcggcgaggttctcgagggggcccttgccggtgacgatggcctggacgaagaagccgaacatggagaacatggcgaggcggccgttcttgatcttcttcaccttgagctccgcg

SEQ ID NO: 401799 - DNA, 250 bp, Oryza sativa nipponbare
  unsure (1)..(250): unsure at all n locations
aataaaagggtaaaggcttcataataatattattaaaacattatanctnatgtcttttnatcacactgcgatcaaattattcatcatangcagtacaactcctcgtcaggaaaaaatanaggagatatatttcttgttattacttaatacagcattcacatatatctaaccatcccgtacgtacctaatagtactccacaccttcacatcgatgatcggggacgatatcctcacgtagtacttatacaaa

SEQ ID NO: 401800 - DNA, 391 bp, Oryza sativa nipponbare
  unsure (1)..(391): unsure at all n locations
tgttgaaacgaagaancttggtggtcagtggattcagattccagtttccacttggaacgaanaaacaagcagagtgtagtacatgagagtacaaatgcgattggaatccgcgaaccaatgagcagtgcccttgatgaatcctgatgctatgaacaacgagaagaaagaagaaagaaagaaaaaaagaagaagaatcctatccatgtcgaactttctaatgaaagaggaactgtgaggcctgggcgactgcgtcgtctagccaccggcgaggctcgtccatgaggtcggggctgagcctgaccatgaggacgcagaactccatctcgctgagggcgccgtcgccgtcgaagtcgccctcggcgagcatcccccggaggtcgtcgtcggacat

SEQ ID NO: 401801 - DNA, 422 bp, Oryza sativa nipponbare
tagcaaatcgatccatgccaccgtgcgtggaaatcagttggagcacaaatttacatgttacacccacaccctacacccatgcataataatacatcgtatatacgtacgtacatacatacccctctcgatcacacgcaccatcgatcgtacaaagttgcgtacatacatacgtacacacatatacgcatacgcacgtacatacatacataattaaaaactcgtaattaattaaatacgtagttgatggcatctctaatggaacttgaggctggtgaggatgttgttgtggactggatcagcgaggtgatcaagcaggttctgcacggggccaaccccggtgaagagcgcctggacggagaagcctaggaaggcgagcatggcgagcctgccattcttgatctccttgagcttgagctccttca

SEQ ID NO: 401802 - DNA, 429 bp, Oryza sativa nipponbare
tatcaagtgtagtatatcatcgggatgcgggtacagtgttacatagattaatcacaatgcagtttgattaaacagtgggcatcatcacatcgcattcagaggaaggctatcttagattacagatgaatatgcagacacccagcttggtgttacatacatagactggatttgggtgaaatttaaccggcgagggcgctggtgttgtagactaggagggcgccgccgccgaggagcccggcgagggtcacggcccagatcaaaagcccggtggttccaccaacgtaggtgtcaccggtgggagaccattcctccggcgagtagattgggctgtagccgtcgacgtttgcgccgtacttgtcaacgaattggtacacacccttccccgtgctcttcctgccagatgcatcaatatcgactgacatgccacct

SEQ ID NO: 401803 - DNA, 395 bp, Oryza sativa nipponbare
  unsure (1)..(395): unsure at all n locations
ttataattaattcacaacaccggatttcagtgatcaggttcagaacctgcacanaaatacacactaccggtacagatctcaccctctctccaatactcgtacatccatccacgcggtccacacgaatacgtacatctatacggtacacgtacgtacatctactgcaccgngtacacacacgcacactctcctgcagagacgcgcatcgtcgtcaacctagctagcttagctgaaggcgatgcgtcgccatggcagcacggcggcggcggcgctcacttgccggggacgaagttggtggcgtaggcccaggcgttgttgttgacggggtcggcgaggtggtcggcgaggttctcgagggggcccttgccggtgcccacgcgtccgcggacgcgttg

SEQ ID NO: 401804 - DNA, 293 bp, Oryza sativa nipponbare
ttagcccatatctttatattatgtgattattaacaaaaacttgtcatgcccagctatggcttgggcgcgatctgatacacagaacaaagagaaaacataaaaaggagaaataattaatagcaagcgtcaagcccgcctgcttaaaaggtgtaaaggcagctgccgtcgtcgctcctacccgttgggtctaagttcttggcaacagggtcagtgcaaccttaccgcacaggcaggttacctgcttgctgtgctccttgcccgtagaaggaaccagacttcatggcgtcggagtt

SEQ ID NO: 401805 - DNA, 392 bp, Oryza sativa nipponbare
  unsure (1)..(392): unsure at all n locations
aaagatatatgggcggagcttccatatatttcattcacatatgcctcacccaacaacatatagtcgtagcagataccactcttacatcaagtcagagagagatcaggtgaaacaaaaacaaaagcagagcacggccggtaaaatcaaaagacgatgaacaaactgggaacacacgaaacaaggtgggagacatcatcgaatcagagatgaacaattaaacaaggctatatatgacgatgacggcttatttgccaccagactcctcgcagcccgggggcttgtaggcgatgaagctgatgagctgcacctgcctgacgttgtcgaagccgatgatacggacgaatgcatcagggtacgccttcttggcctnctcgagctccttgagcacctgg

SEQ ID NO: 401806 - DNA, 467 bp, Oryza sativa nipponbare
  unsure (1)..(467): unsure at all n locations
agaattaacattagggggccgggttcattaccaccggtggcagtcaagtccagtccaggtacataactggttacattcctagtgaagattatatacatggaagcaggcacagcttggtctgctgcacttagctaagccagtgcactagtgttgtagacaagaatagcgccgccaactagaattccagcaagagtgattgcccagagaagtaaacctgcctttcctccaacatagacatcaccagttgaagaccattcttctggggtatatattgggctgtacccatcaacatttgctccatacttggtggaaaactggtaaagaccctttcccttggctacccnttcagatgcatcaacaccttccttggacaccactcctncagcaggcccatagggctggggatgtctgaatcttctttggtttctttgccactatgatcaaagatgggcttgccattggccctt

SEQ ID NO: 401807 - DNA, 327 bp, Oryza sativa nipponbare
  unsure (1)..(327): unsure at all n locations
aacagagcgatggatgcnaccatgcgtgcaaatcaattggagcacaaatttacatgttacacccacaccctacacccatgcataataatacatcgtatatacgtacgtacatacatacccctctcgatcacacgcaccatcgatcgtacaaagttgcgtacatacatacgtacacacatatacgcatacgcacgtacatacatacataattaaaaactcgtaattaattaaatacgtagttgatggcatctctaatggaacttgaggctggtgaggatgttgttgtggacgggatcagcgaggtgatcaagcaggttctgcacgggg

SEQ ID NO: 401808 - DNA, 367 bp, Oryza sativa nipponbare
  unsure (1)..(367): unsure at all n locations
ttttgaagaaacaaaanctaaaagttaaagccatcaacagcccgatcgagtttgcattactagatacacacattgcagccttccttccctctctccatgtatcgatatatcaacccggccacgcacaaaacatttgttcattccctactcgagctgcgcgtaccacaccccttggatcttgacatccttgggcaccttggcgcctaggtctgtgtccgacggctgcacgctctcgaagacgccaatcacctcgccggtctctggcttgctcttggtgacgctcaacgtgatgttgcccgtcgacgacgaggcgttcttgacgttctccttagcgagctcctnctcgtctcctctgcctccggcgggg

SEQ ID NO: 401809 - DNA, 220 bp, Oryza sativa nipponbare
  unsure (1)..(220): unsure at all n locations
gatcataangcaaancttcnagggccagagcatcttattactacagcttcttncccatatcctacantancttcttcctcccttgcaaaaagaaacccaaaccttatctacaacgcaacacacacacctgacacagagcgctcgatcgatcgaagcagactagactactatggcgaactactactaggtaagcgacaacacctaggctatacagggatac

SEQ ID NO: 401810 - DNA, 396 bp, Oryza sativa nipponbare
tgaagtgactaattgggcataggggaataaatagacccaccagaagttcatagaaccaactgaacacatggcaaagcctgaagattcagttattaatcgtatacggatacagagcagttgttgcaacatggagaaattaggtcggagtgacaaaatgggaagaaaaaaaacagagaggaagagcctagtgagcgtcttcctcctcgcagtgcttggtgtacttggccgggtccagcacggcgtccagctccgacgggctgctcggcttcaccttgatcatccacccgtcctcgtacgggcttgagttaatcatgccgggtgtctcagagagcttgtcgttaacctcgacgacctcaccggagatgggggaggtgatgtccctggtggccttcacac

SEQ ID NO: 401811 - DNA, 448 bp, Oryza sativa nipponbare
tcgggttcaactgaacttattggagggtaaaacaatgaagcaaaatatcaacaaatatatggttatcccacaaagtctaacaagaaagctcaaatgaacaaggcgaaaagggcaacaatgccagcgttgtcatggtttgtttcctgatcagaatgaaggagaaaatgggggggaaaagagcataggcaaaaacagtacacggtacatcacaaagggcatcgctcctctggagagttatatacaggaaggcgcatcatgctaagttgctactccggtgctctcctatgccagacagacccaagtttttctggtcgttaccaagtcaaggcaacaggagtttatgaagattgcggagtttcttgaaggcggtacattgtgatctcttgctgcttgaagtacctccggtcttcctcgtcaacaagaaccaggttcaggtagtacttgacat

SEQ ID NO: 401812 - DNA, 233 bp, Oryza sativa nipponbare
  unsure (1)..(233): unsure at all n locations
ggtagtaaaanagtgagactctgtgataataatattattaagacattatagcttatgtcttttgatcacactgcgatcaaattatgcatcataggcagtacaactccgggtcaggaaaaagtagaggagatatatttcttggtattacttaatacagcattcacatatatcgaaccatccggtacgtacgtagtagtacttcacgcgtccacatcgacgatcggggacgatat

SEQ ID NO: 401813 - DNA, 295 bp, Oryza sativa nipponbare
  unsure (1)..(295): unsure at all n locations
cacagaaaatcaatccttncatgcagggggaatcaatggatcgacctctctccttaacttgttcttaattctcatgtacaatcaaagaaacacacacgcacacacacatgcgtgcactgcatctctctgagcaacgaactcgattgatttgattttgattcgctagggattaaagagaagctgagatagagatttcgacgatcatgcgacgctgaaggacgtggctgcgctctcgacgaacttnctggcgcccttgaaccacctnttgtggccggcctgcgccttgaagatgtac

SEQ ID NO: 401814 - DNA, 374 bp, Oryza sativa nipponbare
tttgcttaatggcaaaacagaggtgcgaatttacctttatatgcaactgtttacaccaaaaggggaaaaaaacgggtaccttgcaaaaaggagtataactttgcagtttcaagtcccacttcaactacaacccaatctgcattacaggatgggagtctaaaacgactgcagtttcagcgtttttgaggcctgcagagacactgggctcgcgttgcagcaaaagattaggcggcggcgcccacggtggcgccggcggtgagcctcgacgagccgtaaagagtctcctcgaaccggatgatctccttcttggaaccgtaggccacttgagtccgctcgtcgaggttgttgatcaccttgtccagcaccgactgttt

SEQ ID NO: 401815 - DNA, 410 bp, Oryza sativa nipponbare
cagaatcaaattatttggaaagcgaagcatctgcaaaattacatcaaattacaaagttacaacataattggccgcaaaagcctcttccagaattcattggaaatacaagggattacaataaccgtggaaccacgttctaaattctagctcaccttgctaaaagaagcaaagatacagatctgaatgagacagctcaacattgtggtacaatcctctagtagaactagggtacaaaaaaaaatcaaaataatccactcaacactctagttggccaatggtggatttctattttcattgcaagctatcaaagaaaccatggccagcctttgctttcagctcgtggccagcatctttacccatctcaaccatgatatcgaaatcataaggtccagttctcgaagtctcatata

SEQ ID NO: 401816 - DNA, 424 bp, Oryza sativa nipponbare
ccacgcgtccggccgggaggcgagcgcgtgccgttcctcttcaccatcaagaatctggtcgccaccggcaagccggagagcttcggcgggcccttcctcgtgcccagctaccgtggttcgtccttcctcgacccaaagggccgcggtggctctaccggctacgacaacgctgtggcgctccccgccggaggcagaggagacgaggaggagctcgctaaggagaacgtcaagaacgcctcgtcgtcgacgggcaacatcacgttgagcgtcaccaagagcaagccatagaccggcgaggtgattggcgtcttctagagcgtgcagccgtcggacacagacctcggcgccaaggtgcccaaggatgtcaagatccaaggggtgtggtacgcgcaactcgagtagggaatgtacaaatgttttgtgc

SEQ ID NO: 401817 - DNA, 372 bp, Oryza sativa nipponbare
ccacgcgtccgggcacacttgactggagatgtataaagagaggaggatgtgaagaaagaagatatctaccaccaagctaattaagcaaaagaagaagaagaagaaagaagaagaagaagatgcagaccgctgctagcagtgtcgttggattgtcggccgtgttgcccgctgctgtgaaggggcgcagcctgcagattcaggctcctcgccgtgttgcgttgcgcgttcgtgcggcggcggcggcggtggcagtggaggctgcggaggtggactacagctctaacatctcggtgtttccgatggaggcgtgcgacctcatcggcggcgaggcgtgcaacgtgcagatgtacccagaggccaagctctcatcat

SEQ ID NO: 401818 - DNA, 391 bp, Oryza sativa nipponbare
ccacgcgtccgccacgcgtccgcccacgcgtccgcccacgcgtccgcccacgcgtccgaaccgccagagcagtccatctcatcgtcgaatggggagattcaggtgtatccgtcgctgatggcctctccaatctgctgaagtgccgtctatcaaccaccatccgctgtctttcgcaccccagcgcgcatgtccgtgcactcagcatgtccgtccttcgcgacatcttgaacagcggacaaataaactccagtaagctcatccaaggggaacaccggaatggcatccagagcccaacctaccagtgcttggcagcaagcatcatcaactggcaagccgatgtggagagatgcatagagtgggaagcccacagccgccgcgccaccgggctgac

SEQ ID NO: 401819 - DNA, 432 bp, Oryza sativa nipponbare
ccacgcgtccgcccacgcgtccggaagtactcgagcaaagaaggagagagcttggtgagctgcagagatggccccctccgtgatggcgtcgtcggccaccaccgtcgctcccttccaggggctcaagtccaccgccggcatgcccgtcgcccgccgctccggcaactccagcttcggcaacgtcagcaatggcggcaggatcaggtgcatgcaggtgtggccgattgagggcatcaagaagttcgagaccctctcctacctgccaccgctcaccgtggaggacctcctgaagcagatcgagtacctgctccgttccaagtgggtgccctgcctcgagttcagcaaggtcggattcgtctaccgtgagaaccacagatcccccggatactacgatgggaggtactggaccatgtggaagcttgccatggtcgg

SEQ ID NO: 401820 - DNA, 360 bp, Oryza sativa nipponbare
ccacgcgtccgagatcctcgaccagaagttcggcatcatcaaggggacgatgaccaccacccactcctacaccggcgaccagaggctgctcgacgcgagccaccgtgacctccggcgcgcgcgtgcggcggcgctgaacatcgtgccgacgtccaccggcgcggccaaggccgtggcgctggtgctcccgaacctcaaggggaagctcaacgggatcgcgctccgggtgccgacgccgaacgtgtccgtggtcgacctcgtggtgcaggtgtacaagaagaccctcgccgaggaggtgaaccaggcgttccgcgacagcgccgccaacgagctcaagggcattctcgaggtctgcgacgt

SEQ ID NO: 401821 - DNA, 298 bp, Oryza sativa nipponbare
ccacgcgtccgcccacgcgtccgcaccaagttcctgaagccctatgttctcaagatgcatttcacaaacaactttgtgagcgcccaggtcatccacaccccatctgccacggttgcatgctcggcgagttcacaggagaagcttcttaggccaagcatggagtccacacgtgatgtcgccgcggcggcgaagatcgggaagctgcttggcgagcgcctgctgttcagaggcattcctgcggtgtcggtctccatgtcaagggaccagacgtaccatggcagggtcagggccgtcatgg

SEQ ID NO: 401822 - DNA, 208 bp, Oryza sativa nipponbare
ccacgcgtccgtccacacttacttacacgcgtacgtcatcactcacttagctcatgaactcttactccatgtgtgacaagcgcagccactgcgactgtgctgacacgagctattgcgtgaagataggtaccagctatagcagccacatagatgaagccgacaacagccacttagacgaggtctgcaactgcgaggacaactgctgctg

SEQ ID NO: 401823 - DNA, 134 bp, Oryza sativa nipponbare
tcttgaccaccctaagcgtgtcttgtgtagaagtggcctgaggataagacttgacatgatcgggaaataatccagcaatattgtttgctgcccaccagtcttgatcttggatttcttctggctggggaatggtc

SEQ ID NO: 401824 - DNA, 512 bp, Oryza sativa nipponbare
ccacgcgtccgagaaagcataagcaacacaagggattaactcatcactcacttagctaattaaatcttcgaccatgtcggacaagtgcggcaactgcgactgtgctgacaagagccagtgcgtgaagaaaggtaccagctatggcgtcgtcatagttgaagccgagaagagccacttcgaggaggtcgccgccggcgaggagaacggcggctgcaagtgcggcaccagctgctcctgcaccgactgcaagtgcggcaagtgaagtcacgaagcaaccgaacactcgccgccggcgagtcacctaccttaattagtccacaataaaaaccacccatatgagtgtggtttgtgtgtgtgctgattattgctgaattaaacccgtgtgttatcgattaattaagcaactggtcgcttcggcgactatgcgtgtatcaacgtatgaatttgtgtgatgtgatgtacccgtgctattctcagtgaaattaatcaatcgtgtattcgtgtggttgcct

SEQ ID NO: 401825 - DNA, 454 bp, Oryza sativa nipponbare
ccacgcgtccggctgaacaccgcatcagcagcagcaagcagctaatcgcgcacgtacgcacaccgcgacccggggcgagatggcgcagtcgatgctggtgtcgggagccaatggcacggtggccgccgcgagcaccagcaggctgcagcccgtgcggccgacgccgttctcgcggctcgtgctgtcgcagccgtcgtcgtcgctggggcgcgcggtgtccgtcaagacggtggcgctgttcggcaggtccaagaccaaggccgcgcccgcaagaaaggctgagccgaagccaaagttcaagaccgaggacggcatcttcggcacgtccggtgggatcggtttcaccaaggagaacgagctgttcgtcgggcgtgtcgccatgctcgggtttgccgcgtcgatcctgggtgaggccatcaccgggaagggaattctggcgcagctgaacctggag

SEQ ID NO: 401826 - DNA, 394 bp, Oryza sativa nipponbare
  unsure (1)..(394): unsure at all n locations
ccacgcgtccgcggacgcgtgggatctcaagaagtactcgagcaaagaaggagagagcttggtgagctgcagagatggccccctccgtgatggcgtcgtcggccaccaccgtcgctcccttccaggggctcaagtccaccgccggcatgcccgtcgcccgccgctccggcaactccagcttcggcaacgtcancnntggcggcaggatcaggtgcatgcaggtgtggccgattgagggcatcaagaanttcgagaccctctcctacctgccaccgctcaccgtggaggacctcctgaagcagatcgagtacctgctccgttccaagtgggtgccctgcctcgagttcagcaaggtcggattcgtttaccgtgagaaccacagatcccccggata

SEQ ID NO: 401827 - DNA, 378 bp, Oryza sativa nipponbare
  unsure (1)..(378): unsure at all n locations
ccacgcgtccgcaaggatcgtataaagaaggtagcctcaatgaagaaaaagaagtcaagcaaagagatggacacagcagcaaagattgctgcatctgaggccgcagcaaggagcgcgaagcttgcagctgcgaagaagaaagagaagagccattacaaccagcagcctgtgcggtgaattactgcccagattttggatgtcgaaaactcctaatacaatccttgttcgctctggactcacaatagacaatgttggtccactgtacttatgttgacttggggttgtaggaggttccttctgaactgttcatcacaagaaaccttttgaatcttgattccctgcnnnnnaaaaaaaaaaataaataaaaaaaaataaaaa

SEQ ID NO: 401828 - DNA, 270 bp, Oryza sativa nipponbare
ccacgcgtccgcccacgcgtccggggagtgtttatcatttggtacacacatggctctttcctgggaattgacctggctggtgatggtcactctcttgtctcgtactcccagctctcaaactggggccagtgctcctcatgggagggtttcaaggtgtcaccattcacagcaggtgcccgtacattcaacttcgatgtgaacccatgtgattactccagggcgcaaaataaagcacaacccttccctgctgcttgtgccatgaatgtcact

SEQ ID NO: 401829 - DNA, 228 bp, Oryza sativa nipponbare
ccacgcgtccgcccacgcgtccgatcatgttttatcatctaacaataatgaaaatactaattataaaaaaatttcatataagatgaacagttaaacgttagacacggaaattcaggtttatcattttttaggacagagggagtacgaccggaccaatgagcaaatatgttgttttttcaaaaaaaaaaaaaaaaaaaaataaaaaccaaaatggtgcgcgcggtgtgg

SEQ ID NO: 401830 - DNA, 467 bp, Oryza sativa nipponbare
ccacgcgtccgcccacgcgtccgcccacgcgtccgcccacgcgtccgcccacgcgtccgctctactactactagccagtaagctagctaactaactacgtggctatggcccccaccgtgatggcctcctcggccacctccgtggctccattccaagggctcaagtccaccgccgggctccccgtcagccgccgctccaccaactcgggcttcggcaacgtcagcaatggcggaaggatcaagtgcatgcaggtgtggccaattgagggcatcaagaagttcgagaccctatcgtacctgccaccactcaccgtggaggatcttttgaagcagatcgagtacctgcttcgatccaagtgggtgccttgcctcgagttcagcaaggttggattcgtctaccgtgagaaccacaggtttcccgggtactacgatggcaggtattggaccatgtggaagctgcccatgttc

SEQ ID NO: 401831 - DNA, 378 bp, Oryza sativa nipponbare
ccacgcgtccgcccacgcgtccggtactggaccatgtggaagctgcctatgttcggatgcactgatgccacccaggtgctcaaggagctcgaggaggccaagaaggcatatccagatgcatttgttcgcatcatcggcttcgacaacgtcaggcaggtgcagttgattagcttcatcgcctacaagcccccgggttgcgaggagtccggcggaaactaagctagttggcaagccagcaagctcactcgtgagctctatacagaggagactcgattgatctattcggtttggcagctttgaacgttcgaattcggcccaccttgatttgtttccccttttccaagttggtgctttaagtttttttttttcattctggtt

SEQ ID NO: 401832 - DNA, 294 bp, Oryza sativa nipponbare
ccacgcgtccggggagagggcgtacgacatcttctcgcgcctgctcaaggagcggatcgtgctcatccacgggccaatcgccgacgagaccgcctcgctcgtcgtcgcgcagctgctcttcctcgagtcggagaacccgctcaagccggtccacctctacatcaactccccgggcggggtcgtcaccgcggggctcgcgatctacgacaccatgcagaacattccgtgccccgtcaacacgctctgcatcggccaggcccgggtccatgggcttcctcctggttgcccccggcc

SEQ ID NO: 401833 - DNA, 104 bp, Oryza sativa nipponbare
ccacgcgtccgcccacgcgtccgcccacgcgtccgcccacgcgtccgcccacgcgtccgaagcccaagagggctccctccgctttcttcgtgtttatggaggag

SEQ ID NO: 401834 - DNA, 351 bp, Oryza sativa nipponbare
ccacgcgtccgcccacgcgtccggtcaaacttcttcaagttttatcaagtttttttaaaaatatactaatattttcaatacaaaataaacatattattaaaatatattcaatgttaaatttaataaaattaatttatatcccatatgttactatttttttctataaacttagtcaaagctaaaaactttgattaagaaaatagacaaacaatttataatatgaaatgaaacggaaaaagtattactgttgctcagctgagttgttgacaagaatccccctttgtgatttgtgcagcttgaccatgcagccaagatcaagagccccgaagaggcggagaagtactacacgtt

SEQ ID NO: 401835 - DNA, 296 bp, Oryza sativa nipponbare
ccacgcgtccgcaacgccactgcctgaaccaagaacactgccctcctccacacgacatggcttctcaagaagagaagacgagcgtcaagtcggaggaggcctcgtcggcggcggaggagcagccacctcaagctgcagctccgccgccgcgcaggggtgtgccgccggccaaccccttcgacttctcaaccatgatgaacttgctcaatgatccgagcataaaggagatggcggagcatatcgccaaggacccggcgttcacggagatggcggatcagctgcagaagacggtgcag

SEQ ID NO: 401836 - DNA, 297 bp, Oryza sativa nipponbare
ccacgcgtccgcactgatcctgagaagagagacatatatgaccaatatggggaggatgctcttaaggatggaatgggaggaggcagtgacttccataatccatttgacatatttgagcagtttttcgggggtggtgcctttggggggagtagctcaagagtacgcagacagagacgtggtgaagatgtggcgcatactttgaaggtgtctttagaagatgtgtataatggatctatgaagaaactatcattatcacgaaatattctgtgcccaaagagcaaaggaaaagggaccaaa

SEQ ID NO: 401837 - DNA, 291 bp, Oryza sativa nipponbare
ccacgcgtccgcttatctgccttcctccctcctctcgccttccgcctcgcgtgcgctccaccaccgaaaaaaaggacaggttccacataaagaccaacgagtaaaagcttgatctgtccggtgccaaccaatcaacaaacaagtttcatgtctgatctcgacgttcagcttccatctgccttcgatccgtttgctgaggcaaatgctgaggacttcggcgctggccctggaacaaaggattatgtgcatgtgcgcattcagcagcgcaacgggagaaagagtctaactact

SEQ ID NO: 401838 - DNA, 415 bp, Oryza sativa nipponbare
tccgggtcgacccacgcgtccggctactgctataaggagcgcgccgtgcaccgcctctcacaatgtcgaccgccgccgccgccgccgctgaccagagctggtgcttcgccactgtcaccccgcgctcccgcgccacagtcgtcgccagcctcgcctccccatcaccgtcctcctcctgctcctcctccaacagcagcaacctcccggcccccttccgcccccgcctcatccgcaacacccccgtcttcgccgcccccgtcgcccccgccgcgatggacgccgccgtcgaccgcctcaaggatgggttcgccaagttcaagaccgagttctatgacaagaagccggagctcttcgagccgctcaaggccgggcaggcacccaagtacatggtgttctcgggcgccgactttcgcgt

SEQ ID NO: 401839 - DNA, 419 bp, Oryza sativa nipponbare
ccacgcgtccgtctctcgcgccgccgccgccgccgagcgcctggagcagcgtcagccatggccgtaggtaagaacaagcgcatctccaaggggaagaagggatccaagaagaagaccgtcgatccctttgctaagaaggactggtatgatatcaaggccccgtcggtgttcaatgtgcggaacatcggcaagaccctcgtgtccaggacacagggtacaaagattgcttctgagggcctaaagcatagagtgtttgaggtctccttagctgatctccagaacgatgaggatcaggcgtacaggaagatcagacttcgtgctgaggatgtgcaagggaagaacgtgctcaccaacttttggggcatgtcgttaactaaccgatagctcagaacactttgtaaagaagtggcagacacctg

SEQ ID NO: 401840 - DNA, 294 bp, Oryza sativa nipponbare
  unsure (1)..(294): unsure at all n locations
ccacgcgtccggaagatataattgggggacatgtatggttgggtttcatttgtgtatttggcggaatttggcatatcttaaccaaacccttcgcatgggctcgccgtgcatttgtatggtctggagaagcttacttgtcttatagtttaggcgctttatctgtctttggttttatcgcttgttgntttgtctggttcaataatacagcttatcctagtgagtttttattgtcctactgggcttgaattcttttaagttcatgcttttatttttttagttagagttcttcgtctt

SEQ ID NO: 401841 - DNA, 240 bp, Oryza sativa nipponbare
  unsure (1)..(240): unsure at all n locations
ccacgcgtccgcggacgcgtgggcggacgcgtgggcggacgcgtggggaaagcataagcaacacaagggattaactcatcactcacttagctaattaaatcttcgaccatgtcggacaagtgcggcaactgccactgggctgactngnntgctgtgcgtgaagaaaggtaccagctatggcgtcgtcatagttgaagccgagaagagccactttgaggaggtcgcctgcggcgaggagaa

SEQ ID NO: 401842 - DNA, 145 bp, Oryza sativa nipponbare
ccacgcgtccggcggccggccatcatcagtgatcctctacaatcatcgactttcagcaaattaagatggctgctgccttctcctccaccgttggagctccggcgtccactccgaccaacttcctggggaagaagctgaagaagca

SEQ ID NO: 401843 - DNA, 384 bp, Oryza sativa nipponbare
  unsure (1)..(384): unsure at all n locations
ccacgcgtccgcccacgcgtccgtttgcatttcgcacgcagagaagagaaaaaaaaagggaaaaagaaaatgtaccaggcgatcccgtacaacgcgaaccgggcttggccggcggcgagccggccggcgacggtttaattttaggntctcttaagcagtctgagacttttaggaaccatatccagtatgggaaattaaatggttgggttttcgatgactgtggggattgctcggttagccaaggatgcttcgtggacacgaatgatgatccttttgatgttgatgcgtacatgtacagggagaactggggtgggttcatattccgcaaagtgttcataaccctaacatagcaataaatttgcagttttttattcctggtggatg

SEQ ID NO: 401844 - DNA, 406 bp, Oryza sativa nipponbare
ccacgcgtccgcccacgcgtccgcccacgcgtccgcccacgcgtccgcccacgcgtccgcggacgcgtgggcggccaccatggcgctctcctccccggtgatggcccgcgcggcgccgtcgacctcctccgcgctcttcggcgaggcgcggatcaccatgcgcaagaccgccgcgaagcccaagccggcggcgtcgtcggggagcccgtggtacggcgccgaccgcgtcctctacctcggcccgctctccggcgagccgccgagctaccttaccggcgagttcccgggcgactacgggtgggacaccgcggggctctccgtcgacccggagacgttcgtcaagaaccgggagctggaggtgatccactctcggtgggctatgctgggcccgctcggattgcttttt

SEQ ID NO: 401845 - DNA, 380 bp, Oryza sativa nipponbare
  unsure (1)..(380): unsure at all n locations
ccacgcgtccgaggcggngtcgcagatcttcagcgagggcgggctcgactacctcggcaacccgagcctgatccacgcgcagagcatcctcgccatctgggcggtccaggtggtgctcatgggcgccgtcgaggggtaccgcatcgccggcgggccgctcggcgaggtcgtcgacccgctctaccccggcggcagcttcgacccgctcggcctcgccgacgacccggaggccttcgcggagctcaaggtgaaggagatcaagaacggccgcctcgccatgttctccatgttcggcttcttcgtccaggccatcgtcaccggcaagggccccctcgagaacctcgccgaccacctcgccgaccccgtcaacaacaacgcct

SEQ ID NO: 401846 - DNA, 440 bp, Oryza sativa nipponbare
ccacgcgtccgcggacgcgtgggcggacgcgtgggctcgagcaaagaaggagagagcttggtgagctgcagagatggccccctccgtgatggcgtcgtcggccaccaccgtcgctcccttccaggggctcaagtccaccgccggcatgcccgtcgcccgccgctccggcaactccagcttcggcaacgtcagcaatggcggcaggatcaggtgcatgcaggtgtggccgattgagggcatcaagaagttcgagaccctctcctacctgccaccgctcaccgtggaggacctcctgaagcagatcgagtacctgctccgttccaagtgggtgccctgcctcgagttcagcaaggtcggattcgtctaccgggagaaccacaaaatcccccgatactacgatggcaggtactggaccatgtggaaggctgccatgttcgggt

SEQ ID NO: 401847 - DNA, 418 bp, Oryza sativa nipponbare
ccacgcgtccgcccacgcgtccgcccacgcgtccggactcgtgggattggagggaagcgtaggaacactcatcatggaccttgaggagccggctgagtccaagctgatgaggatgaacattctgggagaagccaagtatgcaaaacaaaggggcactcaagcagtcgagacttttaggaaccatatccaggaagggaaactaaatggttgggttctcgatgactgtggggattgctcggttagccaaggatgcctcgtggacacgaatgatgatccttttgatgttgatgcgtacatgtacagggagaactggggtgggtccacattcgccaaagtgtacataaccccaacatagcaataaatatgcagtcttctatccctggtggatgcaaatccatggcaaaggatcttcttgaca

SEQ ID NO: 401848 - DNA, 411 bp, Oryza sativa nipponbare
ccacgcgtccgcagggaggagttcgagcggatgaaggagatcgcgccggagaggttccggctggacttcgcggtgagccgggagcagacgaacgcggcgggggagaagatgtacatccagacgcggatggcggagtacaaggacgagctgtgggagctgctcaagaaggacaacacctacgtctacatgtgcggcctcaagggcatggagaaaggcatcgacgacatcatgatcgacctcgctgcaaaagacggcatcgactggcttgactacaagaagcagctgaagaagtcggagcaatggaatgtggaagtctactgatggatatatatatgttaataattaattaatccctttttatctcgaatttcatgcatgcatgcgcaacctgcatacgccatcttggtggac

SEQ ID NO: 401849 - DNA, 310 bp, Oryza sativa nipponbare
ccacgcgtccgagcagcagtagctgagcttgaagcagcagagcgaggtagacatggccgccgccaccatggccctctcgtccccggcgctggccggcaaggccgccgcgaaggtgttcggcgaggggcgcatcaccatgcgcaagtcggcggcgaagcccaagcccgccgcgtcggggagcccgtggtacggcgccgaccgcgtgctctacctcggcccgctctccggcgagccgccgagctacctgaccggcgagttccccggcgactacgggtgggacaccgcggggctctccgccgacccggagacg

SEQ ID NO: 401850 - DNA, 519 bp, Oryza sativa nipponbare
ccacgcgtccgcatcctcactgagcagaaaatcgttccaggtatcaaggtcgacaagggtcttgtgccccttgctggctccaacaacgagtcatggtgccaaggtctcgacggccttgcctcgcgcgaggcggcatactaccagcagggcgctcgcttcgccaagtggcgcactgttgtcagcatccccaacggcccatctgaactcgccgtgaaggaggctgcctggggccttgcccgctacgccgccatttctcaggacaacgggctggtgccgattgtcgagcctgagatcctcctcgacggtgagcatggcatcgacaggaccttcgaggtggcgcagaaggtgtgggcggagaccttcttctacatggccgagaacaatgtgatgttcgagggcatcctcctcaagccaagcatggtgacacccggtgccgagtgcaaggacagggccacccctgagcaagtatctgactacacccttaagcttcttcacagaaagattccccctgccgtcccg

SEQ ID NO: 401851 - DNA, 467 bp, Oryza sativa nipponbare
ccacgcgtccgcttcaaggccgacgtcaagatcgtcgacgaccagaccatcagcgtcgacggcaagctgatcaaggtcgtctccaacagggaccccctcaagctgccatgggctgagctcggcatcgacattgtcatcgagggtaccggagtgttcgtcgacggccccggcgccgggaagcacatccaggccggcgcgaagaaggtcatcatcactgctccggcgaagggtgctgacatccctacctacgtcctcggtgtcaacgagggagactactcccacgaagtggccaacattatcagcaatgctttctgcacaaccaactgcctcgctccgttcgtcaagatcttggacgaagagttcggaatcgtaaagggaaccatgaccacaactcactcctacaccggcgaccagaggttgctggacgcgtcgcaccgtgacctgaggagggcccgggcggcggcgct

SEQ ID NO: 401852 - DNA, 467 bp, Oryza sativa nipponbare
ccacgcgtccgcccacgcgtccgcccacgcgtccgcgcagaaatccgcatcaacagccagccatggcgtccacgctgaccaacgtcggcctgtctaccccggcggcggcggcgtcgtccctcgttaggccggtcgccggagctggacgcgtggtgtttccccgtgttggccgcggcgggttcgcggcggtgagggcgagcgggccggcgacgccgccggacatctcggacaagatgtcggagagcatcgacaaggcgaaggaggcgtgcgcggaggacacggcgagcggcgagtgcgcggcggcgtgggacgaggtggaggagctgagcgcggcggcgagccacgcgcgcgacaagctcaaggagacctccgacccgctcgaggcctactgcaaggacaacccggagaccgacgagtgccgcacctacgacaactgattcttaccattatatgtttgctaatctctc

SEQ ID NO: 401853 - DNA, 278 bp, Oryza sativa nipponbare
  unsure (1)..(278): unsure at all n locations
aatcttcgaccatgtcggacaagtgcggcaactgcgactgtgctgacaagagccagtgcgtgaagaaaggaccagctatggcgtcgtcatagttgaagccgagaagagccacttcgaggaggtcgccgccggcgaggagaacggcggctgcaagtgcggcaccagctgctcctgcaccgactgcaagtgcggcaagtgaagtcacgaagcaaccgaacactcgccgccggcgagtcacctaccttaattagtccacaatanaaaccacccatatgagt

SEQ ID NO: 401854 - DNA, 206 bp, Oryza sativa nipponbare
ccacgcgtccgcccacgcgtccgcccacgcgtccgcagagccactgagaagattccctaccctgcaagctgcgattgcaactgctgctaatgaagctctggaaaggtttcgggaggatggacgtagcactgcactttggcttgttgacatggaggcatatttgacagtggaattcttccggaaactttcgcaagatccagattgtg

SEQ ID NO: 401855 - DNA, 411 bp, Oryza sativa nipponbare
ccacgcgtccggtctccactcacacgcattgcagaggagaggcgacaatggaggggaaggaggaggacgtgcggctgggggcgaacaggtactcggagaggcagccgatagggacggcggcgcagggcgccggggacgacaaggactacaaggagccgccgccggcgccgctgttcgagccaggggagctcaagtcgtggtctttctaccgggccgggatcgccgagttcgtcgccaccttcctcttcctctacatcaccatcctcaccgtcatgggggtctccaagtcctcctccaagtgcgccaccgtcggcatccagggcatctcctggtccttcggaggcatgatctttgcgctcgtctactgcaccgccggcatctccggaggacacattaacccagcaggtactt

SEQ ID NO: 401856 - DNA, 408 bp, Oryza sativa nipponbare
ccacgcgtccgcgaggactaccgctcgccggcggtgcccgccctcaccaagaccctcctcgaggacgtcaagcagatcttcaagaccaccaccggcacccccttcctcttccccaccaccgggacgggggcgtgggagagcgcgctgacgaacacgctgtcgccgggggacaagatcgtgtcgttcctgatcgggcagttcagcctgctgtggatcgaccagcagcaacgcctcaacttcaacgtggacgtggtggagagcgactggggctacggcgccgacctcgccgccctcgactacaagctccgccaggacccctcccactccatcaaggccatctgcatcgtccacaacgagaccgccactggagtcaccaacgacctttccgtcgtccgcaaaattcttgac

SEQ ID NO: 401857 - DNA, 314 bp, Oryza sativa nipponbare
ccacgcgtccgaaggccctggagggcgacatggccaccgacaacagcagcagcctcgccctcgccgaggtgttccgcgcgccgctccgccccgacgtggtccgcttcgtccacaggctgctctcctgcaacaagcgccagccctacgccgtgtcccgccgcgccggccaccagacctcggcggagtcgtggggcacggggcgcgccgtgtcgcgtatcccccgcgtccccggcggcgggacgcaccgcgccgggcagggagccttcggcaacatgtgccgcggcgggcgcatgttcgcgccgaccaagacatgg

SEQ ID NO: 401858 - DNA, 431 bp, Oryza sativa nipponbare
ccacgcgtccgcccacgcgtccggcagcttgatcggctcgggataggacagctgcattggtctactgctaactatgcacctctgcaggagcgtgctctttgggatggtctagttgagatgtatgaaaagggtttggttcgtgctgtcggcgtcagcaattatgggcccaagcagcttctgaagatccacagccatctatcatctagaggtgttccattgagctcagctcaggttcagttctcactactgagcatgggggatgagcagatggagctgaaaactgtgtgtgattctttgggcattcgtctgattgcttatagtccacttggattaggaatgctgacaggaaagtatactacttttaaccttccaagtggaccaaggtctgtggttgtcccgcaaattcttcctgggttggaatctctgctgac

SEQ ID NO: 401859 - DNA, 329 bp, Oryza sativa nipponbare
  unsure (1)..(329): unsure at all n locations
ccacgcgtccgcgccgccgtgccgccacaaccttcctctgccgtgtcggccctggcaagccttccaaggacaccggcgcggatgacgagccgaagaagaggtcgttcttcgccgatttcggtaagctctcggatggaaggtcgctgataccggccttcccgccggccgcggctgggtctctgttcgccggcgggagggggaggaaggacccgcagacagtgttcgtcgcgggcgccacggngcaggcgggagttcgcatcgcgcagacgctgctgcggcaggggttcgccgtgcgcgccggggtgccggacctcgcgtncgccaggagc

SEQ ID NO: 401860 - DNA, 264 bp, Oryza sativa nipponbare
ccacgcgtccggttgatgagctgaaggaagttgctgaaaagtacaatgtcgaggcaatgccgaccttcctattcatcaaggatggtgctgaggctgacaaggtcgttggcgccaggaaggatgacctccagaacaccatcgtgaagcacgtcggtgccactgctgcatctgcttctgcctaagaattctcgcaggcgcaagttatcaaataagggccagcacctggtgttgtagtacgtattagcgttagtcatcgttatcgtc

SEQ ID NO: 401861 - DNA, 315 bp, Oryza sativa nipponbare
ccacgcgtccgcccacgcgtccgatcactcttcacccgccgcgccgcgaactccggaaccgaacgccacacgcgccttcctctcacttaatccgccatgcttcctcctagggttgccccctcctctctggccgccgccgccgccgcggcgcctacctatctcgccgccgcggcctcgacccctgcttccgtctggctgcctgtgccgcgtggagccggagccgtggcagtgtgcagggccgccgggaaagggaaggaggtgctcagcggcgtggtcttccagccattcgaggagctcaagggggagctctccctc

SEQ ID NO: 401862 - DNA, 487 bp, Oryza sativa nipponbare
ccacgcgtccgcccacgcgtccgcccacgcgtccggttggaaagactgaagagcaggtgaaagctttaggaattccctaccgtgttggcaaatttccgctgttggcaaacagccgtgcaaaggccattgacgatgctgagggcttggtgaaggtggtggctgagaaggaaactgacaagattctgggcgtgcatatcatggctcccggtgctggagagataatacatgaggctgtccttgctttgcagtatggagcatcaagtgaggacatagctcgtacatgccacgctcatcccaccgtgagcgaagccttgaaggaggcctgcctgcaaaccttcacaaaggcgattcacatttaagttctgttttgcttttaacatccaaactgcttggcttcacaaattccaaaattttgtaatatatttggatatatgggatcaaaaagccactgtctgtcattttactcttgctcgtgatgctgtgaatt

SEQ ID NO: 401863 - DNA, 420 bp, Oryza sativa nipponbare
ccacgcgtccgattctggtgacatcgggcgcttccacccagatggctgccttgaaatcattgaccgtaaaaaggatattgtgaagcttcaacatggtgaatatgtgtctctcgggaaggtggaggctgctctgattgtgagcccatatgtggagaacatcatgatccatgctgatcctttccacagttactgtgttgcacttgtggtagctgcacacaatgagctggaaaactgggcttcgcagcagggagttacatacaccgatttcgtagatttgtgccagaagccagaggctgttaaagaagtgcttggatctctatcaaaggctgcgaagcaagcgcgactggagaagtttgagatcccggccagatcaacctgatatctgagccatggaccccggagtttggccttgtcactgct

SEQ ID NO: 401864 - DNA, 169 bp, Oryza sativa nipponbare
ccacgcgtccgcggacgcgtgggttctgcttcgacccgctgggcctcgccaccgcgccggagaacttttagcggttcaaggagtcggaggtgtaccactgccggtgggccatgctcgctgcgcctggggtgttggagccggatgcactggcgctgtgcaactgaatgca

SEQ ID NO: 401865 - DNA, 427 bp, Oryza sativa nipponbare
ccacgcgtccgcacacaccccaccagcagcagcagcagtagctgagcttgaagcagcagagcgaggtagacatggccgccgccaccatggccctctcgtccccggcgctggccggcaaggccgccgcgaaggtgttcggcgaggggcgcatcaccatgcgcaagtcggcggcgaagcccaagcccgccgcgtcggggagcccgtggtacggcgccgaccgcgtgctctacctcggcccgctctccggcgagccgccgagctacctgaccggcgagttccccggcgactacgggtgggacaccgcggggctcttcgccgacccggagacgttcggcaagaaccgggagctggaggtgatccactccaggtgggcgatgctcggcgcgctgggctgtgtgttcccggagcttctcgcccgtaacggcgt

SEQ ID NO: 401866 - DNA, 403 bp, Oryza sativa nipponbare
ccacgcgtccgcccacgcgtccgcccacgcgtccggtactcgagcaaagaaggagagagcttggtgagctgcagagatggccccctccgtgatggcgtcgtcggccaccaccgtcgctcccttccaggggctcaagtccaccgccggcatgcccgtcgcccgccgctccggcaactccagcttcggcaacgtcagcaatggcggcaggatcaggtgcatgcaggtgtggccgattgagggcatcaagaagttcgagaccctctcctacctgccaccgctcaccgtggaggacctcctgaagcagatcgagtacctgctccgttccaagtgggtgccctgcctcgagttcagcaaggtcggattcgtctaccgtgagaaccacagatcccccggatactacgat

SEQ ID NO: 401867 - DNA, 399 bp, Oryza sativa nipponbare
ccacgcgtccgcccacgcgtccgctgctataaggagcgcgccgtgcaccgcctctcacaatgtcgaccgccgccgccgccgccgctgcccagagctggtgcttcgccactgtcaccccgcgctcccgcgccacagtcgtcgccagcctcgcctccccatcaccgtcctcctcctcctcctcctccaacagcagcaacctcccggcccccttccgcccccgccttatccgcaacacccccgtcttcgccgcccccgtcgcccccgccgcgatggacgccgtcgtcgaccgcctcaaggatgggttcgccaagttcaagaccgagttctatgacaagaagccggagctcttcgagccgctcaaggccggtcaggcacccaagtacatgggggttctcgtgc

SEQ ID NO: 401868 - DNA, 522 bp, Oryza sativa nipponbare
ccacgcgtccgcggacgcgtgggcggcgagccgccgagctacctgaccggcgagttccccggcgactacgggtgggacaccgcggggctctccgccgacccggagacgttcgccaagaaccgggagctggaggtgatccactccaggtgggcgatgctcggcgcgctgggctgcgtgttcccggagctcctcgcccgcaacggcgtcaagttcggcgaggcggtgtggttcaaggcggggtcgcagatcttcagcgagggcgggctcgactacctcggcaacccgagcctgatccacgcgcagagcatcctcgccatctgggcggtccaggtggtgctcatgggcgccgtcgaggggtaccgcatcgccggcgggccgctcggcgaggtcgtcgacccgctctaccccggcgggagcttcgacccgctcggcctcgccgacgacccggaggcctttggggagctcaaggtgaaggagatcaagaacggccgcctcgccatgttcttcatgttcgggtttttc

SEQ ID NO: 401869 - DNA, 333 bp, Oryza sativa nipponbare
ccacgcgtccggaaaaaggttattccatatattgcaagtcatttccgcagggataagatatggttgcgccgaactaaacctaataaacgtaattaccaagtggttattgctgtggacgactcacggagtatgtccgagggcaagtgtggaaaagtggctattgaagcattagttacagtctgccgggccatgtcacaacttgaggttggacagtttgcagttgcaagtttcgggaaaaagggaaatgtcaaagtgctacatgatttcgatcaggtcttcaatggagaagcaggaacgaatatgatttctagtttgtcctttgagcaagacaac

SEQ ID NO: 401870 - DNA, 398 bp, Oryza sativa nipponbare
ccacgcgtccggttagtcttagcgaatccagcagcagaagcagcagcagcagctcagccgccgccgatggcgtccacgatcatggccccaacctcccgcgtcctcgccgccaagacccccttcctcggccatccccgcccctccaatgcccccgtccgcgacatcgccgccgccgccaccggccgcatcaccatgagcaaggagctgtggtacgggccggatagggtgaagtacctggggccattctcggcgcagacgccgtcgtacctgaggggcgagttcccgggcgactacgggtgggacacggcggggctctccgcggacccggaggcgttcgcgaggaacagggcgctggaggtgatcccacggccggtgggcgatgctcggcgcgctgggct

SEQ ID NO: 401871 - DNA, 199 bp, Oryza sativa nipponbare
ccacgcgtccgcccacgcgtccgcccacgcgtccgtcctcaacccggacgacatcgccggagaccaagacgaagacgacacccacaactgaatgcaacaacaaaattcacaaccacagattctccacatctcattttgtgatcaaattgcatctcaaactgcaccgatcttgttatactagtaacaaatcttgatttgg

SEQ ID NO: 401872 - DNA, 337 bp, Oryza sativa nipponbare
ccacgcgtccgcccacgcgtccgcaaaaaaccaacccaaccgccgccgcatcgccctcgttagaacgatggccgcgtcggcgctgcaccagaccaccagcttcctcggcaccgcccctcgccgggatgagctcgtccgccgcgtcggcgactccggtggccgcatcaccatgcgccgcaccgtcaagagcgcgccccagagcatctggtatggacctgaccgtcccaagtacctgggcccgttctcggagcagacgccatcgtacctgaccggagagttcccgggagactacgggtgggacacggcggggctatcgggcgacccggagacgttcgcg

SEQ ID NO: 401873 - DNA, 451 bp, Oryza sativa nipponbare
  unsure (1)..(451): unsure at all n locations
ccacgcgtccgctcgcaaatccatctccgagggggggctcgactacctgaggaaccccaacctggtgcacgcgcacagcatcctcggcatctgggcggtacacgtggtgctgatgggattcgtcaagggctaccgcgtagggcgaggctcgctcggcgagggcctcgacaagagtgccacacgcaaggccttcgcacccgctcgggctagacgacgaccctgacaccnttgccgagctcaaggtgaaggagctcaagaacggccatctcgccatgtactccatgttcggcttcttcgaccaggccatcgtcaccggcaagggccccatcgagaacctgttcgaccacgtcgccgacctcgtcgtcaacaacgactgggcatactccatcaacttcgatcccgggaagtgagcacaacgacacgatcgagatggtgccaaccaaacgtacca

SEQ ID NO: 401874 - DNA, 464 bp, Oryza sativa nipponbare
ccacgcgtccgcggacgcgtgggcgccaccaaaaaaatccccaattccgccgtcgtcttcgtcgccgtcgccgcgaggatgtctgggcgcgggaagggagggaagggcctgggcaagggaggcgcgaagcgccaccggaaggtgctccgcgacaacatccaggggatcacgaagccggcgatccggaggctggcgaggaggggcggggtgaagcgcatctcggggctcatctacgaggagacccgcggggtgctcaagatcttcctcgagaacgtcatccgcgacgccgtcacctacaccgagcacgcccgccgcaagaccgtcaccgtcatggacgtcgtctacgcgctcaagcgccagggccgcaccctctacggcttcggcggctaggctccccccaaatatttctctctcttcctgtccagggcgtccgtgttggttgccctgtgtagattggtgatttc

SEQ ID NO: 401875 - DNA, 366 bp, Oryza sativa nipponbare
  unsure (1)..(366): unsure at all n locations
ccacgcgtccgcgctgccgtcgctggccggcgccgcaccggcggcgaggaagaggagcggcgtgacgtacgtggaggggatgaacgcgtacagcgggctcaaggcgctcaacaaggtgaccctgctcggcgtgcgcaagaccgccgactactcgttcgccaaggtggtggccaagctgagccccgccggcgggaagagccgcggcggcgcgttcggggcgcagtgcaacgccgncggtgagatattcaggatcgccgtcatcatgaacgggctcgtgctcgtcggcgtcgccgtcggcttcgtgctgctccgggtggaggcggccgtcgaggagtcggagtagtggaccccgatcgagccatagca

SEQ ID NO: 401876 - DNA, 350 bp, Oryza sativa nipponbare
ccacgcgtccgctgattgctcgctcgctcgctcgctgcgtcgccgcactttctccacagatttttctgctgctgttgcttcgtcgcctcgcccgcggattccgtactactaccggagggtttggttggttgatttggtttggtttagccatggccgggagagggaaggcgatcggctcgggcgccgccaagaaggccatgtcgcggagctccaaggccgggctccagttccccgtgggcaggatcgcccggttcttgaaggccggcaagtacgccgagagggtcggcgccggcgccccggtctacctcgccgccgtcctcgagtacctcgccgctgaggttcttgagctc

SEQ ID NO: 401877 - DNA, 401 bp, Oryza sativa nipponbare
cgacccacgcgtccggcgagctgcagagatggccctctacgtgatggcgtagtcggccaccagagtcaatgactttcacaggctcaagtacactcgcggatgcccgtcatccgtcgctccggcaactccagcttcggcaacgtcagcaatggcggcaggatcaggtgcatgcaggtgtggccgattgagggcatcaagaagttcgagaccctctcctacctgccaccgctcaccgtggaggacctcctgaagcagatcgagtacctgctccgttccaagtgggtgccctgcctcgagttcagcaaggtcggattcgtctaccgtgagaaccacagatcccccggatactacgatggcaggtactggaccatgtggaaagctgccatgttcgggtgcactga

SEQ ID NO: 401878 - DNA, 415 bp, Oryza sativa nipponbare
ccacgcgtccggcgagacgaacacgagagaaagacgaagaaaaataaaaacctccaaaaaaaagaaaaaaaagggagaaaaaacgccgcgggttggattaaagagccgccgccgccgccgccgccgaagtccgcaggtgcgaggacgccgacgagtctccagagagcagggtaagacaagatgaacaggaagccaggagactgggactgcagggcgtgccagcacctcaacttcagccgccgggacctatgccagcgctgcggcgagccgcgtggcgccgctgatcgcggcagcggtggtggcggtgactacgccaacttcggcggccgtggtggttcctccttcggtggaggctttggcactggctctgatgtccgcccaggtgactggtactgcaactgcggcgcgcacaact

SEQ ID NO: 401879 - DNA, 332 bp, Oryza sativa nipponbare
  unsure (1)..(332): unsure at all n locations
ccacgcgtccgggcacggagagcttcaccaaggtggaagctctgaagtaccagctgaccctaatgatgaattgactgaagctgataagatgggagaagaagggaacctgcaaggcgactatgatcacctcaccccagctgagaggcgttacatggagcagaagcagaagattgacatgcataagctagccaaagtagccaacaagtcacacagggaccgcatccaggacttcaaccaatacctggcaaatcttagcgagcactacgacatcccaaaagttggccctggttaactntgcctattcagagcttcgcaggaatgcttnctatgct

SEQ ID NO: 401880 - DNA, 396 bp, Oryza sativa nipponbare
ccacgcgtccgcccacgcgtccgctctcaggcaggcaatcagcggcgaggcaccagcccaccggccggcaatggcgtccacctcctgcttcctccaccagtccacggcccgcgtcgccgcgcgcgtcgcctccccgtccccggcgacacggacccacctcctcgtctgccgcgcccagaagcaggacgacgccgacgtctcccgccgcgcggcgctcgcgctgctggccggagcgacggcggcggtgggggtgaaggtggcgcccgccgccgcggcctacggcgaggcggcgaacgtgttcgggaagcccaagacgaacacggagttcatcgcctacagcggcgaggggttcaagctgctgatcccgtccaagtggaaccccaacaaggagcgcga

SEQ ID NO: 401881 - DNA, 283 bp, Oryza sativa nipponbare
ccacgcgtccgcccacgcgtccgcaccttcccatcaactacgttctcgtagtcgtcctcggcctcggcgtaaaggcggtcgcattggcgtccgtgctggccaacttgaacctcgtgctcttcctcctcgcctacatcttcttgaaaggcgtccacaagcgcaccggcggtttccttctgtccgccgagagcttccgtggctggggcgagctcatcagcctcgcgctgccgagctgcgtgagcgtctgcctcgagtggtggtggtacgagatcatgatcctgct

SEQ ID NO: 401882 - DNA, 368 bp, Oryza sativa nipponbare
  unsure (1)..(368): unsure at all n locations
ccgacatcagcatctagtataggcccgatccgcaccgaggaatcaaggaagctcacaggcgtattgaggcttggtggagtgcgcttgcatgattggctcccgtgcacccaaccttctggctgtctcgctttttcgctgacatgtggatgctcttcccgaacgaagaggagtatattgagtggttcaaaaaggcagggttcaaggatgtcaagctcaaaaggattggaccaaaatggtaccgtggtgtccgaaggcatggcctgattatgggatgctctgtgacgggcgtcaaaagagaacatggagactcccctttgcagcttggtccaaaggttgaggatgtcagcanacctgtgaatcctatcacc

SEQ ID NO: 401883 - DNA, 332 bp, Oryza sativa nipponbare
ccacgcgtccgccaaaatctccccctccgatttcgcgcggctgcggtggtggtgcgtgtgctgctgccactgacgttgcggcgggagaccgtgatgttaagttctgcacaaggacaactttaagcgacaatgctatcacaaatgcgatagatatacacagatctgcaagtggaagcttgcgtgttaccgtgtccaacaatgattgtggtgttcgtgaatttgacatggaaacatttcagctcttgaaccacttcagttataactggccaggaaatcacacatctgtgagccctgataggaaacttctggcagtagttggagatgatcgggat

SEQ ID NO: 401884 - DNA, 395 bp, Oryza sativa nipponbare
ccacgcgtccgccacgcgtccgggcgtcggagaaggaggcggcgctcgccgccgtgcccaacgacaaccccaccatatttgacaagatcatcaagaaggaaataccttccactgtggtatttgacgatgagaaggttctggctttcagagacataaatcctcaagctccgacccacattgtgatcattcccaaagtgaaggatggattaactggcctatcaaaggcagaagagaggcatgtagaaatactcggttacctcctctatgttgccaaagttgttgcaaagcaggagggacttgaagatggctaccgtattgtcatcaatgatggccccagtggatgccaaatctgttaccacatacatgtacatcttctcggaggcaggcagatgaac

SEQ ID NO: 401885 - DNA, 492 bp, Oryza sativa nipponbare
ccacgcgtccgcccacgcgtccgcggacgcgtgggtccagccttgtcagctcaactgtctgagccagcaggacttgttgaagtgggagatggaaggcttcttgtagcagatacaaacaatagcacaatcaggtatatagttttgaatgagaaaggcgctgaggtgcgcacgctagatttgattggagttcagccaccatcaccaaaaccaaagacattgaaacgcctaagaagacgtctatcagcagacacggatgttattaacattgatggtggttcttcaattgaaggatatttgtctctagcaatctctgtccctgatggttaccatttctccaaggaagctcgaagtaaatttgatgtggacatagaaccagctgatgcaattgagatagagccagttaatggttttctaaactcaggacaggcattactcaagtacagaaggaaatctttatcgtcatcaacgggaaggatcaattgcaagggttac

SEQ ID NO: 401886 - DNA, 490 bp, Oryza sativa nipponbare
tgcaggaaactggaaatagatacaacagcagaaaaggatatacctctgcttcccgggttacgatatggaaagatttttacgttacagacatacaagttacagacaagcagttttcatatgcttgaacatctaatgtcagcggtagcacattaaccaaaagtaaagtaaaaatcacatcttgggagcaagccccgtatcatgcttgggaacatcagctaatatcagtcttaaatcacatctcaggaaactggccggcaagtcatcctttcctactcgctgatcctacagcagctgcttgcagtgacagtcatggtgtggccttgtcagcaagtgagtgggcagccgagctccttcgccgccgcggtgaggaaggcgagcgtcagcccggtggcgcggcggctgtgggcttcccactctatgcatctctccacatcggcttgccagttgatgatgcttgctgccaagcactggtaggttgggctctggatgc

SEQ ID NO: 401887 - DNA, 444 bp, Oryza sativa nipponbare
aaaaaatatatagccggagcttccatatatttcattgggatatggctcacccaacaacatataggcgtagcagataccactcttacatcaagtcagagagagatcaggtgaaacaaaaacaaaagcagagcacggccggtaaaatcaaaagacgatgaacaaactgggaacacacgaaacaaggtgggagacatcatcgaatcagagatgaacaattaaacaaggctatatatgacgatgacggcttagttgccaccagactcctcgcagcccgggggcttgtaggcgatgaagctgatgagctgcacctgcctgacgttgtcgaagccgatgatacggacgaatgcatcagggtacgccttcttggcctcctcgagctccttgagcacctgggtggcgtcagtgcacccgaacatgggcagcttccacatggtccagtacctg

SEQ ID NO: 401888 - DNA, 479 bp, Oryza sativa nipponbare
ttggtcccaagcaacatgctgaaattctataccagaacctggcaaccggtgtccggtagtagatacggtattacacatgaacattacacagcattgcgatttcaattgcgcggaagtcgataataatccgtgccggacagtgaaaagtcagatgaggtggggaagaaaagcaaagaaagaaacaagaaactgtgttgggcgctcgaaacttcgaaattctcattacaaaggatcgagaggaagaaggaagaagtctggggaaaatttttggagcgaggtggagttacaaaggcagcagcagcagcagcttctacgttctcacttccactggttggcgacgatgtcggcgaggtcgacgaccctctgcgagtatccccactcgttgtcgtaccaggcgatgaccttcaccatgtcgtcgcccatgaccatgctgagcgacgcgtcgatggtgcacgacacgtcggagcacctgaagtcga

SEQ ID NO: 401889 - DNA, 432 bp, Oryza sativa nipponbare
  unsure (1)..(432): unsure at all n locations
tgattaatttcactgagaatagcacgggtacatcacatcacacaaatggatacggtgatacacgcatagtcgccgaagcgaccanctgcttaattaatcgataacacacgggtttaattcagcaataatcagcacacacacaaaccacactcatatgggtggtttttattgtggactaattaaggtaggtgactcgccggcggcgagtgttcggttgcttcgtgacttcacttgccgcacttgcagtcggtgcaggagcagctggtgccgcacttgcagccgccgttctcctcgccggcggcgacctcctcgaagtggctcttctcggcttcaactatgacgacgccatagctggtacctttcttcacgcactggctcttgtcagcacagtcccagttgccgcacttgtccgacatggtccaagatttaatt

SEQ ID NO: 401890 - DNA, 326 bp, Oryza sativa nipponbare
  unsure (1)..(326): unsure at all n locations
aaaaaacaaggaaacatttttatttcnagggaaggacgcgggactgaggaaacttaaaagtgtccctgatgtgtttcatcatccgttctgtcactcacanaatggacttcaaaatacagaccccagatcaagtgtggtgttcaaccaaaatgttaactggcgaatggaaggtggcgtggttttctagaaactgcagatttgtacagaccaatccccagacagaagaaatacaagatcaagactggtgggcagcaaacaaattttgctgggatttatttgccccgattcatcgtccaagttcttcataccttcagggccaacttctt

SEQ ID NO: 401891 - DNA, 419 bp, Oryza sativa nipponbare
  unsure (1)..(419): unsure at all n locations
ttaggcaaaccacacgaatacacgattgattaatttcactgagaatagcacgggtgcatcggatcacacaaattcatacgttgatacacgcatagtcgccgaacgaccagctgcttaattaatcgataacacacgggtttaattcagcaataatcagcacacacacaaaccacactcatatgggtggttnttattgtggactaattaaggtaggtgactcgccggcggcgagtgttcggttgcttcgtgacttcacttgccgcacttgcagtcggtgcaggagcagctggtgccgcacttgcagccgccgttctcctcgccggcggcgacctcctcgaagtggctcttctcggcttcaactatgacgacgccatagctggtacctttcttcacgcactggctcttgtcagcacagtcgc

SEQ ID NO: 401892 - DNA, 449 bp, Oryza sativa nipponbare
  unsure (1)..(449): unsure at all n locations
ttttctccatgggcattaattaacaactaattaaacaaggtacgtctgtgcacctacacntacacaggacatatacacttgaaagaaagtctaatgatgcgcaagcacaacaatggcggcgaaacctcggtagatcgatcgatcctcgtaattctactcttcgtcgtcgtcgctgacgaacttgccggtgccggggttgatggcggcgatgaagaagaagacgacgttgaagaggacgagcggctcgatctcgttgatggggacgccggtctcgatgttgagctgcgcgagggcgcccttgccggtgatgatctcgccgatgatggagaaggcgatgccgagctgcgcgagccggccgacgaacagctcgttggccttggtgaagccgaacagcgggccgccctcgctgaggcccagcgcggagcggaagcccttgcccggggcgatga

SEQ ID NO: 401893 - DNA, 347 bp, Oryza sativa nipponbare
  unsure (1)..(347): unsure at all n locations
catgcacgccgtacgtaaggcttggatgctctanaaacagccnnccctttttttttttttttttttttttnttttttntttatataagccccgagctctccatatantttcattcgagatatgggctcancccaacaacatatgaggcctagcagataccactcttacatcaagtcagagagagatcaggtgaaacaaaaacaaaagcagagcacggccggtaaaatcaaaagacgatgaacaaactgggaacacactaaacaaggtgggagacatcatctaatcagagatgaacaattaaacaaggctatatattactatgactgcttagttgccaccagactcct

SEQ ID NO: 401894 - DNA, 357 bp, Oryza sativa nipponbare
ggagcaggcaaacatgctggctttgcagcacattcacaaataacaatcttagttacaatgaataaatgcggtctgtgtcgctgcctgattatgagttctatagagtacctaagttcgctgcatagtcatgttcgcaaacattctctcaacaaagaacgagagcctttggaactcgagaaaaaataatgtttgtgctacatcaggtgttggttcctcgtgacataactagaaatctaaaacactgatgactagcatctaatcttccttctgctttcctgattgttttctggcacgggctgtcaagcaccgccccacaaatttaaggacctcgtccatgagaaccactgggaaagcaac

SEQ ID NO: 401895 - DNA, 473 bp, Oryza sativa nipponbare
acgtgataccatccattttttttattggcgacgaatttatcagatatgctctaggtacatggcttgtgtgtatatagccggagctttgttttcacatatctacccaacgataattgtagtactcttacaataaaaccggccggagagggagggaagagattattacatatgtgttaagagcagaggccattgagatggtacataaccaaactgtaaaataaaaatatatagcatattatatattgatatatcatcaacatagcccaaaacaaagctgcatactattattataggcagcaatccaccagcgcgatgcttgatcttagcttagttgccaccagactcctcgcaacctgggggcttgtaggcgatgaagctaatcaactgcacctgcctgacgttgtcgaagccgatgatacggacaaaggcatcggggtaggccttcttggcctcctcgagctccttgagcacct

SEQ ID NO: 401896 - DNA, 429 bp, Oryza sativa nipponbare
gaaatggaaaccagaggtatcaagtttggtctgagtatagtattacgtagtaaggagggtttttgacgatttgtacaatatatttattacgatgtgtatgtgcatatgattagcctggtgctagcattcacatatgcatgctcttcaacctatgttgatacatacatatgtacatacatacacagctgatgttgacacaaacaagatgaaaaaaaaaaaactgaagcaacaaactgggaaaggggaaaccaatgcaaggtggcccgattcgaacgttcaaagctgccaaaaccgaatagatcaatcgagtctcctctgtatagagctcacgagtgagcttgctggcttgccaactagcttagtttccgccggactcctcgcaacccgggggcttgtaggcgatgaagctaatcaactgcacctgcctga

SEQ ID NO: 401897 - DNA, 349 bp, Oryza sativa nipponbare
  unsure (1)..(349): unsure at all n locations
agaaacaatttaatctaacatacgcaaactgatattatcagagtggtgggcgatcacaatggaaagagtaatctaggtacaagcggatcattgacngtggagacaagacattggctgcaccacaacacccaccagtggcgccaacaaggagcgctatccgttatatgacgagagaaaaagtaaaacatcacgatgtgaagtgaaactgaataattctagtaaactatgatgatgatggataggctccttaggacgcccgccgcccttagcgtattgctgctcccatcttgtccactggaaggctcactcgtcatcggctttatcctcttcgctgccctcgtcgtcatcc

SEQ ID NO: 401898 - DNA, 454 bp, Oryza sativa nipponbare
  unsure (1)..(454): unsure at all n locations
aaacatacctaagagcttgctgatacaatatcaacatananggtacgttgggcgttccatatgaacaaacataaaaacacccaaaccccatattccattanttcccatcccttacctaaacttggcgagaacatccccaagagcagatttggtcaacgtgtagtacttctccccctcttcggggctcttgatcttggctgcatggtcaagctgcacaaatcacaaagggggattcttgtcaacaactcanctgagcaacagtaatactttttccgtttcatttcatattaataaattgttgtctattttcttaatcaaagtttttagctttgactaagtttatagaaaaaaatagtaacatatgggatataaattaattttattaaatttaacattgaatatattttaataatatgtttattttgtattgaaaatattagtatatttttaaaaa

SEQ ID NO: 401899 - DNA, 376 bp, Oryza sativa nipponbare
  unsure (1)..(376): unsure at all n locations
gaaatgaaatttacttttcttccttattcattaaacaaaactctggagggatgagtagaatancaatccaatctcaccttaaccttgctcccaatgaaataaaaaataatctagtgcactcttcgatacatacagaagcatacaggtactcatttgcggatgaacaggagcatatgcagagcagaaatgcagcatttgtctctgaattgagagagaggagtgtggctggcctggcctggcctggcctcgattgtttcattctatacgaaggcgtgcttctcgagcagcttgaggacttcctcctggttgttgagtttcgccacgtcgatggccgtcttcccgtccaggttctgcaccgtcacggcggcgccgtggt

SEQ ID NO: 401900 - DNA, 362 bp, Oryza sativa nipponbare
  unsure (1)..(362): unsure at all n locations
cttttaaaaacctacnaacggtttttggtttcaaaaaaggacccaggacttaaaaaacttaaaaccttcttattgtgtttaatcatccgttctttcactcacaaatggactaaaaatacacacctaaattaagtgtggtgttcaaccaaaatatttactgtcaaatggaaagtcgcttaattttctaaaaactgcaaattttttcagaccaatccttaaacagaaaaaatacactatcaagactgttgggcaacaaacaaattttgcttggatttatttcccccgattcattatccaattttttcataccttcagggccaacttcttatcaacaaaaacctccttttttaaggttgtctccc

SEQ ID NO: 401901 - DNA, 372 bp, Oryza sativa nipponbare
tatagtcaaatagcaagtacttttattagattgacaatatcccagacaaaccatgctcatagtatgcccgtagtgcataatgaggacacaacttgcatcaagcaagaatcgctttaatagcaacaaatagtcttatgacttcaaatatagagaacagtaactggtagcttcagaggcttcccaatatctggcagcacacgatattgcatacgagcatctataggcagcttagaaaccgtgaatcttgatgttgtccttcttagcaatcccagcctgaactaggaacgtggcaacattcttacgctgatcaccttgaagctgaatgacctggccaagctctggatcttggactacagtaccattgcagcagaa

SEQ ID NO: 401902 - DNA, 304 bp, Oryza sativa nipponbare
  unsure (1)..(304): unsure at all n locations
taaaaaggtaaactcttcataataatattattaacacattatanctnatntcttgtgatcagactgccatcaaattatgcatcataggcantacaactcctctcaggaaaaagtanaggagatatatttcttgttattacttaatacagcattcacatatatcgaaccatccggtacgtacgtagtagtactccacgcgttcacatcgatgatcggggacgatatcctcaggtagtacttatgcaaaagctttggcgtaaactgacgaactgaactgacggacggtcggatttatggctcccat

SEQ ID NO: 401903 - DNA, 405 bp, Oryza sativa nipponbare
  unsure (1)..(405): unsure at all n locations
ctcatcagaaagcaaatatgcagctggcaagtaatcccaacaaactattcanagtgtctggcattgacacaggctaggatgttcacgatccacaactagatactgtttacttgttgtctaaataaacgggcagcaaaataagtgataatctctactcggcagcagcgacctcctgcccggccatggcctcatcttctgcaggcctatcaagcttcgtaccgatgtcctccttggcatagtcaccatgcacctccatgagcttccccaggtcaaatttcggggcctttagaatcttcactttgcggacaaacacattctgaagggggaaaatactggatgtcgccttctcaatttccttcccaataacttcaggaatgaactttgaaactagctctttcaaatcac

SEQ ID NO: 401904 - DNA, 301 bp, Oryza sativa nipponbare
  unsure (1)..(301): unsure at all n locations
gcgtattgaatacctttgtttctttatttgttttttttgttctgtccccttatcgttcttgcatacaaatgaataaatggctcggctacatagaataacctaccanaacataaaaaaacagtataacatgtataaataataaaatcttatttaanatgggtcatgtaaagaacatacttcaaatcacgatcaattcccttttcaaatcctaattcaacaaccctgactcttccttcattccacaaatcgcccacaaaaaataagaatcctacaacaaaatgtgtattctctaaccaacttc

SEQ ID NO: 401905 - DNA, 449 bp, Oryza sativa nipponbare
  unsure (1)..(449): unsure at all n locations
actaggcaaaccacacgaatacacgattgattaatttcactgagaatagcacgggggcatcacatcacacaaatgcatacgttgatacacgcatagtncgccgaagcgaccaagctgcttaattaaatcgataacacacgnnggtttaattcagcaataatcagcacacacacaaaccacactcatatgggtggtttttattgtggactaattaaggtaggtgactcgccggcggcgagtgttcggttgcttcgtgacttcacttgccgcacttgcagtcggtgcaggagcagctggtgccgcacttgcagccgccgttctcctcgccggcggcgacctcctcgaagtggctcttctcggcttcaactatgacgacgccatagctggtacctttcttcacgcactggctcttgtcagcacagtcgcagttgccgcacttgtcccacatg

SEQ ID NO: 401906 - DNA, 474 bp, Oryza sativa nipponbare
  unsure (1)..(474): unsure at all n locations
ttagcccatatctttatattatattattattaacaaaaacttgtcatggccagggatggcttgggcgcgatctgatacacagaacaaanagaaaacataaaaaggagaaataattaatagcaagcgtcaagccggcctgcttaaaaggtgtaaaggcagctgccggcgtcgctcctcgccgttgggtcgaagttcttggcaacagggtcggtgcaaccttccggcacaggcaggttacctgcttgctgtgctccttgccctcctcctcctatgcaggccgcctacgatgcatcgatgggatgcgaatagctagagatcttttattcagctggatggcgcagaaccgtagaaggaaccagtcttcatggcgtcggagttagcgtcaccaagagcagcctcgctcaagtactgctcagccagctgcacacgcttgacgttctcctgctccttcacaagcatgtatccgtactccat

SEQ ID NO: 401907 - DNA, 406 bp, Oryza sativa nipponbare
  unsure (1)..(406): unsure at all n locations
catgaagtaacttatatatatgttgaactccgttaattaaaaattaagggagtggataaaccggttccgtaaatatcttaaggcgagatatacagatgccaaataggtgtacagtactcgaaattacaaagattataccagtataattaatcgttgggattaagagcatgaacgacccagttacgaggggtgcacggagtacgtgtgttgcttgcgcgcgtgtggatcgacgagattcttttgcaaaaattacctaattaattaatcggcgtgctctctggcgtcgtcgatattgtttattgtttggctagagttcgccggcggcggcggcggcaaggtcctcacaacctgnggaaggggcgggcgaggcggtcggcgtcngtgtaaatgtgggcgcgggtgatgt

SEQ ID NO: 401908 - DNA, 302 bp, Oryza sativa nipponbare
  unsure (1)..(302): unsure at all n locations
aattaattcacaacaccatatttcattgatcaggttcagaacctgcacagaaagacacactaccggtacagatctcaccctctctccaatactctacatccatccacgcggtccacacgaatacgtacatctatacggtacacgtacgtacatctactgcaccgngtacacacacgcacactctcctgcagagacgcgcatcgtcgtcaacctagctagcttagctgaaggcgatgcgtcgccatggcagcacggcggcggcggcgctcacttgccggggactaagttggtggcgtangccc

SEQ ID NO: 401909 - DNA, 477 bp, Oryza sativa nipponbare
  unsure (1)..(477): unsure at all n locations
ttcacatccatctcgtaccctttgtataaatatatatagccggagcttccataggtttcagtcacatatgcctcacccaacaacatatagtcntagcaaataccactcttacatcaagtcagagagagatcaggtgaaacaaaaacaaaagcagagcacggccggtaaaatcaaaagacgatgaacaaactgggaacacacgaaacaaggtgggagacatcatcgaatcagagatgaacaattaaacaaggctatatatgacgatgacggcttagttgccaccagactcctcgcagcccgggggcttgtaggcgatgaagctgatgagctgcacctgcctgacgttgtcgaagccgatgatacggacgaatgcatcagggtacgccttcttggcctcctcgagctccttgagcacctgggtggcgtcagtgcacccgaacatgggcagcttccacatgggccagtacctgccatcgt

SEQ ID NO: 401910 - DNA, 479 bp, Oryza sativa nipponbare
  unsure (1)..(479): unsure at all n locations
cttaaactaatgcaggtttctattgaaaggatatcaaaatattatagtctctacgtactcgacagaaagagcaaagctcttgttcgatcttccagtagggatgtaaaagttatacatacanaagtgtagnaaagctaatgattataatataatatctactttacaaacttttgtacttcggtgatgtcaacaaactcattgactccactcgtcagtagatacctgtcaagaagatcctttgccatggatttgcatccaccagggatagaagactgcatatttattgctatgttggggttatgtacactttggcgaatgtggacccaccccagttctccctgtacatgtacgcatcaacatcaaaaggatcatcattcgtgtccacgaggcatccttggctaaccgagcaatccccacagtcatcgagaacccaaccatttagtttcccttcctggatatggttcctaaaagtctcgact

SEQ ID NO: 401911 - DNA, 507 bp, Oryza sativa nipponbare
  unsure (1)..(507): unsure at all n locations
cgaaaaatactaaaaaatattctaaagtgcagccggatagatccaatctattctggaaaagacaactcncacacactccctttccaaaataaatcaatacaccaaccactacagttagatttattagatttgttgctaaaatatcggtattaagcccgaaactcccagcggatggccagtgagctaaaaaaacgaaagaatgggttacatttttcatatgctctcctcttatagataggacgaacaaagaacaaagtttttcgatcacttacttcgctcgccctttttgatcggtttttttaatgcaattttttttaatagaaatagattcaatttagtaatttcttttagattaagtcttagatctcgtttgacctgtgaaagacctcctttgttgaaatgttcccaaaattcctaaaataaaaggaaaaatactttccactgccctaaacaaagggcgggaagcaagactgcgaacatatcctctaaattgatcatccttaaatc

SEQ ID NO: 401912 - DNA, 421 bp, Oryza sativa nipponbare
acggcagaaaatgggaaaccactttatagtcgacgaggcgtcgggataatatctacatgcatctcatcagatgagatcagatcgagtcaacaagatggcgtatgcaggttgcgcatgcatgcatgaaaatcgagataaaaagggattaattaattattaacatatatatatccatcagtagacttccacattccattgctccgacttcttcagctgcttcttgtagtcaagccagtcgatgccgtcttttgcagcgaggtcgatcatgatgtcgtcgatgcctttctccatgcccttgaggccgcacatgtagacgtaggtgttgtccttcttgagcagctcccacagctcgtccttgtactccgccatccgcgtctggatgtacatcttctcccccgccgggttcgtctgctcccggctc

SEQ ID NO: 401913 - DNA, 446 bp, Oryza sativa nipponbare
  unsure (1)..(446): unsure at all n locations
tatagcaaattggaggaatcatcccattaaaaacaatangaggaatggcccaggcaacanttgctaacatctaaatcttttttttttctctgattcttgtgacagagctgagtcacatttttctatttgccggaacaagtttgacaagctttgccaaatcataagacttgaaatctcttccaaaacacaagcttatatccaaggcagtccttccatccttggttcttctcgtcttatctgcaccattgacaagcaatatctttgctatatctctatttctactctgtatagctaaatgcaacggtgtccagccatcattatcagcaacattgacatcaaccctattcttaatcagtaacttcacagtttgcagggcaccaacttgaactgcataatgtaatggtgtggctccatccctatctctgacatgaggatttgcccctctt

SEQ ID NO: 401914 - DNA, 372 bp, Oryza sativa nipponbare
  unsure (1)..(372): unsure at all n locations
atacgcaaaactttgcagtaaccaaatcgattcacaggccacacatgcgaggtggtatacanattcgtctacacacaaggttattgcaaagcaaaacacgaggtatgtatatcaaacgctctagaaaagattcatgtgatgaaatacatgatgaaccacgtatgttctcaaggtaaaattaattaatgcagtatagttttaactttgtccatcgatctcaacctgtaactgtgacgacacactggctacagtgccctcgaggtactagcagtatagcagtagctgtagtacgtagcagcagcagcagcaggttcactgtcttgattggattggatcggattagtagacttagttcttgacgaacatgccctc

SEQ ID NO: 401915 - DNA, 381 bp, Oryza sativa nipponbare
  unsure (1)..(381): unsure at all n locations
gccgaaattcgaaacctcatgacttcagagttcagaggtcngacaaaacagacgcatgtggcacaaacacacagacagaagaaagttaaacaagactcgaaaagaaaaaaatcctgaagtctgtaccaaagttcagtattacacctcacagaaaatggcccgtgtctgcagctgtgtttcttcttcgacagtcatgcgttcctctgtcgaaggggaacaacgtacgggcagccaatccgagcacagtatatatagtatagcagttctgcccggggacagtcaatgtgtgtgcttcgttacattataggagtatatatttctgcacctacacgagcccgtacttggacagtggtcttagttttcgtacactttgcactcgtc

SEQ ID NO: 401916 - DNA, 413 bp, Oryza sativa nipponbare
  unsure (1)..(413): unsure at all n locations
ggcgggaaaatttgatgaggtatttgccacttatatcatcatatacaaatactaacacatgcgaaaattatcaagcaganaaagttccatacaaattcatccagacaaacaagtgtaaaaaaccttttttttcccatttcccccttgaactatccgtaaataccaccattccaccaaactcccctttgttttttacgacaaataatcttttcaacccagtaacttataattaattacagagagattagcaaacatataatggtaagaatcagttgtcgtaggtgcggcactcgtcggtctccgggttgtccttgcagtaggcctcaagcgggtcggaggtctccttgagcttgtcgcgcgcgtggctcgccgccgcgctcagttcctccaccttgtcccacgccgccgggcac

SEQ ID NO: 401917 - DNA, 311 bp, Oryza sativa nipponbare
cttctactaggcaaaccacacgaatacacgattgattaatttcactgagaataggacgggtgcatcacatcacacaaattcatacgttgatacacgcatagtcgccgaagcgaccaagctgcttaattaaatcgataacacacgggtttaattcagcaataatcagcacacacacaaaccacactcatatgggtggtttttattgtggactaattaaggtaggtgactcgccggcggcgagtgttcggttgcttcgtgacttcacttgccgcacttgcagtcggtgcaggagcagctggtgccgcacttgc

SEQ ID NO: 401918 - DNA, 400 bp, Oryza sativa nipponbare
tttttaaattcgatcatcccttggatgcggcctgcggcttacattaaatctcgagccaaagaagcaaatatgatgacagacagaaattaattaagctagaaatctcctcgatcgatcacacacacacacacaattaaggtacatacatacatgcactgctgcaactgcaactgcagggtcggtgcttggctactacaagtgtacacatggtacgttggttggcaccatctcgatcgtgtcgttgtgctcacttgccagggacgaagttggtggcgtatgcccaggcgtagttggcgacggggtcgtcgacgtggtccactgtcactgagcctgagcctgagccattggattcattggtattattcccaaccttgctgccactatcttgatcttgctggag

SEQ ID NO: 401919 - DNA, 408 bp, Oryza sativa nipponbare
  unsure (1)..(408): unsure at all n locations
ttccagcaacagagatgataacttaagaattaagatctccatcacataaaaacagacaggggctgagtactggattacacgattgagttgttcaaggttcaataggaaaaacatcttggggactagagatagagggaatcgacagatgcgcancantagcgcgcgggaaacaggacatcacgattgcgttgcatgtcgtcggctgcgcagcggcggcgcggggcttaagacctgctcttgaatgggatcgccctgatgatcacctggtggtagatggcagccagggcagcgccaacgaagggaccaacccagaagatccaatggtcattccaggcatggtccttggtgtagatgatggcagcgccaaggcttctggctgggttgatgccagtaccggtgatggggatg

SEQ ID NO: 401920 - DNA, 458 bp, Oryza sativa nipponbare
  unsure (1)..(458): unsure at all n locations
ttagttaaaattaagaggcattagggaatgatgattaatttaactgttcactgtggtgtacgtcgaggttcaagattaattaagtaaaagctgcagtaccttacaaaattatactccttactccttagcatagagctgatcgatggagcgtataaaaatttaactttacatacagagaccaaattatatgcaataggattaatttgccgctgttccgttctgccaaactgcaggcagaaccatcgctgctgagaattgctttccttccttcgttcgttgtgcttcagatcctggacgggatgagcggcgtcnaattcgacaggtacgccgncgccgccgccacgccggagccgagcttcaccgggtagccgatgtccttgagcaccatctccactccactcagggcacccatcaattgcagctcgttgaggtggccgaggtggccgatcctgaacacc

SEQ ID NO: 401921 - DNA, 434 bp, Oryza sativa nipponbare
tcttaagcgaacaattctcacctgcagagaatgttatacggttttgcagccaatgttatacggctgtcactcattcactttccaagaatacaccaagagcttatagatatagcatacaaaagattaagaaaaatggcagagtctgcattagctcagtcctcatccacaaagattgtttcttgcttgaagagtcccccaaacacgggcctcacatccggcttggattccggctgctttggtgttggtcttgtcttctgcgccgcgggcttcacaacagctctctgtggtgccagcttctttgcttttgcctggcctctcacggtggcgatctgcgcttttggttccacctcgtctgagtcctgagtggccactcctgcaagttgtgtgctgagcttctcccatgagaagtccgtgccgaaccctttggctctgct

SEQ ID NO: 401922 - DNA, 466 bp, Oryza sativa nipponbare
ttaattcacaacaccatatttcattgatcaggttcagaacctgcacagaaatggacactaccggtacagatctcaccctctctccaatactcgacatccatccacgcggtccacacgaatacgtacatctatacggtacacgtacgtacatctactgcaccgcgtacacacacgcacactctcctgcagagacgcgcatcgtcgtcaacctagctagcttagctgaaggcgatgcgtcgccatggcagcacggcggcggcggcgctcacttgccggggacgaagttggtggcgtaggcccaggcgttgttgttgacggggtcggcgaggtggtcggcgaggttctcgagggggcccttgccggtgacgatggcctggacgaagaagccgaacatggagaacatggcgaggcggccgttcttgatctccttcaccttgagctccgcgaaggcctccgggtcgtcggc

SEQ ID NO: 401923 - DNA, 426 bp, Oryza sativa nipponbare
gaatcatacgtaagtgcttgctgatacaatatcaacatggaggggagattgccggttccatatgaacaaacataaaaacaccgaaaccccatatggccattatgccgatcctagcctagcttggcgaggacatcgccaagagcagatttggtcaacgtgtagtacttctccgcctcttcggggctcttgatcttggctgcatggtcaagcccgtcaatggtggcaaaaagcttgccggtgaggtccttgaggccctttttctcgtccttgggcttggagttgatgacggttttaaggtcgtagcgcaggtaggaggccctgaggcggaggtcgtccctgacgaacggccactgcttcttctcgatgagcggcttgaggttgatgatgtcctgggccgactccttcgccctcgccgccgcctccgcc

SEQ ID NO: 401924 - DNA, 252 bp, Oryza sativa nipponbare
  unsure (1)..(252): unsure at all n locations
ccaggacaaattcaagctatctacaagcttgccagcatcatcatatggtaagagttgctttaatagtcagcaaactcgtacagaatanccatatcaaatttccacaaactatatatcatcatcaggaattttaaaaagagaactcggaatcgatttcgcatgatattcgaggacacccaagccaaactgactataacgatgactaaccctaatacctactacaacaccaggtgctggcccttatttgataac

SEQ ID NO: 401925 - DNA, 472 bp, Oryza sativa nipponbare
gaaacaagcattaacaccacaatggattatcatactgttccttactggctgcgagcaaaatctctctagcaacaaacgtgtaaatgctccccaaaatacaccatcaccatgactccatgcatagccacaatatcacaagtatcgctacagccagccgcgccatgttccttttctgcgaggacgcgcgacatacacatgattctgaagctctactgacctagacacagggggaagttcatgaccaaattggttggttcattcactccattgctactgcgtgcttaatttgatgaatacacagactcgacttattttctttctttagctgcatgatcccatggatggaagaaacgaaacctactactgcccttcacaccgtctcctccattcaagcttcttcctcaagcagcttctgatcaaagtgccacaccccatgcccctttcccactcttctcagctgggcgacatactc

SEQ ID NO: 401926 - DNA, 474 bp, Oryza sativa nipponbare
  unsure (1)..(474): unsure at all n locations
gaacaatgtaaattcacaagagaatatggcagagacacagaantaantgtgaaaggaggctgcacataattgtgctagctccaaaagatcaaacaaccacactccaaaatttcaggctacctcctgccggtatcagcatcttcagtttgctcacaagagctctgtcctacggtagctggttgtgtcaaaacgtcgagtaggcttaatcagcaattcagcattgatcatcaggcgtatagtttagcaagatcatcctcatatgtcttcctgagcacttccctcttgagcttgagggcagcagtgacaaggccagactccggggtccatggctcagatatcagcttgatcttggccgggatctcaaacttctccagtcgcgcttgcttcgcagcctttgatagagatccaagcacttctttaacagcctctggcttctggcacaaatctaccaaatcggtgtatgtaactccctgc

SEQ ID NO: 401927 - DNA, 440 bp, Oryza sativa nipponbare
  unsure (1)..(440): unsure at all n locations
tttgatcgagtttaactaagaccagtttgatttcgtgtttgatacagggattaggatggacggattcacaagagagcaccctctacttaagctttacattacaaggccaaccagcagctgcctgccggccgaccactgcgtgcgcacgcgcgcgcaataatcaaccaatcacacacagtacgcacgcacataaaaaccacccatagccttcacgtacgcccggacgcacgcaccggttcgtgccaagctcaagggtagatggttctcgggatgatgatgtcgccgatgttgttgtgccacgggtccgagaggtggctggccaggttctccagtgggccggtgcccgggtacgccgactgttggacgcagaaacccacanaagccagcatggccaatcgcccgttcttgatctccttgagcttgtactcctcgaacttgac

SEQ ID NO: 401928 - DNA, 470 bp, Oryza sativa nipponbare
  unsure (1)..(470): unsure at all n locations
taaatatatatagccggagcttccatatatttcattcacatatncctgacccagcagacatatagtcgtagcagataccactcttacatcaagtcagagagagatcanngtgaaacaaaaacaaaagcagagcacggccggtaaaatcaaaagactatgaacaaactgggaacacacgaaacaaggtgggagacatcatcgaatcagagatgaacaattaaacaaggctatatatgacgatgacggcttagttgccaccagactcctcgcagcccgggggcttgtangcgatgaagctgatgagctgcacctgcctgacgttgtcgaagccgatgatacggacgaatgcatcanggtacgccttcttggcctcctcgagctccttgagcacctgggtggcgtcagtgcacccgaacatgggcagcttccacatggtccagtacctgccatcgtagtatccgggggatctg

SEQ ID NO: 401929 - DNA, 307 bp, Oryza sativa nipponbare
  unsure (1)..(307): unsure at all n locations
aaaaaagtaaactcttcataataatattattaaaacattatanctggtgtcttgggatcacactgcgatcaaattatgcatcatangcagtacaactccncgtcanngaaaaagtagaangagatatatttcttgttattacttaatacagcattcacatatatcgaaccatccggtacttacgtattagtactccacgcgttcacatcaatgatcggggacgatatcctcaggtagtacttatgcaaaagcgttggcgtaaactgacgaactgaacggacggacggtcggatttagggctcccata

SEQ ID NO: 401930 - DNA, 217 bp, Oryza sativa nipponbare
  unsure (1)..(217): unsure at all n locations
ttataattaattcacaacaccatatttcattgatcaagttcanaacctncacagagatacagactacctntacagatctgaccctctctccaatactcgacatccatccacgcggtccacacgaatacgtacatctatacggtacacgtacgtacatctactgcaccgggtacacacacgcacactctnctgcagagacgcgcatcgtcgtcaacct

SEQ ID NO: 401931 - DNA, 494 bp, Oryza sativa nipponbare
  unsure (1)..(494): unsure at all n locations
ttgaagaggaaatttctttccagacgctcatgagtcatgagtagtagctacagagatggtgggtttctcaaatgcagttacaacgaaatgtggtatatttgtacacagctcangccttggaacagttgttaacccaaagtgtgtaagcagctagaagcctaggggactcaaaattttggtagtattctatacacaaattacagtgatgggcgcgagggcattcttcctccggttactttgatgagcatccaaaagatcattcattagcgctctgcatgagctcaaaccactgtctaagcaagtcagccaatgtacgaggaagtgcttcaatattcttcagcatgacatagtaagggaatggaaaggagtccatatatttccccatggttagtttggtaccttgataggatacttccagtgaatccatgatagattcctcgtgaccatctaggagcacatatgcgatcatcctctttctgtaaggacattcctga

SEQ ID NO: 401932 - DNA, 305 bp, Oryza sativa nipponbare
  unsure (1)..(305): unsure at all n locations
gcaaaccccaacttttttcagtttctgaattctnnatngatcgtatcaggttcatcacagcatcggacaatctgtgcaagcattggtacatcgagccatggaaagagagagtantctacaatggcggctgggccattcacgagcccggcgtgaacttggtggcgtaaacccaggctttgttggccacggggtcggcgaggtggtcaagcaggttctccaaggggcccttgccggtgactatggcctggactaagaagccgaacatggagaacatggcgaggcggccattcttgatctccttgacc

SEQ ID NO: 401933 - DNA, 284 bp, Oryza sativa nipponbare
  unsure (1)..(284): unsure at all n locations
gacagacagaaattaattaagctagaaatctcctcgatcgatcacacacacacgcgcaattaangtacatacatacatgcactgctncaactgcaactgcanggtcggtgcgtggctactacaagtgtacacatggtacgttggttggcaccatctcgatcgtgtcgttgtgctcacttgccggggacgaagttggtggcgtatgcccaggcgttgttggcgactgggtcggcgacttggtcgaagaggttctcgatggggcccttgccggtgactatggcctg

SEQ ID NO: 401934 - DNA, 415 bp, Oryza sativa nipponbare
  unsure (1)..(415): unsure at all n locations
gaccgccaaaaaaaattgcaaaaacttgcgttagagtgataccaacaaggtgaatgtcaaacaagtttacttgcattcttcactgccagaatctaagtactacattgaaatcagcaatctacacagggcaaccaacacgcgacgcctggacacgaagagagagaaatatttggggggagcctatccgccaaagccgtaaagggtgcggccctggcgcttgagcgcgtaaacaacttccatggcggtgactgtcttgcggcgggcgtgctcggtgtaggtgacggcgtcncggatgactttctcaaggaagatcttgagcaccccgcgggtctcctcgtagatgagccccgagatgcgcttaaccccgcccctccttgccagccttcggatcgccggcttcgtgatcccctggatg

SEQ ID NO: 401935 - DNA, 430 bp, Oryza sativa nipponbare
tgagcttaatcaaggtctcataatattatttccccacaaacaagaaccacagtaaaggaagtgcataacaacagggacaacagaagtaaatacagaactgacaaaagtgcctaatatagagaagcctaattcagatattggctatcctctcttgcagctcagttcatctcccttagatcggcatgcctttgggcacaatctggtcctttatccacatgtagataggcaccagaacatagtatgcagcacatattgttcccatgaggaagcggaagaggaaggtgataagattcacaggtttgctgacatcctcaaccttttgaccaagcttcaaaagggagtctccatattctgttttaacgcccgtcacaaaacatgccataatcaaaccattccttcggacaccaacataccattttgatccaatcct

SEQ ID NO: 401936 - DNA, 355 bp, Oryza sativa nipponbare
  unsure (1)..(355): unsure at all n locations
ataacatctacttacatcccatacataaccttggatcctgtanagcaacccccctttctttctttttttttttttttttttttttttttttttttttttttttttttttttttttacaaaaagtaaacaggtttaattactaagattacttaaccccccnatcccaaaaaatcaatcctttcatcccgggaaaatctatggatccccctctctccttaacttgttcttaattctcatggccaatcaaaaaaacacacacccccacacacattcctgcactaaattttttttaacaacaaactccattaatttcattttaattccctaaagattaaaaaaaaacttaaataaaaat

SEQ ID NO: 401937 - DNA, 164 bp, Oryza sativa nipponbare
  unsure (1)..(164): unsure at all n locations
ccacgcgtccgatcgagcaaagaaggagagagcttggtgagctgcagagatggccccctccgtgatggcgtgggcggccaccaccgtcgctcccttccaggggctcaagtccaccgncggcatgcccgtcgtccgccgctccggcaacttcaggtttggcaacg

SEQ ID NO: 401938 - DNA, 388 bp, Oryza sativa nipponbare
  unsure (1)..(388): unsure at all n locations
ccacgcgtccgacaaatgtgaagatttggatgaatgcaaggagaagcttgcgtgcacttgccctaactgccactgcaagaacacctggggcaactacgagtgcaagtgcaagggcaaccagatctacataagaggagaggacacatgcatagccaacagcatgtcaaggttcggctggtcatactatattggtgcgtctgcgtaccgcgtgggatgccggtatggtctcagtcagactagtctcatgactgaatatggctatgncagtcagcgtgcagcagacacagacaccctcacgatgataaggtaagactgcattgagaattgtagtttactggaagatgtcaatggcttagtagactgttggccaactctacaactaggctca

SEQ ID NO: 401939 - DNA, 145 bp, Oryza sativa nipponbare
acgcgaccggtacgctttcgttacgcgttcgggactgcactcccttcgtcagcgacactggtacattcagagcacttgtgccacaactggtgagggtctgtaccagggcctggattgggtgtccaacaacataggtagcaaggct

SEQ ID NO: 401940 - DNA, 179 bp, Oryza sativa nipponbare
ccacgcgtgcggggaggcggagctgatccacgggcggtgggcgatggcggcggtgctggggatcttcgtcgggcaggcgtggagcggcgtgccgtggttcgaggccggcacgcaaccagaggccatcgcgcccttctgcttcggcttcctcctcgggacgcaactggtggtcatgggct

SEQ ID NO: 401941 - DNA, 303 bp, Oryza sativa nipponbare
ccacgcgtccgcccacgcgtccgcggacgcgtggggcgaggagtcaggcggcaactaagcgctttcgttccttcgtgcatgttctttctttttctttttttttttgtgtgtccgtgttaagctgcacgtaattgttctctcgcgctccgacctgccgttgttgcaagagtactactacaactatcggtctatcgttcggtgacggtgagacagggcacgtgaatgcaagatctccggctatacacacgtactcatgtaatatgatgcctagagcatatctgaatccgtcgacaattgaaattt

SEQ ID NO: 401942 - DNA, 188 bp, Oryza sativa nipponbare
  unsure (1)..(188): unsure at all n locations
ccacgcgtccgccacagtctnctcctttctgaacacagcaccacccttctgctgcatctcccaccttcctctgaattgtgggcctgaggcgatggcggcgctcgccccgtccaagatgctcggcacccggctcaaacttcccggctccttccgctacgccactcgggcaccgaccaccggagcgcaga

SEQ ID NO: 401943 - DNA, 208 bp, Oryza sativa nipponbare
  unsure (1)..(208): unsure at all n locations
ccacgcgtccgcccacgcgtccgcccacgcgtccgctcacaacgtggtgttcgacgaggacgcggttccgagcggcgtcgacgtgtccaagatatcgcaggaggagtacctcaacgcccccggcgagaccttnttcgtcacgctcaccgtncccggcacatacggcttntactgcgagccgcacgccggagctgggatggtcggcaag

SEQ ID NO: 401944 - DNA, 183 bp, Oryza sativa nipponbare
  unsure (1)..(183): unsure at all n locations
ccacgcgtccgcccacgcgtccgctcctcctcctcctcgtcgctgcattccggttgagtgagttggtgattatctgtagggggtgaaaatggcgcaggcggtggtgccggcgatgcagtgccaggtcggggccgtgcgggcgaggccggcggcggctgctgctgcngctggggggagggtgtg

SEQ ID NO: 401945 - DNA, 364 bp, Oryza sativa nipponbare
ccacgcgtccgccttcgccgagcaccagcgcaccatggagaaggaccccgagaagaagaagtaccccggcggcgccttcgaccccctcggcttctccaaggaccccgtcaagttcgaggagtacaagctcaaggagatcaagaacgggcgattggccatgctggcttttgtgggtttctgcgtccaacagtcggcgtacccgggcaccggcccactggagaacctggccagccacctctcggacccgtggcacaacaacatcggcgacatcatcattccgagaaccatctacccttgagcttggcacgaaccggtgcgtgcgtccgggcgtacgtgaaggctatgggtggtttttatgtgcgtg

SEQ ID NO: 401946 - DNA, 179 bp, Oryza sativa nipponbare
  unsure (1)..(179): unsure at all n locations
ccacgcgtccgcgctcgctcatcgccatctctctcagctctcacagctcactgcatcaatgttcgcggccaccatggcgctctcctncccggtgatgggccgcgcggcgccgtcgacctcctccgcgctcttcggagaggcgcggatcaccatgcgcaagaccgccgcgaagcccaagc

SEQ ID NO: 401947 - DNA, 236 bp, Oryza sativa nipponbare
ccacgcgtccgacagtctccactcacacgcattgcagaggagaggcgacaatggaggggaaggaggaggacgtgcggctgggggcgaacaggtactcggagaggcagccgatagggacggcggcgcagggcgccggggacgacaaggactacaaggagccgtcgccggcgccggttgtcgagccaggggagctcaagtcgtggtctttctaccgggccgggatcgccgagttcgtc

SEQ ID NO: 401948 - DNA, 170 bp, Oryza sativa nipponbare
ccacgcgtccgcgatgacgaccagaagctccgggcattttatgacaagaggatctcccaggaagtcagtggtgatgctcttggcgaaaaattcaagggctatgtattcaaaatcatgggaagctgtgacaagcaaggtttccccatgaaacacggtgtgcttactttgga

SEQ ID NO: 401949 - DNA, 396 bp, Oryza sativa nipponbare
ccacgcgtccgcttactcaggaattctatcggcttcgatcaagcctcagagtgaagcaacaacatgcttcgctccttgacctaagagattttgacagagcaaagtttgatgttgagagtggagactcagccgatcaagctcttcttagagaacaagctgcaatcagtaggagttctggacagatggataatgtgatatcacatgctcaagcaacgctaggaactctcatgtcacaacgatcaacatttggtggcatcactacaaagataagcaatgttagtagccggcttcctacgatcaatcatatcctcgcgtcaattagaagaaagaagtcgatggacacaatcattctttcacttgtcgcgtctgtctgcgcctttcttattctcgtctact

SEQ ID NO: 401950 - DNA, 235 bp, Oryza sativa nipponbare
ccacgcgtccgcccacgcgtccgcccacgcgtccgattgtttgaggagggtggtgattgggagaggaagaacagattgaaagtgtacgagggcttatactgcatggccactagaaacttcaagaaagctgcaagcttatttttggattcaatttcaacattcacaacctatgagttgttcccctatgatacattcatattctacacaattcttacaagtgttatcttattggatc

SEQ ID NO: 401951 - DNA, 78 bp, Oryza sativa nipponbare
ccacgcgtccgcggacgcgtgggcggacgcgtgggccgacgcgtgggccgacgcgtgggccgacgcttggcccccaca

SEQ ID NO: 401952 - DNA, 133 bp, Oryza sativa nipponbare
ccacgcgtacgtccacgcgtccggaggttctagtagcacgaaggagagagcttgcagagctgtagagatcgccccctacgtgatggcgtcgagggacaccaccgtctgtacattgcagggctcaagtccaccg

SEQ ID NO: 401953 - DNA, 185 bp, Oryza sativa nipponbare
ccacgcgtgcgataagctctctcatgtctacacggctatcttgaagcctgataatgaggtgagaattttggttgatggggaagagaagaagagggcagacttctcttctgccgctgaggtctgagccatttactttatcccatccaagaccagccctgatcctgatgacaaaaagccagaacact

SEQ ID NO: 401954 - DNA, 343 bp, Oryza sativa nipponbare
ccacgcgtccggatctactcagtgtcaactcggcattactttgctttaggagctcttgtatctgaggaactctcctacaaactcaaagagttgcccaaggtgcgctgggttctttcagactcatacctggatgtcagaaataaggactactgaggagaaccttttataaatgggggaagccgttccttatgaccctaagtaccacgaggagtgggtgagaaacaatgcgcgtgccaatgaaagaagcccgcgcaatgataggcctagaaactttgacaggtcaaggaattttgagaggagaagggagtacatgcagaactttcaaaacagagatgtgctttct

SEQ ID NO: 401955 - DNA, 173 bp, Oryza sativa nipponbare
ccacgcgtccgcccacgcgtccggggttgctccacacaacttgtggaactcctgcatatgttgctccagaagtgattaacagtaaaaggatatgatggtgcaaaggctgacgtatgggcttgtggaagtgattcctttatgtactaatggctggtttatcttccatttctaga

SEQ ID NO: 401956 - DNA, 244 bp, Oryza sativa nipponbare
ccacgcgtccggtgtactgcactgcacactctaggcggctgaagcgaacgacaccggcgtcaagagtatcaagcacggccatggcggcggcgaacggcgatgccagccatggcgccaacggcggcattcagattcagtccaaggagatgaagacggccatcccagcaacgatgccccagaccctcctcagaggaatcctcacatcatgctgaacagggacccggagaacatagccagctcgcta

SEQ ID NO: 401957 - DNA, 213 bp, Oryza sativa nipponbare
  unsure (1)..(213): unsure at all n locations
ccacgcgtccgcgcctccctcgcatcgaccctccccgaccccgccgagatcggagcaggcgccgncttcctccttccgcctncttctccgccatggcgcgcgtctctgctcggngggttcaccaagtcgctggccatgacagtgctctcggagatcggcgacaagaccttcttcgccgccgcgattctgggcatgccctatccccggaagctt

SEQ ID NO: 401958 - DNA, 163 bp, Oryza sativa nipponbare
accttcggcctgaccggcgtctccgtgtgggaggccctggtgctggagatcgtcatgacctggggcctcgtctacaccgtgtacgccaccgctcttgaccccaagaagggcagcctcggcaccatcgcccccatcggcatcggcttcatcgtcggcgcgaaca

SEQ ID NO: 401959 - DNA, 373 bp, Oryza sativa nipponbare
ccacgcgtccgatcaggaaagggtttgtcaagatagctatgcagtctggctgccctttagttcccgttttctgtttcggacagagctacgcgtacaagtggtggagaccgaagggcaaattgtttgtgaaaattgctagagcaattaaatttactcccattgtcttttggggaagatacgggacaccaatccctttcccaacgcccatgcatgtagttgttggcagacccattgaggttgagaaaaattctcagcctaccattgatgagataaatgaagtccatgaacaatttactgtggccttgcaagatcttttcgacaaatacaagacagaaactggatatcctggccttcatctaagagtcctatgata

SEQ ID NO: 401960 - DNA, 252 bp, Oryza sativa nipponbare
ccacgcgtccgcggacgcgtgggcagctgcaaggagaaggagaaggtaggctccagccatggcttcccagctctccgccgccacatccgtgccgcaggtgcatggcctccggacctactcctctcctaggtccatggtgacgctgccatcgttgaggatgagcaagaagaggttccagggcatccggtgcgactacatcgggtcaggcaccaacgttatcatggtgacgacgacgacgctgatgctgttcgc

SEQ ID NO: 401961 - DNA, 156 bp, Oryza sativa nipponbare
gtccggattcccggtcgacccacgcgtccgcccacgcgtccgcggacgcgtgggctccaccacctgctcccacttcacttggaattcgaaatccacacgagcgcggcggctgcggcggcggcgatggcgagcaccattaacgtggcgtccgccacc

SEQ ID NO: 401962 - DNA, 193 bp, Oryza sativa nipponbare
tggccccctccgtgatggcgtcgtcggccaccaccgtcgctcccttccaggggctcaagtccaccgccggcatgcccgtcgcccgccgctccggcaactccagcttcggcaacgtcagcaatggcggcaggatcaggtgcatgcaggtgtggccgattgagggcatcaagaagttcgagacccttttctacct

SEQ ID NO: 401963 - DNA, 145 bp, Oryza sativa nipponbare
gtcgacccacgcgtccgatttgaagaaagattaaagaagctgatggaagaaatcaagcagagtgatgagataatactatttattgatgaagtccacactctcataggagcaggagcagctgagggtgctattgacgctgctaaca

SEQ ID NO: 401964 - DNA, 342 bp, Oryza sativa nipponbare
ccacgcgtccgcccacgcgtccgatcatggttagcaggatcaggttatgttggccttgcagcaatctcaacagcaactgtgccaatgatcttgccgcaggtcaagtggtaccttgtcctgtgtgcctatgttgtagctcccctgctcgccttctgcaactcatacggctgtggcctcacagactggaaccttgcgtccacgtatggaaagattggcctttttatttttgccttcttggttggccgaagcggtggcgtgattgctggcctagcaacttgcggtgttatgatgttcatcgtatccaccgctgccgatctcatgcaagacttcaagactggttac

SEQ ID NO: 401965 - DNA, 213 bp, Oryza sativa nipponbare
ccacgcgtccggatcgagtacctgctccgttccaagtgggtgccctgcctcgagttcagcaaggtcgtattcgtctaccgtgagaaccacagggccgggggatactacgatggcgggtactggaccatgtgaaagctgcccatgttcgggtgcactgacgccacccatgtgcttaaggagcttgaggaggacaaaaaggcgtaccctgttgca

SEQ ID NO: 401966 - DNA, 183 bp, Oryza sativa nipponbare
ccacgcgtccgcccacgcgtccgcccacgcgtccgcccacgcgtccgctgtgaatggtggtggtgtattgggatgtaattgtggatggagcactgcatgccttgttgattgtgtacctgtactatgatgtaaccgatgtaaaaaacaagttgatactcttttagaagtgaagttctcttcatc

SEQ ID NO: 401967 - DNA, 224 bp, Oryza sativa nipponbare
  unsure (1)..(224): unsure at all n locations
ccacgcgtccgcacccaccaactgagagctgagcaggcgagcgagcggacatggcagcatcgctccaagccgcggccaccctgatgcagccggccaagctcggcggccgggccttctncgcgcgctgccatcgcgcccgtcttcgacgtcgcagggcgttcggcgtnacaccggtgccgcggcaggatcacgtgctcctgcagtcgacatcggaggcgcaacag

SEQ ID NO: 401968 - DNA, 247 bp, Oryza sativa nipponbare
  unsure (1)..(247): unsure at all n locations
ccacgcgtccgcccacgcgtncgaaaaaccaacccagccgccgacgtatcgtcactcgttagatacgaatggcncagagtntggtcgctgcaccaggaccaccaggttaactcgagtaacgcctcctcgtcggagatgagcttagtcggcgagtctgcgactcccgtggccggatcaccatgcgccgcaccgtcaagagcgcgccccagagcatctggtatggacctgaccggctaagtacctggcc

SEQ ID NO: 401969 - DNA, 303 bp, Oryza sativa nipponbare
ccacgcgtgcgccctttctgaacacagcaccaccccttctgctgcatctcccacctccctctgaattgtgggcctgaggcgatggcggcgctcgccccgtccaagatgctcggcacccggctcaactttcccggctcctcccgctacgccaccgctgtaccgaccaccggagcgcagaagatcgtctccctcttcagcaagaagcccgccccgaagcccaagcccgccgtcgtcaccttctcgagccccgacatcggcgatgagctcgccaagtggtacggtcctgacaggaggatctttttg

SEQ ID NO: 401970 - DNA, 278 bp, Oryza sativa nipponbare
  unsure (1)..(278): unsure at all n locations
ccacgcgtccgcaactgggcgctggtgtcgatgaaccacgacacgcagtcgtgcatggaccccaacgtgatggagtccagggtggtggtgagctcctgcggccacgacgggccgttcggcgccacgggcgtcaagcggctgcaggacatcggcatgatcgacgccgtgcccggcatgcgcgctctcgacatgaacaccgccgaggacgagatcgtncgcctcacccgcgaggtcgttcccggcatgatcgtcaccggcatggaggtcgccgagatcga

SEQ ID NO: 401971 - DNA, 352 bp, Oryza sativa nipponbare
ccacgcgtccggcaatacaagcgttgtgctgctaggcgaagcggttgagtgccgcaccctagatggctaaagtccagtagccgaaagcatcactagcttacgctctgacccgagtagcatggggcacgtggaggacctcctgaagcagatcgagtacctgctccgttccaagtgggtgccctgcctcgagttcagcaaggtcggattcgtctaccgtgagaaccacagatcccccggatactacgatggcaggtactggaccatgtggaagctgcccatgttcgggtgcactgacgccacccaggtgctcaaagagctcgaggaggccaagaaagcgtaccctgatgcattc

SEQ ID NO: 401972 - DNA, 124 bp, Oryza sativa nipponbare
ccacgcgtccgtaagaagtactcgagcaaagaaggagagagcttggtgagctgcatagatggccccctccgtgatggcgtcatcggccaccaccgtcgctcccttccaggggctcaagtccacc

SEQ ID NO: 401973 - DNA, 201 bp, Oryza sativa nipponbare
ccacgcgtccgcccacgcgtccgcccacgcgtccgcggacgcgtgggcaagccggcggcgtcgtcggggagcccgtggtacggcgccgaccgcgtcctctacctcggcccgctctccggcgagccgccgagctacctcaccggcgagttcccgggcgactacgggtgggacaccgcggggctcttcgtcgacccggagacg

SEQ ID NO: 401974 - DNA, 220 bp, Oryza sativa nipponbare
ccacgcgtccgcccacgcgtccggaaggagatgctgatgcccaaggaccccaacgccaccatcatgatgctgggcaccggcaccggcatcgcgcccttcaggtccttcctgtggaagatgttcttcgaggagcacgacgactacaagttcaacggcctggcgtggctctttctcggggtgcccaccagcagcacgctgctgtacagggaggagttcgagc

SEQ ID NO: 401975 - DNA, 149 bp, Oryza sativa nipponbare
  unsure (1)..(149): unsure at all n locations
ccacgcgtccgggagcgcgccgtgcaccgcctctcacaatgtcgaccgccgccgccgccgccgctgcccagagctggtgcttcgccactgtcaccccgcgctcccgcgccacagtcgtggccagcctcgcctncccatcaccgagcttc

SEQ ID NO: 401976 - DNA, 135 bp, Oryza sativa nipponbare
ccacgcgtccgcagcccgcgcacctccacagcattagccatcaacgaccagcatctcagctttgctcgccttctcgaagcttctgctgccatggcggaccagctctccgaagagcagattggagagttcagggag

SEQ ID NO: 401977 - DNA, 173 bp, Oryza sativa nipponbare
ccacgcgtccgaggctatgcttagcattccttgcacttagttgtgttgggtatgctattcccttcgtcatgtgtgcagccatatgctgctgctttccatgcttaatttctcttctgcgccttcaaaaagatttgggtcatactagaggagcttctcaagaactaattggtgca

SEQ ID NO: 401978 - DNA, 146 bp, Oryza sativa nipponbare
ccacgcgtccggaggacgcgacggaggcggactccgggaagctcttcgtcggcggcatctcgtgggagacagacgaggaccgccttcgcgagtacttcattcggttaggggaggtcaccgaggccgttatcatgcgggaccttaac

SEQ ID NO: 401979 - DNA, 470 bp, Oryza sativa nipponbare
tgtataaatatatatagccggagcttccatatatttcattcacatatggggcacccaacaacatataggcgtagcagataccactcttacatcaagtcagagagagatcaggtgaaacaaaaacaaaagcagagcacggcctgtaaaatcaaaagacgatgaacaaactgggaacacactaaacaaggtgggagacatcatcgaatcagagatgaacaattaaacaaggctatatatgacgatgactgcttagttgccaccagactcctcgcagcccgggggcttgtaggcgatgaagctgatgagctgcacctgcctgacgttgtcgaagcctatgatactgacgaatgcatcagggtacgccttcttggcctcctcgagctccttgagcacctgggtggcgtcagtgcaccctaacatgggcagcttccacatggtccagtacctgccatcgtagtatcctggggatc

SEQ ID NO: 401980 - DNA, 438 bp, Oryza sativa nipponbare
agcaaatcgatccatgcgaccatgcgtgcaaatcagttggagcacgggggggatgttacacccacaccctacacccatgcataataatacatcgtatatacgtacgtacatacatacccctctcgatcacacgcaccatcgatcgtacaaagttgcgtacatacatacgtacacacatatacgcatacgcacgtacatacatacataattaaaaactcgtaattaattaaatacgtagttgatggcatctctaatggaacttgaggctggtgaggatgttgttgtggacgggatcagcgaggtgatcaagcaggttctgcacggggccaaccccggtgaagagcgcctggactgagaagccgaggaaggcgagcatggcgagcctgccattcttgatctccttgagcttgagctccttcatctccgcctcgctcttgg

SEQ ID NO: 401981 - DNA, 396 bp, Oryza sativa nipponbare
  unsure (1)..(396): unsure at all n locations
ttggcaaagcctgaagattcagttattaatcgtatacggatacagagcagggggggcaacagggagaaattaggtcggagtgacaaaatgggaagaaaaaaacagagaggaagagcctagtgagcgtcttcctcctcgcagtgcttggtgtacttggccgggtccagcagggcgtccagctccgacgggctgctcggcttcaccttgatcatccacccgtcctcgtacgggcttgagttaatcaggccgggtgtctcagagagcttgtcgttaacctcgacgacctcaccggagatgggggagttgatgtcgctggtggccttcacactctccacgttgccgaatgcacctncctggctcaccttcgcccccgccttcggcagctccacgaacacc

SEQ ID NO: 401982 - DNA, 402 bp, Oryza sativa nipponbare
ggagcacaaatttacatgttacacccacaccctacacccatgcataatagggggtcgtatatacgtacgtacatacatacccctctcgatcacacgcaccatcgatcgtacaaagttgcgtacatacatacgtacacacatatacgcatacgcacgtacatacatacataattaaaaactcgtaattaattaaatacgtagttgatggcatctctaatggaacttgaggctggtgaggatgttgttgtggacgggatcagcgaggtgatcaagcaggttctgcacggggccaaccccggtgaagagcgcctggacggagaagcctaagaaggcgagcatggcgagcctgccattcttgatctccttgagcttgagctccttcatctccgcctcgctcttggt

SEQ ID NO: 401983 - DNA, 515 bp, Oryza sativa nipponbare
ttgaaattggcatttatgttccattattataatgcacagtatgggggttcggtgctgatacatcatacattcacgtggtcttcacaatgctacataaaccttcgcggactaagttttgaaaatggctgaatcaaggcaaaacataagcacgattgattcccaaagagaagcagattaatttgctacaacttggatgatctcacttgggcgataagctgccttctcagaatctttcctgaagctgatttgggcacgctgcccacaaaggtaactctcttcaatcttttgtagtacgccacctgtttttcaataaatttttggacatcaacttctgtcaatgaactgtcaggtgaccgaacaacataggcaatgggaacctccccagctttagcatcaggaaacgggataacaacagcatctagaatctctggatgagatagaagtaacccttcaagctcggcaggtgcaatctggaaacctttgtacttaatcagttctttaagtctatcaacaac

SEQ ID NO: 401984 - DNA, 443 bp, Oryza sativa nipponbare
tactaggctaaccacacgaatacactatagattaattacacttacaatagggcgggtcctttacatcacacaaattcataccttactacacgcatagacacaaaacgaccaactgcttaattaatcgatcacacacgggttaaattcaacactaataaccacatacacacaccacactcatatgggtagacattattgaatactaaataacgaatgagactcgctatctatgactattacggttcatttggacttaaattgctgcaattccagtcgctgcaagagcatgaagctgcctgacttgccctcgcctgacttctcgaaggcggtgacctccacgaaggcattatggtacgctctaactatcaccacgacctacctgagccctttcttcacgcactggctcttgaacatacacacgtagcagatggactagtaccaca

SEQ ID NO: 401985 - DNA, 255 bp, Oryza sativa nipponbare
tttaactaagaccactttgatttcctgtttgatacaaaaattaagaggggcggattcacaagagagcaccctctacttaagctttacattacaagccaaccagcagctgcctgcctgccgaccactgcgtgctcactcgctcgcaataatcaaccaatcacacacagtactcactcacataaaaaccacccatagccttcacttactccctgactcactcaccggttcttgccaagctcaagggtagatggttct

SEQ ID NO: 401986 - DNA, 427 bp, Oryza sativa nipponbare
ggaactgctaaacatgaggcattcatcaaatcctatgggcagcaatatatgttttggagcaaaaagctcttaaaatgtgtaataggtattggacaggttcatcacaacatgcccacgggaacatcatactgcaaatccttgtgcaaaacgaccacaggttggggtaggtacaaataatactgagaagataacgatggagtgaggtatcattacaaaaatattgggcttgcccaagacacctaacaagattgaaacagtgttcgtcctacgtatgaatgagatacatgcatagctcctagtcagctcgaagttttacggtcggagttccaagcctcaagccttgctagcaatgttgctggacagccaatccaggccctcgtacagaccctcaccagttgtggcacaagtgctctggatgtaccaatgt

SEQ ID NO: 401987 - DNA, 368 bp, Oryza sativa nipponbare
  unsure (1)..(368): unsure at all n locations
tatcgttgaattgttcgtctcattgctattgataattgatacacacttgggtaggcacaanagaaaactgaggaacagatcatcggtacgtagtatattctcgatggacanaatcgatatatatatatataggatagagccgtaggaggcatatttagattgagaagaaagaataattagttgacggtgaccttgccgaccatcccagctccggcgtgcggctcgcagtagaagccgtatgtgccggggactgtgagcgtgactgagaaggtctcgccgggggcgttgaggtactcctcctgcgatatcttggacacgtcgactccgctcggaacctcgtcctcgtccaacaccactttgtgagcgga

SEQ ID NO: 401988 - DNA, 355 bp, Oryza sativa nipponbare
aaaaacaaggaaacatttttatttcgagggaaggacgcaggactgaagaggcgggaagtgtccctgatgtgtttcatcatccgttctgtcactcacaatggactcaaaatacagacccagatcaagtgtggtgttcaaccaaaatgttaactggcgaatggaaggtggcgtggttttctagaaactgcagatttgtacagaccaatccccagacagaagaaatacaagatcaagactggtgggcagcaaacaaattttgctgggatttatttgccccgattcatcgtccaagttcttcataccttcagggccaacttcttagcagcaagaacctccgcttcgagggttggctccc

SEQ ID NO: 401989 - DNA, 489 bp, Oryza sativa nipponbare
gagagtacatgaacgtgcgtgctggtactcttgtcatcaatcaatgtgggggaatcgacgtaccataccagatcgagtttaactaagaccagttgatttcgtgtttgatacaaaaattaagatggacggattcacaagagagcaccctctacttaagctttacattacaaggccaaccagcagctgcctgccggccgaccactgcgtgcgcacgcgcgcgcaataatcaaccaatcacacacagtacgcacgcacataaaaaccacccatagccttcacgtacgcccggacgcacgcaccggttcgtgccaagctcaagggtagatggttctcgggatgatgatgtccccgatgttgttgtgccacgggtcctagaggtggctggccaggttctccagtgggccggtgcccgggtacgccgactgttggacgcagaaacccacaaaagccagcatggccaatcgcccgttcttgatctccttgagcttg

SEQ ID NO: 401990 - DNA, 385 bp, Oryza sativa nipponbare
  unsure (1)..(385): unsure at all n locations
ttgggaaactaataaaatcattattgcaaaaacatcatcttcttctgggtgttcttantgtacacaacaccaactcgatcatcatctcgtcgcactaaacccatcttccccaacccaaagacaacgaactcgctggccacaaatccatccaaccacaattaaccactgctaagctacggtcccccacttcacttgccggggactaagttggtggcgtacgcccaggcgttgttgttgactgggtctgcgaggtggtctgcgaggttctctagggggcccttgccggtgactatggcctggactaagaagcctaacatggagaacatggcgaggcggccgttcttgatctccttcaccttgagctccgcgaacgcctctgggtcat

SEQ ID NO: 401991 - DNA, 457 bp, Oryza sativa nipponbare
  unsure (1)..(457): unsure at all n locations
tttttaagaattaagatctccatcacataaaaacatacagtgactgagggggggattacacgattgagttgttcagggttcaaataggaaaaacatcttggggactagagatagagggaatcgacagatgcgcagcagtagcgcgcgggaaacaggacatcacgattgcgttgcatgtcttcggctgcgcaccggcggcgcggggcttaagacctgctcttgaatgggatcgccctgatgatcacctggtggtagatggcagccagggcagcgccaactaagggaccaacccagaagatccaatggtcattccaggcatggtccttgttgtagatgatggcagcgccaaggctcctggctgggttgatgccagtaccggtgatggggatggtggccaggtggaccangaacacctcaaaaccaattggcattggggcaaggataggaacatgtgagt

SEQ ID NO: 401992 - DNA, 366 bp, Oryza sativa nipponbare
  unsure (1)..(366): unsure at all n locations
tcagaatacatagcaactgcaagtgctcaaaaattgttacaaancagggtgttgtccacagaaaactggtccaattacctaanaaaaactancccaccatgtctatccatcacaactacaaacacttcctcatctataatgttttaaggtcttataggggtcttatgctgtggtggcagcagaaagcttggacctcctctttgccaagctctcactcctgcgttccctctgctccttgagcctctgggcaagcagcttctggtactctgcagcctctgacttcttcttggcaattctttgcttcttctgggcgattctcgccctcttcctctgaagagtcacgggagtgacaagcctctggatctt

SEQ ID NO: 401993 - DNA, 379 bp, Oryza sativa nipponbare
  unsure (1)..(379): unsure at all n locations
atgtatatgtagcacagtttgattcctctttgctagtcaaaagatggtagtgatgaatcaataatagttacaggattgattccatggagtantangatacaacaattaaggacgatgaagagaaaggggtggctggcgatacacatagagaggcaaagcagggggtagcttanttacaacttactaaactaagctctgatcgatcaaatctgatttgattgatgcacctgaagaagaagaggaagaagactactattatgatgcaatcagctgctgacgtacttgtcgatgatggtggcgagggtggtctttgggactgctctcaaaaccctctccttcttctcgctgtactagagtactccttctttggcttttctag

SEQ ID NO: 401994 - DNA, 485 bp, Oryza sativa nipponbare
  unsure (1)..(485): unsure at all n locations
gtagaaacaacgggtctgaactttcatcgatccatatagtaggttacatagggggagaattctcagatttaacgctgattttgttaagctctctttcctctaacctacnttcgaatgctaagtcaagtactgttcgtagtcccctgggaccaaagcaaataagttactcgtgcgggggagctcgagcagagttttggcaagcaccagctccaacactaacacctacaggtcaatgactcgtgatagcttctggatgcggttcagcaggaagtccccttgcttgatggttgcctggtagaaagcatttctggcatcaggccggttcgtctccaggacgcaagcaaccttatcgatcttgcagtggagctttccagcagcaatgaagcgtgacaattccaggtctatgaaatcaactgtcacaccaaatgcagaagccattgcttccatcgtcacactcttgtaggactcgaggaattgtgaataga

SEQ ID NO: 401995 - DNA, 526 bp, Oryza sativa nipponbare
tttcgatgtaacaagaaagatgattttgactgtgcttcaaacttggtagagtgggggtacaacagctgcgaactaacgcatttagccatagcaaataacaaagctgcaattagcaaccatagtgccactagcataacaagactgaatttgctccagactgttcacagcgaaaggggatgcttgaaacaaaattttcaggttaacataaataatatacaacagcagctaagatattttgaggctagtagttctttggggcaggtttcactaaacccagtccagaaccactccccaaatgcttgaaatctctcgcctctagacgctcatcatgggcagcgaatccagttcctcctttttccaaaggaacgaaattcctctccttgcacggtttgttgcacaccaagcagaccttatcagttacaaggaacttgtcagagcacttcttgcagaagacatggccacacgtgctgatcgtcaccagggacatggtgtttgttagggtagacttgcaactggggcacatgta

SEQ ID NO: 401996 - DNA, 346 bp, Oryza sativa nipponbare
aaatatatatagccggagcttccatatatttcattcacatatgccggagggcgcaacatatagtcgtagcagataccactcttacatcaagtcaagagagatcaggtgaaacaaaaacaaaagcagagcacggcctgtaaaatcaaaagactatgaacaaactgggaacacactaaacaaggtgggagacatcatctaatcagagatgaacaattaaacaaggctatatatgacgatgacggcttagttgccaccagactcctcgcagcccgggggcttgtaggcgatgaagctgatgagctgcacctgcctgactttgtcgaagcctatgatactgactaatgca

SEQ ID NO: 401997 - DNA, 307 bp, Oryza sativa nipponbare
  unsure (1)..(307): unsure at all n locations
ttaaggtaaactcttcataataatattattaagacattatanctggtggcgtttgatcacactgcgatcaaattatgcatcatangcagtacaactcctcgtcaggagaaaagtagaaggagatatatttncttgttattacttaatacagcattcacatgtatcgaaccatccggtacttacgtagtagtactccacgcgttcacatcgatgatcggggacgatatcctcaggtagtacttatgcaaaagctttggcgtaaactgactaactgaactgacggacggtctgatttagggctcccata

SEQ ID NO: 401998 - DNA, 474 bp, Oryza sativa nipponbare
ttgaataaaacatgttttcaattaaatggtcaatacaattatcgtttcagacgtaacacatgataatgaaaaatcaaatgacaaacttttttagaaaatacattattgattactaatagcacatacaacacatcaacacattgccacaatctctactgtcatttcacttgtcaaaatatttaacattaagactgttctttcaatgattgtggttgtggctgctcaccttgccaagcccatacaatatcctttagtgctggtctcatctcttgtttgaccttttgatactcaagtgtatcaccatttatcttcgtaaattccactaaatcaaaatctggtgtgatctgaaatatttcagcattcatggacattacacctttctttccaggttttgatccttccatctctaacaaactaccatttttcttcaagaattttaatcgtaaaattcttcgaaacatcctcaagcttttt

SEQ ID NO: 401999 - DNA, 410 bp, Oryza sativa nipponbare
  unsure (1)..(410): unsure at all n locations
agataaaacatcactctagaatttaatttttgttctcagacacaaacctgggtgagaaacatacaaaggctacgatataattgcagtgcanctgcttattatactacagttcaggcccatttggggggtccattcaaagcccaaatccagccccacttcagtctccccgagatcagtgcttcgcacacggcttgcgccgatctcaaactaggcggcggcagagggtgatgccgtctgagaccgggagctgcacggcctccacgcgcgggtcgccggcgatcttggcgttgaaggccactatggagcggcggatgtcctggtcgaactcctccagcacggagtcgtcctccagcgccacggacccgccccagagcgtgttgtcttaggccagcacgcctccggcgcgcacc

SEQ ID NO: 402000 - DNA, 270 bp, Oryza sativa nipponbare
aacaaaaacaaagcaacgggttcccaaaggtccacacttacagtactttcaacttacaacttattcaagcaaattaaacaggtttgatgattcccttatccgagaaactaaactgtttgattttatttcgaaaccaggctattattgacaatctgcggcgggggcaataaatttaataatccgtgggggggaacttctctttggtttgggaaataaaaaagaccttttaaattatccctgcaaggccaccccccatgagtgggccaaccc

SEQ ID NO: 402001 - DNA, 439 bp, Oryza sativa nipponbare
  unsure (1)..(439): unsure at all n locations
gtactatagtcagaatcttgttttattttactgagtcaggcatgtacggggtttctgatgcgcacaggtgaatcttgggctgaaaaatancctattaatatatatacattgacagatggccactaatttctggagctggtgttcatggagatggcctggccaagtattgcagccattcttcaggcaacccttggctcctcttgagcgtcctgaatgcagcttttgtcaagggtactgcaagaatgtcaaattcctttggcgccttggggaccttgagtagcttcatgtttgcttgctccactgtcttctggcccttcctggagttgcatcttgagcatgcagtcaccagattttcccattcccattttcccgcacgtgcagtcggaatgacatgatcaatcgttaggttatcaacagaagaacaatactggcaagtaaa

SEQ ID NO: 402002 - DNA, 316 bp, Oryza sativa nipponbare
  unsure (1)..(316): unsure at all n locations
cctccctttttttttttttttcaaattcaaaaaccacgatttataaagtgcctgagatgaantacacagaggaacattacatcaagttttaataaaacatcatgctaaaagccacaaaaacaaaaggcagcatacacctaatgaagctctactggagtagctctcaaaaggtcctacttattttcagtagcactctactccatttcttccgaaagagtgaccatcttctactgggtgttgtacatgtgactgatcaggtcaacaactctagagctgtatccccattctttgtcataccaagacacaagcttaacaa

SEQ ID NO: 402003 - DNA, 265 bp, Oryza sativa nipponbare
  unsure (1)..(265): unsure at all n locations
ggacagaaacaaaattaagctagataaccactggttgcacgcacaatttacatggtcattacatcntccatcacacaggcactcatgctatcgattacacatnaggagtatttgattctgtgtgacttagcttaatgagatttgattagcgcgatgatctggtccaggactcctatgttcttgaggcctaggactactcctactcccatgatgtggcctactgcgcctcaggccagcttgtctgcgagcgtgaaccctgcggggt

SEQ ID NO: 402004 - DNA, 375 bp, Oryza sativa nipponbare
aacatactattataccggtttggaagaaaaaaccaccaccattacactaatacacacaaagctcatcaagcagtttaattaattttttccacatgtaccacatgcatccttttcttactccgggatcaatttaaaatgatttttttcattttcaactcgacgactatccattcgaattaaaatcatttgacctcctggatctcgtccagggcgtaattgttggtcgacacccccgcttaattaacctttgcgaacccaaccaccacctggtagccagtgttgggatccttatcaactgtgaccaccgaaccagtgcctttgtaccattaggactccctcctcaagatcttcacctttgtgcctatcttggggcca

SEQ ID NO: 402005 - DNA, 466 bp, Oryza sativa nipponbare
taaatatatatagccggagcttccatatatttcattcacatatgcctcaggcgggaacatatagtcgtagcagataccactcttacatcaagtcagagagagatcaggtgaaacaaaaacaaaagcagagcacggccggtaaaatcaaaagacgatgaacaaactgggaacacacgaaacaaggtgggagacatcatcgaatcagagatgaacaattaaacaaggctatatatgacgatgacggcttagttgccaccagactcctcgcagcccgggggcttgtaggcgatgaagctgatgagctgcacctgcctgactttgtctaagcctatgatactgactaatgcatcagggtacgccttcttggcctcctcgagctccttgagcacctgggtggcgtcagtgcacctcaacatgggcagcttccacatggtccagtacctgccatcgtagtatcctggggatc

SEQ ID NO: 402006 - DNA, 383 bp, Oryza sativa nipponbare
ccctcctcctttgatttgaatatactatatgggggggtatgctaagttgctaactatgcagaaatatatttgaatgaaagcactgcattttttaacactttgcagtatatatgaactactacacagtgacagccggagttgaaagctcaggcaacccattttggccattcagtacaatcaccttcccctcggaatccacatcgacaatggcagaatcaccctctttaacctccccagctagcatcttctccgcgaggttgtcctccaggagcctaatgatggccctctttagcggcctcgcaccatagctcgggttgaagccttcgtcaacgatactctctttgaacttctcggtgacctggaggtcaatgtccttggccttg

SEQ ID NO: 402007 - DNA, 233 bp, Oryza sativa nipponbare
ggagcacactaagattcattcattcatggggtggatcaaagcaaacgagacgagctttcttttttcgatcaaaaacacaaatgggcaaccacacagttaacacaaactagatagttccacacaaaactaactatgataacgatcggatgatgattattttagctctattagatagatagataacttggccatgagggccccacctctcaattcctccagtttctttcggaatt

SEQ ID NO: 402008 - DNA, 370 bp, Oryza sativa nipponbare
atcataaacagagaaatatattaacagaaagaacaaagttactgcactttggcgcagtctaatttacaacagagagaaatatatacatgtgaaaatcttttctattttggcatccaaataaacaacggattttgcgctattttcaactggtaagggatggcttgaagtacatgcacattggtgggtcaatcctcatgatggacaatatcgcagatggaacactccagatcccatcaccgcagatcaaaccagatgcaatcgcgcctgcaaagtcctcagattccttgcggttcaccctctcccagacaaacaggataaccgtcctaactaacatgtcgatcgcaaagtactccccaatgtagaatgggac

SEQ ID NO: 402009 - DNA, 422 bp, Oryza sativa nipponbare
tttataagcaagggattatcaagtccactaggaacaagcagaggcaggcaggtgcgtagtattatacggattataaagaagaaaccaccaccattacactaatacacacaaagctcgatcaagcagcttaattaatttcttccacatgtacgacatgcatcctctcctcactccgcgatcaatttaagatgattctttgcagctacagctcgacgacgatccatccgaattaaaatcatttgacctcctggatctcgtccagggcgtagttgttggtcgacactccggcgtagttcaccttggcgaaccgaaccaccaccgtgtagcgagtgttgggatcctgatcaacggagactacggagccagtgccgcagtaccagtaggactccctcctcaggatcttcaccttggtgcctctcttg

SEQ ID NO: 402010 - DNA, 270 bp, Oryza sativa nipponbare
  unsure (1)..(270): unsure at all n locations
cacatccatctcgtaccctttgtataaatatatatagcggggggttccatatattaaattgacatatgcctcacccaacaacatatatcttancanataccactcttacatcaagtcacagagagatcatgtgaaacaaaaacaaaagcagagcactgcctgtaaaatcaaaaaactatgaacaaactgggaacacactaaacaaggtgggagacattatcgaatcagacatgaacaattaaacaaggctatatatgactatgactgctt

SEQ ID NO: 402011 - DNA, 363 bp, Oryza sativa nipponbare
attgcaaaaacatcatcttcttcttcatcttcttagtgtacacaacggcgggtcgatcatcatctcgtcgcactaaacccatcttccccaacccaaagacaactaactctctggccacaaatccatccaaccacaattaaccactgctaagctacgggcccccacttcacttgcctgggactaagttggtggcgtactcccaggctttgttgttgactgggtctgcgaggtggtctgcgaggttctctagggggcccttccctgtgaccatggcctggactaagaaacctaacatggagaacatggccaggcggccgttcttgatctccttcaccttgagctcctccaactcctcggggtcat

SEQ ID NO: 402012 - DNA, 191 bp, Oryza sativa nipponbare
  unsure (1)..(191): unsure at all n locations
gatgaagagaacttcacttctaaaagagtatcaacttntttttggcagcggttacatcatagtgcaggtacacaatcaacaangcatgcagtctccatccacaattacatcccaatacaccaccaccattcacagcggactcttnggctgacgcttgggctgactcttnggctgactcttgggtctacctt

SEQ ID NO: 402013 - DNA, 451 bp, Oryza sativa nipponbare
  unsure (1)..(451): unsure at all n locations
tgaagataggcacatatatgtatcgtacaatgtcctctccgcttgtcggagggcggataacatcatcgggggatatgatcatcanttcacgagaacacaggaagaaacaaaagctaaaaattaaaaccatcaacagcccgatcgagtttgcattactagatacacacattgcagccttccttccctctctccatgtatcgatatatcaacccggccacgcacaaaacatttgttcattccctactcgagctgcgcgtaccacaccccttggatcttgacatccttgggcaccttggcgccgaggtctgtgtccgacggctgcacgctctctaagactccaatcacctcgccggtctctggcttgctcttggtgacgctcaacttgatgttgcccgtccactactaggctttcttgacgttctccttagcgagctcctcctcggctcctctg

SEQ ID NO: 402014 - DNA, 305 bp, Oryza sativa nipponbare
  unsure (1)..(305): unsure at all n locations
gggagatcctataataaccatacgtggggaattcnatcatcccttggatgcggcctgcggcttacattaaatctcgatccaaagaagcaaagatgattacagacagaaattaattaagctagaaatctcctcggtcgatcacacacacacacacaattaaggtgcatacatacatgcactgctgcaactgcaactgcagggtcggtgcgtggctactacaagtgtacacatgggactttggttggcaccatctcaatcgtgtcgttgtgctcacttgccggggactaaattggtggcctatgccc

SEQ ID NO: 402015 - DNA, 338 bp, Oryza sativa nipponbare
agcaaatcgatccatgcgaccatgcgtgcaaatcagttggagcacgggtgggatgttacacccacaccctacacccatgcataataatacatcgatatacttacgtacatacatacccctctcgatcacacgcaccatcgatcgtacaaagttgcggacatacatacttacacacatatactcatactcacgtacatacatacataattaaaaactcgtaattaattaaatacttagttgatggcatctctaatggaacttgaggctggtgaggatgttgttgtggactggatcagctaggtgatcaagcaggttctgcacggggccaacctctgtga

SEQ ID NO: 402016 - DNA, 478 bp, Oryza sativa nipponbare
tcgagacaatttactcaggtagcaaatatttctcagccacaaatccaaacgctggggccttcctatcagaagatcagaatgaacaggttttcaaattcatctcccaactcgacgataatttacacgtacatttaacacattcttccacccttctcaaactcctcccttcttcttcccgggtaagattaaaattaacttgaggccagccagcgtcgccggcggcgagatgtttacaggctgggcgtcctctcggcggcgccggagatgacggtgagcaggttgttgccgaaggggtcgctgaggtgcttggagaggttctcgacggggccctcgccggtgacgtaggcctggatgaagaaccccagcatggagaacatggccagccgcccgttcttgatctccttcaccttcagcagcgccgcctggtccgggtcgctcgccagccccagcgggtcgaatgggccacctgggtggagct

SEQ ID NO: 402017 - DNA, 443 bp, Oryza sativa nipponbare
aaacagcctaattccaatgtgctcattcggtctctcaccaaatcccattactgggtcttgacaagtcacaacacttctgaatgcgtcatatattacatgaaacccaacaaatcaagctaaataggagtataccatacatggaataggcagtgatctccaaatgaaaaccacagagaacatattgcaacacaagaacacaaaagcgcaccatttcgcgttcgccatcttcgtctacctcatcatgccgaccgggacgccaggagctcccatcaccgacgctccggtgacgcctcgcctttgcctgtccacattggcagcccaaccgatccccaagtcgaagccgcggttcttgagctcccggtactcctggcacagcgcgcagtactcgcagcagaaatggactaggaaatcggggcaatccccttcgtccaggtcgaactgag

SEQ ID NO: 402018 - DNA, 222 bp, Oryza sativa nipponbare
aaaaaaaatatgtgggcccaccttccatatatttgattcacatattcctcacccaacaacatataatcctagcaaatacctcttttactttaaatcaaaaaaaaatcattttaaacaaaaacaaaagccaaccacccccttttaaattaaaaaacttttaacaaactttgaacacaccaaacaaggttggagacttcttcttattaaagattaacaattaaa

SEQ ID NO: 402019 - DNA, 527 bp, Oryza sativa nipponbare
  unsure (1)..(527): unsure at all n locations
tttttgactccaaatgattgaaaaggtattctaaaagtacanagtaggggggagcaactctatacattctacagcagggagaacagattcaacacataactagaatctaccatcaagaacataacaggttaagctggattgcttcttatgttgccctgtggaaatctacaaactaactagtcataatataatgataaatatcgtcggataatagtcgatatagatcaacaacagggtggctgtaatactattgcccacatgcacccaaatttggtcacaaatcgtagcgatgctccacaacttcatgggcacttcctttggatgtaggatactccatgttcttcgtattctgctttggagaaccacatttgctggaacgacctcaaggatgctagaatgctccctccaatccaaacactgaatcgcctctctactgaatttccacttgccaaaacctttacacgagtattaccagaagattcctcaagtacttctttntctagcctctccttcaactgcagaattga

SEQ ID NO: 402020 - DNA, 284 bp, Oryza sativa nipponbare
aacctcacggacaacatataataggaggaaataccacttttatattaaataaaaaaaaatcattttaaacaaaaacaaaagcaaagcactgcctgtaaaattaaaaaactattaagaaacttggaacacacaaaacaaggtgggaaacattatttaatcaaaaataaacaattaaacaaggttatatattaccataaccgtttaattgccaccaaaatttctcaaacctgggggcttttaggccataaaatttataaacttcaccttccttactttttcaaaac

SEQ ID NO: 402021 - DNA, 299 bp, Oryza sativa nipponbare
  unsure (1)..(299): unsure at all n locations
tacagcanaaaatgggaaaccactttatagtccaccaatcctcagggtgatgtctacatgcatctcatcagatgagatcagatctagtacaacaagatggcttatgccangttgcgcatgcatgcatgaaaatcgagataaaaagggattaattaattattaacatatatatatccatcagtagacttccacattccattgctcccacttcttcagctgcttcttgtagtcaagccactcgatgccgtcttttgcagcgaggtctatcatgatctccaccatgcctttctccatgccct

SEQ ID NO: 402022 - DNA, 382 bp, Oryza sativa nipponbare
taaccaaaacataggaggtttcatttcttcttctcaaagtagtgtagcatgctttccttctttcaccattacataagcttaagcaataacagataacaaatcctcctcctcctctaggtaaaatattcaaacacaatacccttataagtacttattattaggaaagtagcgtgcatgggcataaatggcagcggggggcaggttaagaatcacaatgctgagcagcgaggaaacaaaacaccataatgggacagagcaaaagcctccgaaagggagcttttaggcagaaggcttctcccacttgaggggcttcaccacctcccaggtgaagtctgggtcgtcccttccgaagtgaccgtaagccgccgtcttgaggtagcgt

SEQ ID NO: 402023 - DNA, 497 bp, Oryza sativa nipponbare
ttaaaaaggtaaactcttcataataatattattaagacattatagctgatggctgtggatcacactgcgatcaaattatgcatcataggcagtacaactccgcgtcaggagaaaagtagaggagatatatttcttgttattacttaatacagcattcacatatatcgaaccatccggtacgtacgtagtagtactccacgcgttcacatcgatgatcggggacgatatcctcaggtagtacttatgcaaaagcgttggcgtaaactgacgaactgaacggacggacggtcggatttagggctcccataagtccaagttgccggagacgaagtcgtagtggccgccgacgagcttgagggtgccgttggcgatcccctccttgacgaacgggtaggtcttgaggttctccagggattggttcacggcctccttctccaagatggcgcattggtcatcgaaaggcagcgaggcgtgctcggtctgaaccttcttttggc

SEQ ID NO: 402024 - DNA, 414 bp, Oryza sativa nipponbare
  unsure (1)..(414): unsure at all n locations
ttttaacttgcactggccagtgttatttctcgatctttcagtggagcatggtggacacgcccacacaattggtttgccattttacaacaacacacatattcgtgtagctcattgactcatgagaatctcagtgctggctcaattattacaggatcacgcacttctggccacgcttgctcgccggcgcggcggagggccctgcactcttcgtcctgctgccgccgtcgnggtccctcttctcctctatcctcttcctcctcttcttggccatcatgcacttgacgaactcctcgtagttgatctgcccgtcgccgtcgacgtcggcctcgctgatcatctcgccgacctcctcgtcggtgagccgctccccgatgttggccatcacgtggcggagctcggtggcagagatgaaac

SEQ ID NO: 402025 - DNA, 470 bp, Oryza sativa nipponbare
  unsure (1)..(470): unsure at all n locations
gaagtgaactttgtgctctttatttacaatcttgacatcaaatgttacatgaggatatacttatgtttctactggactgcagaaacttgtcactgcaacatcanngtctccaacttttctgtcatcacttttggtgagactcacagggtgatgaaagcgagattagtcgctttcattgcaaatcaacaaactacaatccatgagcacgtcttttatgtgcatatgagcagatgaaacaagcaaacatgctagagaagaagacgtgttctatacagtgaatctcgagctagctatacctcttcctgccatcctatcaacacgtcggcgactcaaaggcaagccaaaaaatgatcgaaccacacccccaatctcggtcttgcagagtgggcacactgcatttatcttgagccatttatcgacacattgcacatgaaagaagtgggtgcaaggaagctcacggagctcatcat

SEQ ID NO: 402026 - DNA, 113 bp, Oryza sativa nipponbare
cttgaagcagcagagcgaggtagacatggccgccgccaccatggccctctcgtccccggcgctccggcaaggccgccgcgaggtgttcgggaggggcgcattacctgcgcaag

SEQ ID NO: 402027 - DNA, 152 bp, Oryza sativa nipponbare
  unsure (1)..(152): unsure at all n locations
catcttcatgcgctcctggaccggcacaatcattggaccactcaactctgtgcacgaggngcgcatctaccagctgaagctcttctgcgacaaggactaccccgacaagccggccaccgtgcgctttcactccaggatcaacatgccctgcg

SEQ ID NO: 402028 - DNA, 245 bp, Oryza sativa nipponbare
ccacgcgtccgggcacccggttcgagaccggcgaggtgaagtccaccccgttccagccctacaccgaggtgttcggcctccagcgcttccgcggtgcgagctcatccacggccgctgggccatgctcgccaccctcggcgccctctccgacgagtggcttaccggcgtcacctggcaagacgccggcaaggtggagctggtggatgggtcgtcttacctggggcaaaccgttgccgttctcgatc

SEQ ID NO: 402029 - DNA, 287 bp, Oryza sativa nipponbare
ccacgcgtccgcacgctcatgaccgcattctatcacatgaagcccgagctcttctagccggtcaaggtcggccaggcacccaagtacatggagtctcgtgcgccgactttcgcgtgtggccgttggtgaccatgggcctggagcccggcgaggcctttaccgtccgcaacatcgtcaacatggtcccagcttactgcatgatcaagcacgctggcgtcgggtcggccatcgagtacgccgtctgcgccctcaaggttgaacttatcgtggtgattggccacaaccgc

SEQ ID NO: 402030 - DNA, 132 bp, Oryza sativa nipponbare
ccacgcgtccggcagcagcagcagcagcagctgagcttgaagcagcagagcgaggtagacatggccgccgccaccatggccctctcgtccccggcgctggcggcaaggccgccgcgaaggtgttcggcgagg

SEQ ID NO: 402031 - DNA, 107 bp, Oryza sativa nipponbare
ccacgcgtccggcagcagcatcagcagcagctgagcttgaagcaccagagcgaggtagacatggctcccgccaccatggcccttttgtcctcggccttggggaaagg

SEQ ID NO: 402032 - DNA, 161 bp, Oryza sativa nipponbare
cgtccggcggcgaggcaccagcccaccggccggcaatggcgtccacctcctgcttcctccaccagtccacggcccgcgtcgccgcgcgcgtcgctccccgtccccggcgacacggacccaccttctcgtctgccgcgcccagaagcaggacgacgccgacg

SEQ ID NO: 402033 - DNA, 258 bp, Oryza sativa nipponbare
ccacgcgtccggacaccttccgtcttcaggagcaacctccttttgacaagaagcagtttgtgaccttcatgaagcgctacatcaagaacctctcgcaagctggatgcggaaaagcaagaggaattcaagaagaacattgagggtgccaccaagtacttgcttggaaagctcaaggaccttcagttctttgttggtgagagcatgcatgatgatggcggcttggtgtttgcctactacaaggaccgagccaccgaccca

SEQ ID NO: 402034 - DNA, 480 bp, Oryza sativa nipponbare
ccacgcgtccgcaagttcaagaccgagttctatgacaagaagccggagctcttcgagccgctcaaggccggccaggcacccaagtacatggtgtctcgtgcgccgactctcgcgtgtgcccgtcggtgaccatgggcctggagcccggcgaggccttcaccgtccgcaacatcgccaacatggtcccagcttactgcaagatcaagcacgctggcgtcgggtcggccatcgagtacgccgtctgcgccctcaaggtcgaactcatcgtggtgattggccacagccgctgcggtggaatcaaggccctcctctcactcaaggatggagcaccagactccttccacttcgtcgaggactgggtcaggaccggtttccccgccaagaagaaggttcagaccgagcacgcctcgctgtctttcgatgaccaatgcgccatcttggagaaggaggccgtgaaccaatccctggagaacctcaaga

SEQ ID NO: 402035 - DNA, 206 bp, Oryza sativa nipponbare
ccacgcgtccgcccacgcgtccgcccacgcgtccggaagatgatcaggcagatagcgaggcaaacatgtatgatccaagcttggatggagcggataacaggtttcggccttcccacagaaagcgagcgatccctaatggagcgtgtccgtcaagagctaaagcatgaactaaagcagggttacaaagagaagcctgatgacataag

SEQ ID NO: 402036 - DNA, 246 bp, Oryza sativa nipponbare
  unsure (1)..(246): unsure at all n locations
ttcccgggcggacgcgtgggcgaccgagctaccgagctaatccagccatggcctccaccgcgctctccaccgcctccaaccctactcagctgtgcaggtctcgcgcctcgctgcaagcccgtcaagggcctgggcttcggccgggagcgcgtgccgaggacggcgacnaccatcacatgccaggccgcgagcagcatcctcggtcgactcgcgncccggacatgggcaagcgccagctgatgaacc

SEQ ID NO: 402037 - DNA, 160 bp, Oryza sativa nipponbare
  unsure (1)..(160): unsure at all n locations
ccacgcgtccgcccacgcgtncgcgccgaccgcgtgctctacctcggcccgctctccggctagccatcgagctacctgaccggcgagttccgcgcgactacgggtggtacaccgaggggctctgcgcctacccggagactttcgccaagaaccgtgagct

SEQ ID NO: 402038 - DNA, 334 bp, Oryza sativa nipponbare
ccacgcgtccgcttcgttctggtccagcatcttctctgcgtatcaatattcgagcagtggcgcagtatgcttctagcagtggtcaaggcaaagcgcctctgatgcagtggacgaatgcttacgagcattggaagatcttgactcactgctactacaagcatcacggaacaacccatcagcggctgtcgatgtcatgaggagcaaaatcagtgtagcccttggagctttagacaaccttcttcagactgtgccatcagcagtgcttgacaaagggaaggccattgccgatgcataccggactcctacggatgattatgaaatgggccgatgcaac

SEQ ID NO: 402039 - DNA, 168 bp, Oryza sativa nipponbare
ccacgcgtccggtaggataaagccacagagagagcagtagtagtagcgagctcgccggagaacggacgatcaccggagaagggggagagagatgagcgggtcaggacctgcagctgccgccggggttccggttccacccgacggacgaggagctggtgatgcactacc

SEQ ID NO: 402040 - DNA, 397 bp, Oryza sativa nipponbare
cgcgtccgggggcacgctgccgacgatcctggtcatcgagttcgtcgccatcgccttcgccgagcaccagcgcaccatggagaaggaccctagaagaagaagtaccccggcggcgccttcgaccccctcggcttttccaaggaccccgtcaagttcgaggagtacaagctcaaggagatcaagaacgggcgattggccatgctggcttttgggggtatctgcgtacaacagtcggcgtacccgggcaccgtgccactggagaaccctggcagccacctttcggacccgtggcacaacaacatcggcgacattatcatcccgagaaccatctacccttgtacttggcacgaaccggtgcgtgcttccgggcgttcgtgaaggatattggtggttttta

SEQ ID NO: 402041 - DNA, 224 bp, Oryza sativa nipponbare
ccacgcgtccggtgttgtcactacagatttctgagcttggtatttatcctgctgtcgatcctttggattccacatccagaatgttgtctccccattactgggtgaggaccactacaacacagttcgtggtgttcataaggatcttcataattacaagaatctttaaagaattattgccatttctggaatggaccagctcagcgaggatgattagttgcagtcgc

SEQ ID NO: 402042 - DNA, 297 bp, Oryza sativa nipponbare
  unsure (1)..(297): unsure at all n locations
ccacgcgtccgcccacgcgtccgaaccaacccaaccgccgtcgcatcgccctcgttagaacgatggccgcgtcggcgctgcaccagaccaccagcttcctggcaccgcccctcgccgggatgagctcgtccgccgcgtcggcgactccggtggccgcatcaccatgcgccgcaccgtcaagagcgcgccccagagcatctggtatggacctgaccgtcccaagtacctgggcccgntctcggagcagacgccatcgtacctgaccggagagtttccgggagactactggtgggacac

SEQ ID NO: 402043 - DNA, 238 bp, Oryza sativa nipponbare
ccacgcgtccgcacaaaaccaacccaaccgccgccgcatcgccctcggtagaacgatggccgcgtcgtcgctgcaccagaccaccagcttcctccaccgcccctcgccgggatgagctcgtccgccgcgtcatctacttcggtggccgcattaccatgcgccgcaccgtcaagagcgcgctccagagcaatctggtttggatctgaccgtcccaagtacctgggtccgttcttggagc

SEQ ID NO: 402044 - DNA, 173 bp, Oryza sativa nipponbare
ccacgcgtccgccctatcctctttctcttctacacaaaaaattttctcctcctctttctcttctctctgtgtcactgcgtgtgaggagcgtagctagagtgagaaaataatggcgttggagacgtgctttagagcctgggcgactctgcacgccccacagccaccgtctcggc

SEQ ID NO: 402045 - DNA, 440 bp, Oryza sativa nipponbare
ccacgcgtccgaacggcggcgccggcgagatggcgcagtcgctggcggcgtcggccaagacgttcttcgcggcgctggcgctgtcctcggtgcgctctactcggcggtatataattataaattatatatttaaaaatatatacttataataaattaataatagatttaaaattttaacttaaaatattaaaattaacaattaattattattatttttaaataaataaatataattaaaaaaatttatttattaaaaaattatttaatataaataaacttaataaaaaatatttaataaatatatatataatttaaaataatataatattaatattaataataaaaatttaaaaaaatataatttataaaaaataaaattaattttatataatttaaaattaaataaaaatataataatattattaaatataataaatata

SEQ ID NO: 402046 - DNA, 417 bp, Oryza sativa nipponbare
ccacgcgtccgcccacgcgtccgcaccggctatctatccatctatctactcagctttgcgtcctcccgcgaattcaccgcagcaatggcgtccctgtcgccgtccagcctgtcgccgtgaagggcctcgccggcagctccatctccggcaggaagctcgccgtcaggccgtcgccccgggcgctctgccgcaccacccgcaggccgcgcgccgccgtggtggccaagtacggcgagaagagcgtctacttcgacctcgaggacatcggcaacaccaccgggcagtgggacctgacggctccgacgcgccgtcgccgtacaaccctctccagagcaagttcttcgagacgttcgcggtgcccttcaccaagagggggctcctgctcaagttcctgctgctcggcggcggatcgctggt

SEQ ID NO: 402047 - DNA, 251 bp, Oryza sativa nipponbare
  unsure (1)..(251): unsure at all n locations
ccacgcgtccggagcgaggaggaggaggagatggcggaggcgaagcagcagcagcagcagccgcaggcggcgaccgcggcggcggcgagccgggtgtggagacggtgaagcccttcgccaacggcggcgccttcgggatgctcgccacctgcgtcatccagcccatcgacatggtcaaggtgaggatccagttgngtgagggctcggcggcttctgtcaccaagaaaatgcttgcaaatgagggaattagt

SEQ ID NO: 402048 - DNA, 350 bp, Oryza sativa nipponbare
ccacgcgtccggctctcacagctcactgcatcaatggccgcggccaccatggcgctctcctccccggtgatggcccgcgcggcgccgtcgacctcctccgctcttcggcgaggcgcggatcaccatgcgcaagaccgccgcgaagcccaagccggcggcgtcgtctgggagcccgtggtacggtgccgaccgcgttctctacctcggcccgctctccggcgagccgtcgagctaccttaccggcgagttcccgggcgactacgggtgggacaccgcggggctcttcgtcgacccggatacgttcgtcaagaaccgggagctggaggtgatccactcccggtgggtgatgc

SEQ ID NO: 402049 - DNA, 87 bp, Oryza sativa nipponbare
  unsure (1)..(87): unsure at all n locations
ccacgcgtccgcgctatctggcagnattatcacatcagcaagccatgtgtggttagcctatgctatgacctgtctaatacggagaag

SEQ ID NO: 402050 - DNA, 193 bp, Oryza sativa nipponbare
ccacgcgtccgcggacgcgtgggcggacgcgtgggtcaagaagtactcgagcaaagaaggagagagcttggtgagctgcatagatggccccctcgtgatggcgtcgtctgccaccaccgtcgcttccttccaggggctcaagttcaccgtcggtatgcccgtcgcccgccggtccggaacttcagctttgcaa

SEQ ID NO: 402051 - DNA, 189 bp, Oryza sativa nipponbare
ccacgcgtccgcaccaaggaaggtctgaagcttgatgagagtgaggacgagaagaagcggcaggaggaactcaaggagaagttcgagggtctgcaaggcgatcaaggaggtgctcggtgacaaggtggagaaggttgttgtctctgaccgagtggtggactcttcctgctttctagtcactggggagta

SEQ ID NO: 402052 - DNA, 245 bp, Oryza sativa nipponbare
ccacgcgtccgcggacgcgtgggcggacgcgtgggggccaatctggttccccggcagcaccccgccgccgtggctcgacggcagcctccccggacttcggcttcgaccccctgggtctcggatcggacccggagagcttgcggtggaacgtgcaggcggagcttgtgcactgtcggtgggcgatgctgggcgcggcgggcatcttcatcccggagttcctgaccaagaacggcatacttaacacg

SEQ ID NO: 402053 - DNA, 195 bp, Oryza sativa nipponbare
ccacgcgtccgcccacgcgtccgcggacgcgtgggcgcgcgccggccatggccaccgcgacgctgcccctccgcctcctcgcctacaaaaccctaccttgccctacgccccgtccctcccggcctcgagatgctccctccccgtcgccgggtacgcgccccgtcgttgctggcggttactcgattacgtcgagga

SEQ ID NO: 402054 - DNA, 323 bp, Oryza sativa nipponbare
ccttctaggggaggccatctgttaattagtactacctgatttcaagcaaaggcttgatcagaattaatccatttaattctgctctgcctgggaggaactttgcctgcaggctgctccatggattccaactccatccagcgtttggctggcaaggtggctatcattaccgggggagccagtggcatcggaaaggggacagcaaaggagttcatcaagaatggcgccaagggcatcatcggcgatggccaggacgaggttcggcactctggggcggacaagctcggaccggacgcctcgtacacgcactgggatgtgaccgacga

SEQ ID NO: 402055 - DNA, 215 bp, Oryza sativa nipponbare
ccacgcgtccgagaagagcaactccagcaggtagaaaggccagaagcaaagatggcgatctccagcctacatgccaccacctccctgcactcccatgcaccaccaacacaagcttcaggcagaatcaggtcatcttcttcaccaccagaagcaacaggaggggtagcacaaggtacggaggagcaaagaaccttcaggtttcatgctcagtcgac

SEQ ID NO: 402056 - DNA, 441 bp, Oryza sativa nipponbare
  unsure (1)..(441): unsure at all n locations
gtnttttttttttttttttgatacaggagggcggggtgttattcaatctgtctcanccttcaaaccaagccaaacctgtccttcacattggcatgcatatgatagcaagcagggcagccattaggcattagcaaggctattcagtaattaccaacaacactgcactacatacacatctagtactactacctttcaggtgacagatttgggggcaggtgatagttacgaacggtgcgtgccatggacagagatagcaatccaatcctatatgagtatatagcagcagcagcagcaacaggaacatgccctcgaacatctcacggtatgactagaagaaggtcccttctggaggctgaaccagcttgcggctgtgcggcgcggccatctccttcttcagctgcgtcaggatattctccatggtgtactccctctgccagtttg

SEQ ID NO: 402057 - DNA, 592 bp, Oryza sativa nipponbare
aattaagctgcacaatatatatgtgtagccagtataataattaccacgacaacatacgcacacatattgacataattaagcctgctacgtaacaaagcatcatccataaacacgcgtaccgtgccgtgcatgcatacagatacatacaggcactccacttattttacaaccattcacactctcacactgaaagtcccaaataaaactgacaacagacgcatgcatcgatcatatcatatgcatgatcgtccatagtcgtagattgtaaattgaacaacgaaatcaagaacaattaatcaagcagctgatcgatctctcgtatcaaatgaacatcgtcgtcttcctcacgccgtcacgctggtgctcctgaacgagctgagcgccttggcggcctcgccgcgcagcaccagcttgtggtacgccgccgccaagaacgccccgatcaccggccccacccagaagatccagtggtctttccaagctgcgtgcttgttgtacagcacggcggcgccgaggctcctcgccgggttgatgcccgtgccggtgatcggaatcgtcgccaggtgcacgacgaacaccgcgaacccgatcg

SEQ ID NO: 402058 - DNA, 425 bp, Oryza sativa nipponbare
tagcaaatcgatccatgggaccgggcgtgcaaatcaattggagcacaaatttacatgttacacccacaccctacacccatgcataataatacatcgtatatacgtacgtacatacatacccctctcgatcacacgcaccatccatcgtacaaagttgcgtacatacatacgtacacacatatactcatacgcacgtacatacatacataattaaaaactcgtaattaattaaatacgtagttgatggcatctctaatggaacttgaggctggtgaggatgttgttgtggacgggatcagcgaggtgatcaagcaggttctgcacggggccaaccccggtgaagagcgcctggactgagaagcctaggaaggcgagcatggcgagcctgccattcttgatctccttgagcttgagctccttcatct

SEQ ID NO: 402059 - DNA, 454 bp, Oryza sativa nipponbare
  unsure (1)..(454): unsure at all n locations
tttcccctggctgtacacgttggtgtgcaccgggtacgggtcgcctctcgcattccccaggaactcnaagtcgatctcgtcgtgctgcgacccctgcgacgacaggtagaaggtggcgactgtgccggcggagttgccggggactagcttgatctgcatgtcgaaacggccgtacaggtactggttcttggactggaagccggagccggacgacctgtccagcgacagcgtcaggagctggccgttgccgaggatcttgccgcggccgtcgccccaagtgatgtccacgtcctggtagaagttgccggcggcgccgccggcgagcagcagcacggagcacacaatcgccgccaccaacggcggcgttctcccgggattggaagaagaaaccatcgtgtgtgtgtgtaacactgttggattggattcggtttttgatcgatcgatcagatggttt

SEQ ID NO: 402060 - DNA, 432 bp, Oryza sativa nipponbare
gggtcggggtacaagtggatgcattaattcatcatcttgggtgttcttatattacaaatcaccaccatgcaagtcgccattaaccaccaacccagctttcctaatttaagtagtaatcaacaaaaggatgacctctcctctctccataccctcccagctcgctcgtcatcacaaaactaaacagcgcgcgcgaacgcacaccaacgcatcgatcccgtttgaattgcgcgcgaaagagcttaaattaaaaggatgaggagaaggtgtcgaaaatggtggtgtggagcgggtcccttaggtgggtggcccacttgttgaggggccccttgccggtgacgagcacctcgatccaaatcagcgtctagatcgagaacggcagcggctgccccaggtacgacgacccatccaccagctccaccttgcccgcgtttt

SEQ ID NO: 402061 - DNA, 445 bp, Oryza sativa nipponbare
  unsure (1)..(445): unsure at all n locations
aattcacaacaccatatttcatggatcaggttcagaacctgcacagaaatacacactaccggtacagatctcaccttctctccaatactcgtacatccatccacgcggtccacacgaatacgtacatctatacggtacacgtacgtacatctactgcaccgngtacacacacgcacactctcctgcagagacgcgcatcgtcgtcaacctagctagcttagctgaaggcgatgcgtcgccatggcagcacggcggcggcggcgctcacttgccggggacgaagttggtggcgtaggcccaggcgttgttgttgacggggtcggcgaggtggtcggcgaggttctcgagggggcccttgccggtgacgatggcctggacgaagaagccgaacatggagaacatggcgaggcggccgttcttgatctccttcaccttgagctccgcg

SEQ ID NO: 402062 - DNA, 461 bp, Oryza sativa nipponbare
  unsure (1)..(461): unsure at all n locations
cacagaaaatcaatccttncatggaggggaaatcgatggatcgacctctctccttaacttgttcttaattctcatgtacaatcaaagaaacacacacgcacacacacatgcgtgcactggatctctctgagcaacgaactcgattgatttgattttgattcgctagggattaaagagaagctgagatagagatttcgacgatcatgctaccctgaaggagctggctgcgctctcgacaaacttcctggcgcccttgaaccacctcttgtcgccggcctgcgccttgcagatgtacagcttgccgtcgttgactgtggccgtgatcagctggtgcttgccgccctcctcgccgtccgccgtcctcgtcagcaccgttacgctgtagtactgcttccctcccaccaccggcgccgagctctccaggatgttcgccgtccccaccgcgtccgactcaaacccac

SEQ ID NO: 402063 - DNA, 428 bp, Oryza sativa nipponbare
ggtagcgagcacaacaatttcatcattatctttctccaaccatcacaaagcaaattaatatcgttccaaacatttaaggagctcatgaatccaataatcccgaggtttttttaaaaggactcatctcaacatccataacaagcaaaccatagttgtttcccacaccaacattagaccatatcgagtcaactgacaaccatagactagaccaaaaataccgcggactgcataaataaaacatcaatgtcgagcaaaaggaaccgctcaacacttgacctccttcagcccatgagagaagtaaaggaaggttgggtcggtggctccctccttgtagtaggcaaacaccaagccgccatcatcatgcatgctctcaccaacaaagaactgaaggtccttgagctttccaagcaaatacttggtggcaccct

SEQ ID NO: 402064 - DNA, 201 bp, Oryza sativa nipponbare
  unsure (1)..(201): unsure at all n locations
tcatttgatcaaancaaggacgggacgagctttctttttgcaatcaaaaacacagatgggcaaccacacagtaacacaaactagatagtagttccacacaaaactaacgatgataacgatcggattattataatggtagctccattagatagatagataacttggccatgagggccccaccgctcagttcctacagttccc

SEQ ID NO: 402065 - DNA, 326 bp, Oryza sativa nipponbare
  unsure (1)..(326): unsure at all n locations
caaaagagaatgggctacaaatctccactcaaatnatacaaatacacagtgagcacgacaagcgttcaattattcatgcagttgtgtcatatcacaaagggtctaggtacaataattttttcattgctggccaatcaatcaatgatcatcatcagatcatcaccatttccagaagactttggatccgcacttgtacttctccttcccctcgcactctatctcaaaatcatctaagatgaatgggactttcttctgcttggcaaagtcctggcagcctgttaaattttatgggaacttgcaacttcctaactctactgtgtacaccc

SEQ ID NO: 402066 - DNA, 431 bp, Oryza sativa nipponbare
ttaatagtaatagactctttgagggaggattacaacatgcagcagtggcattaatacgccagtacattaattaagttacacatatgcaggctccattttggtttcttttaatttatcgtattacagaatttctgtagccttgctgatgatcacttggatatcatgtactagtaattaacaataggatgcatacaaaagatggcccaacgacaacagaagatgcgtgcatctgacattgtctggccttatttggttggtagtactccaattaattaacaagagatgatgcattcttgtgccttagtttcttcacatgcttggcttcacgttgagcctattcgcaatcttcacccccaacgactcatcacactgggagaggtagttgacccagatggcgcggagctcaggggagaccttggggtgcgcgagct

SEQ ID NO: 402067 - DNA, 432 bp, Oryza sativa nipponbare
  unsure (1)..(432): unsure at all n locations
aagctaaataaacccacancaggggatgcatatatacgtgtgaaaaaaatcntctgaagcggaccgttcaaccgcttgtctactacgcatggagaacaaaaacatcaacaccaggggtatgagcagtattacccagtggtatctagaaactgaaatataaatttcgccattttatacaacccctttggaaaaatttccccttttcttcaaatcaagcgcttacagaactatatatgtttacttgcaattagttttgtctataaaatataactggttctctaatatacggctcctgatcctgatcttgcagaacatttcctgatctaagcaattggcctcctattggtttggatgaattcctcctgccctgtaacccagcatagtgttcagccctcggcgatcatctgctaccaattgttatcacctgcatta

SEQ ID NO: 402068 - DNA, 410 bp, Oryza sativa nipponbare
tctcaagggcaaaacaaatcagagtcatgcaattgctctgaaacaattctctatatatgctatcttatgccctgaattcttcagtctttcagtttcagagtgtagtgcagatgcagaaatgcccatattcaggaagacatctaaggtatgatctgctataaaagagtatccatctcacagattcataaccctcaaaaagggttacttatgcagtgaaaagggttttatgctctttcatacagtgtgacagtgtgtgtacatataatttggaaaaacaaagtgaagatggatttacagcagcgtttctcagatacagcggacttatagctacaagctgatcacacaagtgaactttgctgctgatgatgatatggatcatgttgttatagcttacgcccaccacgggttgt

SEQ ID NO: 402069 - DNA, 441 bp, Oryza sativa nipponbare
tttttaattcacaacagcgtaggtcattgatcaggttcagaaccttcacagaaatacacactaccggtacagatctcaccctctctccaatactcgtacatccatccacgcgggccacacgaatacttacatctatactgtacacgtacgtacatctactgcaccgcgtacacacacgcacactctcctgcagagacgcgcatcgtcgtcaacctaactagcttagctgaaggcgatgcgtcgccatggcagcacggcggcggcggcgctcacttgcctgggactaagttggtggcgtaggcccaggcgttgttgttgactgggtccgcgaggtggtctgcgaggttctctagggggccctttccagtgactatagcctggacgaagaagcccaacatggagaacatggcgaggcggccgttcttgatctccttcaccttg

SEQ ID NO: 402070 - DNA, 432 bp, Oryza sativa nipponbare
  unsure (1)..(432): unsure at all n locations
tttttggcaaaaantacgaactgtacttcacttcacaattcacatatantacagtcacattgacaaaactttcagtatgtgttaacaaattcagcatcaaagaatatcctggagttgtttcaatcttggatccaactctgttgcatcgcccatttcataatcatccgtaggagtccggtatgcatcggcaatggccttccctttgtccagcactgctgatggcacactctgaaggaggttgtctaaagctccaagggctacactgattttgctcctcatgacatcnacagactctgatgggttgttccctgatgcttgtagtaccaatgagtcaagatcttccaatgctcgtaagcattcttccactgcatcaaaggcagctttgccttgaccactgctagaagcatactgcgccactgctccaatattgat

SEQ ID NO: 402071 - DNA, 385 bp, Oryza sativa nipponbare
  unsure (1)..(385): unsure at all n locations
atttgcaacacaactacgttcagctgacacatctgggcctgaanttcatttcctcctcaacagcatangatacagatcatacacacacccaaacactgaaaagtgctaaccatgctggcagcactagtctttactggagatgatgatacaaatcagatgcatgccttgcgactatgttacaccaccatttacagactacagagttttcctttcccaacaacagctggagatccaaaaatctcctaatacacccctgtgaggattgtagatccttccaccttgaaaggtgcaccgcaaatttcttcttctttggcaggaactgccgtcaccttgtgctttgggttctcatagcacttcaagcctccaactccaagagcattggaat

SEQ ID NO: 402072 - DNA, 381 bp, Oryza sativa nipponbare
ggtcgtctagaatggcttgcccgagtgcgatgaggatgtcctggaggagggggtcgctgccgccgccgccgaggccgccgaggccgccggagccggcggggtcgaggatggaggcggcggggttgatgggcccgacggtggcgaaggtgcgctcccactcgctgatcttgggctggctctgcacctcgcacgcgaactccggcgacagcacctgctccgagcagctcgagtcggcgtgcagccgcggcatcgagtccgacggccggtcgtagtacgccgccaggtccgggaacgccggccccgccaccaccggcttctgctccggcggggagctcaccgccgcgttcacccccaccatcggcttcctctggacgccgccgc

SEQ ID NO: 402073 - DNA, 434 bp, Oryza sativa nipponbare
  unsure (1)..(434): unsure at all n locations
ttaactaaaaccaatttggtttgtggttttatacaaaaattaaaatnnaccgattcacaagagagcaccctctacttaaactttacattacaaggccaaccagcagctggctggcggccgaccacttttttctcactctcgcgcaataatcaaccaatcacacacagtacccacccacataaaaaccacccataaccttcacgtaccccctgacccacgcacctgttcttgccaagctcaagggtaaatggttctctggatgataatatctccgatgttgttttgccaccggtcccagaggtggctggccacgttctccaatgggccggtgccccggtacccccactgttggactcacaaacccacaaaagccagcattgccaatccccccttcttgatctccttgagcttgtactcctccaactttacggggt

SEQ ID NO: 402074 - DNA, 409 bp, Oryza sativa nipponbare
  unsure (1)..(409): unsure at all n locations
taattaagctagaaatctcctgggtcggtcacacacacacacacaattaangtacatacatacatgcactgctgcaactgcaactgcagggtcggtgcgtggctactacaagtgtacacatggtactttggttggcaccatctcgatcgtatcgttgtgctcacttgcccgggactaaattggtggcgtatgcccaggcgttgttggcgacggggtctgcgacctggtctaagaggttctcgatggggcccttgcccgtgactattgcctggactaagaaacctaacatggagaacatggctaggcggccgttcttgagctccttcaccttgagctcggcgaaggtgtcagggtcttctgctaggcctagcgggtctaaagcgcctcctgggtacaccttgtcgaggcc

SEQ ID NO: 402075 - DNA, 370 bp, Oryza sativa nipponbare
  unsure (1)..(370): unsure at all n locations
gggagtggagaaacatcaacttcttcttcatcttcatctccccaaaaaataccacaagaatttaaaagaggctattggcaatgcanctactatgggccactctcactttttttactgaatggcaacctatctactcccctctcaatggcgtctctccacaaccgatacctgataccaagcttgtcatataatactggccacttccaaacatttgccccattgatcatcccttcttgctgccccagcaccagtcaaaaatcctcattcaaaaccttctcagcaaaatgtgaccatagtatattcatcaaagggacatgctttatccattgagccaagtccagagacatcctttagagcaacctggttttat

SEQ ID NO: 402076 - DNA, 380 bp, Oryza sativa nipponbare
  unsure (1)..(380): unsure at all n locations
ttgctggaaaatttgagggtttgtttcccacttatatcatcatatacaaatactaacacatgcnaaaattatcaagcagaaaagttccatacaaattcatccagacaaacaagggtaaaaaaccttttttttcccatttcccccttaaactatccgtaaataccaccattccaccaaactcccctctgtcttctacgacaaataatcttttcaacccagtaacttataattaattacagagagattagcaaacatataatggtaagaatcagttgtcgtaggtgcggcactcgtcggtctccgggttgtccttgcagtaggcctcgagcgggtcggaggtctccttgagcttgtcgcgcgcgtgggtcgccgccgcgctc

SEQ ID NO: 402077 - DNA, 227 bp, Oryza sativa nipponbare
  unsure (1)..(227): unsure at all n locations
tttaattcgatcatccctgggaggcggcctacaaattacattaaatctcnatccaaaaaancaaanattatnacacacanaaattaattaagctagaaatctcctcgatcggtcacacacacacacacaattaangtacatacatacatacactgctgcaactgcaactgcagggtccgtgctttgctactacaaatgtacacatcgtaccttggtttgcaccatct

SEQ ID NO: 402078 - DNA, 324 bp, Oryza sativa nipponbare
  unsure (1)..(324): unsure at all n locations
tagtcaaaaaatnntatggtcagtcaataataggtacagggttgattccattgagtantacgattacaacaattaacgactattaanagaaaggggtggcttnctatgcgcatagagaggcaaatcatggggtagcttaattacaacttacaaactaagctcttatctatcaagtctgatttgattgatgcacctcaagaagaagaggaagaagactaccatnatnatgcaatcagctgctgacttacttttcgattatggtggcgagggtggtctttgggactgcgcctatgaccctctccttcttctcccccttcttgaaca

SEQ ID NO: 402079 - DNA, 620 bp, Oryza sativa nipponbare
gtctgaatattcagttaagaccggtcgggggctccttttcgccatgcataaactaaaccaacaactaggataagcacgaaaatgaaagcttcgataaaaacggatatacccaatacgtcgaaactcattgcccaagggtagagaaagaccgtttccacatcaaaaacaacaaaaactagcgcaaacatgtaatagcgtattcggaattgtaaccaagccccccccatgggttctatacccgattcataactagaaagcttctctggtccttcacgaaccggagctaaaagtgctgaaatccaaaatgctaaaataggaataaggcttgctattattagaaatgcccaaaaaatatcatattcgtaaagcagaaacataaatgtactcccattaatgtggaataggcggaactgaattagtcaattcaagtcagcattgtcaatttatacagaatttctctcttttcctcggtgaaacaaggatcggtttttctcaaaccaaaggcttagtttagcctttgttcctctttgccacgtcttctttaaagattcatccaatggaatcccgaccccctttctttttgatttcctttctatttaggtatggtggagacataattc

SEQ ID NO: 402080 - DNA, 358 bp, Oryza sativa nipponbare
  unsure (1)..(358): unsure at all n locations
tgttctcaacaatcttaagatggtaaatacacacaagagagaggtactctatacaanacttaatttttcttaagtacaacaaatcttccattcctccatgatcctatcaggttgtacacccaaaccacacaaatcaccatgcactaaccctcttcctccactggcaaatcaacttgggcttgagtagccaaacatccatgtggtgatcaatagcccatgtcaacgtcctctaccactaggttgcctgtgattaactcactgtaagcggcgactcgccaaattaaccccctctggaggagctttactgccaactctaccttcataataatctccctcatagccggcttcttctcacccc

SEQ ID NO: 402081 - DNA, 365 bp, Oryza sativa nipponbare
  unsure (1)..(365): unsure at all n locations
gcagcatcnaattngaggctgtgcaacttatatagccataggaatantacaattatatcaacatcataaacagggggaattaatccatggcgatccggccatggggggctagcagtacagtacaaaggatttgcatggatggatcggatcaagaagaaggtgaggcagagactaggaatttaatttagatcttgcctcgtgggccgggcgtcngcggcagctgctggcccttcttgatcggaagcaggtctggcgactcctactcgctgacttaggccaccagcgatcctccgcctagcagcaggaacttgagcaggagccccctcttggtgaagggccccgcgaacgtctcgaagaacttgctc

SEQ ID NO: 402082 - DNA, 456 bp, Oryza sativa nipponbare
aagcccaaaaggtacgaagaaatgatccaaagaacaataaatgaggtgatcatttggtgtcaatggctcaaagcaccaaggaagcatataggctaaagattttgtttatcagaagcaattgctcgactatgtacacctggactgttgttatgtcttaggtaaggacagcatgaccgaaccaaccagctcttagaggcctaaacgcttctcgagcttctggatctcatttaggaatatccaagtcatcatggcatgtggtgcaatcctgacacagtacacaggaaagccagtgtagaacttaaatgggcctccactcttcaaggtcttcatggcacaatcaagagacccagtgtatggatacttcccggaggcatcaggctgcatcttttgaatctgtgtcttcacataatcaaagggtaaactgcaagcagacgcacataaccctgaaacagcact

SEQ ID NO: 402083 - DNA, 363 bp, Oryza sativa nipponbare
  unsure (1)..(363): unsure at all n locations
gggaaacgaataaaatcattatggcgnggaacatcatcttcttcttcatcttcttagtgtacacaacaccaactcgatcatcatctcgtcgcactaaacccatcttccccaacccaaagacaacgaactctctggccacaaatccatccaaccacaattaaccactgctaagctacgggcccccacttcacttgcccgggactaaattggtggcgtactcccacgcgttgttgttgaccgggtctgcgaggtggtccgcgaggttctctagggggccctttcccgtgactatggccttgactaanaaacctaacattgagaacatggcgaggcgggccttcttgatctccttcaccttgagct

SEQ ID NO: 402084 - DNA, 452 bp, Oryza sativa nipponbare
actggatagcttggagcacaggggatgcgatccatagcacaagccataagtattataatagcatacaagacctggacataaacagccctcataacaaagagattggcttctggccataacaattctaagctttattacatgctaacaatcaagtggcgtcaccgatacttcagtgactcaagcaccgtacaagggaaataacatctgtacggtagcagtgagcttgtcatcacctaaaatcattctgacgtgcctactaagcactttatactaatttatggggaaaccatgttcctctgatcgtgtcacaagaggacagagtgtgtatatcacatggtaaaatcgagcctctggaagctcgaggatgcgttggaaaggtttcctgaggtccacctcatcagcatctccagagcgaccttcggttgatccattggtaccatgtggccagcatc

SEQ ID NO: 402085 - DNA, 410 bp, Oryza sativa nipponbare
  unsure (1)..(410): unsure at all n locations
aaggggggggttccatatatttcattcacatatncctcacccaacaacatatagtcctagcaaataccactcttacatcaagtcaaagagagatcaggggaaacaaaaacaaaatcagagcacggcccgtaaaatcaaaagacgatgaacaaactgggaacacactaaacaaggtgggagacatcatcgaatcaaagatgaacaattaaacaaggctatatattacgattaccgcttaattgccaccaaactcctcgcaacccgggggcttgtaggccataaaacttatgagcttcacctgccttaccttttcgaaacccatgataccgaccaatgcatcagggtaccccttcttggcctcctcgagctccttgagcacctgggtggcgtcagtgcaccccaacatgggc

SEQ ID NO: 402086 - DNA, 413 bp, Oryza sativa nipponbare
  unsure (1)..(413): unsure at all n locations
aagaaaatacanattctggatgggttaactagcatatttaaatttaaaacgtaactgtttgagcaaataccacgaaatgttcaggcgctaagatacggcaataccgatacgtgcagcatagcaaaaatggcgaagagcacagagtcaaataaagctatagagaactagggctccaggagatgggggccgaatgacaaccatggcgcttagtcgacctcctccatcttgctctcgccggcgtcgtcctccagcggcggcatgtcggcgtcagcctcaacagactcgtcctcgtcgatgctcaggccgagcttgagcatccggtggatcctggtgcctaaagtgttggggtcctcaaggctgaaacccgaggtcaggagggcagtctctaagagcagcatcaccaggtccttcac

SEQ ID NO: 402087 - DNA, 441 bp, Oryza sativa nipponbare
  unsure (1)..(441): unsure at all n locations
ttgttctcaagaatcttaagatggtaagtacacacaagagagaggtacggtatacaagacttagtttttcttaagtacaacagatcttccattcctccatgatcctatcagcttctgcacccaaaccacacaaatcaccatgcacgagccctcttcctccactgccaaatcaactcacctggggcttgagtagccaagcatccatgtggtgatcagtagccgatgtcagcgtcgtcgacgacgaggttgccggtgatgagctcacggtaggcggcgacgggccagatgaaccccctcgggaggagcttgacggcgagctcgacgtcgatgatgatctccctcatggccggcttcttctcgccgctgatggcgatgaggtagctcctgccgacccagccgatccagccggcgatgtagaggaagagcaagcccggngtgatg

SEQ ID NO: 402088 - DNA, 127 bp, Oryza sativa nipponbare
  unsure (1)..(127): unsure at all n locations
tttttctcaagaatcttaanaggggtggtgcacacaaaaaagagggactttttacaatacttactttttcttatatacaacacatcttccattcctccatcatcctatcattttgggcgcccaaacc

SEQ ID NO: 402089 - DNA, 288 bp, Oryza sativa nipponbare
  unsure (1)..(288): unsure at all n locations
gggggagggaancaaacaaactgtttttccccttttccaaattcatttcatttatacaantaaaangcactcaaatcaaccaccacatgggcgggggcatgttccattatttattcatctacacatacaaaaaacagtcattcacttacaaacaaaaaatctactttaaaaaatactggaggtctatcacttaaaagaagaaataggcccaaagaacccctgaaattccccctaaaaaaaaaccccctgtaaactttgcccaaccttccgcggtctacaacttttctg

SEQ ID NO: 402090 - DNA, 422 bp, Oryza sativa nipponbare
  unsure (1)..(422): unsure at all n locations
tttgatgaananaactgggcttgtgaaaaaatatcaacttgttttttacatcncttacatcatantacangtacacaatcaacaaggcatgcagtgctccatccacaattgggggccaatacaccacttcttattcacagcctactccaaaaccaaaaaagagaggtaagtcgcgtctaccaacaatcttttcatcttcctccattggcagccattgctaacactccaacacctgaagaactcctcatttgggggtgaaggccttgaaaatggtggcttggcccgggtccgctagatgggccaataggttgtcaattgggcctgtgcctgtgtactcttcctggaaccaagcttccatgactgctagcatggcgagcccccctttcttaatctcctttgtgcgcagctcctttgatcttctc

SEQ ID NO: 402091 - DNA, 280 bp, Oryza sativa nipponbare
  unsure (1)..(280): unsure at all n locations
gaaatatatagggccggagcttccatatattgcattcacatatgcctcacccaacaacatatagtcgtagcagataccactcttacatcaagtcanagagagggggggtgaaacaaaaactaaatcanagcaccgcctgtaaaatcaaaagactatgaacaaacttggaacacaccaaacaaggtgggagacatcatctaatcagagatgaacaattaaacaaggctatatattacgattactgcttagtttccaccaaactcctcgcaaccctggggct

SEQ ID NO: 402092 - DNA, 413 bp, Oryza sativa nipponbare
tataactctgagaacatatatgggagggagaaattcgggaataaaaaaactagaattggagggacacactccttgccgctgcactatcaagtgcaatgcacgtacatatgcacggcaaccttattattcttactagtcgacgaacaagggtgttcgatcgattaattagttgggtgtgtcattaattcatgcgattgtcgtctcctttatgccttgtgaaacctccgtccacgaccaggttatgcccgttgacgtacttggcctcgtcggaggcgaggtacaccgccgccctctcgacgtactcctgctcgatggccactccggcgctgatggcggcgtccgccatcccctccaggtcgtcctctcccactccgggggtcatctgggagatgatatgcatcatcatcggcgtc

SEQ ID NO: 402093 - DNA, 452 bp, Oryza sativa nipponbare
gttatatagccggagcttccatatatggcatgcacatatgcctgacccaacaacatatagtcgtagcagataccactcttacatcaagtcagagagagatcaggtgaaacaaaaacagaagcagagcacggccggtaaaatcaaaagacgatgaacaaactgggaacacacgaaacaaggtgggagacatcatcgaatcagagatgaacaattaaacaaggctatatatgacgatgacggcttagttgccaccagactcctcgcagcccgggggcttgtaggcgatgaagctgatgagctgcacctgcctgacgttgtcgaagccgatgatacggacgaatgcatcagggtacgccttcttggcctcctcgagctccttgagcacctgggtggcgtcagtgcacccgaacatgggcagcttccacatggtccagtacctgccatcgtagtat

SEQ ID NO: 402094 - DNA, 465 bp, Oryza sativa nipponbare
  unsure (1)..(465): unsure at all n locations
acattgaaatatanaagaggggcgttgaaatgtggcaagaagagatgtaccagcaccctcatggagagggatttttagaagttccattgcatgggttcacaagttatgcaggggcgcatcctactttcttctatctgtaatatttccaaaactagttacaagaaatgcgaggatgcccattggcattgatatggtatggtgatgaaaagattcacgaaatattaatgtggagctcattaaacttttgccccttcagtacgtgcaccggccctctcaacaataatctgctcatagagatctctaatcttcagtcctaccatagtttggaagagacctgttccattgttgctcccggggaagtcttcatgctttaacatttgctgtgtcacctctccataaaatttggttgagaggttgcttaaatggctctcaacatacataaactcatctagtctttcaaattgg

SEQ ID NO: 402095 - DNA, 418 bp, Oryza sativa nipponbare
ccacgcgtccgcggacgcgtgggcggacgcgtgggcccctcttctacataaacgaaaacagcttgttgactggctccctagagctttttgtaagttgatcatcgaagtagctagttctcttcacttatcagtcatcactgttctatgttctatctgcattttccttgattttgtacttttcctgaacgaaaggacaatccttagccatcataatgctatgatcgacttattctgaagtcatccggcctcgatcctcttttgtttcggtgagatctgtaatggtttaagaaaattatggatctctgaaaaataagaaacatctagtagtatatgaaattaagaaatgtcggaccacgtcaaatcctactggtatcatataccagataactaactttttgaatggaaccaaacaccagat

SEQ ID NO: 402096 - DNA, 451 bp, Oryza sativa nipponbare
ccacgcgtccggcggcgccggcgaggaggaggtcggtggcggcgagggcggagctgagcccgtcgctggagatcagcctgagcaccggcgtctccctgttcctggggcggttcgtgttcttcaacttccagcgggagaacgtggcgaagcaggtgccggagcagaacggcaagacgcacttcgacgccggcgacgagcgcgccaaggagttcgccggcctgctccggtccaacgaccccgtcggcttcaacctcgtcgacgttctcgcctggggctccctcggtcacatcgtcgcctactacattctcgccacctgcagcaacggatacaacccaaacttcttctgatcattcttatcttggatggatgcaatggtatctgaatggatctctggtgtttctacgtgattatgtatgaaatggggtaaaaagaaaagaaaaaaggttgattt

SEQ ID NO: 402097 - DNA, 283 bp, Oryza sativa nipponbare
ccacgcgtgcggagcaaagaaggagagagcttggtgagctgcagagatggcccgctccgtgatggcgtcgtcggccaccaccgtcgctcccttccaggggctcaagtccaccgccggcatgcccgtcgcccgccgctccggcaactacagattcggcaacgtgagcaatggcggcaggatcaggtgcatgcaggtgtcgccaactgagagcatcaagacgtacgagaccatctactacctgccaccggtaaccgtggaggaccttctgaagcagatcgagtac

SEQ ID NO: 402098 - DNA, 425 bp, Oryza sativa nipponbare
  unsure (1)..(425): unsure at all n locations
ccacgcgtccggcaaggtcggattcgtctaccgtgagaaccacagatcccccggatactacgatggcaggtactggaccatgtggaagctgcccatgttcgggtgcactgacgccacccaggtgctcaaggagctcgaggaggccaagaaggcgtaccctgatgcattcgtccgtatcatcggcttcgacaacgtcaggcaggtgcagctcatcagcttcatcgcctacaagcccncgggctgcgaggagtctggtggcaactaagccgtcatcgtcatatatagccttgtttaattgttcatctctgattcgatgatgtctcccaccttgtttcgtgtgttcccagtttgttcatcgtcttttgantttaccggcccngctctgcttttggttttggttcaactgatctttttctgacttgatg

SEQ ID NO: 402099 - DNA, 360 bp, Oryza sativa nipponbare
ccacgcgtccgagcataagcaacacaagggattaactcatcactcacttagctaattaaatcttcgaccatgtcggacaagtgcggcaactgcgactgtgctgacaagagccagtgcgtgaagaaaggtaccagctatggcgtcgtcatagttgaagccgagaagagccacttcgaggaggtcgccgccggcgaggagaacggcggctgcaagtgcggcaccagctgctcctgcaccgactgcaagtgcggcaagtgaagtcacgaagcaaccgaacactcgccgccggcgaggcacctaccttaattagtccacaataaaaaccacccatatgagtgtggtttgtgtgtgtgctgatta

SEQ ID NO: 402100 - DNA, 484 bp, Oryza sativa nipponbare
ccacgcgtccgattttctgcaacacgattagaaaggttgattggcttacagaaagaatgcgcagcaataacttcacggtatcagctatgcatggtgacatgcctcaaaaggaaagggatgccattatgggtgaattcaggtctggtgcaacccgtgttctaattacgacagatgtgtgggctcgaggcctggatgttcagcaggtctctcttgtcataaactatgatcttccaaataatcgtgaactttacatccatcgcattggtcgctctggacgttttggtcgcaagggtgtggccatcaattttgtcaaaaaggaagacatccgtatcctgagagatattgagcagtactacagcacacagattgatgaaatgccaatgaatgttgctgatctaatttgagtgcttgagtggcacaatcatgtttttgatcatctggtctggcaacaagtgagcttgtttgttgtgatttggtgacatgt

SEQ ID NO: 402101 - DNA, 473 bp, Oryza sativa nipponbare
ccacgcgtccgctaaagtactaggaattccaacagccaacttacctgcagaaaacttctccgacgtactatcagagcatacatcaggggtatactttggctgggctggactttcaacgcgaggtatatttaagatggtcatgagcattggctggaacccttattttgataacacggagaagactattgaaccatggttgcttcacgattttggtgaagacttttacggagaggagctgcgccttgttattgttggttacatacgacccgaggccaactttccttcacttgagagcttgatagagaggattcacgaggatgcaaggatatcagataaggccctgaatttaccattatacgccaagtataaagactcgccgtacctaagaaattccttgaaggaggacaattctgctaacgggaaccagtcagtgatagattccaagtgattcaacgttgtgaagcgaaagacat

SEQ ID NO: 402102 - DNA, 375 bp, Oryza sativa nipponbare
  unsure (1)..(375): unsure at all n locations
ccacgcgtccgcgacgcaccctttcagaaggacagtttcccagtttattggatgtttctaatgcgcttgatgcaaaatggacaggtaaaaatgatcctgtccctagcagtgcgatagtaccagattgtgtggcatcctcagaggattcagaagaacatgtgactgatacaccttcatatgcctctgtcttcctgaacaagctaggcgatagtgcagaggaccagtccaactggcttgggatgcctttcttacaactttaccgtgctctgcttttgtttttgtttcacctgatctctctctgacttgatgtaagagtggtatctgctacgactatatngttgtgggtgaggcatatgtgaatgaaatatatggaag

SEQ ID NO: 402103 - DNA, 364 bp, Oryza sativa nipponbare
ccacgcgtccggctaattaagcaaaagaagaagaagaagaaagaagaagaagaagatgcagaccgctgctagcagtgtcgttggattgtcggccgtgttgcccgctgctgtgaaggggcgcagcctgcagattcaggctcctcgccgtgttgcgttgcgcgttcgtgcggcggcggcggcggtggcagtggaggctgcggaggtggactacagctctaacatctcggtgtttccgatggaggcgtgcgacctcatcgtcggtgaggcgtgcaacgtgcatatgtacccagaggccaagctcttatcatcggctgctgatgctgtttttcgtgccgcggccgtggaagtctacagggactaccta

SEQ ID NO: 402104 - DNA, 322 bp, Oryza sativa nipponbare
  unsure (1)..(322): unsure at all n locations
ccacgcgtccgcccacgcgtccgcccacgcgtccgcccacgcgtccggccatctctctcagctctcacagctcactgcatcaatggccgcggccaccatggcgctctcctccccggtgatggcccgcgcggcgccgtcgacctcctccgcgctcttcggcgaggcgcggatcaccatgcgcaagaccgccgcgaagcccaagccggcggcgtcgtcggggagcccgtggtacggcgccgaccgcgtnctctacctcggcccgctctccggcgagccgccgagctacctcaccggcgagttcccgggcgactacgggtgggac

SEQ ID NO: 402105 - DNA, 346 bp, Oryza sativa nipponbare
ccacgcgtccgtgattttggtgttgcacgtgttaaagctcaatctggagtaatgactgctgaaacagggacatatcgatggatggctccagaggctatagaacacaagccctatgatcacaaggccgatgtttttagttatggaatttggatgtgggagctgctcacagggaagattccttatgagtacctgacaccattacaagcaagttggaggtgtggtccacaagggattacagccttacaataccaaaaaatgctcatggcaaactttatggaggtgttcagacatgttggtaacaggagcctgctgaaagaccacattctctagaatattagaaactttt

SEQ ID NO: 402106 - DNA, 344 bp, Oryza sativa nipponbare
ccacgcgtccgacttgattactcaaacaaccgattctcatctatgcctatgcctcttaatttctctacttaccttatgaatacagtaattttcaaggtctccagaaatagcctctctggatacattccaccaacgatttgtgatgcaattaagagtttacaaattattgatctctcttataacaacttgactggatcaataccatcatgtctgatggaggatgtaggtgcactacaagtcttaaatctaaaaggaaataagcttgatggcgagttgcctgataatatcaaagaaggttgtgcattaagtgcattggattttagcgacaccctgattcaaggaca

SEQ ID NO: 402107 - DNA, 388 bp, Oryza sativa nipponbare
ccacgcgtccgcgaaaaagggctccccgatggcgccgtcgcagccgaagtccgggctcttcgtgggcatcaacaagggccacgtcgtcaccaagcgcgagctgtcgcctcgcccgtccgaccgcaaggggaaatccaccaagagggtgacctttgtcaggaacttgatcagggaggttgctggatttgctccctatgagaagcgtatcactgagcttctcaaagttggcaaggacaagcgtgcactgaaggtggcagagagaaagcttggcacccacaagagggccaagaagaagagagaggagatggctggtgtcctcaggaagatgaggtctggtggcggtcacgctcacaccgagaagaagaaatagagtatctccaagttcatg

SEQ ID NO: 402108 - DNA, 351 bp, Oryza sativa nipponbare
ccacgcgtccgggaggagcttgagcttggagagagacaacaatggcggctcaggctcttctctctgggaggcagctgctggggaggccattgcaatcttcagtctccaggtcttcttcctccaggaaggcacccttcatggtcagggcagaggccactccccctgccaagcaaggtgctgacaggcagctgtggttcgcatccaagcagtccctgagctacctggatggcacgcttccgggagacttcgggttcgacccgctggggctatcggacccggaggggaccggtgggttcatcgagccacggtggctggcctacggcgaggtgttcaacggccggacggcgatga

SEQ ID NO: 402109 - DNA, 456 bp, Oryza sativa nipponbare
ccacgcgtccgcaagaacggccgcctcgccatgttctccatgttcggcttcttcgtccaggccatcgtcaccggcaagggccccctcgagaacctggtcgaccacctcgccgaccccgtcaacaacaacgcctgggcctacgccaccaacttcgtccccggcaagtgagcgccgccgccgccgtgctgccatggcgacgcatcgccttcagctaagctagctaggttgacgacgatgcgcgtctctgcaggagagtgtgcgtgtgtgtacgcggtgcagtagatgtacgtacgtgtaccgtatagatgtacgtattcgtgtggaccgcgtggatggatgtacgagtattggagagagggtgagatctgtaccggtagcgtgtatttctgtgcaagttctgaacctgatcaatgaaatatggtgttgggaattaattataaaattagcttgtttaat

SEQ ID NO: 402110 - DNA, 348 bp, Oryza sativa nipponbare
ccacgcgtccgcccacgcgtccgaattgatgctgttgggaggcaaagagggacaggtattggtggtggaaatgatgaaagggagcagactttgaatcagttgctgactgagatggatggttttgaggggaacactggaatcattgttattgctgccaccaacagggctgatatcctggattctgctttactcagacctggacgtttagacagacaggtaagtgttgatgttcctgatgtacgcggaaggacagagattcttaaggtgcacggtagcaaacaagaagttcgatactgatgactttcttgaagtcatagcaatggagaacacctggctttagtgggagca

SEQ ID NO: 402111 - DNA, 410 bp, Oryza sativa nipponbare
ccacgcgtccgcccacgcgtccgaagtactcgagcaaagaaggagagagcttggtgagctgcagagatggccccctccgtgatggcgtcgtcggccaccaccgtcgctcccttccaggggctcaagtccaccgccggcatgcccgtcgcccgccgctccggcaactccagcttcggcaacgtcagcaatggcggcaggatcaggtgcatgcaggtgtggccgattgagggcatcaagaagttcgagaccctctcctacctgccaccgctcaccgtggaggacctcctgaagcagatcgagtacctgctccgttccaagggggtgccctgccttgagttcagcaaggtcggattcgtctaccgtgagaaccacagaacccccggatacttcgatggcaggttctggaccat

SEQ ID NO: 402112 - DNA, 242 bp, Oryza sativa nipponbare
ccacgcgtccgcgacgcactctctgaccctcgcctcacccacgagatcaggagcatctggctctcctactggtctcaggctgacaggtctctgggtcagaaactggcgagccgtctcagcgcgaagccgagcatgtaaggagatcgatcagcgttgcaatctgcttcagtcacggaaggcctcagcctcactctatcggataataattgctactcatactctagcattaccgatcgatcgag

SEQ ID NO: 402113 - DNA, 405 bp, Oryza sativa nipponbare
ccacgcgtccgcccacgcgtccgcccacgcgtccggccaagaagagggagagcaccaaggacacgcgactagcagaagccgagcgaccgcctcctcgatccatatcttccggtcgagttcttggtcgatctcttccctcctccacctcctcctcacaggttcttggtgtagcttgccactttcaccagcaaagtttcatgtctgatctcgacattcagatcccaactgccttcgatccctttgctgaggccaatgctggagactctggtgcggctgcaggatcaaaggactacgttcatgtacgcatccagcagcgtaatggccgtaagagcctgaccactgtccagggattgaagaaggaattcagctacaacaagatcctcaaagatctcaagaaagagtttt

SEQ ID NO: 402114 - DNA, 379 bp, Oryza sativa nipponbare
ccacgcgtccgaagaaagcataagcaacacaagggattaactcatcactcacttagctaattaaatcttcgaccatgtcggacaagtgcggcaactgcgactgtgctgacaagagccagtgcgtgaagaaaggtaccagctatggcgttgtcatagttgaagccgagaagagccacttcgaggaggtcgccgccggcgaggagaacggcggctgcaagtgcggcaccagctgctcctgcaccgactgcaagtgcggtaagtgaagtcactaagcaaccgaacactcgccgtcggcgagtcacctaccttaattagtccacaataaaaaccacccatatgagtgtggtttgtgtgtgtgctgattattgcttaattaaac

SEQ ID NO: 402115 - DNA, 273 bp, Oryza sativa nipponbare
  unsure (1)..(273): unsure at all n locations
ccacgcgtccgcccacgcgtccgcccacgcgtccgctcttccctcctgccaccattactacatgaccttatggttactcatgtgcataatgagttgctacctttcttgctctcgaacctcacctcgttatccatatttgcaatatctaacagtccagagttaacatcccttgttcttcattcttgcacatctttagaaactntgatcattgaaaaatgtgttgggctgtctgctctagagggtttgcatttccttcccaaacttaagcatcta

SEQ ID NO: 402116 - DNA, 273 bp, Oryza sativa nipponbare
gtttctgagaagaaagctaaagcttggtgtgcttctaagggaaacatcccttattttgagacatctgctaaagaaggcttcaacgtggaggctgttattgagtgtatagcagggaatgctatcaagaatgaaccggaagaggagatttattttcctgatacatttgatgtcggtggtgctggaaggcaacattgctcgttaggtttgtgatgctagaagatatggcaccagcgtttcgtcagttggtttaaccgggtcggtgtagatcattat

SEQ ID NO: 402117 - DNA, 444 bp, Oryza sativa nipponbare
gacccacgcgtccgcccggaccaggcggcgctgctgaaggtgaaggagatcaagaacgggcggctggccatgttctccatgctggggttcttcatccaggcctacgtcaccggcgagggccccgtcgagaacctctccaagcacctcagcgaccccttcggcaacaacctgctcaccgtcatctccggcgccgccgagaggacgcccagcctgtaaacatctcgccgccggcgacgctggctggcctcaagttaattttaatcttacccgggaagaagaagggaggagtttgagaagggtggaagaatgtgttaaatgtacgtgtaaattatcgtcgagttgggagatgaatttgaaacctggtcaatctgatcttctgatagggaggaacaagctgttggatttgtggttaaaaaaatttggtaccttgagtaaatggcttgg

SEQ ID NO: 402118 - DNA, 579 bp, Oryza sativa nipponbare
ccacgcgtccgcttctccaacgtggcagtcgcggagaacaaggttgtccaagtttccactagctcatcagtaacatccaagaccatagaggaggctttctcagctatccctgaggacagtagaaggaaggagtaccaagatgctgttgcaaaagcacaggcagaagaggagactcgggcttcgcagcgaactcgtcaggcagaagaggacactactacggtcaaagccggggggaagaagacgccctctgatgaggcagctgcaagtgaggcgcaagcttctctggagaaccttctgagcagagccaaagggttcggcacggacttctcatgggagaagctcaacacacaacttgcaggagtggccactcaagactcagacgaggtggaaccaaaagcgcagatcgccaccgtgagaggccaggcaaaagcaaagaagctggcaccacagagagctgttgtgaagcccgcggcgcataagacaagaccaacaccaaagcagtccgaattcaagcccgatgggaagcccgtgttgggggactcttaagcaagaaacaatcttttggatgaggactgagct

SEQ ID NO: 402119 - DNA, 195 bp, Oryza sativa nipponbare
ccacgcgtccgctattcacagaggtggtggccaggtcattcccacggccaggagggtcatctatgcttctcagctcacagcaaagcccaggcttcttgagcccgtctacctggtggagatccaggcccctgagaatgcccttggtggtatctatggtgttctgaaccagaagagaggacatgtgttcgaggagat

SEQ ID NO: 402120 - DNA, 347 bp, Oryza sativa nipponbare
ccacgcgtccgcccacgcgtccgcatccatccatcagagatcaggtagaacagcgagagtgaggtgcacaaaaattagagctgaagctgaggatggcaacatccatgatcacctcgccgctggaggcgccggcccgggccaagggccttccgtccatctaccggcggagatcctccttcgccatacgctgcagcggtgggaagaagatcaagaccgacaagccctactggattggaggtggcatgtcagtcgatattgatgcatctggcatgaagagcacgcagaatggtgtgtaccaattcgttgacaagtacggcgcatacgttgacggctacagcccaatctac

SEQ ID NO: 402121 - DNA, 435 bp, Oryza sativa nipponbare
ccacgcgtccgcccacgcgtccgcccacgcgtccgcccacgcgtccggggcttcgtcagaccctaaggctgtcataacaacttatgaaggaaaacataaccatgaaccaccggttggtaggggaaacaaccagaatgcgggaaatgcggccccttcaagcagtgcacaacagaatatgcagaatttgtctagtaatcaagcttcacttacaatggcagacttcaacaacattaaccagaggccaattggggtcttacagttcaaaagcgaagaataacaccgtcaactgactttcttgggaccccggttgctgaagtggcacactggtatttggttgatttcttcaggcaaatattggatgcctgcaattcttatagtcacacttgttcaaacgttcaaaagtaatacaacaatatcaatggtggaaattttcta

SEQ ID NO: 402122 - DNA, 482 bp, Oryza sativa nipponbare
ccacgcgtccggccctagataacataacgtcataacaagggtctgaggatcttagctagcacaagatctcaactcggcatttcattggagtttttcacgcctaatggatagcagcagtggtagccagggaaagaattccaaaaccagtgatggttgtgaaacaaaagaagttaataacactgcacagaattttgttcatttcacggaagaagaggaagatctcgttttcagaatgcacaggcttgttgggaacaggtgggaacttatagctggaagaatccctggatgaacagcaaaagagtacactgaaggggaaatttggtgtttggaaacatttcccaaaaggatgtaatcacgtatgaagtgacagttttgatgcttaacaaataatgtccacgggtgaccttgtaatactttgcaatagtttgggtctaactgacattgcttccaaaataaaagaaacacggggatattctaaagaa

SEQ ID NO: 402123 - DNA, 401 bp, Oryza sativa nipponbare
cccacgccgtccgcccacgcgtttcgctctccttcctccgcaagttcgctttcttgaccaaaattttccacccgaatgtgcatttcaagacaggtgagatttgcctggatatcttgaagaatgcgtggagcccagcatggacactacaatccgtttgtagagccataattgcattgatggcccatcctgaaccagacagtccacttaactgtgactcaggcaacctcctgcgctcaggcgacatcagaggctatcaattcatggcaagaatgtatactaggttggctgccatgccaaaaaaaggttaactccagggtgcaaaaggaaatatgcgccaagcgaaagcatggctgattcatgtgaattgctctggtaagtgtaactcttactgtcaccatgtg

SEQ ID NO: 402124 - DNA, 315 bp, Oryza sativa nipponbare
ccacgcgtccgcccacgcgtccgcccacgcgtccgcagagttctggatcacgttgagaaactatcaagtgttcaaatgtatcgttttccttttctttgacgatatatgaagaggaatatcagtggtggaaacgagcaggaagacttttctgcattggatcatatgccagaaaatctaggacttgtttggttgggttctagctctagattcttgttatgtggagcaggagccaaaccaaacactcctagatcctcctaagagtggaggggatggatctgcttcacaaaatatatatgaagggtggagctaccattt

SEQ ID NO: 402125 - DNA, 304 bp, Oryza sativa nipponbare
ccacgcgtccggtagatcaagaacggccgcctcgccatgttctccatgttcggcttcttcgtccaggccatcgtcaccggcaagggcccgctcgagaaccttgccgaccacctggccgaccccgtcaacaacaacgcctgggcctacgccaccaacttcgtccccggcaagtgagcgccgccgccgccgtgctgccatggcgacgcatcgtcttcagctaagctagctaggttgacgacgatgcgcgtctctgcaagaaagtgtgcgtgtgtgtacccggtgcagtagatgtacggtcggggac

SEQ ID NO: 402126 - DNA, 231 bp, Oryza sativa nipponbare
ccacgcgtccgctactatcaagcctcaatcaaaaggcttgaagggaagaagagcaactccagcaggtagaaaggccagaagcaaagatggcgatctccagcctacatgccaccacctccctgcactccccatgcaccaccaacacaagcttcaggcagaatcaggtcatcttcttcaccaccagaagcaacaggaggggtagcacaaggtacgagagagcaagaacctttc

SEQ ID NO: 402127 - DNA, 232 bp, Oryza sativa nipponbare
ccacgcgtccgcccacgcgtccgcccacgcgttcgttttgatgacaagagggatgctgaggatgcactccgtgatttagatggcaagaatggatggagagttgagctctcacggaactcaagtagccgcggaggtcgtgatcgacatggtgggtctgagatgaagtgctatgagtgtggtgaaactgggcactttgctcgtgaatggcgtttgcgtattgttcctggaggtc

SEQ ID NO: 402128 - DNA, 297 bp, Oryza sativa nipponbare
ccacgcgtccgcccacgcgtccggtttgatgtccttccatccacaaagcttgtgacaagtgtcaagctgcctgactacaattctggaaaggtggagatgcaatacttccatgagaatgcaagttttgccactgctgttggcatgaagccatctcctgtggttgaattttctggaacagctggtgctcaaggacttgcctttggtgcagaagctgggtttgacactgctacaggaaaatttaccaagtacagtgctgcgataggggtacccaagcagattatcatgctgcaatcgttc

SEQ ID NO: 402129 - DNA, 298 bp, Oryza sativa nipponbare
ccacgcgtccgagcagcagcagcagtagctgagcttgaagcagcagagcgaggtagacatggccgccgccaccatggccctctcgtccccggcgctggccggcaaggccgccgcgaaggtgttcggcgaggggcgcatcaccatgcgcaagtcggctgcgatacccaagcccgccgtgttggtgagcccgtggtacggcgcctaccgcgtgctctacctctgcccgctctccggcgagccgtcgagctacctgaccggtgagttccccggcgactacgggtgggacaccgcggggctc

SEQ ID NO: 402130 - DNA, 147 bp, Oryza sativa nipponbare
ccacgcgtccgcccacgcgtccgcccacgcgtccgcaaaggttttgttatgatctccatttaagtggcagtgaactgcatcacagtgggggttacagttttccaacagaagggtaattatatgatgttttggggttgttgatacttc

SEQ ID NO: 402131 - DNA, 291 bp, Oryza sativa nipponbare
ccactcgtccgttcaaagattgcaatcttgaatgcaaactacatgacatagcgtctggagaaacactacccagttcttttccgtggagtcaatggaactgttgcccatgagttcattattgatttaagaggatataagacgactgctggtatagagccagaggatgttgcaaagcgtctgatggactatggattccatgcacctactatgtcatggcctgttccaggcacactttatgattgaactaactgaaagtgaaagcatggtctaactagaaaggttctgtgatgc

SEQ ID NO: 402132 - DNA, 389 bp, Oryza sativa nipponbare
ccacgcgtccgcggacgcgtggggtacccttgtgactacacccgcttcgcttcctcccctctctaagccggggaagctaagccatggcgtccgtcaccgcccgcaccccggtcgcagccctccgctcgtcggcgtcgctcaagtctaccttcctagggcaatcctccacccgcctcgcccgcgcaccgactacgaggcgtaatgttcgggcggaggccaagggagagtggctccccggcctcccttctcccacctacctcaacggcagcttgccaggcgataacgggttcgacccgttgggtctggcggaggacccggagaacctgcggtggttcgtgcaggcggagctggtgaacgggcggtgggcgatgctggggggggcccggatg

SEQ ID NO: 402133 - DNA, 359 bp, Oryza sativa nipponbare
ccacgcgtccgcccacgcgtccgcccacgcgtccgcccatggcgactgcgaccgaggaggttgccgctgcggctgctgccgccggcgaggcgccgtcgccgccgccgccagcggtggtagaggaggcgaaggaggctttggaggcaccgaagccggaggaggcgccgaaggctgaggagggggaggagaagaaggcggagggtgagaaggagaaggagaaggcgaataatgagaggaaaccgagggcgaggaagccccgatcggcggggccacaccacccgccctacttcgagatgatcaaggaggcgatcatggcgctggacgggaacggcaaggcgggatcgagcccgtacgcgatc

SEQ ID NO: 402134 - DNA, 425 bp, Oryza sativa nipponbare
ccacgcgtccgcgccgtcgtcgccggcgacgctgcggctcgccgccatggacgccgacgcgttcagggcgctgctccacttcatctacaccgacacgctgcccgacgacgacgacgatgacgacgccatggcgcggcggctgctcgccgcggcggacgcgtacgggatggagaggctgaggctgatctgcgaggacaggctgcgccgccgcgtcgccatgggcaacgtcgccgtgacgctggcgctggcggagcagcaccattgccgcgcgctcaaggaggcttgcgtcgagttcttgtcttctccggcaaccctcaagcggccatggctaccgagggtttgagcatttgaggcaacatgtcctcaagtttgactggactcgtcaggaacaaataggatagctagattttaattaaggggtatta

SEQ ID NO: 402135 - DNA, 309 bp, Oryza sativa nipponbare
ccacgcgtccgcccacgcgtccgcggacgcgtgggtgcggcgatggttgtgatggaggctatcctatcatggcatggcgctactttgttcggaatggtgttgttaccgatgagtgcgatccatactttgatcaggtcggttgtaagcatccaggatgcgaacctgcttatcctacgccagtgtgcgagaagaaatgcaaggtgcagaaccaagtttggctggaaaagaagcatttcagtgtcaatgcatacagagtaaattctgatccacatgacataatggcagaggtctaccaaaatggccctgtag

SEQ ID NO: 402136 - DNA, 446 bp, Oryza sativa nipponbare
ccacgcgtccgacccacgcgtccgcccacgcgtccgcggacgcgtgggcggcggagacgcaggcctggcccatttaccggcccaggcccgtttaccagcccatccgggcctgcaacggatacgagtacgaccgagccggcagtgaccaagacggttcaaactctacctaaaagttgtgtgttagacccgtctcgtttaatcaatctactctagcaattaactacttctactcctcgatagaaaaagaggcaatcaaccttgggatttacctagtcccaatgtctttgtagtgttcttttttacttgtagtatgtagtactcctactagttttttttttcaggatattaatccttggatatatactgctggtggttggtgagaaggcataaaaaatcaaacggggtcatttggcttaataaaaaaaaaatactatgtatttttcttg

SEQ ID NO: 402137 - DNA, 334 bp, Oryza sativa nipponbare
ccacgcgtccgcagctattggaagagggcttttcgacatggacaaggagggacttcaatacattcatccgtgcttgtgagaagtacggtcgtaatgacataaagaacatatcctctgaaatggaggggaaaacagaagaggaggtgcagcggtacgctaaagttttccaggaaagatacaaggaattaaatgattatgaccgagttattaagaacattgagaaaggagaagcaaggatataccggaaggatgagattatgaaagctattgggaaaaagctagaccgctataagaacccttggttagagttgaaaattcagtatggccagaataa

SEQ ID NO: 402138 - DNA, 387 bp, Oryza sativa nipponbare
ccacgcgtccggctaattaagcaaaagaagaagaagaagaaagaagaagaagaagatgcagaccgctgctagcagtgtcgttggattgtcggccgtgttgcccgctgctgtgaaggggcgcagcctgcagattcaggctcctcgccgtgttgcgttgcgcgttcgtgcggcggcggcggcggtggcagtggaggctgcggaggtggactacagctctaacatctcggtgtttccgatggaggcgtgcgacctcatcggcggcgaggcgtgcaacgtgcagatgtacccagaggccaagctctcatcatcggctgctggtgctgtttctcgtgcggcggcggaggaagtcgacagggactacctatcctacgacgaggccaccacggt

SEQ ID NO: 402139 - DNA, 335 bp, Oryza sativa nipponbare
ccacgcgtccgcacgcaggttaaatgtcgcattaactcgtgctcggtacggtatagttattcttgggaaccctaaagttctaagcaagcagccactctggaatagtttattgacacattataaggagcatgagtgtttggtagaaggacctttgaacaacttaaagcagagtatggtgcaatttcaaaagccaaaaaagatctacaatgatcgacgacttttactgtgtggcggtcaaggtgatatgcaaggagctagttttggtgcttgaggcacaaacccagtggcagataagaaaagtggtggtgggaaggtcatttcctttggtcatttgg

SEQ ID NO: 402140 - DNA, 362 bp, Oryza sativa nipponbare
ccacgcgtccgagcataagcaacacaagggattaactcatcactcacttagctaattaaatcttcgaccatgtcggacaagtgcggcaactgcgactgtgctgacaagagccagtgcgtgaagaaaggtaccagctatggcgtcgtcatagttgaagccgagaagagccactttgaggaggtcgccgtcggcgaggagaacggcggctgcaagtgcggcaccagctgctcctgcaccgactgcaagtgcggtaagtgaagtcacgaaacaaccgaacactcgtcggcggcgagtcacctaccttaatcagttcacattaacacccacccatttgagtgtggtttgtgtgtgtgctgattatt

SEQ ID NO: 402141 - DNA, 344 bp, Oryza sativa nipponbare
  unsure (1)..(344): unsure at all n locations
ctagctctacagctcactgcatcaatggccgcggccaccatggcgctctcctccccggtgatggcccgcgcggcgccgtcgacctcctccgcgctcttcggcgaggcgcggatcaccatgcgcaagaccgccgcgaagcccaagccggcggcgtcgtcggggagcccgtggtacggcgccgaccgcgtcctctacctcggcccgctctccggcgagccgccgagctacctcaccggcgagttcccgggcgactacgggtgggacaccgcggggctcttcgncgacccggagacgttcgccaagaaccgggagctggaggtgatccacttccggtgggcgatgct

SEQ ID NO: 402142 - DNA, 327 bp, Oryza sativa nipponbare
  unsure (1)..(327): unsure at all n locations
ccacgcgtccggacggcgatcccgtggttccagaccggcgtgatcccccccgcgggcacctacacctactgggccgacccttacactctcttcgtcttcgagctcgccctcgtcggcttcgccgagcaccgacgcttccaggactggtacacgccgggctccatggngaagcagtacttcctcggcctcgagaagtccctcgccggcttcggcgagccggcctaccncggcggcccgctcttcaacccgctcggcttcgggaccaagagcgaggcggagatgaaggagctcaagctcaaggagatcaagaatggcaggctcgcatgc

SEQ ID NO: 402143 - DNA, 264 bp, Oryza sativa nipponbare
ccacgcgtccgaagaagtactcgagcaaagaaggagagagcttggtgagctgcagagatggccccctccgtgatggcgtcgtcggccaccaccgtcgctcccttccaggggctcaagtccaccgccggcatgcccgtcgcccgccgctccggcaactccagcttcggcaacgtcagcaatggcggcaggatcaggtgcatgcaggtgtggccgattgagggcatcaagaagttcgagaccctctcctacctgccaccgctcacc

SEQ ID NO: 402144 - DNA, 420 bp, Oryza sativa nipponbare
ccacgcgtccgccacgcgtccgcggacgcgtgggtccttcctcccagtgtctctcaagagcggtgcagggttcacaaggcaggagaaaatgggggagatcaccaatgtcatggagtaccaggccatcgcgaagcagaagcttccgaagatgatctacgactactacgcctctggagctgaggatgagtggactctcaaggagaacagggaggcattctccaggatcttgtttcgtccccgcatcctgatcgatgtctcaaagatcgacatgttcgcaactgttcttgggttcaagatatcaatgcccataatgattgctcccagtgccatgcagaagatggctcaccctgacggagagtatgcaacagccagggcagcttcagcagcaggaactataatgacactgtcatcttgggctac

SEQ ID NO: 402145 - DNA, 376 bp, Oryza sativa nipponbare
ccacgcgtccgcggacgcgtgggagaaagcataagcaacacaagggattaactcatcactcacttagctaattaaatcttcgaccatgtcggacaagtgcggcaactgcgactgtgctgacaagagccagtgcgtgaagaaaggtaccagctatggcgtcgtcatagttgaagccgagaagagccacttcgaggaggtcgccgccggcgaggagaacggcggctgcaagtgcggcaccagctgctcctgcaccgactgcaagtgcggcaagtgaagtcacgaagcaaccgaacactcgccgccggcgagtcacctaccttaattagtccacaataaaaaccacccatatgaatgtggtttgtgtgtgtgctgatta

SEQ ID NO: 402146 - DNA, 339 bp, Oryza sativa nipponbare
ttaatcaaccttttttcttttcttttttacccatctcatacataatgacgtagagacaccagagatccattcagattacattgcatccatccaagatgagaatgatcagaagaagtttgggttgtatccgttgctgcaggtggcgaggatgtagtaggcgacgatgtggccgagggagccccaggcgaggacgtcgacgaggttgaagccgacggggtcgttggaccggagcatgccggcgaactccttggcgcgctcgtcgccggcgtcaaagtgcgtcttgccgttctgctccggcacctgcttcgccacgttctcccgctggaagtgaagaacacg

SEQ ID NO: 402147 - DNA, 431 bp, Oryza sativa nipponbare
  unsure (1)..(431): unsure at all n locations
ccttccttttttaaatatatatagccggagcttccatatatttcattcacatatgcctcacccaacagcatatagtggtagcatataccactcttacatcaagtcagagagagatcagtnaaacaaaaacaaaagcagagcacggccggtaaaatcaaaagacgatgaacaaactgggaacacacgaaacaaggtgggagacatcatcgaatcagagatgaacaattaaacaaggctatatatgacgatgacggcttagttgccaccagactcctcgcagcccgggggcttgtaggcgatgaagctgatgagctgcacctgcctgacgttgtcgaagccgatgatacggacgaatgcatcaaggtacgccttcttggcctcctcgagctccttgagcacctgggtggcgtcagtgcacccgaacatgggca

SEQ ID NO: 402148 - DNA, 428 bp, Oryza sativa nipponbare
ttactaggcaaaccacacgaatacacgattgattaatttcactgagaatagcacgggtacatggcatcacacaaattcatacgttgatacacgcatagtcgccgaagcgaccagctgcttaattaaatcgataacacaacgggtttaattcagcaataatcagcacacacacaaaccacactcatatgggtggtttttattgtggactaattaaggtaggtgactcgccggcggcgagtgttcggttgcttcgtgacttcacttgccgcacttgcagtctgtgcaggagcagctggtgcctcacttgcagccgccgttctcctcgccggctgcgacctccttgaagtggcttttctcggcttcaactattacgacgccataacttgtacctttcttcacgcacttgctcttgtcaacacagtcccaat

SEQ ID NO: 402149 - DNA, 372 bp, Oryza sativa nipponbare
gactaattaagcatagataaatagatagacccaccagaagttcagagaaccagcgtaacacatggcaaagcctgaagattcagttattaatcgtatacggatacagagcagttgttgcaacagggagaaattaggtcggagtgacaaaatgggaagaaaaaaaacagagaggaagagcctagtgagcgtcttcctcctcgcagtgcttggtgtacttggccgggtccagcagggcgtccagctccgacgggctgctcggcttcaccttgatcatccacccgtcctcgtacgggcttgagttaatcaggccgggtgtctcagagagcttgtcgttaacctcgacgacctcaccggagatgggggagttgatgt

SEQ ID NO: 402150 - DNA, 278 bp, Oryza sativa nipponbare
  unsure (1)..(278): unsure at all n locations
tttttgtaccattacatgatgattaacatataaatctgtanctacagggaatgagtgtaatagagcagaagaggaaggatnatacaaaactccaattctcatggatgggaatgggatcaggtggccttgcagaactctcctcccaaatcttcacacgcctgctggggggaacaccttgtttggctcttcttangataggtagtccctgtcaacttcctctcccgccgcacgagaaacagcaacaacagcctatgatgaaagcttggcctctgggtaca

SEQ ID NO: 402151 - DNA, 496 bp, Oryza sativa nipponbare
  unsure (1)..(496): unsure at all n locations
tgaaataaaatgccttgctatattatacctatatcatatttgctaggggaaggagactataacatattgaactaagcttagatggcctcatttagacggaaagccaaaattttagatacatatgctttgttttgagcactaaaatactaactcaattacaatggggatgaacccaagaacatggcctgctcaaagcagtgctacagcctctaggagctgacatctctcatcttcccttttcattttatagctagtttcccgccagaacaaaatggttcaagtctcagttcttgattgcacacagccacagaaaggtgccctcttctttttcttctgcgcaccgccgcgcttctccttccttccatacagataatccctcagaaaaacccgagtgcgcttatcggagaccttgagcctnctgtactcatgctcctcttcaagctttagcaggacatactgtatcttctgaagttccagttccaatctccccacgttt

SEQ ID NO: 402152 - DNA, 482 bp, Oryza sativa nipponbare
tttcttttgggaaacgaataaaatcattattgcaaaaacatcatcttcttcttcggcttctgggggtacacaacaccaactcgatcatcatctcgtcgcactaaacccatcttccccaacccaaagacaacgaactcgctggccacaaatccatccaaccacaattaaccactgctaagctacggtcccccacttcacttgccggggacgaagttggtggcgtacgcccaggccttgttgttgacggggtcggcgaggtggtcggcgaggttctcgagggggcccttgccggtgacgatggcctggacgaagaagccgaacatggagaacatggcgaggcggccgttcttgatctccttcaccttgagctccgcgaacgcctcggggtcatcggcgaggccgagcgggtcgaaggcgccgcctgggtagagcgggtcgacgacctcgccgagcggcccgccggcgatgcggtacccctcgac

SEQ ID NO: 402153 - DNA, 512 bp, Oryza sativa nipponbare
  unsure (1)..(512): unsure at all n locations
gcggtaacagaaaatttacttctttaaaccatcttacagaaattgaaacagataggacaaatgagacaaggtaatcctccgccaactttaanataaccatctcaggaaaatgtctacaacagtcccaactgtagcatttttttttacagcgataacagttacggtaacaaacggactgggtagagcaaagcctccacaggaacaaacccaccccccaccagtgcttttgtcattccccactcttatgtcaaagacaaagatatgtcgatacagcagcttctaaaatagctcctctttgtcacaaaattcaaaaatcaaattcgccggtagccttgttgaatagaacatctcggccatttaaatgcatgattccatccttcaaagtgcatttccagcggttctttgtccttgtcactttgtcaaactgtgcgaggacaaggtgctgtgtgttaggctcatcctccccttgctcaaggtcatctaactcatcatcatcatcggcatcttcatta

SEQ ID NO: 402154 - DNA, 474 bp, Oryza sativa nipponbare
gataattaatggatgattggtatccacaccaatcaacttgtcattggggtaccagttgacatgtaaattatgttccgacactcgagtttcgaacaatattacagtttttagtcaacaacaccccaccacaactccataagcttacagctcttatactaagggccactcaacggcagcgtggggcaaaatatagcttagtaacggtatttagtggagtagtccttgggagcaatcaccaaaccacgccctttgcgagcacctctgtagacggtctccacaatgtcgatgaactcctgcttgtccttcaaggcccagttgatcttgttgttgtttcctgtccccagatcaatcatgatgtgcttgttgcggaagaagaacatcaccgtcgacggatcatacagctcgtacatggtgttgaagtctggaacctcggtgatgtcgaccaggtagatgaccgcaaagttctttatggtc

SEQ ID NO: 402155 - DNA, 455 bp, Oryza sativa nipponbare
  unsure (1)..(455): unsure at all n locations
taaaacacaagacaggaggtttttaacacagaactaacaccattatgtttaactggataatggagtgcaattctagtagtagggttctacaatagtaaactcaacaaacaatatttgccatggaacttcatgnaacttggagatactctatttcttcttctcggtgtgagcgtgaccgccaccanacctcatcttcctgaggacaccagccatctcctctatcttcttcttggccctcttgtgggtgccaagctttctctttgccaccttcagtgcacgcttgtccttgccaactttgagaagctcactgatactcttctcataaggagcaaatccagcaaccttcctgatcaagttcctgacaaatgtcaccctcttggtggatttccccttgctgtcggactgactaggcgactactcgctcttggtgacaaccttgcccttgttgatgccca

SEQ ID NO: 402156 - DNA, 349 bp, Oryza sativa nipponbare
  unsure (1)..(349): unsure at all n locations
ggcaggcaaattacatagtattatacggattataaagaanaaaccagcaccattgcactaatacacacaaagctcgatcaagcancttaattaatttcttcacatgtactacatgcatcctctcctcactccgtgatcaatttaagatgattctttggagctccagctcgacnactatccatcctaattaaaatcatttgacctactagatctcgtccagggcgtagtttttggtcgacactcccgcttagttcaccttggcgaacctaaccaccacctggtagcgagtgtttggatcctgatcaactgtgaccactgagcccagtcctttttaccaataagactccct

SEQ ID NO: 402157 - DNA, 399 bp, Oryza sativa nipponbare
ggagcacaaatttacatgttacacccacaccctacacccatgcatagtaatacagggtatatacgtacgtacatacatacccctctcgatcacacgcaccatcgatcgtacaaagttgcgtacatacatacgtacacacatatacgcatactcacgtacatacatacgtaattaaaaactcttaattaattaaatacgtagttaatagcatctctaatggaacttgaggctggtgaggatgttgttgtggactggatcagcgaggtgatcaagcatgttctgcacgggtccaacccctgtgaagagcgcctggactgagaaccccagtaaggcgagcattgccagcctgccattcttgatctccttgagcttgagctccttcatcttctcctcgctctt

SEQ ID NO: 402158 - DNA, 456 bp, Oryza sativa nipponbare
  unsure (1)..(456): unsure at all n locations
aaacaagctaattttataattaattcacaacaccatatttcattgatcangttcggaacctggacagaaatacacactaccggtacagatctcaccctctctccaatactcgtacatnccatccacgcgagtccacatcgaatacgtacatctatacggtacacgtacgtacatgtactgcaccgngtacacacacgcacactctcctgcagagacgcgcatcgtcgtcaacctagctagcttagctgaaggcgatgcgtctccatggcagcacggcggcggcggcgctcacttgccggggacgaagttggtggcgtatgcccaggcgttgttgttgacggggtctgcgaggtggtctgcgaggttctcgagggggcccttgccggtgacgattgcctggacgaagaagccgaacatggataacatggcgaggcggccgttcttgcggacgcgtgg

SEQ ID NO: 402159 - DNA, 488 bp, Oryza sativa nipponbare
tttttaccgaaaacaatctatccaataagtgacatgaaggttccacccttagggtggccctgagagaaaatgcaggtcaagaattcaccagccaagctacagtcaactcaaggtttcctagcacaacataaatggggagcgcctactgttttcgacaaatcactagacattagcgggctataaaatgaaacgataacccacagcacatttgcagcgtcactattctagtttgcgggcgcacgcattcgatcatgttcactgtccatctactgattcgcccttgggggcctccttgatttcctcagcagcatcctccgagatatctgaagtccacagcgtcaggttatcacgcataagctgcatgatcaaagtgctgtccttgtaggattcctcactcagagcgtgcagctctgagatagcctcatcgaaagcctgctttgcaagattgcaagcactgtcatgagagttgaggatctcggtataaaaca

SEQ ID NO: 402160 - DNA, 231 bp, Oryza sativa nipponbare
  unsure (1)..(231): unsure at all n locations
taaatatatataacccgagcttccatatatttcattcacatatnccgcgcccgagcgcatatagtcggagcagataccactcttacatcaagtcacagaagatcanttgaaacaaaaacaaaagcagagcacggcctgtaaaatcaaaagaccattaacaaacggggaacacaccaaacaaggtgttttacatcatcnaatcanagataaacaattaaacacggctatata

SEQ ID NO: 402161 - DNA, 289 bp, Oryza sativa nipponbare
tatttctaataataaaataattaattacctgcttttaaatattgataaaaggggtgcttgagactaataatgaagtatcaggagaaacctgtcttcagttacaatattacatcatggtggttcaccaattgtgcggtgatagaaatcatatatgtcctctttccaaaagagactccatccatcagtattgctagagtctgagtagcaattattatcctatatagtgaggctgaggccttccctgactgaaccatattgcaacgctgatcgatctccttacatgctcggc

SEQ ID NO: 402162 - DNA, 300 bp, Oryza sativa nipponbare
  unsure (1)..(300): unsure at all n locations
ttgcgctctcaaagtagcatatattattcaatcttnatgaaanagggacacaaggcatcatctatagtgatggtgcctcttacaaacttcaacacactgtaacaagcatacactcaagagtcaagaggtggctaagttttttgtgtacaattgaacacgcaggcgggtacacaaccaattatactctatccaaactataatctttacaaaaaatttngcanttnctcaaaaaccattaatcttnatttgttccttcttcacaatgcccgcctgaacaagaaaatttgatacgtttttcct

SEQ ID NO: 402163 - DNA, 475 bp, Oryza sativa nipponbare
  unsure (1)..(475): unsure at all n locations
ttttgaagttcgattgagtatgatagacctttttactaggcaaaccggactaatgcacnattgattaatttcactganaatagcacgggtacatcacatacacaaattcatacgttgatacacgcatagtcgccgaagcgaccagctgcttaattaatcgatggggacgggtttaattcagcaataatcagcacacacacaaaccacactcatatgggtggtttttattgtggactaattaaggtaggtgactcgccggcggcgagtgttcggttgcttcgtgacttcacttgccgcacttgcagtcggtgcaggagcagctggtgcctcacttgcagccgccgttctcctcgccggcggcgacctcctcgaagtggctcttctcggcttcaactatgacgacgccatagctggtacctttcttcacgcactggcttttgtcagcacagtcgcagttgccgcacttgtcctacat

SEQ ID NO: 402164 - DNA, 490 bp, Oryza sativa nipponbare
tttatgacacaactagaacacagttattatacattaaacaagcaagcacattaagtgtagcgtgaacaccctgttccatgaactaacatgcaacacgatgaacataccatcaattcattgccacaagtcagctgctgatatagcacaccgcatacatcacacacacgaatgggcgcaggcggcgtgcatacataacaactagtttctgtgacataccatgagcagatacattggatagttagttactcatgggaaaacatgcttttgttgagcagaaacctttcatccagagctcatggtaaaccggacagcaaagtgaccgtcacttgccatacttgttgccactgaagagatagtcaagtgatgaaccaccgcctggagcaacctgcaccttggttgacggacggtccgtaaagaaatttacacagttttgacctttagcccctatgtaattggtcgccttactactttgaataccggctgggatctc

SEQ ID NO: 402165 - DNA, 445 bp, Oryza sativa nipponbare
acggttttgcagccaattttatacaactgtcactcattcactttggggaatcggcaagagcttcatagatatagcatacaaaagattaagaaaaatggcagagtctgcattagctcagtcctcatccacaaagattgtttcttgcttgaagagtcccccaaacacgggcctcacatccggcttggattccggctgctttggtgttggtcttgtcttctgcgccgcgggcttcacaacagctctctgtggtgccagcttctttgcttttgcctggcctctcacggtggcgatctgcgcttttggttccacctcgtctgagtcctgagtggccactcctgcaagttgtgtgctgagcttctcccatgagaagtccgtgccgaaccctttggctctgctcagaaggttctccagagaagcttgcgcctcacttgcagctgcctcatca

SEQ ID NO: 402166 - DNA, 444 bp, Oryza sativa nipponbare
tcatgcaagtacagtgtcacatagattaatcacattgcagtttgattaaacagggggcatcatgacatcacattcagaggaaggctatcttagattacagatgaatatcttacacccagcttggtctaacatacatacactggatttggttgaaatttatccctctagggcgctggtgttataaactaggatttcttccgctccgatgagcccagcaagagtcacggcccagatcagaagcccggtggttccaccaacataggtttcacctttgggagaccattcctcccgcagtacattgggctgaaccctcgacatttaccccttacttttcaacgaattggatcacaccctacccagagctcttcctgccagatgcatcaatatcgactgacatgccacctccaatcctctagggcttgtccggcttgatcttcttcccac

SEQ ID NO: 402167 - DNA, 487 bp, Oryza sativa nipponbare
  unsure (1)..(487): unsure at all n locations
gatctgtaaattgagttgttaatgaatccgctttattcgctgactctatatgatggttctttttctttgaaggaaaaattctataacaaggtttgagaccttgtatctattcctcttttttctatactagtagaatttcattgcattgagttctttcttagatctagatggggtggaataganaaatagaaaaaagtcctttcggatgaaaatggaagaatattacgccatatatcccacttggacaaattagaagcaattttctcttatcctcatttgttccttcctttagataaatactcaaaatccccttacaataatgcaatttcgaagggaccttttccctcgtgttgagaaaacttttcttcttccaattcttcttcattcaattcatttcaaaaaattcaattggtactcaaaatacttccattggtatgcgcaagaaataagccaattcggcagctttttgttcaatttctcgtggagt

SEQ ID NO: 402168 - DNA, 300 bp, Oryza sativa nipponbare
  unsure (1)..(300): unsure at all n locations
taattcacaacaccatatttcattgatcaggttcaaaacctncacagggatacgcggtacctgtacagatctcaccctctctccaatactcgtacatccatccacgctgtccacacgaatacttacatctataccgtacacgtacttacatttactgcaccgggtgcggacacncacactctcttttatagactcgcatcgtcatcaacctagatagcttagcttaaggctattcgtctccattgcagcaccgcggcggtcgggctcacttgcctgggactaatttggtggcctatgccc

SEQ ID NO: 402169 - DNA, 489 bp, Oryza sativa nipponbare
  unsure (1)..(489): unsure at all n locations
ttatagtagaaagcaaccgtatttctttctacattgaaatatacaagatgtacagggaaatgtgtcaagaagagatgtaggagcaccctcatggagagggatttttaaagttccattgcatggtttcacaagttatgcaatgaccatcctactttcttctanctgtaatatggggagaaactagttacaagaaatgctacgatgcccattgtcattgatatagtatggtgatgaacagattcacgaaatatgaatgtggagctcattaaacttttgccgcttcagtatgtgcaccggccctctcagcaataatctgctcatagagatctctaatcttcagtcctacgatagtttggaagagacctgttccattgttgctgccggggaagtctgcatgctttagcatttgctgtgtcacctcttcataaaatttggttgagaggttgcttaaatggctctcaacataaataaactcatctaatctgtcaa

SEQ ID NO: 402170 - DNA, 402 bp, Oryza sativa nipponbare
  unsure (1)..(402): unsure at all n locations
aggggggagataattaaggcatatggggtgcctattgctatataagaccaagttcaattntttaaccaactactacctccaattcatctatagtcaatctaatagcccattcatacaatatttacatgctggactggggatatctaatcccaccttttttataccccctttacaacacttaaaaaattaattggccttttattaaattgtacataatattaattttttttattaaatttgatcaaaccttttaaaaacttttaattccttgattttttccaatttttcatatttttcttaaaaattttttttttttcaatatgcttaaaactttttggaattctttctaattcagtttctttaatttattaacctcgtaaggtcaaaaagttttttaaagta

SEQ ID NO: 402171 - DNA, 497 bp, Oryza sativa nipponbare
  unsure (1)..(497): unsure at all n locations
gcaaggaatatcaatatagactactggtggcatggcacctcaatagtacatagagagtgagcgttaanctaagaaagagaggaaaacancatacatctaacaatgactaatgctttcatcaacagaagtagcggataaaatcatgtaaaacacccattggctcctgcccacagagcagcaaaactttaaaagattgaagtaacaggtctgcggaacaaattattggccattgctttgcaaaacaaccaaagaattcgaaatttaacagccatcaaccacagacgatgttatcagggcctgagtgcaagcgctagaccaaacttggggggtctgtccaaggccttggtgtccaattcaccagagattggcaaaaccgacttgggtttaacctcatgctggaaaagagcagcaagctttccagtgttgttgagcctttccttcacagctgtcttcgggtcaaccttttacaggccaccaacagtgaaaatgttctcatt

SEQ ID NO: 402172 - DNA, 414 bp, Oryza sativa nipponbare
  unsure (1)..(414): unsure at all n locations
ttaatcataacttcttttcctgtactcagcagtgtaccaatgctagggagataaaggtaatttcacctttgaacgggaatggggaaccaatggagtagaaattacagngagaaggtggcagctgaagagagaatcaagagctgtcacaaagctatatacaagttgggaagctgaaccagaagagagcatattcttccctcctacaagaagcattataacttgttggtgctgttttacaaatctgggtgattatcggaagatcggcatgcggtagcaacttcagcttcttcttcgacttgggatccctgttgcagagagcatatgaaggtgcgatccccctacacattttccacgcgacatgttgttggccataactttgcgcccccaaaccacccttcaaggaacgcaacatac

SEQ ID NO: 402173 - DNA, 390 bp, Oryza sativa nipponbare
  unsure (1)..(390): unsure at all n locations
tttgatcataaggcaaagctgcgagcgccagatcatcttattactacagcttctgggcgatgtgctacaatagcttcttcctgccttgcaaaaagaaacccaaaccttatctacaacgcaacacacacaccggacacagagcgctcgatcgatcgaagcatactagacgacgagggcgaactactactaggtaatctacaacacctangctatacaaagatacagcgcgcggcggcgactggcggcgatacggctgcgatgatcaggcgctggccttgttggccttcttggagatggccgatcgaatggatttgggctgttgcatctgcttaacggaggcggccttcctcgccctcttggcactggcttgacctgcggtgggaaccatct

SEQ ID NO: 402174 - DNA, 395 bp, Oryza sativa nipponbare
  unsure (1)..(395): unsure at all n locations
aaactcgaccaaacaaaaatatcaattagaaaacttttgacnaccggggaaagaggttaatttggattgacagagattacatatgagaaagaaaactcggccatgcattttctataataaacacaatgactcggtgagattactttgacactaacactaatgaccgggtttgcagaaactagtttgacttaatacccactaattaaaaatctagctaaactaattgtttcatgacgagttcagtcaaaactgaaggacatgttgccttcagatgctcgaagccatcggtagccatggccgccttgaggttgcccggagaagacaagaactcgacgcaagcctccttgagcgcgcggcaatggtgctgctccgccagcgccagcgtcacggggacg

SEQ ID NO: 402175 - DNA, 504 bp, Oryza sativa nipponbare
  unsure (1)..(504): unsure at all n locations
gagctaaagctactgctagacaattgggatgtatctggggtttccccttggggtggatgtgagcctccaaatgagctccctaaatgcatatggggggaggaacgaacaataatcagatcannccctcgccttctccttcccgagccctgcattnggcttcagtgtaggggcgtggcgcgggtgctcttcnaagagctcttgtgtgaggggtattcgagcgacctatgatgaaagaacgctttgctggcgacatattcttcttatctttcctggccaatctctcacgctcatcatattcttggttctccttctccactagacgaatgagggtctcgcacctcctagctagctcttgggttgttctagacttcacaaaccaatcaaatcggaacaagggcgacatgcgaaaggctgctttcagttcatcccagtttccgtatccgagtttgtgcaccatgcataacataaaacgatcacattcttccgtggataacttccctttat

SEQ ID NO: 402176 - DNA, 142 bp, Oryza sativa nipponbare
cgatggagtaagtgtattatatgtatgtaaatattatattattggggatcatgtgtaggagctagactaacgtgccttattaacaaggagatatgtaccattcatgattattaacatataaatctgtagctacatcgaatta

SEQ ID NO: 402177 - DNA, 285 bp, Oryza sativa nipponbare
  unsure (1)..(285): unsure at all n locations
tttttaactcaaaatacaaaatatccattttttatcatcttccaaaggttttgggtagcaaaaatacatatgcccactaattttacattcctccaaattacaaagattatacccagacaattctaaactttgtatacttaagagccctctactacctcanttacgaaggggtgcacggaataacttttgttttcttcctcgcttgattgatcgacaaaaatacttttgcaaaaattacctaattaattaatcgtcgtgctctctaacataaccaatattgtttat

SEQ ID NO: 402178 - DNA, 456 bp, Oryza sativa nipponbare
aatccttccatgccacaatataaacaatttagactacatatttacactatacggggccagaaatggttatattttgggatcgagggagtatttgtttcgatctaatagagatgagaaatccgctaatcagaataacaccacggataagtacctagaccatgggttgggaaacgaataaaatcattattgcaaaaacatcatcttcttattcatcttcttagtgtacacaacaccaactcgatcatcatctcgtcgcactaaacccatcttccccaacccaaagacaacgaactcgctggccacaaatccatccaaccacaattaaccactgctaagctacggtcccccacttcacttgccggggacgaagttggtggcgtacgcccaggcgttgttgttgacggggtcggcgaggtggtcggcgaggttctcgagggggcccttgccggtgacgat

SEQ ID NO: 402179 - DNA, 287 bp, Oryza sativa nipponbare
  unsure (1)..(287): unsure at all n locations
aaatatatataccccgaacttccatatatttcattcacatatncctcacccaacggcatataggcgtaacaaataccactcttacatcaantcanananagatcatttaaacaaaaacaaaatcatatcacctcctgtaaaatcaaaacaccatcaacaaacttggaacacacgggacaatgttttatactttattctatcacanattaacaataaaacaaagctatatattactattactgcttaatttccaccagactcctcacaacccctatgcttttatccta

SEQ ID NO: 402180 - DNA, 420 bp, Oryza sativa nipponbare
  unsure (1)..(420): unsure at all n locations
tattacgccccatccacacctacgtatcctgtgagagcctctccaccttttttttttttttttttgttgaactccgttaattaaaaattaaaggagtatataaaccggttccttagagatctgagggcnanatatacagatgccaaatangtntacagtactcgaaattacaaagattataccagtataattaatcgttgggattaagagcatgaactacccanttacgaggggtgcacggagtacttgtgtttcttgctcgcgtgtggatcaacaagatacttttgcaaaaattacctaattaattaatcggcgtgctctctggcgtcgtcgatattgtttattgtttggctagagttcgccggcggcggcggcggctaagtcctcacaacctgtggaaggggcgggcgaggcggtccg

SEQ ID NO: 402181 - DNA, 263 bp, Oryza sativa nipponbare
  unsure (1)..(263): unsure at all n locations
cagcctcccttttttttttttttttgaagttcgattgagtattatagacctttttactaggcaaaccacagcaatacagtattgattaatttcactgagaatagcactggtacatcacatcaacaaattcatacgttgatacacccatagtctcccaanccaccagctncttaattaatcgataacacgcgggtttaattcancaataatcatcacacacacaaaccacactcatataggtggtttttattgtggactaatta

SEQ ID NO: 402182 - DNA, 381 bp, Oryza sativa nipponbare
  unsure (1)..(381): unsure at all n locations
ccacgcgtccgaagaaagcataagcaacacaagggattaactcatcactcacttagctaattaaatcttcgaccatgtcggacaagtgcggcaactgcgactgtgctgacaagagccagtgcgngaagaaaggtaccagctatggcgtcgtcatagttgaagccgagaagagccacttcgaggaggtcgccgccggcgaggagaacggcggttgcaagtgcggcaccagctncncctncnccaactgcaagtgcggcaagtgaagtcacgaagcaaccgaacactcgccgncggcgagtcacctaccttaattagtccacaataaaaaccacccatatgagtgtggttgggtgtgtgcatatcattgctgcattaaactcc

SEQ ID NO: 402183 - DNA, 159 bp, Oryza sativa nipponbare
ccacgcgtccgctcagctctcacagctcactgcatcaatggccgcggccaccatggcgctctcctccccggtgatggcccgcgcggcgccgtcgacctcctccggctcttcgggaggcgcggacaccatgcgcagaccccgcgagcccagccggcgcgt

SEQ ID NO: 402184 - DNA, 400 bp, Oryza sativa nipponbare
  unsure (1)..(400): unsure at all n locations
ccacgcgtccgcagattttttctggcgctgtttcccagatggaaaggatgtttatgataatgtcactactggtgtcatatgccatggagagaagagtgtcatcaaagaaggtcacaagagctttccaagcgggcactcttcatggtctttcgctggtctaggcttccttgcatggtacttagctgggaagatcacagtttttgatcgtagaggtcatgttgcatagctatgcatagnatngnngncnttcttactgctgacttgtggctgttctcgagtggatgactactggctcactgcaggattatttgcaggcttctataggcttacagtccatcatttgtatctgcatcttccatatctatgaccaacgctttttgtctatgctcccttcactagc

SEQ ID NO: 402185 - DNA, 187 bp, Oryza sativa nipponbare
ccacgcgtccgcctccacctccgcttcccctcctcctcctcctcccgccgcgccgcgcgcctcgcgctcgccgcctccgccgccgaggccgccgagcctgtcgaggtggaggaggcgcccgccgaggacggggcggatgaggtggtggccgtggaggacgagctgtccggaccggcgctggaaagta

SEQ ID NO: 402186 - DNA, 432 bp, Oryza sativa nipponbare
ccacgcgtccgcccacgcgtccggccgaacgaccgagctaccgagctaatccagccatggcctccaccgcgctctccaccgcctccaaccctactcagctgtgcaggtctcgcgcctcgctgggcaagcccgtcaagggcctgggcttcggccgggagcgcgtgccgaggacggcgacgaccatcacatgccaggccgcgagcagcatcccggccgaccgcgtcccggacatgggcaagcgccagctgatgaacctcctcctgctcggcgccatctcgctccccaccgtcggcatgctcgtcccctacggcgccttcttcatccccgccgggtccgggaacgccggcggcgggcaggtcgccaaggacaagctcggcaacgacgtgctcgccgaggagtggctcaagacacacggtcccaacgaccgcaccc

SEQ ID NO: 402187 - DNA, 433 bp, Oryza sativa nipponbare
  unsure (1)..(433): unsure at all n locations
ccacgcgtccgcccacgcgtccgccacgcgtccgcccacgcgtccgccacgcgtccgaaagaaaaggcctgtgtcaaggagagggtagtagcaccttgctctcctttgccttcagagaaaccggaagcaatggcgtctgctactctcctcaagtcatctttccttcccaagaagtctgaatggggtgccacccgccaggctgccgcccncaagccggtgactgtctccatggttgtccgcgctggtgcctacgacgatgagcttgtcaagaccgcgaaaaccattgcatcaccaggaaggggtatccttgccatggatgaatcgaacgcgacctgcggtaagaggcttgcgtcaattggccttgagaacaccgaggccaaccgccaggcttaccggacccttcttgtcaccgcaccgggcttgggacagtaca

SEQ ID NO: 402188 - DNA, 422 bp, Oryza sativa nipponbare
ccacgcgtccgcccacgcgtccgcccctttctgaacacagcaccaccccttctgctgcatctcccacctccctctgaattgtgggcctgaggcgatggcggcgctcgccccgtccaagatgctcggcacccggctcaacttcgccggctcctcccgctacgccaccgcggcaccgaccaccggagcgcagaagatcgtctccctcttcagcaagaagcccgccccgaagcccaagcccgccgccgtcacctcctcgagccccgacatcggcgatgagctcgccaagtggtacggccctgacaggaggatcttcttgccggagggtctcctggaccgctcagaggtgccggactacctcaacggagaggtccccggagactacggctacgacccttttggcctcagcaagaggccagagggac

SEQ ID NO: 402189 - DNA, 383 bp, Oryza sativa nipponbare
gattccggtcgaccacgcgtccgctactagccagtaagctagctaactaactacgtggctatggcccccaccgtgatggcctcctcggccacctccgtggctccattccaagggctcaagtccaccgccgggctccccgtcagccgccgctccaccaactcgggcttcggcaacgtcagcaatggcggaaggatcaagtgcatgcaggtgtggccaattgagggcatcaagaagttcgagaccctatcgtacctgccaccactcaccgtggaggatcttttgaagcagatcgagtacctgcttcgatccaagtgggtgccttgcctcgagttcagcaagggtggattcgtctaccgtgaagacccacaggtctccgggtacta

SEQ ID NO: 402190 - DNA, 333 bp, Oryza sativa nipponbare
ccacgcgtccgcggacgcgtgggccgtcaagagcgcgccccagagcatctggtatggacctgaccgtcccaagtacctgggcccgttctcggagcagacgccatcgtacctgaccggagagttcccgggagactacgggtgggacacggcggggctatcggccgacccggagacgttcgcgaggaacagggagctggaggtgatccactcgcggtgggcgatgctgggggcgctgggctgcgtcttcccggagatcctgtccaagaacggggtgaagttcggggaggcggtgtggtttaaggccggcgcgcataatcttctcgagggggggct

SEQ ID NO: 402191 - DNA, 399 bp, Oryza sativa nipponbare
  unsure (1)..(399): unsure at all n locations
ggcgaatcccggtcgaccacgcgtccgaaggccctcctctcactcaaggatggagcaccagactccttccacttcgtcgaggactgggtcaggaccggtttccccgccaagaagaaggttcagaccgagcacgcctcgctgcctttcgatgaccaatgcgccatcttggagaaggaggccgtgaaccaatccctggagaacctcaagacctacccgttcgtcaaggaggggatcgccaacggcaccctcaagctcgtcngcggccactacgacttcgtctccggcaacttggacttatgggagccctaaatccgaccgttcgttcgttcagttcgtcagtttacgccaacgcttttgcataagacctacctgaggatatcgtccccgatcatcgatgtg

SEQ ID NO: 402192 - DNA, 281 bp, Oryza sativa nipponbare
ccacgcgtccgcggacgcgtgggcggacacgtgggcgcctcagcagatttaatcctcaatggcggccttcaacaagctcggtagcttcctgaggcacagtggcttgacaagcagtgccttggccggctcttccactgccatgtgcaatgctgatcgtctgatgtgcaccaagctcttcggcgttggtctttcttggaatactagtgacgagacgctgaaagaggctttcaccagctccccccttgcgactgaggctcttttgatcaatgacagagcatctt

SEQ ID NO: 402193 - DNA, 325 bp, Oryza sativa nipponbare
ccacgcgtccgtttttggtccgcccattgctttagcactaggtgcaaaatttgttccattgaggaagccaaaaaagttacctggtgaggtgatctcggaagaatattctttggaatatggtacagataaaatagaaatgcatgtaggagctgtggagccaaatggccgggccgttgttgttgatgatctaatcgctacaggtggaaccttatctgcagccgataaacttattgagcgtgctggagcagaggttgttgagtgcgcatgtgtcattgaactaccagaactgaagggtcgggacaagctggggaacaagccagttttt

SEQ ID NO: 402194 - DNA, 352 bp, Oryza sativa nipponbare
  unsure (1)..(352): unsure at all n locations
ccacgcgtccgcggacgcgtgggcggcgagaccaccacccagggcctcgactccctgggcgcgcgctgcgccaagtactacgaggccggcgcccgcttcgccaagtggcgggccgtgctcaagatcggcgccgccggcgagccgtccgagctcgccgtcaagcagaacgccgagggcctcgcccggtacgcgctcatctgccaggagaacggcctcgtccccatcgtcgagcccgagatcctcaccgacggcgcccacgacatcaagacctgcgccgccgtcaccgagcgcgtnctcgccgncgtctacaagtctctcaacgaccacaaggtcctnctcgagggcacccttc

SEQ ID NO: 402195 - DNA, 368 bp, Oryza sativa nipponbare
ccacgcgtccgcgaaggccgacgcctgctcctccaatacctacccgcagcaggctgggaccatccgcaaaaatggctacatagtcatcaagaaccgcccctgcaaggttgttgaggtttcaacctctaaaactgggaagcacggtcacgccaagtgccactttgttgcaattgacatctttactgccaagaagctcgaagatattgtgccatcttctcacaactgtgatgtcccgcatgtgaaccgtacggagtaccagctcattgatatatctgaggatggatttgtgagtctgttaactgaaaatggcaacaccaatggatgaccttaggcttcctactgatgataacctggttagtcagatcaag

SEQ ID NO: 402196 - DNA, 342 bp, Oryza sativa nipponbare
  unsure (1)..(342): unsure at all n locations
ccacgcgtccgcgccctgngaggttcgatcggcaggtcaccgtagacaggccggatgtcgccgggcgtgtcaagattcttgaggttcactcgagaggaaaggctctggcaaaagatgtcgactttgagaaaattgcccggagaacccctggtttcactggagctgatcttcaaaacttgatgaatgaggctgctattcttgctgctcgtcgtgatctgaaggagattagcaaggatgagatctctgatgctttggagaggatcattgctgggcctgagaagaaaaatgctgttgtttcagaagagaagaggagacttgtggcttaccatgaggctggtcatg

SEQ ID NO: 402197 - DNA, 458 bp, Oryza sativa nipponbare
ccacgcgtccgcccacgcgtccgcccacgcgtccggctcatcgccatctctctcagctctcacagctcactgcatcaatggccgcggccaccatggcgctctcctccccggtgatggcccgcgcggcgccgtcgacctcctccgcgctcttcggcgaggcgcggatcaccatgcgcaagaccgccgcgaagcccaagccggcggcgtcgtcggggagcccgtggtacggcgccgaccgcgtcctctacctcggcccgctctccggcgagccgccgagctacctcgccgatgaccccgaggcgttcgcggagctcaaggtgaaggagatcaagaacggccgcctcgccatgttctccatgttcggcttcttcgtccaggccatcgtcaccggcaagggccccctcgagaacctcgccgaccacctcgccgaccccgtcaacacaacgcctgggcgtacg

SEQ ID NO: 402198 - DNA, 357 bp, Oryza sativa nipponbare
  unsure (1)..(357): unsure at all n locations
ccacgcgtccgcacctgcggcgtcagctgcttgatggacgacgaggccacgctcgtcggcggcaagaaccacagccacgccacccaggacctctacgactccatcgccgccggcaacttccccgagtggaagctgttcgtccaggtgatcgacccggaggaggaggagaggttcgacttcgacccgctggatgacaccaagacatggccggaggacgaggtgccgctccggcccgtggggcgcctcgttctcaaccgcaacgtcgacaacttcttcaacgagaacgagcagctggcgttcgggccggngctggtggtgccggngatctactactccgacgacaagatgctgcaatgc

SEQ ID NO: 402199 - DNA, 308 bp, Oryza sativa nipponbare
ccacgcgtccgcccacgcgtccgccccgtgtccccatcatcgtcaccggcaacgacttctccacgctgtacgcgccgctcatccgtgacgggcgtatggagaagttctactgggctcccacccgcgacgaccgtgtcggcgtctgcaagggtatcttccgcaccgacaacgtccccgacgaggacatcgtcaagatcgtcgacagcttcccaggccaatccatcgatttcttcggcgctcttcgtgcccgtgtttacgacgacgaggtgcgcaagtgggtgtcggacacgggtgtggagaacattggc

SEQ ID NO: 402200 - DNA, 503 bp, Oryza sativa nipponbare
ccacgcgtccgggccatgctcgccaccctcggcgccctctccgtcgagtggctcaccggcgtcacctggcaagacgccggcaaggtggagctggtggatgggtcgtcgtacctggggcagccgctgccgttctcgatctcgacgctgatctggatcgaggtgctcgtcatcggctacatcgagttccagcgcaacgcggagctggacccggagaagaggctgtacccgggggggtcctacttcgacccgctcgggttggcgtcggacccggagaagaaggagcggctgcagctggcggagatcaagcacgcccgcctcgccatggtcgccttcctcggcttcgccgagcaggccgtcgtcaccggtaaggggcccctcaacaactgggccacccacctcagtgacccggttcacaccaccatctttgacaccttcttctcatacttctaatttaagcttctttgcgcgcaattcaaacgggatcgattgcgtggtgtgcgttc

SEQ ID NO: 402201 - DNA, 442 bp, Oryza sativa nipponbare
  unsure (1)..(442): unsure at all n locations
ccacgcgtccgcacagtctccccctttctgaacacagcaccaccccttctgctgcatctcccacctccctctgaattgtgggcctgaggcgatggcggcgctcgccccgtccaagatgctcggcacccggctcaacttcgccggctcctcccgctacgccaccgcggcaccgaccaccggagcgcagaagatcgtctccctcttcagcaagaagcccgccccgaagcccaagcccgccgccgtcacctcctcgagccccgacatcggcgatgagctcgccaagtggtacggccctgacaggaggatcttcttgccggagggtctcctggaccgctcagaggtgccggactacctcaacggagaggtccccggagactacggctacgacccttttggcctcaagcagaagccagaggacttctncaagaccaggcctatgagc

SEQ ID NO: 402202 - DNA, 259 bp, Oryza sativa nipponbare
  unsure (1)..(259): unsure at all n locations
ccacgcgtccgcccacgcgtccgctcagctgcaaggagaaggagaaggtaggctccagccatggcttcccagctctccgccgccacatccgtgccgcagatccatggcctccggacctactcctctcctaggtccatggtgacgctgccatcgttgaggatgagcaagaagaggtcccagggcatccggtgcgactacatcggctcagccaccaacgttatcatggcgacgacgncnacgctgancctgttcgcgggga

SEQ ID NO: 402203 - DNA, 329 bp, Oryza sativa nipponbare
  unsure (1)..(329): unsure at all n locations
ccacgcgtccggcgaaaaccctaaccccgccgccgccgccgctcttcgccacaagatcgtttcgtcgcagtcggagttccggtcttttgagcgcggagatggctgtggagaccccagttgatactccagctgccccggttcttggggagcccatggatctgatgactgctctgcagctagtgatgaagaagtcaagtgcttatgatgggcttgtgaagggtctccgcgtggcttccnnngccaactgagaagcatgctgctcatctttgtgtgcttgttgaggactgccaccaacctgattatgtcaaggtggttaaggcttagtgtgc

SEQ ID NO: 402204 - DNA, 390 bp, Oryza sativa nipponbare
  unsure (1)..(390): unsure at all n locations
ccacgcgtccgcccacgcgtccgcttcatggtcagggcagaggccactccccctgccaagcaaggtgctgacaggcagctgtggttcgcatccaagcagtccctgagctacctggatggcacgcttccgggagacttcgggttcgacccgctggggctatcggacccggaggggaccggtgggttcatcgagccacggtggctggcctacggcgaggtgttcaacggccggacggcnatgatgggcgtcgtcggcatggtcggcccggagctcctcggcaagctgggcctcgtccccgccgagacggcgatcccgtggttccagaccggcgtgatcccccccgcgggcacctacacctactgggccacccttacactcttttcgtctttg

SEQ ID NO: 402205 - DNA, 310 bp, Oryza sativa nipponbare
  unsure (1)..(310): unsure at all n locations
tcccggtcgaccacgcgtccgcccacgcgtccgccacgcgtccgcatcagggccagggcatctcaaggagcttgatgagttcaggctggtgaaaccgatgattgggcgatggaagatgttctcttcttgtttcttctttttttttttgtggagtatgcatgtataagatgttaatgaattggggggaggagagagagagagatggatgtgatgagattcagacttactgtgtgtgttgcggtaanngnnncctgcatgcatggatctggatgcatgggtgagggggtgaagtgagtggtgaatttctgat

SEQ ID NO: 402206 - DNA, 313 bp, Oryza sativa nipponbare
  unsure (1)..(313): unsure at all n locations
ccacgcgtccgcccacgcgtccgcccacgcgtccgcccacgcgtccgcccacgcgtccgggcaagtgagcgccgccgccgccgtgctgccatggcgacgcatcgccttcagctaagctagctaggttgacgacnatgcgcgtctctgcaggagagtgtgcgtgtgtgtacgcggtgcagtagatgtacgtacgtgtaccgtatagatgtacgtattcgtgtggaccgcgtggatggatgtacgagtatgggagagagggtgagatctgtaccggtagtgtgtatttctgtgcaggttctgaacctgatcaatg

SEQ ID NO: 402207 - DNA, 342 bp, Oryza sativa nipponbare
  unsure (1)..(342): unsure at all n locations
ccacgcgtccgccacgcgtccgcatcgatgcatcgtaggcggcctgcataggaggaggagggcaaggagcacagcaagcaggtaacctgcctgtgccggaaggttgcaccgaccctgttgccaagaacttcgacccaacggcgaggagcgacgacggcagctgcctttacaccttttaagcaggccggcttgacgcttgctattaattatttctcctttttatgttntctctttgttctgngtatcaaatcgcgcccaagccatagctgggcatgacaaggttttgttaataataatataatataaagatatgggctaaaaaaaaaaaaaaagggccggccg

SEQ ID NO: 402208 - DNA, 166 bp, Oryza sativa nipponbare
ggtcgccacgcgtccgaaagcatagcatcacatggtattatactatcactcacttagctaattaaatcttcgaccatgtcggacaagtgcggcaactgcgactgtgctgacatgagccagtgcgtgaagaaaggtcccaactatggcgtcgtcatagttgaagccg

SEQ ID NO: 402209 - DNA, 328 bp, Oryza sativa nipponbare
  unsure (1)..(328): unsure at all n locations
ccacgcgtccggctgcctgagcactactatagcgaggctgatctagtcgactctaactcctaccccatgaagactggatccttctacggggctgcgccatccaactgaataaacgatctcgacctattcgcatgctatagatgcatcataagccgcctgcataggacgaggagggcacggatcacaccaagcaggtaacctgcctgcgccggaaggttgcaccgactctnnnnncannanctttacacccaacggcgaggagcgacgaccgccgactgctctacaccatctaagcaggcccgcttgacgcttgctattaactattttt

SEQ ID NO: 402210 - DNA, 422 bp, Oryza sativa nipponbare
ccacgcgtccgcccacgcgtccgcccacgcgtccgcccacgcgtccgtggtaacctccactttgtggaaacacctgctcttgctcctccagatgtcacaattgatctagcagcccagcaacagcacgaggctgaactggcagcggctgcagcccaaccactgccagatgatgacgatgacctgatcgagtagatttgcaatgtgctactttacatcgtcttgcgaggagccctgtttttaagcacagttatatcctaagagatcttttttgcctcggagaaattttcgtggtgtccaaagttaaatatgggagttttgtcggatatttgaccagttcagacaagttttgggtatcggtggatgatgctataagggtactttgggttaacatatttgggctttaaaaaaaaatatataagttt

SEQ ID NO: 402211 - DNA, 427 bp, Oryza sativa nipponbare
  unsure (1)..(427): unsure at all n locations
ccacgcgtccgcggacgcgtgggcggacgcgtgggcggacgcgtgggcggacacggccacaccacccaccaactgagagctgagcaggcgagcgagcggacatggcagcatcgctccaagccgcggccaccctgatgcagccggccaagctcggcggccgggcctcctccgccgcgctgccatcgcgcccgtcttcgcacgtcgccagggcgttcggcgtcgacaccggtgccnccnncaggatcacgtgctccctgcagtccgacatccgggaggtcgccaacaagtgcgccgatgccgccaagctcgccggcttcgccctcgccacctcagctctgctcgtctcgggcgccagcgcggagggcgtgccgaggaggcttaccttcgtcgaggatcagagttagacttacatggaggtgaagggaac

SEQ ID NO: 402212 - DNA, 293 bp, Oryza sativa nipponbare
  unsure (1)..(293): unsure at all n locations
ccacgcgtccgcccacgcgtccgcggacgcgtgggtcgccatctctctcagctctcacagctcactgcatcaatggccgcggtcaccatggcgctctcctccccggtgatggcccgcgcggcgccgtcgacctcctccgcgctcttcggcgaggcgcggatcaccatgcgcaagaccgccgcgaagcccaagccggcggcgtcatctgagagcccgtggtacggagccgaccgaanncactacctncggccgctctactgcgagccgtcgatctactttaatcggttagttcc

SEQ ID NO: 402213 - DNA, 345 bp, Oryza sativa nipponbare
  unsure (1)..(345): unsure at all n locations
ccacgcgtccgagaagccggagctcttcgagccgctcaaggccggccaggcacccaagtacatggtgttctcgtgcgccgactctcgcgtgtgcccgtcggtgaccatgggcctggagcccggcgaggccttcaccgtccgcaacatcgccaacatggtcccagcttactgcaagatcaagcacgctggcgtcgggtcggccatcgagtacgccgtctgcgccctcaaggtcgaactcatcgtggngattggccacagccgctgcggtggaatcaaggccctcctctcactcaaggatggagcaccagactccttccacttcgtcgaggactgggtcaggaccgg

SEQ ID NO: 402214 - DNA, 337 bp, Oryza sativa nipponbare
  unsure (1)..(337): unsure at all n locations
ccacgcgtccgcccacgcgtccgcggacgcgtgggcggcgactacgggtgggacaccgcggggctctccgccgacccggagacgttcgccaagaaccgggagctggaggtgatccactccaggtgggcgatgctcggcgcgctgggctgcgtgttcccggagctcctcgcccgcaacggcgtcaagttcggcgaggcggtgtggttcaaggcggggtcgcagatcttcagcgagggcggnctcgactacctcggcaacccgagcctgatccacgcgcagagcatcctcgccatctgggcggtccaggtggtgctcatgggcgccgtcgaggggtacc

SEQ ID NO: 402215 - DNA, 556 bp, Oryza sativa nipponbare
  unsure (1)..(556): unsure at all n locations
ctaccgtgagaaccacaggtctcctgggtactatgatggcaggtactggaccatgtggaagctgcctatgttcggatgcactgatgccacccaggtgctcaaggagctcgaggaggccaagaaggcatatccagatgcatttgttcgcatcatcggcttcgacaacgtcaggcaggtgcagttgattagcttcatcgcctacaagcccccnnnttgcnaggagtccggcggaaactaagctagttggcaagccagcaagctcactcgtgagctctatacagaggagactcgattgatctattcggttatggcagctttgaacgttcgaatcgggccaccttgcattggattcccctttcccagtttgttgcttcagnttttctttattcatttgtttgtgtcaacatcaacctgtgtatgtatgtacatatgtatgtatcaaccataggtgtagagcatgcatatgtgaatgctagcaccaggccaatcatatcacatacccatcgtaatatattatggacaaacgccaaaaccatcctattgtatactatactca

SEQ ID NO: 402216 - DNA, 347 bp, Oryza sativa nipponbare
ccacgcgtccgcccacgcgtccgcgagagcgcaatggcgtccatggcgttcacactggtgggagcattcaaggggatgtccctctcctccccgtgccattcctcctcctccgcctccttcctccgcgctgaccgtgtctcgctctccgtcggcggcggggtcgggatgggggtgccgatgacgatgccggtgcggcggctgacgatccagatggcgcacaagaagggggccgggagcaccaagaacgggagggactcccccgggcagcgcctcggtgtcaagatttacggcgaccaggtcgccaagcccggcgccatcatcatccgccagcgcggcaccagggtcta

SEQ ID NO: 402217 - DNA, 489 bp, Oryza sativa nipponbare
  unsure (1)..(489): unsure at all n locations
ccacgcgtccgcggacgcgtgggtaccagcagaataaacctactgatattgtttgcaagtactttcttgatgccgtggagaagaaacagtacggttggttttgggtttgcccaaatgggggcaaagattgccactacaggcatgcacttccacctggctatgtactgaagtcccaaatgaaggccttattggaggaagagagtgaaaagattgctatcgaagatgagattgaagatcagcgtaaaaaggtaaaaacaacaactcctatgaccacagatttattcatggaatggaaaaggaagaaggcagaagaaagagaagctggtctggctgccttgagggcagagagggctaagaatgatcgcatgagtggccgtgagctgntcatggctgattcaagtgtgttcggtgatgatgctgaagcatatgatgtatttggaagacaggaagaatcagaggcttatgaagaccgagcaataaaaccaggat

SEQ ID NO: 402218 - DNA, 213 bp, Oryza sativa nipponbare
ccacgcgtccgcggacgcgtgggctgactcttggacatactcatggttcctcgtctaccttacctatcaacagcagctagctagactaactagctagagcagccatggtggctactgcactgaacaaccagatccacattgccgatgtccctgctggtggtgacggtgccggcgccgacgcgcgtgtcattgctggcagagagcaacaaggct

SEQ ID NO: 402219 - DNA, 195 bp, Oryza sativa nipponbare
ccacgcgtccgggcgaggcgcggatcaccatgcgcaagaccgtcgcgaagcccaagccggcggcgtcgtcggggagcccgtggtacggcgccgaccgcgtcctctacctcggcccgctctccggcgagccgccgagctacctcaccggcgagttcccgggcgactactggtgggacaccggggctctcgtcgccc

SEQ ID NO: 402220 - DNA, 350 bp, Oryza sativa nipponbare
  unsure (1)..(350): unsure at all n locations
ccacgcgtccggtgttggccgcggcgggttcgcggcggtgagggcgagcgggccggcgacgccgccggacatctcggacaagatgtcggagagcatcgacaaggcgaaggaggcgtgcgcggaggacacggcgagcggcgagtgcgcggcggcgtgggacgaggtggaggagctgagcgcggcggctagccacgcgcgcgacaagctcaaggagacctccgacccgctcnaggcctactgcatggacaacccggagaccgacgagtgccgcacctacgacaactgattcttaccattatatgtttgctaatctctctgtaattaattataagttactgggttgaaaagat

SEQ ID NO: 402221 - DNA, 287 bp, Oryza sativa nipponbare
  unsure (1)..(287): unsure at all n locations
ccacgcgtccgctcgcccgcaacggcgtgaagttcggcgaggccgtgtggttcaaggcggggtcccagatcttcagcgagggggggctcgactacctcggcaaccccagcctgatccacgcgcagagcatcctggcgatctggggttgccaggtcgtgctcatgggcgccgtcgaggggtaccgcgtcgccggcggcccgctcggcgaggtcgtcgacccgctctaccccggcggcagcttcnacccgctcggcctcgccgacgaccccgaggcgttcgccgagctc

SEQ ID NO: 402222 - DNA, 490 bp, Oryza sativa nipponbare
ccacgcgtccggaaagcataagcaacacaagggattaactcatcactcacttagctaattaaatcttcgaccatgtcggacaagtgcggcaactgcgactgtgctgacaagagccagtgcgtgaagaaaggtaccagctatggcgtcgtcatagttgaagccgagaagagccacttcgaggaggtcgccgccggcgaggagaacggcggctgcaagtgcggcaccagctgctcctgcaccgactgcaagtgcggcaagtgaagtcacgaagcaaccgaacactcgccgccggcgagtcacctaccttaattagtccacaataaaaaccacccatatgagtgtggtttgtgtgtgtgctgattattgctgaattaaacccgtgtgttatcgattaaataagcagctggtcgcttcggcgactatgcgtgtatcaacgtatgaatttggggatgtgatgtacccgtgctattctcagtgaaattaatcaatc

SEQ ID NO: 402223 - DNA, 490 bp, Oryza sativa nipponbare
ccacgcgtccggctcgctcatcgccatctctctcagctctcacagctcactgcatcaatggccgcggccaccatggcgctctcctccccggtgatggcccgcgcggcgccgtcgacctcctccgcgctcttcggcgaggcgcggatcaccatgcgcaagaccgccgcgaagcccaagccggcggcgtcgtcggggagcccgtggtacggcgccgaccgcgtcctctacctcggcccgctctccggcgagccgccgagctacctcaccggcgagttcccgggcgactacgggtgggacaccgcggtgctctccgccgacccggagacgttcgccaagaaccgggagctggaggtgatccactcccggtgggcgatgctgggcgcgctcggctgcgtcttcccggagctcctcgcccggaacggcgtcaagttcggcgaggccgtgtggtcaaggcgggcctgcagatcttcagcgggggcgggctcgacta

SEQ ID NO: 402224 - DNA, 320 bp, Oryza sativa nipponbare
ccacgcgtccgcccacgcgtccggacgccggcaaggccacctacttcgcgtcgtcgtcgacgctgttcgtcatcgagttcatcctgttccactacgtggagatccggcggtggcaggacatcaagaaccctggctgcgtcaaccaggaccccatcttcaagagctacagcctcccgccgcacgagtgcggctaccccggcagcgtcttcaaccccctcaacttcgagcccaccctcgaggccaaggagaaggagctcgccaacgggaggctggcgatgctggcgttcttggggttcctggtgcagcacaacgtgacgcag

SEQ ID NO: 402225 - DNA, 369 bp, Oryza sativa nipponbare
  unsure (1)..(369): unsure at all n locations
tcaccacgctccgcacgcgtccgagggcgctcgcttcgcaagtggcgcactgttgtcagcatccccaacggcccatctgaactcgccgtgaaggaggctgcctggggccttgcccgctacgccgccatttctcaggacaacgggctggtgccgattgtcgagcctgagatcctnctcgacggtgagcatggcatcgacaggaccttcgaggtggcgcagaaggtgtgggcggagcccttcttctacatggccgagaacaatgtgatgttcgagggcatcctcctcaagccaagcatggtgacacccggggccgagtgcaaggacagggccacccctgagcaagtatttgactacaccctaaagctcctc

SEQ ID NO: 402226 - DNA, 302 bp, Oryza sativa nipponbare
  unsure (1)..(302): unsure at all n locations
tccgcgtcccctcttccgtatgcttactatatttttggaaatgaaactgaatcaaggacctttgctaaagttcgtgggtgggagactgagaatactgaggagattgctttgaagatctcgcaattgcctaaggcttcaggagcacacaagaggattactgccattactcaaggctgtgacccagtagttgtggctgatgatggaaaggtcataacnnnccctgttatcgttttgcccaaggaaaagcttgttgacaccataggtgcatgcgangccttatgtgggggttttctctctcaatt

SEQ ID NO: 402227 - DNA, 384 bp, Oryza sativa nipponbare
  unsure (1)..(384): unsure at all n locations
ccacgcgtccggngaagcagtacttcctcggcctcgagaagtacctcgccggctccggcgagccggcctaccccggcggcccgctcttcaacccgctcggcttcgggaccaagagcgaggcggagatgaaggagctcaagctcaaggagatcaagaatggcaggctcgccatgctcgccttcctcggcttctccgtccaggcgctcttcaccggggttggccccgtgcagaacctgcnnaatcacctcgctgatcccgttcacaacaacattctcaccagccttaagttccatttgagatgccatcaactacgtatttaattaattacgagtctttaattatggtatgtatgtacgtgtcgtatgcctaatatgtgtgtaccgt

SEQ ID NO: 402228 - DNA, 315 bp, Oryza sativa nipponbare
  unsure (1)..(315): unsure at all n locations
ccacgcgtccgcacgacacgacgcaccaatggcgctcgtctccgcctcctcctacaccaccgccgtcgcggcgctccccggcgccgccagggcctcctgcttgctcggcggcgccggcaggagcggcaggctgctgctgaggcaggccgagtcgtcgtccgcgcgggcgtcgttcgccgtgcgcgccgggttgcccgacaggccaatctggtacctcggcagcaccccnnccgcgaggctcgacagcagcctccccggggacttcggctactaccccctgggaatcggatcggacccggagagcttgcagaggaa

SEQ ID NO: 402229 - DNA, 312 bp, Oryza sativa nipponbare
  unsure (1)..(312): unsure at all n locations
ccacgcgtccgcggacgcgtgggcggacgcgtgggcggacgcgtgggcggacgcgtgggcaaaaaaccaacccaaccgccgccgcatcgccctcgttagaacgatggccgcgtcggcgctgcaccagaccaccagcttcctcggcaccgcccctcgccgggatgagctcgtccgccgcgtcggcgactccggtggccgcatcaccatgcgccgcaccgtcaagagcgcgccccanagcatctggnatggacctgaccgtcccaagtacctgggcccgttctcggagcagacgccatcgtacctgaccggaga

SEQ ID NO: 402230 - DNA, 494 bp, Oryza sativa nipponbare
  unsure (1)..(494): unsure at all n locations
gtccgaatntcccggtcgacccacgcgtccggtttcttgcacttgacaaagatacaaatggaacattgagcaaacaggagctcaaggaatatgcagatggcacattgactgatatcttcattgaaagagtttttgatgagcatgtacgccggagcaaagttggaggtggcaacagtcgtgaaatggactttgaaagctttcttgactttgttttggctctagaaaacaaagatactcctgaaggattgacatacctatttagatgccttgatcttaatggaaggggattcctgacaactgctgatatccatacattatttagggatgtacaccagaaatggattgaaggcggaaactatgaactttgcatcgaagacgtgagggatgaaatctgggacatggtaaagccggcagatcctctcaggatcgcactaacagatcttctatcttgcaagcaaggcgggactattgccagcatgcttatagatgtgcgc

SEQ ID NO: 402231 - DNA, 409 bp, Oryza sativa nipponbare
  unsure (1)..(409): unsure at all n locations
gtcgacccacgcgtccgccacgcgtcctaaaaaaccaacccaaccgccgccgcatcgccctcgttagaacgatggccgcgtcggcgctgcaccagaccaccagcttgctcggcaccgcccctcgccgggatgagctcgtccgccgcgtcggcgactccggtggccgcatcaccatgcgccgcaccgtcaagagcgcgccccatagcatatggtatggacctgaccgtcccaagtacctgggcccnttctcnnnccatacgccatcgtacctgaccggagagttcccgggagactacgggtggtacacggctgggctatcggccgacccggagacgttcgcgaggaacatggagctggaggtgatccactcgcggggggcgatgctggggggcgctggctgtgtctttcc

SEQ ID NO: 402232 - DNA, 401 bp, Oryza sativa nipponbare
  unsure (1)..(401): unsure at all n locations
ccacgcgtccgctcgagcaaagaaggagagagcttggtgagctgcagagatggccccctccgtgatggcgtcgtcggccaccaccgtcgctcccttccaggggctcaagtccaccgccggcatgcccgtcgcccgccgctccggcaactccagcttcggcaacgtcagcaatggcggcaggatcaggtgcatgcaggtgtggccgattgagggcattaagaagttcgagaccctttcctacctgccnccnctcacccgggaggaccttctgagcagatcgagtacctgctccgttcaagtgggtgccctgcctcgagttcagcaaggtcggattcgtctaccgtgagaaccacagatcccccggttactacgatggcaggttctggaccatgtggaagctg

SEQ ID NO: 402233 - DNA, 358 bp, Oryza sativa nipponbare
ccacgcgtccggctaaacttcttgttgttgtgctgctactatctcttctcatctatgcggccacagcatgggatgccgagagcttcttcaacttcaagagttgtccaccaaatcagtgcagcaaacatggaccaaaagtccggttcccactccgccttgcatcacaatctccgtcgtgcggcacacctctcatggagttatcatgttctggacaggacaccatcctgtatcacccagttctaggctcctgcaaggtgactgcaatatcttacaagcatgctgccatgtccatcatcctgctggtagattccacacctcactgcccacttcagaagctcatctcgacaaattatcaact

SEQ ID NO: 402234 - DNA, 447 bp, Oryza sativa nipponbare
  unsure (1)..(447): unsure at all n locations
ccacgcgtccgcccacgcgtccggggcacgctgccgacgatcctggtcatcgagttcgtcgccatcgccttcgccgagcaccagcgcaccatggagaaggaccccgagaagaagaagtaccccggcggcgccttcnaccccctcggcttctccaaggaccccgtcaagttcgaggagtacaagctcaaggagatcaagaacgggcgattggccatgctggcttttgtgggtttctgcgtccaacanncnncnnacccgggcaccggcccactggagaacctggccagccacctntcggacccgggggacaacaacatcggcgacattatcatcccgagaaccatctacccttgagcttggcacgaaccggtgcgtgcgttcgggcgtacgagaaagctatgggtggtttttatgtgcgtgcgtactgtgggtgaatggttgattatt

SEQ ID NO: 402235 - DNA, 307 bp, Oryza sativa nipponbare
cgattccgtcacccaccgtcgccaccgtcgaccactgtgcttggaagagaggagggcttggcttgagagagacaacaatggcggctcaggctcttctctctgggaggcagctgctggggaggccattgcaatcttcagtctccaggtcttcttcctccaggaaggcacccttcatggtcagggcagaggccactccccctgccaagcaaggtgctgacaggcagctgtggttcgcatccaagcagtccctgagctacctggatggcacgcttccgggagacttcgggttcgacccgctggggctatc

SEQ ID NO: 402236 - DNA, 270 bp, Oryza sativa nipponbare
  unsure (1)..(270): unsure at all n locations
ccacgcgtccgcggacgcgtgggcggacgcgtgggccgcatcaacagccagccatggcgtccacgctgaccaacgtcggcctgtctaccccggcggcggcggcgtcgtccctcgttaggccggtcgccggagctggacgcgtggtgtttccccgtgttggccgcggcgggttcgcggcggtgagggcgagcgggccggcgacgccgccggacatctcggacaagatgtcnnanagcatctacatggcgaaggaagcgtgcgcggaggaca

SEQ ID NO: 402237 - DNA, 434 bp, Oryza sativa nipponbare
cgcgtctcgccacgcgtccgcccacgcgtccgcggaattgtatcaagaactatatacaaaagaataggaaaaagggctcgaatagaaaaatagaagcagactcaagtttcgaagtaattacacataataaaaaaatggactcaggctcaagttccgaagtaattacacatatagaaattcaaaaagaaatcgatacaatccacgtcataatccatattggattccccaatttattaaagaaaaaaggagcaatcgaagaattagagaaagatctacaaaaagaagttaattctgtaaaccagagacttaatattgggatcgaaaaagtgaaagaaccttatagacaacctaacattcttgcagaatatatagctttccaattaaaaaatagagtttcattccgaaaggcaatgaaaaaagccattgaattaact

SEQ ID NO: 402238 - DNA, 285 bp, Oryza sativa nipponbare
ccacgcgttcgcggacgcgtggggctcatcgccatctctctcagctctcacagctcactgcatcaatggccgcggccaccatggcgctctcctccccggtgatggcccgcgcggcgccgtcgacctcctccgcgctcttcggcgaggcgcggatcaccatgcgcaagaccgccgcgaagcccaagccggcggcgtcgtcggggagcccgtggtacggcgccgaccgcgtactctacctcggcccgctctccggcgagccgccgagctacctgaccggcgagttcc

SEQ ID NO: 402239 - DNA, 323 bp, Oryza sativa nipponbare
ccacgcgtccgcccacgcgtccgcatggccaagctggccgagcaggctgaaaggtatgaggagatggttgagtacatggagaaggttgcaaagactgtagatgtggaagagctcactgttgaggagcgcaacctcttgtctgttgcttacaagaatgtgattggtgcccgccgtgcctcctggcgtattgtctcatccattgaacagaaggaggagggtcgtggcaatgaggaacatgttactctgatcaaggagtaccgtggcaagattgaagctgagctgagcaagatttgcgatggtatcctgaagttgcttgactcaca

SEQ ID NO: 402240 - DNA, 347 bp, Oryza sativa nipponbare
ccacgcgtccggaagaaagaagaagaagaagatgcagaccgctgctagcagtgtcgttggattgtcggccgtgtcgcccgctgctgtgaaggggcgcagcctgcagattcaggctcctcgccgtgttgcgttgcgcgttcgtgcggcggcggcggcggtggcagtggaggctgcggaggtggactacagctctaacatctcggtgtttccgatggaggcgtgcgacctcatcggcggcgaggcgtgcaacgtgcagatgtacccagaggccaagctctcatcatcggctgctgttgctgtttctcgagcggcggcggatgaagtcgacagggactacctatcctacg

SEQ ID NO: 402241 - DNA, 317 bp, Oryza sativa nipponbare
ttccggtcgaccacgcgtccgcccacgcgtccggtgagccctaaatccgaccgtccgtccgttcagttcgtcagtttacgccaacgcttttgcataagtactacctgaggatatcgtccccgatcatcgatgtgaacgcgtggagtactactacgtacgtaccggatggttcgatatatgtgaatgctgtattaagtaataacaagaaatatatctcctctactttttcctgacgcggagttgtactgcctattgatgcataattgatcgcagtgtgatcaaaagacatcagctataatgtcttaatatattattat

SEQ ID NO: 402242 - DNA, 434 bp, Oryza sativa nipponbare
ccacgcgtccgcccacgcgtccggtcgtgccgaaattagggattttgatgcttttgatttgcgattgaggcttcctgctgtgattagcaaactgcacaagcttgtcaaccataatggtggggtaacatatatacactgtaccgctggacttgggagagctcctgctgtgacattggcgtatatgttctggattcttggctacagtcttaatgaagggcatcagctactacagagtaaacgagcttgctttccaaagttggaagccattaaattggctactgctgacattctgacaggcttatcaaagaattccatcactttgaagtgggaaagtgaatagtgttcttctggtgaaatttctgggcttgatgtccggtggggacagataattcctttgacatacaacaaggagaaaagagcttggtatcttgaga

SEQ ID NO: 402243 - DNA, 436 bp, Oryza sativa nipponbare
tacaatcaaatgaagtcaaccctttcattagggttgtatatcaaatacattcctaaccatttcttcggtagaggtgtttacaggacagcagctatgcatgtacatcaaaggtatgatagaaagatttctaacattcatcctgtcgatgctttgtcacttccatttgtctacaacaataatgggattcttcaaaccaaaattcccatacttccaatttccaactacatggaaaagtataaaataagtgaatctgagcacgttcaatcggcacagatcttttgctcatgcgctagccaccatttctgttttcttatcaaggctagaagtcagctgcttgtcgatctcagcaaacacatcatccaccaaagcatccccttttacctcaactatcacatcttcgtaaatggatagcaaggattctacattttgataatga

SEQ ID NO: 402244 - DNA, 316 bp, Oryza sativa nipponbare
ggcgaggcaaaccacacgaatacacccctgattaattttactgagaattgcacgggtacatcacatcacacaaattcatacgttgatacacgcatagcccccaaagctaccaggtgcttaattaatcaataacacacgggtttaattcagcaataatcaggacacacacaaaccacactcatatgggtggtttttattgacgactaattaaggccggtgactcacctgccgccaaggttaggttggttcgtcacttaacttgccacactttcagtccgggcaggaacagcttgtgccccacttgcagccacctttt

SEQ ID NO: 402245 - DNA, 347 bp, Oryza sativa nipponbare
tctagcaaaaggatggttggtgtgatacttatcacgagaaggtcactgaaattacattcttaggagaagcagcttatacacacggataaaacacggacaaaatctttacgagagatggttggtgtttgggaggcaagaactgccggcggcggggcggccattacgcggatgggagcaccttcttgacgatctcctccctgagggaggcgatctgggcgtatagcgccttgacggcctcctccttctgcgcctcgaggttggcgagcgcctccactagctcagactctacgcggcggcacccctcgtacagcttcaccttcagctcctgggggggctcctttttcatc

SEQ ID NO: 402246 - DNA, 403 bp, Oryza sativa nipponbare
gggaaacgaataaaatcattattgcaaagacatcatcttcttcttcatcttcttagtgtacacaacaccaactcgatcatcatctcgtcgcactaaacccatcttccccaacccaaagacaacgaactcgctggccacaaatccatccaaccacaattaaccactgctaagctacggtcccccacttcacttgccggggacgaagttggtggcgtacgcccaggcgttgttgttgacggggtcggcgaggtggtcggcgaggttctcgagggggcccttgccggtgacgatggcctggacgaagaagccgaacatggagaacatggcgaggcggccgttcttgatctccttcaccttgagctccgcgaacgcctcggggtcatcggcgaggccgagcgggtcg

SEQ ID NO: 402247 - DNA, 381 bp, Oryza sativa nipponbare
  unsure (1)..(381): unsure at all n locations
gtcttatgtgactatatnaggatgtaagggtgancagctgttctcatcagatatcaggaatgatttcaagataattgccttttgtgacctcaataaaattgcttacagagaacgaagattacaagtctgtggtgaggagcacataatttgcacagaaaataacagagaagggccaatacaaactgtggaatgtaaaacttttaaatgagtctaacaacaaggttgtgcatactctaacgctttgagaactgcgggcgcttgcgtgccttcttaagaccagccttcttcctttcaactatacgggtgtctcttgtcagcaaaccttctcccctcagagtaactttgtttgcggtgctgatcttcaccagtgcacgggcgacg

SEQ ID NO: 402248 - DNA, 402 bp, Oryza sativa nipponbare
tgttcatcaccgaccggtccgatccaaacaagctcgtgttcggctaccacgggtctgggatgcagctcgacgcctagggttttgcggttgggttcttgtacactctcgtggggctcatgatcgccatggtgacacacttgctggtgagggtggagagcctgcagatccagcgttttacgatgctggcggtcatgataattgggtggtgggcagtgaagaaggtgattctttcggataactggaagactggatatagcattcataccttctggcccagcagctggaggtaaatgcttgtacaatggcagacgatatggatggtttcttccttcggcttctgaggttatggaattatccaactttgaccgtgctgagatagagcatattttggagtgttgggac

SEQ ID NO: 402249 - DNA, 266 bp, Oryza sativa nipponbare
tcttttaatcattggggtttggtgtttttcccaaacaaaacttcaaccagatctatccttggcatgacttcataacacatgagcatcatcatgtcttaattttaaactcaatactaacaaccaatttttcatggccacagatcccaaaaaaagcacttttagattaacggttgatcccaaaaacaagaaggcccccctaaaacccgagcttggtgaaaaaccacctgttcttgccggtcttaaacctctcctcgaggcaagccttg

SEQ ID NO: 402250 - DNA, 418 bp, Oryza sativa nipponbare
gtaaaataaaaatatatagcagattatgtgattgatatatcatcaacatagcccaaaacaaagctgcatactattattataggcagcaatccaccagcgcgatgcttgatcttagcttagttgccaccagactcctcgcaacctgggggcttgtaggcgatgaagctaatcaactgcacctgcctgacgttgtcgaagccgatgatacggacaaaggcatcggggtaggccttcttggcctcctcgagctccttgagcacctgggtggcatcggtgcagccgaacatgggcagcttccacatggtccaatacctgccatcgtagtacccgggggacctgtggttctcacgggagacgaatccaaccttgctgaactcgaggcaaggcacccacttggatcgaagcaggtactcgatct

SEQ ID NO: 402251 - DNA, 368 bp, Oryza sativa nipponbare
attgcaaaaacatcagcttctgcttcatcttcttagtggacacaacaccaactcgatcatcatctcgtcgcactaaacccatcttccccaacccaaagacaacgaactcgctggccacaaatccatccaaccacaattaaccactgctaagctacggtcccccacttcacttgccggggacgaagttggtggcgtacgcccaggcgttgttgttgacggggtcggcgaggtggtcagcgaggttctcgagggggcccttgccggtgacgatggcctggacgaagaagcctaacatggagaacatggcgaggcggccgttcttgatctccttcaccttgagctccgcgaacgcctcggggtcatcggcg

SEQ ID NO: 402252 - DNA, 334 bp, Oryza sativa nipponbare
ttaagatcaaaatgagcgggtgtgtaaattcatgtgcgaactcaacaataatttacacatacatttaacacattcttccacccttctcaaactcctacattattatttcgggggaagattaaaattaacttgaggccaaacaacttctacggtggcgagatgtatacaagctgggcgtgctatctgcgggcctgagatcacggttagcatgttactgcctaaggggtctcttaggtgcttggatagggtctccacctggccctcaccagtgacttaagcctggatcaagaaccccagcatcgagaacatggccacgcccccgatcttgatctcc

SEQ ID NO: 402253 - DNA, 387 bp, Oryza sativa nipponbare
  unsure (1)..(387): unsure at all n locations
tgaagatcanaatgagcgggtgtgcaaattcatgtcccaactcnacnataatttacacgtacatttaacacattcttccacccttctcaaactcctcccttcttcttgcggggtaagattaaaattaacttgaggccagccagcgtcgccggcggcgagatgtttacaggctgggcgtcctctctgcggcgccggagatgacggtgagcaggttgttgcccaaggggtcgctgaggtgcttggagaggttctcgacggggccctcgccggtgacttaggcctggatgaagaaccccagcatggagaacatggccagccgcccgttcttgatctccttcaccttcagcagcgccgcctggtccgggtcgctcgccagccccagcgggt

SEQ ID NO: 402254 - DNA, 399 bp, Oryza sativa nipponbare
ttataattatgaaaacttcttggtttggtgtacaaagcaaaccacaccaatacactattgattaatttcactaaaaataacccggtttcattacatcacacaaattcatacgttgatacacacatattttcctaatcacccacctgtttaattaatccataacacacgggtttaattaatcaataattatcacacacacaaaccacactcatatgggtggtttttattgtggactaattaaggaaggtaactccccggcggctagtgttcggttacttagtaacatttacttgccatacttgcagtcggtgcaagatcaccttgtaccacactttcaacctccgttatcctctccggcggggaccttatcgaaatggttctttttggctttaactatta

SEQ ID NO: 402255 - DNA, 393 bp, Oryza sativa nipponbare
tttaaaaaggtaaactcttcatggtaagattattaagacattatagctgatgtcttttgatcacactgcgatcaaattatgcatcataggcagtacaactccgcgtcaggaaaaagtagaggagatatatttcttgttattacttaatacagcattcacatatatcgaaccatccggtacgtacgtagtagtactccacgcgttcacatcgatgatcggggacgatatcctcaggtagtacttatgcaaaagcgttggcgtaaactgacgaactgaacggacggacggtcggatttagggctcccataagtccaagttgccggagacgaagtcgtaatggccgccgacgagcttgagggtgcccgtggcgatcccctccttgacgaacgggta

SEQ ID NO: 402256 - DNA, 377 bp, Oryza sativa nipponbare
gctcaatgcagatcaaatatggagtaagaggacttgctgacacactctagtaattaccctttacacattgcaataaatatgaatacatgcatgtgttctcacttctcactcacaaaaaagcaccattcgcatcctaggccttcacgccaagcatataaagtgcaatatgaacatttaatcttcacctagaatttcaacaaccactgatactaaacggtacaaacgtaaacaataataaggcttcacataagccacatcaggtcctaagctcattatttaagcaagtcagtgcccactttagtactgccttacatagcctcggttgacatcaccatagcctgcttggttaccataaccaccgtcaccaccaccatacc

SEQ ID NO: 402257 - DNA, 401 bp, Oryza sativa nipponbare
taacaaatcatcatcgataaaggcgcgtaccgtgccgtgcatgcatacagatacatacaggcactccacttattttacaaccattcacactctcacactgaaagtcccaaataaaactgacaacagacgcatgcatcgatcatatcatatgcatgatcgtccatagtcgtagattgtaaattgaacaacgaaatcaagaacaattaatcaagcagctgatcgatctctcgtatcaaatgaacatcgtcgtcttcctcacgccgtcacgctggtgctcctgaacgagctgagcgccttggcggcctcgccgcgcagcaccagcttgtggtacgccgccgccaagaacgccccgatcaccggccccacccagaagatccagtggtctttccaagctgcgtgct

SEQ ID NO: 402258 - DNA, 279 bp, Oryza sativa nipponbare
cttttaatttatcgtattacagaatcggtgtagccttgctgatgatcacttgcatatcatgtactattaatcaacaatacgatgcatacaaaagatggcccaacgacaacagaagatgcgtgcatctgacattgtctggccttattaggtcggtagtactccaattaattaacatgagatgatgcattcttgtgccttagtttctacacatgcttggcttcacgttgagcctatatccaatcttgacccccaacgacttatcacactgggagaggtagt

SEQ ID NO: 402259 - DNA, 416 bp, Oryza sativa nipponbare
tagttagcggtgctagagtggggggcaccaactggttacttgatcaatgtcagtatttgccattctttacaatgaactatacaagtatatgcaaaaacatctcgcctaaattgatgtgcttcctacaaattcgccttctccatttcacccaaggggatgaacatacaacgcaattaagcgacaaacaactctgcctgaccgtcgatgaacaggctcatgaactcttccccgtccaccgtctccttctccatcagaagctgagcaagcttgtggaggatgtcgatgtgtgtcgtgatgatctgcgttgctcttgagtaggccttctccacgagctccctcacctcagcatccacaacatccgcggtggccatcgagtagtccttttggctcgacatctgctggcccaagaaaggatt

SEQ ID NO: 402260 - DNA, 159 bp, Oryza sativa nipponbare
attgcaacaacaccaggttcggcttcaccttctgagtactcacaccaccaactcaattatcatcttttacaactaaacctacctttctcaacccaaacacatcgaactcgtgtgccacaaatccatccaaccacaattaaccactcctaacctacggtc

SEQ ID NO: 402261 - DNA, 369 bp, Oryza sativa nipponbare
attgcaaaaacatcgggttgtgtgtcatcttcttagtggacacaacaccaactcgatcatcatctcgtcgcactaaacccatcttccccaacccaaagacaacgaactcggtggccacaaatccatccaaccacaattaaccactgctaagctacggtcccccacttcacttgccggggacgaagttggtggcgtacgcccaggcgttgttgttgacggggtctgcgaggtggtcggcgaggttctcgagggggcccttgccggtgacgatggcctggactaagaagccgaacatggagaacatggcgaggcggccgttcttgatctccttcaccttgagctccgcgaacgcctcggggtcatcggcga

SEQ ID NO: 402262 - DNA, 182 bp, Oryza sativa nipponbare
  unsure (1)..(182): unsure at all n locations
acccaaatgaaatatactcatggatagggtancccatatctttatattatattattattaacaaaaacttgtcatgcccacctatggcttgggcgcgatctgatacacagaccatagagaaaacataaaacggagaaataattaatatcacgcgtcaagcctgcctgcttaaaaggtgtaaa

SEQ ID NO: 402263 - DNA, 283 bp, Oryza sativa nipponbare
ttttaccaaaatcgggcgatgggtgtacaagtggatgcattaattcatcatcttgagtgttcttatattacaaatcaccaccatgcaagtcgccattaaccaccaacccagctttcctaatttaagtagtcatcaacaaaaggatgacctctcctctctccataccctcccagctcgctcgtcatcacaaaactaaacagcgcgcgcgaacgcacaccaacgcatcgatcccgtttgaattgcccgcgaaagagcttaaattaagaggatgaggacaaggtgt

SEQ ID NO: 402264 - DNA, 503 bp, Oryza sativa nipponbare
accgcaccagaattcccggatccgcgccacgcgtacgcttagatcctctacagccaccgcccttttttttttttttttttgcaaatcacttaaaccacagatttggatgttacacccacaccctacacccattcataataatacatcatatatacttacgtacaatacatacccctctcgatcacacgcaccatcgatcgtacaaagttgcgtacatacatacgtacacacatatactcatacgcacgtacatacatacataattaaaaactcctaattaattaaatacgtaatttatggcatctctaatggaacttgaagctgcttatgatgtttttttagactggatcagccaggtgatcaaacaagttcttcacggagccaacccccgttaaaaaccccttgactgaaaaacccatgaaagcgagcattgcaaaccttccattctttatctcctttaacttgagctccttcatctccgctcgcttctagccccaaaccca

SEQ ID NO: 402265 - DNA, 406 bp, Oryza sativa nipponbare
  unsure (1)..(406): unsure at all n locations
tcctatcaaaanatcggaatgggganattttcaaattcatctcccaactctacnataatttacacntacatttaacacattcttccacccttctcaaactcctcccttcttcttcccnggtaagattaaaattaacttgaggccagccagcgtcgccggcggcgagatgtttacaggctgggcgtcctctcggcggcgccggagatgacggtgagcaggttgttgccgaaggggtcgctgaggtgcttggagaggttctcgacggggccctcgccggtgacgtaggcctggatgaagaaccccagcatggagaacatggccagccgcccgttcttgatctccttcaccttcagcaacgccgcctggtccggggcgctcgccagccccagcgggtccaatgggccac

SEQ ID NO: 402266 - DNA, 416 bp, Oryza sativa nipponbare
  unsure (1)..(416): unsure at all n locations
cggatgatgatttggagtaagggcanactattttcagcaccgtaaacataaattcagaggttcaaattttgctcatatctccctggctcgcacttgaaaagaattcttatgtcctaccaagccctataaccaagcataaattaaaacaaaaggtacagaatgtcgagcacacgttctggatataagaatgctatatctagtgcgatttgacatagtcctgcactatgttaaggccctcagactcttcaccatagtccttgacaacgacgcatgagcagcccacaaccttccttgccttgccctcagagtcaatcttgcaaagccctgcccactctccaagagtcttagcactaggcacggtaacaaggtgaacgttgtgctcagcacacagagccttaaccaacttgacataatca

SEQ ID NO: 402267 - DNA, 358 bp, Oryza sativa nipponbare
  unsure (1)..(358): unsure at all n locations
cggatgatgatttgtgttaagggganactattgtcagcacggtaaacataaattcagaggttcaaattttgctcatatctccctggctcgcacttgaaaagaattcttatgggctagcaagccctagaaccaagcataaattaaaacaaaaggtacagaatgtcgagcacacgttctggatataagaatgctatatctagtgcgatttgacatagtcctgcactatgttaaggccctcagactcttcaccatagtccttgacaacgacgcaggagcagcccacaaccttccttgccttgccctcagagtcaatcttgcaaagccctgcccactcgccaaaagtcttagcactaggcac

SEQ ID NO: 402268 - DNA, 317 bp, Oryza sativa nipponbare
agcccatatctttatattataggattggtaacaaaaacttgtcatgcccagctatggcttgggcgcgatctgatacacagaacaaagagaaaacataaaaaggagaaataattaatagcaagcgtcaagccggcctgcttaaaaggtgtaaaggcagctgccgtcgtcgctcctcgccgttgggtcgaagttcttggcaacagggtcggtgcaaccttccggcacaggcaggttacctgcttgctgtgctccttgccctcctcctcctatgcaggccgcctacgatgcatcgatgcggacgcgtggcggacgcgtgg

SEQ ID NO: 402269 - DNA, 321 bp, Oryza sativa nipponbare
  unsure (1)..(321): unsure at all n locations
agcccatatctttatattatgggattnagtgacaaaaacgtggcatgcccatctatngcttgagcgcgatctgatacacagaacaaagagaaaacataaaaaggagaaataattaatagcaagcgttaagccggcctgcttaaaaggtgtaaaggcagctgccgtcttcgctcctaaccgttgggtcgaagttcttggcaacaaggtcggtgcaaccttccggcacaggcaggttacctgcttgctgtgctccttgccctcctcctcctatgcaggccgcctacgatgcatcgatacggacgcgtggcggacgcgtgggtg

SEQ ID NO: 402270 - DNA, 376 bp, Oryza sativa nipponbare
  unsure (1)..(376): unsure at all n locations
aatacccaaatgaaatatacggagggggggtatagcccatatctatataatatattactattaacaaaaacttaggatgcccacatatgtgataagctcatatctgatacacagaacatacataaaacatcaaacggagaaataatgaataacaagcgtcaagcctgcctgcttaaaatgtgtaaaggcagatggcgtacgcgatactaggcattgaatcgaaattcttggcaacagggtcgggccaaccttccagcacaggcaggttacctacttgaatgactccttgccctncttatactatgcaggacgcctacaatgcatcgatgggatgcaaatagatagagatcttgtattcagcttgatggaacagaac

SEQ ID NO: 402271 - DNA, 272 bp, Oryza sativa nipponbare
tacaatgtcctctcgggttggggagatgcaaataacatgatcggtggatatgatcatcagttcacgagaacagaggaagaaacaaaagctaaaaattaaaaccatcaacagcccgatcgagtttgcattactagatacacacattgcagccttccttccctctctccatgtatcgatatatcaacccggccacgcacaaaacatttgttcattccctactcgagctgcgcgtaccacaccccttggatcttgacatccttgggcaccttggc

SEQ ID NO: 402272 - DNA, 310 bp, Oryza sativa nipponbare
  unsure (1)..(310): unsure at all n locations
tcctatcacaanatgggaatggggcaattttcaaattcatctcccaactctactataatttacacgtacatttaacacattcttccacccttctcaaactcctcccttcttcttccccggtaagattaaaattaacttgaggccagccagcttccccggctgctagatgtttacaggctgggcgtcctctccgcggcacccaatatgacagtgagcactttgtctccgaaggccacactcaggtgctcggagaggttctggacagggccctccccagggacgtaggcctcgattaaaaaccccagcatgg

SEQ ID NO: 402273 - DNA, 370 bp, Oryza sativa nipponbare
ttaaacaaggagttaaaaatgggcctggtgttaatctaatagtggatgattaacattccaaacattgttatcaaacatggattgcaaaaatggaaaaaaacggggcaaagaactaatcaccagtctgcattgacctaaggactttaatctgcagctgccaacaccaattgcacctaaacaattccctttgttcttgcctttttgcgttcaccctgcatgcggaagtactctctctttcttgctctgaaactgtttgggttctaaggttgtttctcgtatgggtaaacacttaccttttttttgtctggtccatatttctcgaactttacaaggccatcgatcaaagaaaagagggtgtgatccttggcca

SEQ ID NO: 402274 - DNA, 376 bp, Oryza sativa nipponbare
  unsure (1)..(376): unsure at all n locations
tataattaattcacagggccgtgtttcattgagcaggtgcataacctncacagaaatacacactaccggtacagatctcaccctctctccaatactcgtacatccatgcacgcgggccacacgaatacttacatctatacagtacacgtacgtacatctactgcaccgagtacacacacccacactctcctgcaaagactcgcatcgtcgtcaacctagctagcttaactgaaggcgatgcgtcnccatggcaacactgcggctgccgctctcactttccgggaactaaattggtggcatatgcccaagcgttgttgttgacggcgtcttctaggtggtcggccatgttctctagggggcccttgccggtgactat

SEQ ID NO: 402275 - DNA, 380 bp, Oryza sativa nipponbare
  unsure (1)..(380): unsure at all n locations
tgacaccaaaatgtgatatggatatgggtaancaggtgcagcaaaacgtacattaattaaacaacaacaattaaccctcgggcacgcctgtgttttgttatctcgctcaacatatacgtacgtaatactttgcttgcatagcatagggacgacgacattatattcttaattgataaactcaagaacgcatggagatggatcgagagatttataaatatggagcttgcttgattgattagatgagggcgtcctccttgtgggtctcgatgacgacgtcagacttggggtaggcgtggcaggtgaggacccagccggcggcaacctggtcgtcgtcgaagaagctctggtcggactggtcgatctcgccggagaccaccttg

SEQ ID NO: 402276 - DNA, 361 bp, Oryza sativa nipponbare
tagtttctaaactgagcaaatggttattgcaaaaacatcatcttcttcttcatcttcttagtttacacaacaccaactctatcatcatctcttcgcactaaacccatcttccccaacccaaatacaactaactcgctagccacaaatccatccaaccacaattaaccactgctaaactacggtcccccacttcacttgcctgggaccaagttggtagcgtacgcccatgccttgttgttgacagtctcagcgacgttgtctcccaggttctccaaggagccctttccggtgactatggcctccactaagaatcctaacatggacaacattgccaggccgcccttcttgatctccttcacct

SEQ ID NO: 402277 - DNA, 230 bp, Oryza sativa nipponbare
tttcaggaaaaagtgggggagggatatttcttggtattacttaatacagcattcacatatatcgaaccatccggtacgtacatagtaatactccacacattcacatcgatgatcggggacaatatcctcaggtagtacttatacaaaagcgttgccgtaaactgaccaactgaactgacggactgtcgaatttagggctcccaaaaaaacaagttgccggagactaagtc

SEQ ID NO: 402278 - DNA, 354 bp, Oryza sativa nipponbare
gggaaactaataaaagcattggtgcaaaaacatcatcttcttcttcatcttcttagtgtacacaacaccaactcgatcatcatctcgtcgcactaaacccatcttccccaacccaaagacaactaactcgctggccacaaatccatccaaccacaattaaccactgctaagctactgtcccccacttcacttgccggggacgaagttggtggcgtacgcccaggcgttgttgttgaccgggtcggcgaggtggtcggcgaggttctcgagggggcccttgccggtgacaatggcctggaccaagaagcctaacatggagaacatggcgaggcgggcgttcttgatctccttcac

SEQ ID NO: 402279 - DNA, 370 bp, Oryza sativa nipponbare
ttagctacaacactgctcctgggatgagggactttatccccctgtagtactttacatcataaattcaccactcaactcaccccctcacccatgcatccagatccatgcatgcaggaaacaattaccacaacacacacagtaagtctgaatctcatcacatccatctctctctctctcctccccccaattcattaacatcttatacatgcatactccacaaaaaaaaaaaagaagaaacaagaagagaacatcttccatcgcccaatcatcggtttcaccagcctgaactcatcaagctccttgagatgccctggccctgatgaaatcgatcacacgctcagcctgacaacgtctggatgatggtgttgtg

SEQ ID NO: 402280 - DNA, 373 bp, Oryza sativa nipponbare
tttagagtatcaactgggtttgtacatatgttacatcatagtacaagtacacaatcaacaaggcatgcagtgctccatccacaattacattctaatacaccaccaccattcacagcctactccgatcccaaaaaagagaggtaagtcgcgtcgactaacaatcttttcatcttcctccattggcagccattgctaacactccaacacctgaagaactcctcattttggggtgaaggcctggaatatcgtggcattgccggggtcggcgagatgggctaagaggttgtcgatggggccggtgccggtgtactctgcctggaaccaaactcccatgacggcgagcatggcgagccgcccgttcttgatctccttg

SEQ ID NO: 402281 - DNA, 274 bp, Oryza sativa nipponbare
tttagagtatcaactgggtgtggagatcggttacaggataggacaggtacacaatcaacaaggcatgcagtggtccatccacaattacattccaatacaccaccaccatgtgagagcctactccgatcccaaaaaagagaggtaagtcgcgtcgaccaacagtcttttcatcttcctacattggcagccattgctaacactccaacacctgaagaactcctcatttgggggtgaaggcctggaatatggtggcatggccagggtcggcgagatg

SEQ ID NO: 402282 - DNA, 431 bp, Oryza sativa nipponbare
tgtagatcctataatggcggtgcatcattaattcgatcatcccttggatgcggcctgcggcttacattaaatctcgatccaaagaagcaaagatgatgacagacagaaaggaattaagctagaaatctcctcgatcgatcacacacacacacacaattaaggtacatacatacatgcactgctgcaactgcaactgcagggtcggtgcgtggctactacaagtgtacacatggtacgttggttggcaccatctcgatcgtgtcgttgtgctcacttgccggggacgaagttggtggcgtatgcccaggcgttgttggcgacggggtctgcgacgtggtcgaagaggttctcgatggggcccttgccggtgacgatggcctggacgaagaagccgaacatggagaacatggcgaggccgccgttcttgagct

SEQ ID NO: 402283 - DNA, 377 bp, Oryza sativa nipponbare
ggggggggagtatatatagccggggcttccatatatttcattcacatatgcctcacccaacaacatatagtcgtagcaaataccactcttacatgaagtcaaagagagatcaggtgaaacaaaaacaaaagcagagcacggccggtaaaatcaaaagactatgaacaaactgggaacacaccaaacaaggtgggagacatcatccaatcagagatgaacaattaaacaaggctatatatgacgatgaccgcttagttgccaccaaactcctctcaacccgggggcttgtaggcgataaaacttatgagcttcacctgcctgacgttttccaagcctatgataccgaccaatgcatcagggtacgccttcttggcctc

SEQ ID NO: 402284 - DNA, 355 bp, Oryza sativa nipponbare
gggtgggggaaaatatataggcggagcttccatatatttaattaacatatgcctcacccaacaacatatagttgtagcaaataccactcttacatgaagtcaaagagagatcatgtgaaacaaaaacaaaagcaaagcacgggcggtaaaatcaaaagacgatgaacaaactgggaacacacgaaacaaggggggagacatcatcgaatcagagatgaacaattaaacaagggtatatatgacgatgacgggttagttgccaccaaactcctcacaacccgggggcttgtaagcgataaaacttatgagctgcacctgcctgacgttgtcgaagccgatgatacggacgaatgca

SEQ ID NO: 402285 - DNA, 411 bp, Oryza sativa nipponbare
accaactcatcaacgcggggggctccatttggtgttcccttaaaaattgagggtgcctggatcccattactaacaactttgcagtctggctgaagaacagacactatgcataaggatgtatcaaataccactggcttgcgttgttactgaggcaagttattgggccaactacaccgcgctgatctcttggtaaatctcttgaacaacttactaagcttgcagcttccaatttttgaggtttgtacacatcagttgataaatttgtccagatgagcttctgaagtgggcattgaggtgtggaatctacaagcaggatgatggacatggcaacatgcttgtaagatattgcagtcaccttgcaggagcctagaactgggtgatacacgatggtggtctgtccagaacatgata

SEQ ID NO: 402286 - DNA, 220 bp, Oryza sativa nipponbare
accaacataaactcggaccaggtgtatttcggttttgccacacaaattaatatgcactgtatcacaatacacccccctttacttaaactttacattacaaagccaaccggcaccttcctttcacacacccactgctttctcacacactctcatataatcaccaatcacacacagtacgcacacacataaaaaccacccataggctttacttaccccctca

SEQ ID NO: 402287 - DNA, 414 bp, Oryza sativa nipponbare
  unsure (1)..(414): unsure at all n locations
cctgctggaaaatttgatggtgggttggcgacttatatcatcatatacaaatactaacacatgcgaaaattatcaagcagaaaagttccatacaaattcatccagacaaacaagtgtaaaaaaccttttttttcccatttcccccttgaactatccgtaaataccaccattccaccaaactcccctctgtcttctacgacaaataatcttttcaacccagtaacttataattaattacagagagattagcaaacatataatggtaagaatcagttgtcgtaggtgcggcactcgtcggtctccgggttgtccttgcagtaggcctcgagcgggtcggaggtctccttgagcttgtcgcgcgcgtggctcgccgccgcgctcagctcctccacctngtcccacgccgccgggcac

SEQ ID NO: 402288 - DNA, 396 bp, Oryza sativa nipponbare
ggggaggggcgaatgtcaactgtcaaattatattctccaagtctccaatagtgacgttttcatcgcaactacaggtttagcccgggataaaaaacaaggaaacatttttatttcgagggaaggacccaggactgaagaaacttaaaagtgtccctgatgtgtttcatcatccgttctgtcactcacaaatggactcaaaatacagacccagatcaagtgtggtgttcaaccaaaatgttaactggcaaatggaaggtggcgtggttttctagaaactgcagatttgtacagaccaatccccagacagaagaaatacaagatcaagactggtgggcagcaaacaaattttgctgggatttatttgccccgattcatcggccaagttctttatacctt

SEQ ID NO: 402289 - DNA, 421 bp, Oryza sativa nipponbare
aggtggaccacaactttaaatggtgggggataaaacactatctggagacaacacacacgagagtcatatccagaggaaaacaatcagcccagacggaccactagcaccaaatgcaaagcaatgggaagaactaattcgaccgctaccaccctagtaaaaaccagagaagagagaggaaggggggacaggaagaaaaacattctagtagaacaggagaagaatccatccatcatggtgacagcagcatgaggcatctaaatcgatggtctccaataacatgcggagccatcgatcgatcgatcttcccattttactggccctcgcaggcgtcgcccttggaggcttctttcacctcatcaccaccgtcctccgtgaggtcagaggtccagagggtcaagttgtccctcaagagctgcatgat

SEQ ID NO: 402290 - DNA, 398 bp, Oryza sativa nipponbare
agttaattcaatgggtgtggggttgcctttgggaatgaaactctattttttaattggaaagctatatattctgcaagaatgttaggttgtctataagggtctttcactgtttcgatcccaatattaagtctctggtttacagaattaacttctttttgtagatctttctctaattcttcgattgctccttttttctttaataaattggggaatccaatatggattatgacgtggattgtatcgatttctttttgaatttctatatgtgtaattacttcggaacttgagcctgagtccatttttttattatgtgtaattacttcgaaacttgagtctgcttctatttttctattcgagccctttttcctattcttttgtatataggtcttgatacaatt

SEQ ID NO: 402291 - DNA, 282 bp, Oryza sativa nipponbare
tgttatctaaatggggttggggtgcgacctaataaagataacaattcctctaattagaataacaccatatattactacctagaccattagtctataaacgaataaaatcattattgcaaaaacatcatcttcttcttcatcatcttagaactcacaacaccaactctatcattatttcttcgcactaaacccatctttcccaacccaaagacaactaactctctggccacaaatccatccaaccacaattaaccactgctaagctactgtccaccactttac

SEQ ID NO: 402292 - DNA, 391 bp, Oryza sativa nipponbare
tgggatcgagggagggtgtgggtgcgatctaatagagatgagaaatcctctgatcagaataacaccacggataagtacctagaccattagttgggaaacgaataaaatcagtattgcaaaaacatcatcttcttcttcatcttcttagtgtacacaacaccaactcgatcatcatctggtcgcactaaacccatcttccccaacccaaagacaacgaactcgctggccacaaattcatccaaccacaattaaccactggtaagctacgggcccccacttcacttgccggggacgaagttggtggcgtacgcccaggcgttgtttgtgacggggtctgctaggtggtcggcgaggttctcgagggggccctttgcggtgactatggcctgga

SEQ ID NO: 402293 - DNA, 443 bp, Oryza sativa nipponbare
tttttataagagcaagttcaagagtatggccaactactagctccaattcatctatagtcaatctaatagcccattcatacaatagttacatactacactattaatatctagtcccacctgtcatagacacactgcgtcttggagtccgtgctacagctggctacaaatctgtagcccgttgctcttctctctcttgatttatcttcgtaaaatatgtttgtagctggcttatagcctgccattgtacctgctctaacgcagcaaagtgtgatgaatgttggtgttgatgatgggatcatgggaagtaaccatgagataacagaggtattgttcgatggagtaagtgtattatatgtatgtaaatattatattattgtaaatcattttgaggagctagactagcgtgccttattaacaaggagatatgtaccattacatgatga

SEQ ID NO: 402294 - DNA, 333 bp, Oryza sativa nipponbare
agttatattgaccaagtgcgccaataacatcattcagatacaaagacaaacaaacaaagatactcttgtagctaatatgaacttccaagcattattggtacttttttatccaaataacaaagctctaatcaattgctgctgttgtattgcaccctttcaaaactgctcatggaaaagctatcattttttagcccctctagagttttttcagacatcaaggtacttgctggctgtgtggacatccttgtctcctcttccactgcagttcaccaccaccctcacgccgtcgggcagcgttgggcagagcttttccaggtaggcgagcgcatggga

SEQ ID NO: 402295 - DNA, 348 bp, Oryza sativa nipponbare
  unsure (1)..(348): unsure at all n locations
ccacgcgtccgcccacgcgtccgcggatattttctctccccctgctcccgtcgccatcgcaaaggagaaaaaaaaaagaggaggaaggaaggaaggatgagcgccacggcggtgtcgtcgctgaacccggacgcgccgctcttcatcccggcggcgttccggcaggtggaggacttctcgccgcagtggtgggacctcgtcaagaccaccgnctggttccgcgaccactggttccacgagcaccagcagctcgacgagatgggcgacttccttgtccttcacgacgcccgcgtcgacgacgacgaccttgtcgggcttcttcccgacgacgccttttgacgacgacga

SEQ ID NO: 402296 - DNA, 201 bp, Oryza sativa nipponbare
  unsure (1)..(201): unsure at all n locations
tcgacccacgcgtccgcccacgcgtccgcccacgcgtccgcccacgcgtccgaatgtttgcaaccgcggagcctgtggtgcaccccgtccatcaccgagtctaagcccaagagtgccacctnctcctgctgctggatatgatcggccacatcttggattgatcggcacatctgttttatggagtgctggcacccacctcta

SEQ ID NO: 402297 - DNA, 272 bp, Oryza sativa nipponbare
  unsure (1)..(272): unsure at all n locations
cacgcgtccggngagagagagcatctagctagggagagaaaggaagagacgagaggagagagatggccactgcttatgctcccatggcgagccagctgatgaagagcagctnggtgtgctccaagccgagggggctgtctggtgcttcgctgacaaggaggccccgcttcacagtcaaggccatccagtctgagaagccaacgtaccaggtggtgcagcccatcaatggcgaccccttcatcggcagcctggagacgccggtgacctccagc

SEQ ID NO: 402298 - DNA, 269 bp, Oryza sativa nipponbare
ggtcgacccacgcgtccggagaaatcttggagatgagaagaagacggcgccgttgagagagttccccggcgcggcggagcggctggtgctgttcgaggcggacatgtacgacgccgacaccttcgagcccgccatcgccggctgcgagttcgtcttcctcgtcgctaccccgatgcagcacgaccccaccagcaccaagtacaagaacaccgccgaagcgaccacggacgcgatgcgcatcatcctggaccagtgcgagcgatcgagga

SEQ ID NO: 402299 - DNA, 315 bp, Oryza sativa nipponbare
  unsure (1)..(315): unsure at all n locations
ccacgcgtccgcggacgcgtgggcggacgcgtgggtaaagatggagtgccaaggatgtcgtgtgcaaagattgctggaagagacaagctgaagcgacgtggggactggctgagctcatcaactggtcctgatgacgcanatcttttgacaccgaagattgttagctctgattctgccagtgagaagtgtggtggngactgttctgaaaacagtgctaattcacctnctctagacttgcctctntcatttcccttgttgccatctcttgttcctcttgcgactcaatatccactttctaaggattctacagagcaa

SEQ ID NO: 402300 - DNA, 260 bp, Oryza sativa nipponbare
cgcgtccgatgcgtcgaggaggaggtggccgtggagacggtggagggcggagcggcggcggcgaaggcgccgtactgggacccgccgccggcgccgctgctggacacgagcgagctgggtaagtggtcgctgtaccgtgccctcatcgcggagttcatggcgacgctcatcttcctctacgtgagcatcgccaccgtgatcgggtacaagaaccagagggccaccgtcgacgcgtgcaccggcgtcggctacctcggcgt

SEQ ID NO: 402301 - DNA, 222 bp, Oryza sativa nipponbare
aagagacgagaggagagagatggccactgcttatgctcccatggcgagccagctgatgaagagcagcttggtgtgctccaagccgagggggctgtctggtgcttcgctgacaaggaggccccgcttcacagtcaaggccatccagtctgagaagccaacgtaccaggtggtgcagcccatcaatggcgaccccttcatcggcagcctggagacgccggtgac

SEQ ID NO: 402302 - DNA, 423 bp, Oryza sativa nipponbare
  unsure (1)..(423): unsure at all n locations
ccacgcgtccgaggtgaagagccttctccagacactgttgtctgccctggaggtagcgtcatcatttcaccatccggagaagtcttggcaggtcccaactacgaaggggaggcgctgattacagctgatctagaccttggagaaatcgtgcgagccaagtttgattttgatgtggtgggccactatgctcgacctgaggtcttgagcttggtagtgaatgaccagccgcacctncctgtgtcttcacttctgccgtgagagacacagccgaaaaggcagactgaagcctctagcagtatagagaatgaaatgtctgactgcggatatgtcacgtatctgcgctgatcctgtgaatggcaacaattagtgaactgcttatgggtatagaggaacactgtcccttaatagggtacgctcagtatg

SEQ ID NO: 402303 - DNA, 305 bp, Oryza sativa nipponbare
cgcgtccggagtaggagagaaggccatggcgtcgaaggaggaggtggccgtggagacggtggagggcggagcggcggcggcgaaggcgccgtactgggacccgccgccggcgccgctgctggacacgagcgagctgggtaagtggtcgctgtaccgtgccctcatcgcggagttcatggcgacgctcatcttcctctacgtgagcatcgccaccgtgatcgggtacaagaaccagagggccaccgtcgacgcgtgcaccggcgtcggctacctcggcgtggggtggtcggtcggtgccaccatat

SEQ ID NO: 402304 - DNA, 175 bp, Oryza sativa nipponbare
ttcccggtcgacccacgcgtccgcccacgcgtccgcggacatggcgtcgcccatgctctccgccgccaccgtgccactccagggaggcggcttgtcggagttctccggcctgaggagctcgtcgtcgctgccgctgcggcggaatgccacctccgacgacttcatgaacgcggtc

SEQ ID NO: 402305 - DNA, 389 bp, Oryza sativa nipponbare
  unsure (1)..(389): unsure at all n locations
acccacgcgtccgcccacgcgtccggaagagttctacttanngctttaggcgctgaacttatgctttcttttgtttttttaagggatgaagggggctgtagataaggctacagagattttaaataagacacctgatgcctatatgctgcagcatgttgacaaccctgccaacccaatggtacattatgagactactgggccagaaatctgggaggattctaaagggaaggtggatgtattcactgttggatttggaacaggtggaacaatatctggtgctggctcgttcctgaaagagaaaaatcctggaattaaggttactggtattgagccttctgagagtaacatactttctggtggaaacctggcccacaaagattaaggcattg

SEQ ID NO: 402306 - DNA, 199 bp, Oryza sativa nipponbare
  unsure (1)..(199): unsure at all n locations
cccacgcgtccgtccacgcgttcggtagtccatcgtgtctcgcgagatgacccggcggtacatnacctttttgttctcctacnccgacaccgtactcgtcgtcttcggcgcctgctccgtggtgctcttctgcgcgtacgatctcttcaaggaccccttcgtcagcgtcgccgtcatcgagcaagtcgtgtcccccgct

SEQ ID NO: 402307 - DNA, 384 bp, Oryza sativa nipponbare
  unsure (1)..(384): unsure at all n locations
cgcgtccgcccacgcgtccgncaaaggtgggggtagggagagcaactcgcggtttcttcctttcatgatccaaatggcttctcatcttgtagatggaagtgccaaccagcagcgtcatgtcatggccaaggctgttacctcgtacttgtcctcttcgccttcaactccagaatctcctgttcgactntcagctctatctggagctcgtggtggttcaggttcctcggaggagactgtacagttcatgatggtcaattctctgctgtctgagtcctatgagagttggctgcagcaccgccccgctttcctgcagaggggcatctaccatgcttacatgcaacacaagcatggacgatccaccctcaagctttctgccgacacgtc

SEQ ID NO: 402308 - DNA, 339 bp, Oryza sativa nipponbare
  unsure (1)..(339): unsure at all n locations
ccacgcgtccgcggacgcgtgggtgaaaattgagaaatcttttaataaaattgctatgcttattgtgtgtctcgntagtttttttttagggttcaaaaaggggattaaaaaaaaaatagaatgaaccctactatgtaattatagaaaatgaactaataaccaacctattgcttcgtattgtcgagatcctaactaagaaacagtcactatatgaataaatacatctatcataaatgagtaaatctatcatatccgtgtagcaactgcaattttttctttaaaaaaaaataggattctaagttgtgaagcaaaactaaaggggatgtagataaaaggaag

SEQ ID NO: 402309 - DNA, 328 bp, Oryza sativa nipponbare
ggtcgacccacgcgtccgccacgcgtccggctaattaagcaaaagaagaagaagaagaaagaagaagaagaagatgcagaccgctgctagcagtgtcgttggattgtcggccgtgttgcccgctgctgtgaaggggcgcagcctgcagattcaggctcctcgccgtgttgcgttgcgcgttcgtgcggcggcggcggcggtggcagtggaggctgcggaggtggactacagctctaacatctcggtgtttccgatggaggcgtgcgacctcatcggcggcgaggcgtgcaacgtgcagatgtacccagaggccaagctctcatcatcg

SEQ ID NO: 402310 - DNA, 371 bp, Oryza sativa nipponbare
  unsure (1)..(371): unsure at all n locations
tcgcccacgcgtccggatttatgccctccccagacttgctattggaatcatcgtccaggtgctctgcanctacagttcgctgccgctatacgccatcgttacccacatgggcggagacatcaagctgcaggcgttcggcgagacggtgcacgtgtcggtgcacagctgggcgacggacgtgaggaagaagaaggcggcgccgtcgtcgcactcccaccttcgcatccccttcctcatgaagcgacgccacagcacccgcggcgccgacgacgccgcggacgacgccggcggcgacttcgaccaccaccaccaccattacggccaccaccattacggacaccaccaccaacgaggggaggtccgcgggggcg

SEQ ID NO: 402311 - DNA, 496 bp, Oryza sativa nipponbare
  unsure (1)..(496): unsure at all n locations
cacgcgtccgcccacgcgtccgaagaagtactcgagcaaagaaggagagagcttggtgagctgcanagatggtcccctccgtgatggcgtcgtcggccaccaccgtcgctcccttccaggggctcaagtccaccgccggcatgcccgtcgcccgccgctccggcaactccagcttcggcaacgtcagcaatggcggcaggatcaggtgcatgcaggtgtggccgattgagggcatcaagaagttcgagaccctctgctacctgccaccgctcaccgtggaggacctcctgaagcagatcgagtacctgctccgttccaagtgggtgccctgcctcgagttcagcatggtcggattcgtctaccgtgagaaccacagatcctccggatactacgatggcaggtactggaccatgtggaagctgcccaatgtcgggtgcactgacgccacccaggtgctcaaggagctcgaggaggccaagaaggcgtaccctgatgc

SEQ ID NO: 402312 - DNA, 121 bp, Oryza sativa nipponbare
  unsure (1)..(121): unsure at all n locations
tcgacccacgcgtccgctcaagaagtactcgagcaaagaaggagagagcttggtgagctgcanagatggccctctccgtgatggcgtcgtcggccaccaccgtcgctccctgtcagggctc

SEQ ID NO: 402313 - DNA, 299 bp, Oryza sativa nipponbare
  unsure (1)..(299): unsure at all n locations
gtcgacccacgcgtccgcggacgcgtgggctctcccagaaaatgactgcagatatgccctctatgattttgactttgttactggggagaatgtgcaaaagagcaagattttcttcatcgcctggtctccatcaacatcccggatccgtgctaagatgctgtactccacctccaaggatcgcatcaagcaagaacttgatggattccactacgagatccaggcaaccgacccaactgaggtagacctngaggtcctccgggagcgggctcattaaggccctggccctgatgatcgatcac

SEQ ID NO: 402314 - DNA, 409 bp, Oryza sativa nipponbare
  unsure (1)..(409): unsure at all n locations
ggtcgacccacgcgtccgtacaatttggtctctgttcctgccattcttctgattgaccctatcactgggcaaaaaatgcgtgggtggaatggaatgattcacccggaccgtttgctggaggatttgatgccttacctggacaaaggtccaaaggagcaccatgcagctcaacctcaaaaacggccaagaaaagttgatcaggaaacttctatcggcaaacaaggtaaaacccctgtacccgtagtagccacagaggatgaagacgaagaactagcacgggcagtagcggcttctcttgaggagagtaaaggctctgacactagtgaggaaaagatngaacctgaggtagaaaatgagcctagcctgagtgctaagctgaactatcctcctctccctgaaagacccaaag

SEQ ID NO: 402315 - DNA, 344 bp, Oryza sativa nipponbare
ggtcgacccacgcgtccgctcgaaatcaaaagcacacccaagagagagtagtggtagttccagagcggtctgcttgcgaagttgcgatgcctgccatggccaagcccgcctcccgcgctgccaagcccgcgtcggcgccgaagaagcagaaggcaaagccctccgccgccgccggtggctcctcccacccgccttatttcgagatgatcaaggaggcgatcacggtgcttaaggagaggaccggctcgagcgcgcacgccatcgccaagtacatggaggagaagcacggtgcgtcgctgccggccaactacaagaagatgctctccatccagctgcgcgggttc

SEQ ID NO: 402316 - DNA, 364 bp, Oryza sativa nipponbare
  unsure (1)..(364): unsure at all n locations
gggcgtcagcatcaccaacactgtcggcccggccatggggatcgaggcgctcaagttcatcagctacccagctcaggtcctggcaaaatcttctaagatgattccagtaatgctgatgggaactatactgtatggtgtcaagtacacatttccggagtacatttgcacctttcttgttgctgggggtgtatcatcctttgcgttgttgaagacaagctccaagactatcaagaagcttgctaaccctaatgcgcctctgggctacacattgtgcttnctcaacttagcttntgatggttacaccaattcgacccaagatttgatatagtctaggtatccaaagactaatccatgggatataatg

SEQ ID NO: 402317 - DNA, 331 bp, Oryza sativa nipponbare
  unsure (1)..(331): unsure at all n locations
cacgcgtccggaacacaggtctcctgggtactatgatggcaggtactggaccatgtggaagctgcctatgttcggatgcactgatgccacccaggtgctcaaggagctcgaggaggccaagaaggcatatccagatgcatttgttcgcatcatcggcttcgacaacgtcaggcaggtgcagttgattagcttcatcgcctacaagcccncgggttgcgaggagtccggcggaaactaagctagttggcaagccagcaagctcactcgtgagctctatacagaggagactcgattgatctattcggttttggcagctttgaacgttcgaatc

SEQ ID NO: 402318 - DNA, 366 bp, Oryza sativa nipponbare
  unsure (1)..(366): unsure at all n locations
cacgcgtccgcggacgcgtgggcggcggcgtcgtcggtgagcccgtggtacggcgccgaccgcgttctctacttcggcccgctctccggcgagccgtcgagctacctcaccggcgagttcccgggcgactacgggtgggacaccgcggngctctccgccgacccggagacgttcgccaagaaccgggagctggaggtgatccactcccggtgggcgatgctgggcgcgctcggctgcgtcttcccggagctcctcgcccggaacggcgtcaagttcggcgaggccgtgtggttcaaggcgggctcgcagatcttcagcggagggcggacttgactaccttgggaacccgagcctgatccacgcgca

SEQ ID NO: 402319 - DNA, 118 bp, Oryza sativa nipponbare
tcgacccacgcgtccgtgctctcgcagattggactccaaccgacccaataatgctggtgctcgcactcaacttttcagtgaccgactatgagatcttgaactcccctgaccgtgcctg

SEQ ID NO: 402320 - DNA, 289 bp, Oryza sativa nipponbare
ccacgcgtccgaagtactcgagcaaagaaggagagagcttggtgagctgcagagatggccccctccgttatggcgtcgtcggccaccaccgtcgctcccttccaggggctcaagtccaccgccggcatgcccgtcgcccgccgctccggcaactccagcttcggcaacgtcagcaatggcggcaggatcaggtgcatgcaggtgtggccgattgagggcatcaagaagttcgagaccctctcctacctgccaccgctcaccgtggaggacctcctgaagcagatcgagt

SEQ ID NO: 402321 - DNA, 300 bp, Oryza sativa nipponbare
  unsure (1)..(300): unsure at all n locations
acgcgtcgccaccgtcgccacgcgtcggaactatgaattccttttcngangaatgtattggcagcatgtcaaggacaccacaaccattggagaggggaaaatgttctctcctggtaacctgagggctacatttgataatcctgaatatgacaagctcatcaactactatgtcaaggagaagtacacattgcgttacactggaggaatggttcctgatgtcaaccagatcatagttaaggagaagggcatcttcaccaacgtgacgttctcgacagccaaggccaagctgaggctcctgtt

SEQ ID NO: 402322 - DNA, 372 bp, Oryza sativa nipponbare
tcgaccacgcgtccgccctttctgaacacagcaccaccccttctgctgcatctcccacctccctctgaattgtgggcctgaggcgatggcggcgctcgccccgtccaagatgctcggcacccggctcaacttcgccggctcctcccgctacgccaccgcggcaccgaccaccggagcgcagaagatcgtctccctcttcagcaagaagcccgccccgaagcccaagcccgccgccgtcacctcctcgagccccgacatcggcgatgagctcgccaagtggtacggccctgacaggaggatcttcttgccggagggtctcctggaccgctcagaggtgccggactacctcaacggagaggtccccggagacta

SEQ ID NO: 402323 - DNA, 100 bp, Oryza sativa nipponbare
  unsure (1)..(100): unsure at all n locations
cttctcccacctacctcaacggcagcttgccaggcgataacgggttcgacccgttgggtctggcggaggggacccggagaaaaccctgcgnngtggttcg

SEQ ID NO: 402324 - DNA, 304 bp, Oryza sativa nipponbare
  unsure (1)..(304): unsure at all n locations
cgcgtccggaggtatcagtgctggagatggatggccaatttgacagactagatgagcttatctatgttgagagccatttaagcaacctctcaaccaaattttatggagaggtgacacagcatatgctaaagcatgcagacttccncggcagcaacaatggaacaggtctcttccaaactatcgtaggactgaagattagagatctctatgangcagatatngctgagagggccggtgcacctactgaaagcgcanaagttaatgagctcacattcatatntcgtgatctttcatcccatacata

SEQ ID NO: 402325 - DNA, 409 bp, Oryza sativa nipponbare
  unsure (1)..(409): unsure at all n locations
cgacccacgcgtccgccggcagcgtcttcaaccccctcaacttcgagcccaccctcgaggccaaggtgaaggagctcgccaacgggaggctggcgatgctggcgttcttggggttcctggtgcagcacaacgtgacgcagaaggggcccttcgacaacctgctgcagcacctgtctgacccgtggcacaacaccatcatccagacgctgtcaggctgagcgtgtgatcgatttcatcagggccagggcatctcaaggagcttgatgagttcaggctggtgaaaccgatgattgggcgatggaagatgttctcttcttgtttcttctttttttttttgtggagtatgcatgtataagatgttaatgaaattgnngggaggagagagagaaaaaatgatgtgatgagattc

SEQ ID NO: 402326 - DNA, 334 bp, Oryza sativa nipponbare
  unsure (1)..(334): unsure at all n locations
tcgcccacgcgtccgcccacgcgtccggaagaaggagaagaaggagaggagcagccatggcgtcgtcggnggcagcgtttgcgagcacgttcctggggacgaggctggcggacccggcgccgcagagcgggaggatcgtggcgaggttcgggttcggcggcgggaagaaggcggcggcgaagaaggcggcgaggccgtcggcgccgacgacggacaggccgctgtggttccccggcgcggtggcgctcgactacctgnacgggtcgctcgtcggcgactacggcttcgacccgttcggtcttgggaagccggcggagttcctggcagtcgagct

SEQ ID NO: 402327 - DNA, 184 bp, Oryza sativa nipponbare
  unsure (1)..(184): unsure at all n locations
ccacgcgtccgcggacgcgtgggcggacgcgtgagacatctttgtatacatgtatgtaaatatgtgttttcatgtaanngctaaagatactgttgactgatttgaggtaataatacaataaaccagtggggcactcgggtgtagtctctagggcgccccactgttgtgatataaaaaattatat

SEQ ID NO: 402328 - DNA, 339 bp, Oryza sativa nipponbare
  unsure (1)..(339): unsure at all n locations
tcgcccacgcgtccgctgcttggagcatggacagtatttgctggcatatgaattctacagaaacggttctgttatgacttccttcacctgtctgatggatacagcaaaccactgtcttggaatagccgtgtcaagattgcattangatctngcagggcataagagtatatgcacgaaactngctcaccgtctatcatccacaagaatttcaagtcatctaacatactgttggataatgaggcttaacccccatgnttcagattgtgggtttgcagaagctattcccaaccaggacactccagaattagatgagaactcatgatatagagctcccgaggt

SEQ ID NO: 402329 - DNA, 311 bp, Oryza sativa nipponbare
ggtcgacccacgcgtccgcccacgcgtccgccgagctcgccacccacccgtggttcaagcgctcgctcatcctcttttcgcagctcggcagcctcctcggcggccagccggagcgggagctggcgttccaggcgccgccgccactgaacgcgttcgacatcatatccatgtcgccggggctcgacctgtccgggctgttcggcgagagcaagcgccgccgggagaagcggttcgtgacgacggcgtcgccggagcggacggtggagcggctcggccaggcgggcgccaagctcggctacttcatggggggc

SEQ ID NO: 402330 - DNA, 294 bp, Oryza sativa nipponbare
ccacgcgtccgggaagcgtcagcagcagcggcggctcgtccgcttcgccgtcgccgccgccgtcgttgtcgcggcggccctcatcctgaccgcttcggccaagaagtccggagatgtcacggagcttcagatcggtgtgaagtacaagccagagtcatgcaccctgcaagctcacaaaggagacaaaatcaaagtgcattatcgtgggtcactcactgatggatcagtgtttgattctagctatgacagaggtggaccccttgaatttactcttggaaacggccaagtgataaa

SEQ ID NO: 402331 - DNA, 205 bp, Oryza sativa nipponbare
tcgacccacgcgtccgaaaaaccaacccaaccgccgccgcatcgccctcgttagaacgatggccgcgtctgctttgcaccagaccaccagcttcctcggcaccgcccctcgccgggatgagctcgtccgccgcgtcggcgactccggtggccgcatcaccatgcgccgcaccgcaagagcgcccccaagcattggatggaccgcc

SEQ ID NO: 402332 - DNA, 381 bp, Oryza sativa nipponbare
cacgcgtccgccaacccaaccgccgccgcatcgccctcgttagaacgatggccgcgtcggcgctgcaccagtccaccagcttcctcggcaccgcccctcgccgggatgagctcgtccgccgcgtcggcgactccggtggccgcatcaccatgcgccgcaccgtcaagagcgcgccccagagcatctggtatggacctgaccgtcccaagtacctgggcccgttctcggagcagacgccatcgtacctgaccggagagttcccgggagactacgggtgggacacggcggggctatcggccgacccggagacgttcgcgaggaacagggagctggaggtgatccactcgcggtgggcgatgctgggggcgctgggctgcgtct

SEQ ID NO: 402333 - DNA, 247 bp, Oryza sativa nipponbare
gcgtccgcaccactgctagcttgggaagaggaggaggagcttgagcttggagagagtcaacaatggcggctcaggctcttctctctgggaggcagctgctggggaggccattgcaatcttcagtctccaggtctttcttctccaggaaggcacccttcatggtcagggcagaggccactccccctgccaagcaaggtgctgacaggcagctgtggttcgcatccaagcagtccctgagctacctgga

SEQ ID NO: 402334 - DNA, 306 bp, Oryza sativa nipponbare
  unsure (1)..(306): unsure at all n locations
gccacgcgtccggcaagaagctcagctcctcctcctctcgcatggcagccatggccactcaccgtgtccagcctcctcaagacctccttcgctggcgcgcgcctccccgccgacgtccgcaaccccaccgtctccgtcgcgccgcgcaccggcggcgccatctgcaactccatctcgtcgtcgtcggccactcccccctacgacctcaacgccatcaggttcagccccatcaaggagtccatcgngtctcgcgagatgacccggcggtacatgaccgacatgatcacctacgccgacaccggacgt

SEQ ID NO: 402335 - DNA, 110 bp, Oryza sativa nipponbare
cgacccacgcgtccgcggacgcgtgggcggacgcatgcgcggacacgtggtcggacgcgtgggttcttgctttcgctctagctcgagccatggccggagtgagcaccagc

SEQ ID NO: 402336 - DNA, 211 bp, Oryza sativa nipponbare
acgtacgcgtacgcgtgggcggacgcgtgggcggacgcgtggccggctatctatccatctatttactcagctttgcgtcctcccgcgaattcaccgcagcaatggcgtccttcgtcgccgtccagcctgtcgccgggaagggcctcgccggcggttcaatttccggcaggagctggccgcgggcctggcccggcgctttgccgacacccga

SEQ ID NO: 402337 - DNA, 277 bp, Oryza sativa nipponbare
  unsure (1)..(277): unsure at all n locations
cgcgtccgcccacgcgttcgcccacgcgtccgcccacgcgtccgcccacgcgtncggcattacttttttgcagcaacaatggaacaggtctcttccaaactatcgtaggactgaagattagagatctctatgagcagattattgctgagagggccggtgcacctactgaagcggcaaaagtttaatgagctccacattcatatttcgtgaatctcttcatcaccataccatattaatgacaatgggcatcctcgcatttcttgtaactagttttgga

SEQ ID NO: 402338 - DNA, 297 bp, Oryza sativa nipponbare
  unsure (1)..(297): unsure at all n locations
cggtcgacccacgcgtccggcagcagcagcagtagctgagcttgaagcagcagagcgaggtagacatggccgtcgttaccatggccctctcgtccccggcgctggccggcaaggccgccgcgaaggtgttcggcgaggggcgcatcaccatgcgcaagtcggcggcgaagcccaagcccgccgcgtcggtgagcccgtggtacggcgccgaccgcgtgctctacctcggcccgctctccggcgagccgncgagctacctgaccggcgagttccccggcgactaccggtgggacaccg

SEQ ID NO: 402339 - DNA, 359 bp, Oryza sativa nipponbare
  unsure (1)..(359): unsure at all n locations
cacgcgtccgcccacgcgtccgcccacgcgtccgcccacgcgtccgcccacgcgtgcgcggacgcgtgggcgctcatcgccatctgtctcagctctcacagctcactgcatcaatggccgcggccaccatggcgctctcctccccggtgatggcccgcgcggcgccgtcgacctcctccgcgctcttcggcgaggcgcggatcaccatgcgcaagaccgccgcgaagcccaagccggcggcgtcgtcggngagcccgtggtacggcgccgaccgcgtcctctacctcggcccgctctccggcgagccgtcgagctacctgaccggcgagttcccgggcgactaccgggtgggacacccg

SEQ ID NO: 402340 - DNA, 277 bp, Oryza sativa nipponbare
  unsure (1)..(277): unsure at all n locations
cttgagagagactcaatggcggctcaggctcttctctctgggaggcagctgctggggaggccattgcaatcttcagtctccaggtcttcttcctccaggaaggcacccttcatggtcagggcagaggccactccccctgccaagcaaggtgctgacaggcagctgtggttcgcatccaagcagtccctgagctacctggatggcacgcnnttcggagacttcnggttcgacccgctggggctatcggacccggagggaccgggggttcatcgagcca

SEQ ID NO: 402341 - DNA, 306 bp, Oryza sativa nipponbare
ccacgcgttcgctgctcgccaagcaggtcggtgtccccaagattgttgtcttcctcaacaagaaggaccaggtcgacgacgaggagctgctccagctcgtcgagctcgaggtccgcgaattgctctcctcctacgagtacgatggcgacgaagtgcccatcgtcgctggctccgcgctcaaggcgctcgagaacctcatggccaaccctgccattaagcgcggcgatgatgagtgggtggacgggatcttctcgttggatgattccgtggataactacatccctgtcccacagcgccagaccgacc

SEQ ID NO: 402342 - DNA, 406 bp, Oryza sativa nipponbare
cacgcgtccgcacacgcgagcagcagcagcagcagcatgctgagcttgaagcagcagagcgaggtagacatggtcgacgccaccatggccctctcgtccccggcgctggccggcaaggccgccgcgaaggtgttcggcgaggggcgcatcaccatgcgcaagtcggcggcgaagcccaagcccgccgcgtcggggagcccgtggtacggcgccgaccgcgtgctctacctcggcccgctctccggcgagccgccgagctacctgaccggcgagttccccggcgactacgggtgggacaccgcggtgctctccgccgacccggagacgttcgccaagaaccggaagctggaggtgatctcactcagggtggcgatgctccgcgcgctgggctgtgtagttccggagc

SEQ ID NO: 402343 - DNA, 111 bp, Oryza sativa nipponbare
caaattatggtaattggacatatggagcaggagttggcaatgatccaagagaagaccgatacttcagtatacctaagcaagccaagacatatgatcctgatggagagtatg

SEQ ID NO: 402344 - DNA, 331 bp, Oryza sativa nipponbare
cccgggtcgacccacgcgtccgcccacgcgtccgtgcgcgtcgacttcaaggagcccgtgtggttcaaggccgccgccgctcgcccgcggcggaggagaagccggcggaggccgaggcggccgtggcgaccaaggagcccgccgccgccaagccgcctcccattggccccaagagaggcaccaaggtgaagatcctgaggagggagtcctactggtacaacggcactggctccgtcgtcaccgttgatcaggatcccaacactcgctacccggtggtggttcggttcgccaaggtgaactacgccggcgtgtcgaccaacaactacgccct

SEQ ID NO: 402345 - DNA, 329 bp, Oryza sativa nipponbare
ccacgcgtccgccgatgtcagccacatggacaccaccgccgtggtccgtggattccttgggcccaaccttgcttgaggcagcacttacaggaatggatcttgtcattatccctgctggtctcccaaggaaaccaggaatgacaagggatgatttgttcaacaaaaacgctgggattgttcgctcactttgtgaaggcgttgccaagtgctgtccaaatgcaattgtgaacttgatcagcaacccagtgaactcaaccgtccccattggagcagagggtttcaagaaagctggaacctatgatcccaaacgtctccttggagttacaaca

SEQ ID NO: 402346 - DNA, 523 bp, Oryza sativa nipponbare; identical to SEQ ID NO: 387203

SEQ ID NO: 402347 - DNA, 279 bp, Oryza sativa nipponbare
aatccacttgtaaatatttgtttgtgtttttttcttcgatgtatataaactctattttattatttaatactccatccgttttgaaatgtttgacgccgttgactttttatcacatgtttgaccgttcgtcttattcaaaaaatttaagtaattattaatttttttccattcatttaattcattattaaatatatttttatgcgggcatataattttacatatctgacaaaagtttttgaataagaccaacggtcaaacatgtgcttaaaaggcatcggc

SEQ ID NO: 402348 - DNA, 523 bp, Oryza sativa nipponbare
  unsure (1)..(523): unsure at all n locations
tttgtgcccttgtgcagatgcattgcatttatacaagtagaaggcactcaaatcagccaccacatgaacacacacatgttccatcatcgatcgatctacacatgcatcacccggtcatgcacttacaaacaaaagatctacttgaagaagtacgggaggtcgagcacgtagaggaggaagtaggcccagaggacgccggagatgccgccgaagaagaagccgccggtgaacttggcccagccgtcggcggtctgcagcttgtcggcctccttcttgcggccggtgagcgtcagcgtcggcgccgtggacggctcgccctcgccgaaggaggcgacgccgtacatggtgaggcagacgctgaggatggcgacnaggcctgcggcgccnnaggcgccggcctggccgtgcaccggcgtgttgcggagcgggccggtgagcgcgaagggcccgacgaggaggtagccgtgggcgaggccgacctcgatgccgcggagcagcgggctgacggcggtgcggtacgccg

SEQ ID NO: 402349 - DNA, 467 bp, Oryza sativa nipponbare
gaaaaatagcgccggagtcgctgtttcaggtacaagttttgagttcaggttggcatcaagccgcaagattttattctggagcacaacatctcggtgccccagcagatcggggcagaacaacagtcaaaccaaaaattcgagggaccccccctctagttcacatttgaattgttagaatctgcataggttgcctagttcgcgtgagcaaacttgatgcccttctcaatcgaagacttgagctcacccttcaggttctccagaccctccttttaaaactcggaaagctggcccagcccaagtacttcctccactccgttcttgccaagccttacctttgaggcgaagaatggcagctctgttactgttgattgcacaaaagagcactctacaacatcaggaactccattaagccccttcaagcacgcatctgcaaataccgcaccagcatatgccatagacaatgttgc

SEQ ID NO: 402350 - DNA, 298 bp, Oryza sativa nipponbare
gcataataatacatcggagatacgtacgtacatacatacccctctcgatcacacgcaccatcgatcgtacaaagttgcgtacatacatacgtacacacatatacgcatacgcacgtacatacatacataattaaaaactcgtaattaattaaatacgtagttgatggcatctctaatggaacttgaggctggtgaggatgttgttgtggacgggatcagcgaggtgatcaagcaggttctgcacggggccaaccccggtgaagagcgcctggacggagaaagccgggaaggcgagcat

SEQ ID NO: 402351 - DNA, 346 bp, Oryza sativa nipponbare
gacagggaaacgatcgtagtgccagttcatgcactactcatatttgatatggaggggaaccaagtttgatctgacacctaccttgatagatacacagcataaaaggggcaagttctacagacctcagaagtttgttctggactgcaatttacaagcaaggggatgacagggacgtcaagcatgaacgatcggagccaatgattcaccgtctagtgacagtaatcagttttgcgattgactctgattatcttgcttagtagggctttgcagtgctgtcactttttgcggctgtcgtcttctcagcggcagaagtgaaagacacagggaggtgcggctggtcattcac

SEQ ID NO: 402352 - DNA, 336 bp, Oryza sativa nipponbare
  unsure (1)..(336): unsure at all n locations
tttttattatcagggaaagtttcttattttcatttttttcttttttnatactcaaaaattttaacatggtaaattcactccaaacagaggtgcgggatacaaaacttaattttttttaactacaaaaaattttccattcctccatgaacctataagcttttacacccaaaccacacaaattacaatgcacgagccttttttcttcacttgcaaattaaatggggcttgagtagccaagcattcatctggggttctgtaaccgagttaagcgttgcttaccactaagttaccggggatgatttttctgtaaggggagacctacacgtccccgaggaa

SEQ ID NO: 402353 - DNA, 295 bp, Oryza sativa nipponbare
gggcgctcgaaacttcaaaattctcattacaaaggatcgagaggaagaaggaagaagtctggggaaaatttttggagcgaggtggagttacaaaggcagcagcagcagcagcttctacgttctcacttccactggttggcgacgatgtcggcgaggtcgaccaccctctgcgggtatccccactcgttgtcggaccaggcgatgaccttcaccatgtcgtcgcccatgaccatgctgagcgacccgtccatggtgcacgacacgtctgagcacctgaagtcgacggacacgagcg

SEQ ID NO: 402354 - DNA, 520 bp, Oryza sativa nipponbare
gtgagtaatgactaattgtataagaatcctatgaaagaaatgttccacaaacgaaagaagaatagaaaggtagtaaaaaacactatgatagtgttttcttcatcccctacagctgaacatcatgcactcccgataagctcattgatcagcatgttcatgttcatgttcatcgggactaatcgtgctttcgatgtttatcccaatttcacccctcaagaacttggagtaccagtgagcagagagcttcggctgccttggcaaattggggtcctcaaaatcaacataatgcaggccgaatggcgaatggtatcctgctaacagctcaaacacatcaagaaatgaccacacaaagtaacccttcacattggctccattccttagtgcagctagagtgcttcccatgtagctactcaagtagtccactctatctgtgtcattgagtgaatcgtcgtccttaccgaaatgcccgaaacctaaaatatggtaaatagatgaacaaaaaaaaatagatcggtaaaga

SEQ ID NO: 402355 - DNA, 502 bp, Oryza sativa nipponbare
tttttggaaacgggctgagatgtatacatgtataacacgaccaaaacaaagccttatttgttagggaacaaagtaacagctggtggcgaacaagtaacaaaatccgatcagacgagcacacggtactacactttggagacgaaacgcaatggctctcgcgaaagcaaaaaaactccctacatccatcaccaggcatatgcatatgtgtgcttagatggccgggaagtactccttgcttcccttggggtcaggcttcatcgacttgtcaccgggcttccatccggccgggcacaccttgtccgggttgtcctggacgtactgcaacgcctgaagggtcctcatggtctcatctacactgcgtccaatggcaaggttgttaatggtagagggctgaatcactccctccttggcaatgatgaaaagtcctcttagagcaattccctggtcagggatcaagacaccaaagggcttcgaaattgatttagtaacatctgaaatcaat

SEQ ID NO: 402356 - DNA, 517 bp, Oryza sativa nipponbare
  unsure (1)..(517): unsure at all n locations
attaactcaaggaaaggggtcgttccttcttattctggcatgacaaaattcatgtgtatctctgccataatattaaggcactaattattgcagtaaaaagacaaaattatcagaactgagaagctttgatctttcaaaatctacagtatgtatccaaaactaaaccttacaaagataacatgaccaaaaatgcatctatggcgtctctgttaactgtatatgcagtcgtgcagatacctagacttctgatggtgtctttgcatcaatggagagcgcatgcaacccattcttgagctcatcttgcagaagatcatacacagccctgtgcctcttgagcaggctcttcccctgaaacgcctctgagaccacccgaacattaaaatgcgtntcgccattgctttctgacaccccagcatgacccttatggaggtgcgatatgtcctcgatctggagctgcaccggcgaaagcccgcgctcaaggctctcctttatcctntcctgcctnccaccccccaaa

SEQ ID NO: 402357 - DNA, 489 bp, Oryza sativa nipponbare
  unsure (1)..(489): unsure at all n locations
acatcgaggttcaagattgattagggaaaagctgcagtaccttcacaaaattatactccttactccttagcatagagctgatcgatggagcgtataaaaatttaactttacatacagagaccaaattatatgcaataggattaatttgccgctgttccgttctgccaaactgcaggcagaaccatcgctgctgagaattgctttccttccttcgttcgttgtgcttcagatcctggacgggatgagcggcgtcgaattcgacaggtacgccgncgccgccgccacgccggagccgagcttcaccgggtagccgatgtccttgagcaccatctccactccactcagggcacccatcaattgcagctcgttgaggtggccgaggtggccgatcctggacaccntgccggcgaccttgttgaggccaggcgaggctgaggttgtaccgttccaggcggcttacgatctggcgctgtcgatgacggcggacga

SEQ ID NO: 402358 - DNA, 465 bp, Oryza sativa nipponbare
cccggaaagcacttttaaagggcttcatgctaattgataatgtttcacggctcttcgaaacatttgtttacaattaccaaacacccagctttaaatttacgtatgtattacaaactgctcccagattgatttaaggataaaagagaagagtagaagatgttcagagaaatttcacagtaccctcacaagcctcattataagtgcaaaggtaactgttttatttatcgaacaaacagctatggagtggtttgatacttctcagaaaaaaaaaactaatggccagaaatctcagaaacaattatgatgttgtgaacactgaaattaggctcatggttcaggttgcaacttttcacattcttctcttatcgactgaaaaaggatagatgaaaggtacctctcaccaaagcttggaaacacaaccactaccaactttccagcattttctggtctttttgcaactttaat

SEQ ID NO: 402359 - DNA, 436 bp, Oryza sativa nipponbare
ttaggacaatccacaccgagggagccatattaataccacaatataagagtttgggagagggtgtttcatacgttttacaggctctgagacctcatacgggtaaatctccgacaacactccatctgcagctagaatcatgcaggcaaggctaaacgatgatgatgatgatgatggtggggatacgttttacaggaaacatggatatctttcttattaacaatagtatcgcaagggagcatcactgataggatgaatttgcgtcttgacttgagattcgcaagtgatcgatcatcagggccagggccttaatgagcccgctcccggaggacctcaaggtctacctcagttgggtcggttgcctggatctcgtagtggaatccatcaagttcttgcttgatgcgatccttggaggtggagtacagcatcttagcacgga

SEQ ID NO: 402360 - DNA, 524 bp, Oryza sativa nipponbare
  unsure (1)..(524): unsure at all n locations
ttaatggcactgaatcagggtggtttcctcatcctttttattcattcctcccagagagacggatccatggaagttttcttgccctcatcaggcaagcagagcacacacacacggtggcagtggaagtgctatgaacaagacgctaatcaacatccagagctaaaacaaacaaggggatcaatgcaaatcccgaaaaaaaaacacaggggaaagtccacatcttcttctcgtgcccaactcctccgtgtcaccaccacgtcttgcggatttttttttaccctgttctattcgctcaggcgtccacgatctcgccgtcgtccttcgacgccaggatcagctccgggtgcgccgncgncgncggcgnctttttgatcgtgccgtcgatggcgttcggccggccgagcgccttcagcgccaggtgcgccgccttctggccggagatcatcatggctccgaacgtcgggcccattctcggggcgccgtcgatctcggcgaccttcatgccggtgacgatcatgccgggg

SEQ ID NO: 402361 - DNA, 348 bp, Oryza sativa nipponbare
tcagagaaagcatgttagggtgaaacatggggcattggaacagagtctgaacagtatggttcgaccacatttactgatttacagtcaccaagaaactcaaaaagaaaaatgtattgctgcacttgcaggaagccactgaggctattattcagctaagggaatgtcccaaaatttgcaactacacaattgtgccccaaattgcaatccattccagaaacgcttatgacagacccatgactttgccagtggctgtgtcgacgtcgatttcgtagaagcagggccttgtaggaagaccaggcattgtgctcatggtgccaaccagtgggtagatgaaaccggctccaatgc

SEQ ID NO: 402362 - DNA, 368 bp, Oryza sativa nipponbare
gacagataactcggggtggtagaattatggaaacattgctgtccagtacaatcaattactcccatgacaaagatcaagagaagtacattgattagttttttttctctcttactaaaggaaactaaacaacttaaatagatgagatgacagcagtgagagccaaagacgctttctcctcctccatcagtcgatcgcctatgggattacttggatctctgcctcatctttcggcgcttcctcttgagccgcctcatcctcttcttcttccacttggccctcatcgcggcggcgcgccgctcacctctgtccttcctctccctccctgacggcgagcccacgcgtccgcggacgcgtgggcggacgcgtgg

SEQ ID NO: 402363 - DNA, 470 bp, Oryza sativa nipponbare
  unsure (1)..(470): unsure at all n locations
gtataaatatatatagccggagcttccatatatttcattcacatatgcctcacccaacaacatatagtcgtagcagataccactcttacatcaagtcagagagagatcaggtgaaacaaaaacaaaagcagagcacggccggtaaaatcaaaagacgatgaacaaactgggaacacacgaaacaaggtgggagacatcatcgaatcagagatgaacaattaaacaaggctatatatgacgatgacggcttagttgccaccagactcctcgcagcccgggggcttgtaggcgatgaagctgatgagctgcacctgcctgacgttgtcgaagccgatgatacggacgaatgcatcagggtacgccttcttgcctnctcgagctcttgagcacctgggtggcgtagtcacccaacatgggcagttccacatgtccagtacctgcatcgagtatccggggatctgtggtctacg

SEQ ID NO: 402364 - DNA, 274 bp, Oryza sativa nipponbare
gggaagggcttgctgatacaatatcaacatggagggtacattgccggttccatatgaacaaacataaaaacaccgaaaccccatatggccattatgccgatcctagcctagcttggcgaggacatcgccaagagcagatttggtcaacgtgtagtacttctccgcctcttcggggctcttgatcttggctgcatggtcaagcccctcaatggtggcgaagagcttgccggtgaggtccttgaggcccttcttctcgtccttgggcttggagttg

SEQ ID NO: 402365 - DNA, 483 bp, Oryza sativa nipponbare
ttttaaatatatatagccggagcgtgccatatatttcattcacatatgcctcacccaacaacatatagtcgtagcagataccactcttacatcaagtcagagagagatcaggtgaaacaaaaacaaaagcagagcacggccggtaaaatcaaaagacgatgaacaaactgggaacacacgaaacaaggtgggagacatcatcgaatcagagatgaacaattaaacaaggctatatatgacgatgacggcttagttgccaccagactcctcgcagcccgggggcttgtaggcgatgaagctgatgagctgcacctgcctgacgttgtcgaagccgatgatacggacgaatgcatcagggtacgccttcttggcctcctcgagctccttgagcacctgggtggcgtcagtgcacccgaacatgggcagcttccacatggtccagtacctgccatcgtagtatccgggggatctgtggttctcacg

SEQ ID NO: 402366 - DNA, 361 bp, Oryza sativa nipponbare
  unsure (1)..(361): unsure at all n locations
ttttataattactaataaggagttataatcacaaaggtcattcgcggtaaattacccatcccgaacactaatcgtacaagcacgtattattatttcctctgatcgatcgtggctggcggcgcacgcgcgatgctagaactcctcgacgatgatgccgcccctgacgacctcgtaggcgtcacggctgcgcgacttcctgatgccggcggtgaagtgcaccttggcggcgtcggccctgacggcggtgaccctggcccagacgagcaccttggtcttgagcccctncaccttcgccagcctncccttctccagcgtcccgcacaccgtggcgtcgaaccgcagcacggagccgtccctgtag

SEQ ID NO: 402367 - DNA, 518 bp, Oryza sativa nipponbare
tttttaggacaatgcacggccagtaatccatattaataccacaatataagagtttgggagagggtgtttcatacgttttacaggctctgagacctcatacgggtaaatctccgacaacactccatctgcagctagaatcatgcaggcaaggctaaacgatgatgatgatgatgatggtggggatacgttttacaggaaacatggatatctttcttattaacaatagtatcgcaagggagcatcactgataggatgaatttgcgtcttgacttgagattcgcaggtgatcgatcatcagggccagggccttaatgagcccgctcccggaggacctcaaggtctacctcagttgggtcggttgcctggatctcgtaatggaatccatcaagttcttgtttgatgcgatccttggaggtggagtacagcatcttagcacggatcccggatgttgatggagaccaggcgatgaagaaaatcttgctcttttgcacattctccccagtaacaaagtcaaaatc

SEQ ID NO: 402368 - DNA, 331 bp, Oryza sativa nipponbare
tcacatccatctcgtaccgttggtgtaaatatatatagccggagcttccatatatttcattcacatatgcctcacccaacaacatatagtcgtagcagataccactcttacatcaagtcagagagagatcaggtgaaacaaaaacaaaagcagagcacggccggtaaaatcaaaagacgatgaacaaactgggaacacacgaaacaaggtgggagacatcatcgaatcagagatgaacaattaaacaaggctatatatgacgatgacggcttagttgccaccagactcctcgcagcccgggggcttgtaggcgatgaagccggacgcgtgg

SEQ ID NO: 402369 - DNA, 457 bp, Oryza sativa nipponbare
caactctgagtaggcattgtgaaaaatgttatttagcagtaatgtccaacttatatagacatacattgagtaagagcaattaaattagatgctatgctgtgatacagtacagataattaatccagtagcagcctcccttgaactgaagttgtatataagtagtatctctgttaaccgctgattatatcctcgtagacctccctaacctttgcaaagaaagcttccctgtcaggcttgaacagcaggttccggtatgcaaaccacccgctgtagccaatgccaacagcttccatgagaccaggaacgataggaagcctgtcaattgccgatacaactccgccggcgctccacatcccgagcgacgcagcgaccgccagcgtcgtcaccgcgtacttgtcctcaatcctgtcccactcttgtttgagggcgttgatgaactcggtgatctccgcgttgg

SEQ ID NO: 402370 - DNA, 517 bp, Oryza sativa nipponbare
aaacagccaaatccggacagtagttttctccacaagttatcgtagtgtgactgtatgaagtatcagactatcagtggcagaaacataattatcgttttgataattagcgattcctttagggagagaacaaaaatacagggcgccatacaattctactactcagtgcaatacaattcattgcatcttcttcctgacttcctgtagaacagaaactaccagcatttttttagctattaccatacatctcagttttttatcgatgtaaaacttctcctgaatcagtaatgggctgcaataattatctcccatataacccaacaacaaacatgtccaatcgaagctacaaattggaatgagctaaaatattaaactcattccttgtggtctctgaccttcttttcttccatttgagaaagatttgtaaagagagaccagaaaagaccatcacaacacttccccattgcttcaaggagagtgggttaccactgatgacggaggagatgacaatgctcatgaa

SEQ ID NO: 402371 - DNA, 472 bp, Oryza sativa nipponbare
gaaatggaaaccagaggtgtcaaggttggtctgagtatagtattacatataagtatcgtttttgacgatttgtacaatatatttattacgatgtgtatgtgcatatgattagcctggtgctagcattcacatatgcatgctcttcaacctatgttgatacatacatatgtacatacatacacagctgatgttgacacaaacaagatgaaaaaaaaaaaactgaagcaacaaactgggaaaggggaaaccaatgcaaggtggcccgattcgaacgttcaaagctgccaaaaccgaatagatcaatcgagtctcctctgtatagagctcacgagtgagcttgctggcttgccaactagcttagtttccgccggactcctcgcaaccccggggcttgtaggcgatgaagcttaataactgcacctgcctgacgttgtcgaagccgatgatgcgaacaaatgcatctggatatgcc

SEQ ID NO: 402372 - DNA, 485 bp, Oryza sativa nipponbare
  unsure (1)..(485): unsure at all n locations
tgagaaatccgctaatcagaatagcaccacggataagtacctagaccattagttgggaaacgaataaaatcattattgcaaaaacatcatcttcttcttcatcttcttagtgtacacaacaccaactcgatcatcatctcgtcgcactaaacccatcttccccaacccaaagacaacgaactcgctggccacaaatccatccaaccacaattaaccactgctaagctacggtcccccacttcacttgccggggacgaagttggtggcgtacgcccaggcgttgttgttgacggggtcggcgaggtggtcggcgaggttctcgagggggcccttgccggtgacgatggcctggacgaagaagccgaacatggagaacatggcgaggcggnncgtcttgatctccttcaccttgagctccgcgaacgcctcggggtcatcggcgaggccgagcgggtcgaaggcgccgccggggtagagcgggtcga

SEQ ID NO: 402373 - DNA, 514 bp, Oryza sativa nipponbare
gggtgaagcagagactttcaagacggacatacaaacatactgaaaatgtcttgtcaaacatggttaatataacaccattttaacagggcataataggagggtttttcctgtggctggcattgcggaacaagaaaaccaggatccatccatcatttataaactgaacaaaagcgtgacccagaactacttaagtatatttaagaacatgatggccttcttcgcgatggtgcgactacagatcgtgtactagaagatagctactgaaagccgaagacatcaatgtccattgccccaacaacaacagatggtgcatcagactggcgtccgaattcatcttactgatgcccaggctcttttggagctgcggctttcttgagttcgtcaccatcatcatcattggcatctgaagtccacagagtcaagttgtcacgcaggagctgcatgatcaaagtgctgtccttgtaggattcttcaccaaggctgtccagttctgatatggcctcatcaaacgcct

SEQ ID NO: 402374 - DNA, 514 bp, Oryza sativa nipponbare
  unsure (1)..(514): unsure at all n locations
tttgatgacagacagaaaggaatgaagctagaaatctcctcgatcgatcacacacacacacacaattaaggtacatacatacatgcactgctgcaactgcaactgcagggtcggtgcgtggctactacaagtgtacacatggtacgttggttggcaccatctcgatcgtgtcgttgtgctcacttgccggggacgaagttggtggcgtatgcccaggcgttgttggcgacggggtcggcgacgtggtcgaagaggttctcgatggggcccttgccggtgacgatggcctggacgaagaagccgaacatggagaacatggcgaggcggccgttcttgagctccttcaccttgagctcggcgaaggtgtcagggtcgtcggcgaaggccaagcgggtcgaaaggcgccgccttgggtacaccttgtcgaggcccttgccgagcgggccgncgccgacgcggtagccctcgacgaatcccatgagcaccacctggaccggccagatggggaggatgc

SEQ ID NO: 402375 - DNA, 345 bp, Oryza sativa nipponbare
gggggggggaaaacaaaagacgatgaacaaactgggaacacaccaaacaaggggggagacatcatcgaatcacagatgaacaattaaacaaggctatatatgacgatgacggcttagttgccaccagactcctttcaacccgggggcttgtaggcgataaaactgattagctgcacctgcctgacgttggcgaaaccgatgataccgacgaatgcatcagggtaccccttcttggcctccttgagctccttgagcacctgggtggcgtcagtgcaccccaacattggcaggttccacatggtccaagacctgccattgtagtatccgggggatctgtgggtttta

SEQ ID NO: 402376 - DNA, 500 bp, Oryza sativa nipponbare
ggagggggaaaacagaaatgcgaatttacctttatatgcaactgtttacaccaaaaggggaaaaaaacgggtaccttgcaaaaaggagtataactttgcagtttcaagtcccacttcaactacaacccaatctgcattacaggatgggagtctaaaacgactgcagtttcagcgtttttgaggcctgcagagacactgggctcgcgttgcagcaaaagattaggcggcggcgcccacggtggcgccggcggtgagcctcgacaagccgtaaagagtctcctcgaaccggatgatctcgttcttggaaccgtaggccacttgagtccgctcgtcgaggttgttgatcaccttgtccagcaccgaatgtttggcgttgttgtttaccccgccggttttttttattaagaaacccaacggggccaccttgaacaggagccttaactttgcctttgctgtcggagacttcacgttggtgaagatgcccttcttcttaactatga

SEQ ID NO: 402377 - DNA, 338 bp, Oryza sativa nipponbare
atgtgttgggttttttttttttttttcttttttttttttttcaaaccaccataattaaaatcgacaccattaaatagcttaaacacttcttctaccattaaataatttatccccctttagtgctcatacattaaaaatttaccattaaattcacccccttacccatgcattcaaatccatgcttgcaggaaacaatttccacaacacacacagtaagtctgaatttaataaaatccatcttttttttttttctccccccaattcattaacattttatacatgcatactccccaaaaaaaaaaagaagaaactggaagggaactttttccattgcccaa

SEQ ID NO: 402378 - DNA, 502 bp, Oryza sativa nipponbare
aaaggaaggacctattttttatagtagaaagcaaccgtatttctttctacattgaaatatagaagatgtacattgaaatgtgtcaagaagagatgtaggagcaccctcatggagagggatttttagaagttccattgcatggtttcacaagttatgcaatgaccatcctactttcttctagctgtaatatttccaaaactagttacaagaaatgcgaggatgcccattgtcattgatatggtatggtgatgaagagattcacgaaatatgaatgtggagctcattaaacttttgccgcttcagtaggtgcaccggccctctcagcaataatctgctcatagagatctctaatcttcagtcctacgatagtttggaagagacctgttccatttgtgctgccggggaagtctgcatgctttagcatttgctgtgtcacctctccataaaatttggttgagagggtgcttaaatggctctcaacatagataagctcatctagtct

SEQ ID NO: 402379 - DNA, 359 bp, Oryza sativa nipponbare
aaaggaaggacctgtttgtgatagtataaagcaaccgtatttctttctacattgaaatataaaagatgtacattgaaatgtgtcaagaagagatgtaggagcaccctcatggagagggatttttagaagttccattgcatggtttcacaagttatgcaatgaccatcctactttcttctagctgtaatatttccaaaactagttacaagaaatgcgaggatgcccattgtcattgatatggtatggtgatgaagagattcacgaaatatgaatgtgaaactcattaaactttttccgcttcagtaggagcaccgaccctctcagcaataatctgctcatagagatctctaatctttaat

SEQ ID NO: 402380 - DNA, 516 bp, Oryza sativa nipponbare
ttttgcgacaagggagaggtttcaaattctgtcccatcaggggaaaaaaagttcagaggacatgaaaaaattgtaccataaattaaggatggtttgaacaatactttgaacttcgaagtaacacgatgaacatgaaggaaacagcatccttttttgactgaactcttaaaaggaccactgaaccgctgttttgaggaggcgctacacaagctaactcttcgttgtgtggaacatcaaagacgaccttagagctcactattgctagcaccaccggttgtctttccattgacggcgataagctccgtgtcaaagattagtgttgctccacctggaatcttcggtggggagcctctctccccataacccatctttgcagggatctttagcttcctctttttaccacacacatacctagtaacccttggtcccaaccttttatcacttggccgtttccaagagtaaattcaaaggggtcacctctgtcatagctagaatcaaacactgatccatcagtga

SEQ ID NO: 402381 - DNA, 423 bp, Oryza sativa nipponbare
  unsure (1)..(423): unsure at all n locations
aattcgatcatcccttggatgcggcctgcggcttacattaaatctcgatccaaagaagcaaagatgatgacagacagaaattaattaagctagaaatctcctcgatcgatcacacacacacacacaattaaggtacatacatacatgcactgctgcaactgcaactgcagggtcggtgcgtggctactacaagtgtacacatggtacgttggttggcaccatctcgatcgtgtcgttgtgctcacttgccggggacgaagttggtggcgtatgcccaggcgttgttggcgacggggtcggcgacgtggtcgaagaggttctcgatggggcccttgccggtgacgatggcctggacgaagaagccgaacatggagaacatggcgaggcnnggcgttcttgagctcctttcaccttgagctcggc

SEQ ID NO: 402382 - DNA, 525 bp, Oryza sativa nipponbare
ttaagctagaaatctcctggatggatcacacacacacacacaattaaggtacatacatacatgcactgctgcaactgcaactgcagggtcggtgcgtggctactacaagtgtacacatggtacgttggttggcaccatctcgatcgtgtcgttgtgctcacttgccggggacgaagttggtggcgtatgcccaggcgttgttggcgacggggtcggcgacgtggtcgaagaggttctcgatggggcccttgccggtgacgatggcctggacgaagaagccgaacatggagaacatggcgaggcggccgttcttgagctccttcaccttgagctcggcgaaggtgtcagggtcgtcggcgaggccgagcgggtcgaaagcgccgcctgggtacaccttgttgaggcccttgccgagcgggccgccgtcgacgcggtagccctcgacgaatcccatgagcaccacctggaccgcccagatggcgaggatgctctgcgcgtgcaccaggttggggttccccaggtagt

SEQ ID NO: 402383 - DNA, 299 bp, Oryza sativa nipponbare
cgagagaaaatggggtacggatctccactcagatgatacaaatacacagtgagcacgacaagcgttcaattatgcatgcagttgtgtcatatcacaaaggttctaggtacaggaatgttttcatggctggccaatcgatcgatgatcattatcagatcatcaccatttccagaagacgttggatccgcacttgtacttctccttaccctcggactcgatctcgagatcatctgagatgaatgggactttcttctgcttggcgaggtccttgcaaccggtgaagttgtaagggaactggc

SEQ ID NO: 402384 - DNA, 479 bp, Oryza sativa nipponbare
  unsure (1)..(479): unsure at all n locations
agcaaatcgatccatgcgaccatgcgtgcaaatcagttggagcacaaatttacatgttacacccacaccctacacccatgcataataatacatcgtatatacgtacgtacatacatacccctctcgatcacacgcaccatcgatcgtacaaagttgcgtacatacatacgtacacacatatacgcatacgcacgtacatacatacataattaaaaactcgtaattaattaaatacgtagttgatggcatctctaatggaacttgaggctggtgaggatgttgttgtggacgggatcagcgaggtgatcaagcaggttctgcacggggccaaccccggtgaagagcgcctggacggagaagccgaggaaggcgagcatggcgagccctgcattcttgatctccttgagcttgagcntcttcatctccggctcgctcttggtcccgaagccgagcgggttgaagagcgggccgncggggta

SEQ ID NO: 402385 - DNA, 523 bp, Oryza sativa nipponbare
  unsure (1)..(523): unsure at all n locations
tttgctatgaacaagacgctaatggacatccagagctaaaacaaacaaggggatcaatgcaaatcccgaaaaaaaaacacaggggaaagtccacatcttcttctcgtccccaactcctccgtgtcaccaccacgtcttgcggatttttttttaccctgttctattcgctcaggcgtccacgatctcgccgtcgtccttcgacgccaggatcagctccgggtgcgccgccgccgccgccgccttcttgatcgtgccgtcgatggcgttcggccggccgagcgccttcagcgccaggtgcgccgccttctggccggagatcatcatggctccgaacgtcgggcccattctcggngcgccgtcgatctcggcgacctccatgccggtgacgatcatgccggggacgacctcgcgggtgaggcggacgatctcgtccttggcggtgttcatgtcgagggcgcgcatgccgggcacggcgtcgatcatgccgatgtcctgcagccgcttgacgcccgtggcgccgaac

SEQ ID NO: 402386 - DNA, 360 bp, Oryza sativa nipponbare
ataggggaagggaaccgtatttctttctacattgaaatatagaagatgtacattgaaatgtgtcaagaagagatgtaggagcaccctcatggagagggatttttagaagttccattgcatggtttcacaagttatgcaatgaccatcctactttcttctagctgtaatatttccaaaactagttacaagaaatgcgaggatgcccattgtcattgatatggtatggtgatgaagagattcacgaaatatgaatgtggagctcattaaacttttgccgcttcagtaggtgcaccggccctctcagcaataatctgctcatagagatctctaatcttcagtcctacgatagtttggaagaga

SEQ ID NO: 402387 - DNA, 523 bp, Oryza sativa nipponbare
  unsure (1)..(523): unsure at all n locations
tttaaacaagctaatttgggaattaattcacaacaccatatttcattgatcaggttcagaacctgcacagaaatacacactaccggtacagatctcaccctctctccaatactcgtacatccatccacgcggtccacacgaatacgtacatctatacggtacacgtacgtacatctactgcaccgngtacacacacgcacactctcctgcagagacgcgcatcgtcgtcaacctagctagcttagctgaaggcgatgcgtcgccatggcagcacggcggcggcggcgctcacttgccggggacgaagttggtggcgtaggcccaggcgttgttgttgacggggtcggcgaggtggtcggcgaggttctcgagggggcccttgccggtgacgatggcctggacgaagaagccgaacatggagaacatggcgaggcggccgttcttgatctccttcaccttgagctccgcgaaggcctccgggtcgtcggcgaggccgagcgggtcgaagctgccgncggggtag

SEQ ID NO: 402388 - DNA, 494 bp, Oryza sativa nipponbare
gggaaacgaataaaatcatgattgcaaaaacatcatcttcttcttcatcttcttagtgtacacaacaccaactcgatcatcatctcgtcgcactaaacccatcttccccaacccaaagacaacgaactcgctggccacaaatccatccaaccacaattaaccactgctaagctacggtcccccacttcacttgccggggacgaagttggtggcgtacgcccaggcgttgttgttgacggggtcggcgaggtggtccgcgaggttctcgagggggcccttgccggtgacgatggcctggacgaagaagccgaacatggagaacatggcgaggcgggcgttcttgatctccttcaccttgagctccgcgaacgcctcggggtcatcggcgaggccgagcgggtcgaaggcgccgcccgggtagagcgggtcgacaacctcgccgagcggtccgccggcgatgcgggacccctggacggcgcccatgagcaccacct

SEQ ID NO: 402389 - DNA, 469 bp, Oryza sativa nipponbare
  unsure (1)..(469): unsure at all n locations
agcaaatcgatccatgcggccatgcgtgcaaatcagttggagcacaaatttacatgttacacccacaccctacacccatgcataataatacatcgtatatacgtacgtacatacatacccctctcgatcacacgcaccatcgatcgtacaaagttgcgtacatacatacgtacacacatatacgcatacgcacgtacatacatacataattaaaaactcgtaattaattaaatacgtagttgatggcatctctaatggaacttgaggctggtgaggatgttgttgtggacgggatcagcgaggtgatcaagcaggttctgcacggggccaaccccggtgaagagcgcctggacagagaagccgaggaaggcgagcatggcgagcctgccattcttgatcntcttgagcttgagctccttcatctccgcctcgctcttggtcccgaagccgagcgggttgaagagcgggc

SEQ ID NO: 402390 - DNA, 373 bp, Oryza sativa nipponbare
agttgcaaacagaggtatggttgtcgtgaatatcacaaagtatgcaaattcacttgaagagaaaagtgccatactacaatttcacatgagcaacccctaaaactcaacgcgtaataacaactacagagcatttcgcaaagagtaaacacggaaaattctcacggcggatatgctccatccagtttacttcaagatcgtattgatgacgccggcaccgacggtctttccaccctcacggatggcaaacctcattccctgctcacaagcgacgggctggatgagctccacaaccatcttgacacggtcaccaggcatgcacatcttcgcctcctcgtccttgtcgttcataaatcttgtgacattccccgtcaca

SEQ ID NO: 402391 - DNA, 362 bp, Oryza sativa nipponbare
ataattaattcacaacaccgtatggcattgatcaggttcagaacctgcacagaaatacacactaccggtacagatctcaccttctctccaatactcgtacatccatccacgcggtccacacgaatacgtacatgtatacggtacacgtacgtacatttactgcaccgtgtacacacacgcacactctcctgcagagacgcgcatggtcgtgaacctagctagcttagctgaaggcgatgcgtcgccatggcagcacggcggcggcggcgctcacttgccggggacgaagttggtggcgtaggcccaggcgttgttgttgacggggtcggcgaggtggtccgcgaggttcttgagggggccct

SEQ ID NO: 402392 - DNA, 372 bp, Oryza sativa nipponbare
aactaagaccagtttgatttggtgtttgatacaaaaattaagatggacggattcacaagagagcaccctctacttaagctttacattacaaggccaaccagcagctgcctgccggccgaccactgcgtgcgcacgcgcgcgcaataatcaaccaatcacacacagtacgcacgcacataaaaaccacccatagccttcacgtacgcccggacgcacgcaccggttcgtgccaagctcaagggtagatggttctcgggatgatgatgtcgccgatgttgttgtgccacgggttcgagaggtggctggccaggttctccagtgggccggtgcccggatacgccgactgttggacgcagaaacccacataagcca

SEQ ID NO: 402393 - DNA, 356 bp, Oryza sativa nipponbare
gctcgctggtggtgctctcgttgatgtgttgcttagtggcaaaacagaaatgcgaatttacctttatatgcaactgtttacaccaaaaggggaaaaaaacgggtaccttgcaaaaaggagtataactttgcagtttcaagtcccacttcaactacaacccaatctgcattacaggatgggagtctaaaacgactgcagtttcagcgtttttgaggcctgcagagacactgggctcgcgttgcagcaaaagattaggcggcggcgcccacggtggcgccggcggtgagcctcgacgagccgtagagagtctcctcgaaccggatgatctcgttcttggaaccgtaggccacttgagt

SEQ ID NO: 402394 - DNA, 345 bp, Oryza sativa nipponbare
ggcaggcaaattacataggattatacggattataaagaagaaaccaccaccattacactaatacacacaaagctcgatcaagcagcttaattaatttcttccacatgtacgacatgcatcctctcctcactccgtgatcaatttaagatgattctttgcagctccagctcgacgacgatccatccgaattaaaatcatttgacctcctggatctcgtccagggcgtagttgttggtcgacacgccggcgtagttcaccttggcgaaccgaaccaccaccgggtagcgagtgttgggatcctgatcaacggtgacgacggagccagtgccgttgtaccagtaggac

SEQ ID NO: 402395 - DNA, 360 bp, Oryza sativa nipponbare
ggctagtataggatttttattccatgatcaggaaaaaaaggtttagtgcaactaaagggtaattagcatttcacggtcgttttacagaagtgattttacatgtatatgagcccggcgaaaattttacatgtatatgagcactatatataggacactctttacatgtatgcataactttgtcccttcatacacctcacttgttcatgaaatcgatgcccttctgaatgctctccatcagctctttctttgccatctccaagccagctctctcaaaatcattcaacggccccagagggagaacctcttcggctccagcacgacctaacctcactttttgtgcaaagaacggcgaactcgtca

SEQ ID NO: 402396 - DNA, 364 bp, Oryza sativa nipponbare
gattcccggtcgacccacgcgtccgcggacgcgtgggcactcctctcctcctcgtctaccttacctagcagcagcagctagctagtttaattagctatagcagccatggcggcgacggcactgagcagccaggtccggttgccgatgtccctgcgggtggcgacggcgccggcgccggcgcgcgtgtcggtgctgccggcgagcaacaagctgggagacaggctgcggatgcaggcgacgtacaacgtgaagctgatcacaccggacggcgaggtggagctgcaggtgccggacgacgtgtacatcctggaccaggcggaggaggaagggatcgacctgccttacttctgccgcgcgggctcct

SEQ ID NO: 402397 - DNA, 468 bp, Oryza sativa nipponbare
ccacgcgtccgcccacgcgtccggttcagcaccgacggcgagatcccctaccgcgaggggcagtctcatcggcgtcatccccgacggcatcgacaagaacggcaagccccacaagctccgcctctactccatcgccagcagcgccatcggggacttcgccgactccaagacggtatcgctgtgcgtgaagaggctggtgtacaccaacgatcagggagagatcgtcaaaggagtctgctccaacttcctctgtgacctgaagcctggttcggacgtgaagatcacggggccagtggggaaggagatgctgatgcccaaggaccccaacgccaccatcatcatgctgggcaccggcaccggcatcgcgcccttcaggtcctaccttgggaagatgttcttcgaggagcacgacgactacaagttcaacggcctggcgtggctttatgttggggtgcccaccagcagcac

SEQ ID NO: 402398 - DNA, 253 bp, Oryza sativa nipponbare
ccacgcgtccgcggacgcgtgggaccaggtggtgcagcccatcaatggcgaccccttcatttggttgtctggagacgccggtgacctccagcccggtggtcgcctggtacctctccaacctcccggcgtaccgcaccgccgtcagcccgctgctccgcggcatcgaggtcggcctcgcccacggctacctactcgtcgggcccttcgcgctcaccggcccgctccgcagcacgccggtgcacggtcaggccgg

SEQ ID NO: 402399 - DNA, 448 bp, Oryza sativa nipponbare
ccacgcgtccgccacgcgtccgccttcatggtcagggcagaggccactccccctgccaagttaggtgctgacaggcagctgtggttcgcatccaagcagtccctgagctacctggatggcacgcttccgggagacttcgggttcgacccgctggggctatcggacccggaggggaccggtgggttcatcgagccacggtggctggcctacggcgaggtgttcaacggccggacggcgatgatgggcgtcgtcggcatggtcgccccggagctcctcggcaagctgggcctcgtccccgccgagacggcgatcccgtggtttcagaccggcgtgatcccccccgcgggcacctacacctactgtgccgacccttacactctcttcgtcttcgagctcgcccttcgcggcttcgccgagcaccgtcgcttccaggactggtacacgccgg

SEQ ID NO: 402400 - DNA, 368 bp, Oryza sativa nipponbare
  unsure (1)..(368): unsure at all n locations
atccagttcgaccacgcgtacggtctccactcacacgcattgcagaggagaggcgacaatggaggggaaggaggaggacgttctgctgggggcgaacaggtactcggagaggcagccgatagggacggcggcgcagggcgccggggacgacaaggactacaaggagccgccgccggcgccgctgttcgagccaggggagctcaagtcgtggtctttttaaccggccgtgatcgccgagttcgtcgncaccttcctcttactctacataaccattctcaccgttatggggggtgtcaagatctcctacaagtgcgccaccgtcggcattaagggcatcgcctggtccttcggaggcatgatcttcgcgc

SEQ ID NO: 402401 - DNA, 392 bp, Oryza sativa nipponbare
ttccggtcgagttagcaaggttggattcgtctaccgtgagaaccacaggtctcccgggtactacgatggcaggtattggtctcatgtggaagctgcccatgttcggctgcaccgatgccacccaggtgctcaaggagctcgaggaggccaagaaggcctaccccgatgcctttgtccgtatcatcggcttcgacaacgtcaggcaggtcagttgattagcttcatcgcctacaagcccccaggttgcgaggagtctggtggcaactaagctaagatcaagcatcgcgctggtggattgctgcctataataatagtatgcagctttgttttgggctatgttgatgatatatcaatatataatatgctatatatttttattttacagtttggtt

SEQ ID NO: 402402 - DNA, 472 bp, Oryza sativa nipponbare
ccacgcgtccgcccacgcgtccggaggagcgtcgcctcaaggatctggtgaagaagcattctgtgtcatcagctaccctatctccctatggactgagaagacaactgagaaggagatttctgatgatgaagacgaggaagagaagaaggatgctgaggagggaaaggttgaggatgttgatgaggagaaggaagagaaagagaagaaaaagaagaagatcaaggaagtctctcacgagtggaacgtgatgaacaagcagaaacccatttggttgaggaagccagaggagatcaccaaggaagagtacgctgctttctacaagagcttgacaaacgactgggaggaacatctggctgtcaagcacttctctgtggagggtcagcttgaattcaaggccatcctgtttgtaccaaagagagcgccatttgacctttttgacaccaggaagaagcataacaacatcaagctgtac

SEQ ID NO: 402403 - DNA, 318 bp, Oryza sativa nipponbare
cgaccacgacccacgcgtccggtacatactctactactactagccagtaagctagctaactaactacgtgtctatgtcccccaccgtgatggccttctcggccacctccgtggctccattccaagggctcaagtccaccgccgggcttcccgtcagccgccgctccaccaactcgggcttcggcaacgtcagcaatggcggaaggatcaagtgcatgcaggtgtggccaattgagggcatcaagaagttcgagaccctatcgtacctgccaccactcaccgtggaggatcttttgaagcagatcgagtacctggttcg

SEQ ID NO: 402404 - DNA, 413 bp, Oryza sativa nipponbare
gcgtcacgcgtccgcaaagaagaaagttcgacttggaagcccagcaaatcattggattttattctataatgctaggagacccatgaaacaaagataccattacaatgtagcagatgccagacttcatcaacacatagagaagggaaatgatgatggattgttcattagctcagtggcatcttcagccaatctttgggcccttattatggacgcgggaactgggttcacatcccaagtttatgaactctcaccaatattttttcataaggattggattatggagcaatgggagaataattactacatcagtgccatagcgggtgcaacaaatggaagttccttggtggtcttgtcaaaaggaacttcttacactcaacaggcttacaaaggtagtgaatcggtttccttcaaat

SEQ ID NO: 402405 - DNA, 352 bp, Oryza sativa nipponbare
ccacgcgtccgcacaccccaccagcagcagcagcagtagctgagcttgaagcagcagagttaggtttacatggccgccgccaccatggccctctcgtccccggcgctggccggcaaggccgccgcgaaggtgttcggcgaggggcgcatcaccatgcgcaagtcggcggcgaagcccaagcccgccgcgtcggggagcccgtggtacggcgccgaccgcgtgctctacctcggcccgctctccggcgagccgccgagctacctgaccggcgagttccccggcgactacgggtgggacaccgcggggctcttcgtcgacccggagacgttcgccaagaaccggtagctggagg

SEQ ID NO: 402406 - DNA, 449 bp, Oryza sativa nipponbare
ccacgcgtccgcccacgcgtccgcccacgcgtccgtgctctagcacctcaccaagcagaatgctagagagctagcaatggcgcccaccgtgatggcctcgtcggccacctccgttgctcccttccaggggctcaaatccaccgccgggctccccgtcagccgccgctccaacagcgccggcctcggcagcgtcagcaacggtggaaggatcagctgtatgcaggtgtggccgattgaaggcatcaagaagtttgagaccctgtcgtacctgccaccgctcacggtcgaggacctcttgaagcagatcgagtacctgctccggtccaaatgggtgccttgcctcgagtttagtaaggtcgggttcgtctaccgtgagaaccacaggtctcctgggtactatgatggcaggtactggaccatgtggaagctgcctatgttcggatgcactg

SEQ ID NO: 402407 - DNA, 374 bp, Oryza sativa nipponbare
ccacgcgtccgcccacgcgtccgcccacgcgtccgagcttgggaagaggaggaggagcttgagcttggagagagacaacaatggcggctcaggctcttctctctgggaggcagctgctggggaggccattgcaatcttcagtctccaggtcttcttcctccaggaaggcacccttcatggtcagggcagaggccactccccctgccaagcaaggtgctgacaggcagctgtggttcgcatccaagcagtccctgagctacctggatggcacgcttccgggagacttcgggttcgacccgctggggctatcggacccggaggggaccggtgggttcatcgagccacggtggctggcctacggcgaggtgttcaac

SEQ ID NO: 402408 - DNA, 511 bp, Oryza sativa nipponbare
ccacgcgtccgggctgttgtatggatgcagaaccaacttgcacagaacaagactcaggatctcatcttgaactacattaatcagctctgtgacaagctcccaagtccaatgggagaatcatctgtggactgtggcagccttgcatccatgcctgagatttcattcaccattggaggcaaaaagtttgcactgaagccagaagagtatattctgaaggttggtgaaggagctgctgcccagtgcatcagtggattcacagccatggacatccctcctccccgtggtcctctctggatcctgggtgacgttttcatgggtgcctaccataccgtgttcgactacggcaagatgagggttggcttcgcgaagtcggccctaacgtgttgttgcacgttcctaatgacgaggtggacgcatacgccgagagaagaagaccgtagcttttaactagcgtatttattccggcgatgtgtgtatatatgcatgctaccataacattggtatgtttcca

SEQ ID NO: 402409 - DNA, 433 bp, Oryza sativa nipponbare
  unsure (1)..(433): unsure at all n locations
ccacgcgtccgcccacgcgtccggctttatgcaagattttggcataaggttctttatgatattggcgtagtttccactaaagagcccttcaagtgcctgataaatcaaggattgattctaggagaagttgaatatactgcatatagagacaataaagggagatgggtttctgcagattccaactcaagtttgattgattgctaccaagaaaaagtacctgcagataaggtcacaaaagttggagatcattatgtactgaaggatgatgcaaacatacgtctaaacgctcgtgcttataaaatgagtaaaagtcgaggaaatgtcatcaacccagatgacgtggtttcagaatatggtgctgattctctccgcttatatgaaatgntcatgggaccactgagagattcataaacatggatcactggtggaattg

SEQ ID NO: 402410 - DNA, 358 bp, Oryza sativa nipponbare
gctcgcgtcaatggcggcgtccaccatggcactctcctcccctgccgccctcgccggcaaggcggtcgccaatgccaaggtgttcggcgagggccgcgtcacgatgcgcaagtcggcggccaagcccaagcccgccgcggcgtcggggagcccgtggtacggcgccgaccgcgtgctctacctcggcccgctctccggcgagccgccgtcctacctcaccggcgagttccccggcgactacggctgggacaccgccgggctgtcggccgacccggaacgttcgcaagaaccgggagctgagggatcactgccgggggcatgctggcgccttggtgcgtttccggagtctcgccgaacg

SEQ ID NO: 402411 - DNA, 427 bp, Oryza sativa nipponbare
  unsure (1)..(427): unsure at all n locations
ccacgcgtccgcacgagctcaaaagacacacattccaaaagcatctgtggccatctcctcctagtcctaggctcgcgtcaatggcggcgtccaccatggcactctcctcccctgccgccctcgccggcaaggcggtcgccaatgccaaggtgttcggcgagggccgcgtcacgatgcgcaagtcggcggccaagcccaagcccgccgcggcgtcggggagcccgtggtacggcgccgaccgcgtgctctacctcggcccgctctccggcgagccgccgtcctacctcaccggcgagttccccggcgactacggctgggacanccgccggctgtcggccgacccggaacgttcgccaagaaccgggagctggagggatccactgccggtgggccatgctgggcgcgcttggctgcgtcttnccggagc

SEQ ID NO: 402412 - DNA, 447 bp, Oryza sativa nipponbare
  unsure (1)..(447): unsure at all n locations
ccacgcgtccgcccacgcgtccgcccacgcgtccgctcctcgtctcgccccgctccaagcgcgccttcatggccaccacctccttgtccctgcatggcgtcccatcccccaccgccaccaagctctcctcctcctttctcggcgcccccgcctccttcctccggccgacgccgccgccgctcgctgccccctcgcggagggcgctcgccgtcagggccatggcgccacccaagcccgggggcaagcccaagaaagtggtgggcctcataaagctggcgctggaggccgggaaggccacgccggcgccgccggtcggccccgcgcttggtgccaagggtgtgaacatcatgtccttctgcaaggagtacaatgccaagacggccgagaaggccngctacatcatccctgtcgagatcaccgtgttcgatgataaaaggttcaccttta

SEQ ID NO: 402413 - DNA, 306 bp, Oryza sativa nipponbare
ccacgcgtccgcggacgcgtgggtccatccatccatcagagatcaggtagaacagtgagagtgtgttgcagaaaaatttgagctgaagctgaggatggcaacatccatgatcacctcgccgctggtggcgccggcccgggccaagggccttccgtccatctcccgccggggatcctccttcgccatcgtctgcagcggtgggaagaagatcaagaccgacaagccctacgggattggaggtggcatgtcagtcgatattgatgcatctggcaggaagagcacgtcgttgggtgtgttccaattcgt

SEQ ID NO: 402414 - DNA, 444 bp, Oryza sativa nipponbare
cgcgtccgcccacgcgtccgccgcgctccaatccaagtacaagtccgcccgcatcatgtacgccgacttctactccggcgtctacgacatggtccgcaaccccggcaactacggatttagcacggtgttcgagacgtgctgcgggtcaggcggcggcaagttcaactacaacaacaacgcgaggtgtgggatgtcaggcgcatcagcgtgctccaacccggcgtcgcatcttagctgggacggcatccacctcaccgaggcagcttacaagcagatcactgacggctggctcaacggcccgtactgtagcccggccatcctccacagctaaggcaaaatgactggaaagaacgagccattagttaatttattactttattattaaaggctggtgttattaattaagcggaattaaattaaaggggaatggttgggttctgattt

SEQ ID NO: 402415 - DNA, 515 bp, Oryza sativa nipponbare
ccacgcgtccgcccacgcgtccgcccacgcgtccgcccacgcgtccgagagatcttttcatcaactcagatgaatctactggaccgggcagtgaagatggttgccgaactggatgagccagaagagatgaactacgtgcgtaagcatgcacaagagcaggcacgggaacttggcgtttcattaagagaggcggcaacaagggtgttctcaaatgcatcaggctcttactcatcgaatgtgaacttggcagtggagaatgcatcatggactgatgagaagcagctccaggacatgtacctgagtcgcaagtcttttgcatttgattgtgatgctccaggggcaggcatgcgagagcaacgcaagacatttgagcttgctctagcaacagcagatgccacattccagaacctagactcatcagagatttcactaacagatgtgagccactattttgactcagacccgacaaagctggtgcaaggacttgcgcaggatgggcgggcacctttctcata

SEQ ID NO: 402416 - DNA, 433 bp, Oryza sativa nipponbare
ccacgcgtccgcccacgcgtccgcgccgagctacctcaccggcgagttcccgggcgactacgggtgggacaccgcggggctctccgccgacccggagacgttcgccaagaaccgggagctggaggtgatccactcccggtgggcgatgctgggcgcgctcggctgcgtcttcccggagctcctcgcccggaacggcgtcaagttcggcgaggccgtgtggttcaaggcgggctcgcagatcttcagcgagggcgggctcgactacctcggcaacccgagcctgatccacgcgcagagcatcctcgccatctgggcggtgcaggtggtgctcatgggcgccgtcgaggggtaccgcatcgccggcggtccgctcggcgaggtcgtcgacctcgtctaccccgtgcgggcctttaacaccgttggtctcgtcgat

SEQ ID NO: 402417 - DNA, 334 bp, Oryza sativa nipponbare
ccacgcgtccgcaagaaagcataagcaacacagggattaactcatcactcacttagctaattaaatcttcgaccatgtcggacaagtgcggcaactgcgactgtgctgacaagagccagtgcgtgaagaaaggtaccagctatggcgtcgtcatagttgaagccgagaagagccacttcgggaggtcgccgccgcgaggagaacggcggtgcagtcggaccagtgtctgcccgactgaaggcgaaggagccaacaccgacactcgcgcggagacctactaatgcacataaccccttgagggtgggggcgttgtataaccggttatatacatgcg

SEQ ID NO: 402418 - DNA, 504 bp, Oryza sativa nipponbare
ccacgcgtccgagaagtttgagaccctgtcgtacctgccaccgctcacggtcgaggacctcttgaagcatatcgagtacctgctccggtccaaatgggtgccttgcctcgagtttagtaaggtcgggttcgtctaccgtgagaaccacaggtctcctgggtactatgatggcaggtactggaccatgtggaagctgcctatgttcggatgcactgatgccacccaggtgctcaaggagctcgaggaggccaagaaggcatatccagatgcatttgttcgcatcatcggcttcgacaacgtcaggcaggtgcagttgattagcttcatcgcctacaagcccccgggttgcgaggagtccggcggaaactaagctagttggcaagccagcaagctcactcgtgagctctatacagaggagactcgattgatcttatcggttttgcagctttgacgttcgatcgggccacctgcatggttccctttccagttgttgtcagttttttt

SEQ ID NO: 402419 - DNA, 500 bp, Oryza sativa nipponbare
ccacgcgtccgcccacgcgtccgcccacgcgtccgcaaagacgccataccaggcttctccttcatatgcaaccccagtcaagaaggagcctgagagccagccatggctcggactagggccgaacgccgtcgtgaagcccatagaacgcggccaatgaggttgcatggaaacttcaccaaagctcttcaaaaatatatgaaatgcgcttgccgttagagtaccaaatcatatatgttctctcataccccatgttttagtgttttttctttagttcgtgcttctatgttgttcacttgtcacatagttctgaatgtaaaggaaaaaggtagtagcattgacgaccagtgccgagagcctgagagaagttttggcatgttaacacatggtgactctgaaaatggccatgctaaggtaaaaagttattgcaaaggaaacatatatgtatcttctggaattctgatcatctggctgtgtccttggctctagccttgctctatgca

SEQ ID NO: 402420 - DNA, 552 bp, Oryza sativa nipponbare
  unsure (1)..(552): unsure at all n locations
ccacgcgtccgcccacgcgtccgcccacgcgtccgcaaagacgccataccaggcttctccttcatatgcaaccccagtcaagaaggagcctgagagccagccatggctcggactagggccgaacgccgtcgtgaagcccatagaacgcggccaatgaggttgcatggaaacttcaccaaagctcttcaaaaatatatgaaatgcgcttgccgttagagtaccaaatcatatatgttctctcataccccatgttttagtgttttttctttagttcgtgcttctatgttgttcacttgtcacatagttctgaatgtaaaggaaaaaggtagtagcattgacgaccagtgccgagagcctgagagaagttttggcatgttaacacatggtgactctgaaaatggccatgctaaggtaaaaagttatggcaaaggaaacatatatgtatcttctgaaattctgatcatctggctttgcctttgctctagccttgctctatgcaaagcaaaggaatgtaatggatcagatataatcatatcccaatggtgatncggg

SEQ ID NO: 402421 - DNA, 503 bp, Oryza sativa nipponbare
ccacgcgtccggacggccgcacccttgccgactacaacatccagaaggaatccaccctccaccttgtgcttaggctcaggggaggtatgcagatcttcgtcaagaccctgactggcaagaccatcacacttgaggtcgagtcctcggacacgatcgacaatgtgaaggccaagatccaggacaaggagggcatccccccggaccagcagcgtctcatcttcgctggcaagcagctggaggacggccgcacccttgccgactacaacatccagaaggagtccaccctccaccttgtgctcaggctcaggggtggtatgcagatcttcgtcaagaccctgaccggcaagaccatcacgcttgaggtcgagtcctcggacacgatcgacaacgtgaaggccaagatccaggacaaggagggtattcccccggaccagcagcgcctcatctttgcctgcaagcagctggaggatggccgcaccttggctgactacaacatccagaag

SEQ ID NO: 402422 - DNA, 407 bp, Oryza sativa nipponbare
ccacgcgtccgcggacgcgtgggcgctcgctcatcgccatctctctcagctctcacagctcactgcatcaatggccgcggccaccatggcgctctcctccccggtgatggcccgcgcggcgccgtcgacctcctccgcgctcttcggcgaggcgcggatcaccatgcgcaagaccgccgcgaagcccaagccggcggcgtcgtcggggagcccgtggtacggcgccgaccgcgtcctctacctcggcccgctctccggcgagccgccgagctacctcaccggcgagttcccgggcgactacgggtgggacaccgcggggctctccgccgacccggagacgttcgccaagaaccgggagctggaggtgatccactcccggtgggcgatgctgggcgcgctcggctgcg

SEQ ID NO: 402423 - DNA, 392 bp, Oryza sativa nipponbare
  unsure (1)..(392): unsure at all n locations
ccacgcgtccgcagctgcaaggagaaggagaaggtaggctccagccatggcttcccagctcttcttctccacatccgngccgcagttccatggcctccggacctactcctctcctaggtccatggtgacgctgccatcgttgaggatgagcaagaagaggtcccagggcatccggtgcgactacatcggctcagccaccaacgttatcatggtgacgacgacgacgctgatgctgttcgcggggaggttcgggctggcgccgtctgcgaacaggaagtcgacggcggtgctgaagctggaggcgcgcgactccggcctgcataccggcgaccccgccgggttcacgctcgccgacacgctggcctgcggcgccgtcggccacatcatgggcg

SEQ ID NO: 402424 - DNA, 415 bp, Oryza sativa nipponbare
  unsure (1)..(415): unsure at all n locations
ccacgcgtncgcccacgcgtccgcacgtattacgtgcgaaaaaaaaaatcatcagcacattatcttggaggctttatctgaacaagggagatggcggactacgtgtatgggccggggcggaaccacctgttcgtgcctgggccggtgaacatcccggaccaggtgatccgcgccatgagccgtcagaacgaggactaccgctcgccggcggtgcccgccctcaccaagaccctcctcgaggacgtcaagcagatcttcaagaccaccaccggcacccccttccttttccccaccaccgggacgggggcgtgggagagcgcgctgacnaacacgctgtcgccgggggacaagatcgtgtcgttcctgatcgggcagttcatcctgctgtggatcgaccagcagcaacgccttaact

SEQ ID NO: 402425 - DNA, 469 bp, Oryza sativa nipponbare
ccacgcgtccgcggacgcgtgggtatttctcgacgttttccttctttctgggaggagttgttccatactctctttcgtttcacaatataagttattctagcatttctcacattcatattgatgttaatgaatctacacatatatatctatttagattcattaacatcaatataaatgtgaaaaatgctaaaatgacttatattgtaaagcgaaggaagttacatgaaaattcagcatccaacatcgatggcgcaccagtcaccattcatttccgggtgattttttccgtccggaattagggtgggacagggaggaagagatatgaaggtaatggtctgatagtaaccggaggggctgaacaatctatctatagttggcatttgcaatttgtgcactggtgggcggctgtgtattacgtgcatggccgtacataacatggttcgtgtccacatcttatcatttattatgc

SEQ ID NO: 402426 - DNA, 414 bp, Oryza sativa nipponbare
ccacgcgtccggaagcaaactattgccacaattggagagaacatgaaggtcaacagatttgtccggtacaatctcggtgaagggttggagaagagaagccaggattttgctgctgaagttgccgcccagacagccgcgaaggcaccgccagctgctcctccaaaggatgataagcctgaggaaacagcagaaactgaagagaagaaaccagctgtggcaatttcagctgcattggtaaagcaactccgagacgaaactggtgctggtatgatggactgcaagaaagcactagctgagacaggcggcgacattcagcaggctcaggagttcctcaggaagaagggcctgtcatctgcagacaagaagtcctctcgcctaaccgccgaaggcctaattggcgcctacatccatgac

SEQ ID NO: 402427 - DNA, 162 bp, Oryza sativa nipponbare
tccgaatcccggtcgaccacgcgtccgcttgcacacgcgcagctcgagccatggccggagtgagcaccagcgtcgtcggcttcaatcctgccgcggcggtgccgcaattggccgtcttgtcggtgcctaagcgcgtgcacgtctctgtacctcccaaggagg

SEQ ID NO: 402428 - DNA, 144 bp, Oryza sativa nipponbare
gtccgcttgcacacgcgcagctcgagccatggccggagtgagcaccagcgtcgtcggcctcatgcccgccgcggcggtgccgcaatcggccgcctcgccggtgccgaagcgcgtgcacgtcgctgtgccgccctaggaggagca

SEQ ID NO: 402429 - DNA, 433 bp, Oryza sativa nipponbare
ccacgcgtccgatggccgccgccaccatggccctctcgtccccggcgctggccggcaaggccgctgcgtttgtgttcggcgaggggcgcatcaccatgcgcaagtcggcggcgaagcccaagcccgccgcgtcggggagcccgtggtacggcgccgaccgcgtgctctacctcggcccgctctccggcgagccgccgagctacctgaccggcgagttccccggcgactacgggtgggacaccgcggggctctccgccgacccggagacgttcgccaagaaccgggagctggaggtgatccactccaggtgggcgatgctcggcgcgctgggctgcgtgttcccggagctcctcgcccgcaacggcgtcaagttcggcgaggcggtgtggttcaaggcggggtcgcagatccttagcgagggcgggctcgacta

SEQ ID NO: 402430 - DNA, 320 bp, Oryza sativa nipponbare
ccacgcgtccgcccacgcgtccgcttgtgactacacccgcttcgcttcctcccctctctttctcttgaagctaagccatggcgtccgtcaccgcccgcaccccggtcgcagccctccgctcgtcggcgtcgctcaagtctaccttcctagggcaatcctccacccgcctcgcccgcgcaccgactacgaggcgtaatgttcgggcggaggccaagggagagtggctccccggcctccctttttccacctacctcaacggcagtttgtcaggcgataacgggttcgacccgatgggtctggcggaggacccggagaacctg

SEQ ID NO: 402431 - DNA, 383 bp, Oryza sativa nipponbare
ccacgcgtccggcgctcagcgaggtgtcctcctccggcgccgccgagtcgctcctcgtcggctcttagtggtccgtcgtggacgccgactccgactcctacgatgcagtgcaggttgagctggggtgcaccaaggggagcgggacgctggaggtgacgtacgtggtgacgctgtacccgctgagcatggcgacggcggtgatggtgaagaacaacggcaagaagccggtgtcgctgacgagcgcgatgctgagccacatcaagttcgacaagcggcggggcacggcggtggaggggctccggggatgcccctactgctcccacccgccgccggccgtcggcttcgcgctcctcaccccggcggaggccatgaagcgggaggac

SEQ ID NO: 402432 - DNA, 231 bp, Oryza sativa nipponbare
  unsure (1)..(231): unsure at all n locations
ccacgcgtccgcggacgcgtgggcagcaatggccgccctcgccgncgcatccaccgccttcgccttcatttccgcctggcgcgcgcgccgtcgtccccggccgcgcggttctccgtgtcgtgctccgcgtcgggcaacaacggcggcgccggcgagatggcgcagtcgctggcggcgtcggccaagacgttcttcgcggcgctggcgctgtcctcggtgctgctcttctcg

SEQ ID NO: 402433 - DNA, 433 bp, Oryza sativa nipponbare
ccacgcgtccgttcatccctgcctgtcagaaatttcagagggtgatgctgcagatagggttagcttcttgacagatgccactgttgacagcttgattgagtctatcatcattaaagatggggtgaaagccaagtttttctttaacattctgtctcttgctaactctgcaggagagaagttgcttgccttcagtcaatatatacttcccatgaaatttttggaaagggtgttggttaagaggctgggctggcatgtagggaaggagattttcatgatatctggtgatactagggccaaccacagagaagtggcgatggatcagtttaacaactctggcgatgcaaaagttttgtttggtttcattcaggcccggggagagggaatctcccttggtggtgcatttcgaggcatcattctagatgttcatttgaac

SEQ ID NO: 402434 - DNA, 516 bp, Oryza sativa nipponbare
ccacgcgtccgcccacgcgtccgcacaagaaagcataagcaacacaggggattaactcatcacttacttagctaattaaatcttcgaccatgtcggacaagtgcggcaactgcgactgtgctgacaagagccagtgcgtgaagaaaggtaccagctatggcgtcgtcatagttgaagccgagaagagccacttcgaggaggtcgccgccggcgaggagaacggcggctgcaagtgcggcaccagctgctcctgcaccgactgcaagtgcggcaagtgaagtcacgaagcaaccgaacactcgccgccggcgagtcacctaccttaattagtccacaataaaaaccacccatatgagtgtggtttgtgtgtgtgctgattattgctgaattaaacccgtgtgttatcgattaattaagcagctggtcgcttcggcgactatgcgtgtatcaacgtatgaatttgtgtgatgtgatgtacccgtgctattctcagtgaaattaatcaatcgtgtattc

SEQ ID NO: 402435 - DNA, 439 bp, Oryza sativa nipponbare
ccacgcgtccgatcatcggcttcgacaacgtcaggcaggtgcagttgattagcttcatcgcctacaagctttcgggttgcgaggagtccggcggaaactaagctagttggcaagccagcaagctcactcgtgagctctatacagaggagactcgattgatctattcggttttggcagctttgaacgttcgaatcgggccaccttgcattggtttcccctttcccagtttgttgcttcagtttttttttttcatcttgtttgtgtcaacatcagctgtgtatgtatgtacatatgtatgtatcaacataggttgaagagcatgcatatgtgaatgctagcaccaggctaatcatatgcacatacacatcgtaataaatatattgtacaaatcgtcaaaaacgatacttatatgtaatactatactcagaccaaacttgat

SEQ ID NO: 402436 - DNA, 441 bp, Oryza sativa nipponbare
ccacgcgtccggcagtcctttggatgtttcctaactcctggaatgaatattcggctagttggagaggccttcgattatgtgggaaagggtatggctggtggagagctggttgtagttcctgtagaaaaaacaggatttgttcctgaggatgctgctatagttggtaacacttgtctgtatggagctactggtggtcaggtatttgtgagaggcaaaacaggtgaaagatttgcagttagaaactcccttggtcaagcagtggttgagggcactggagatcattgctgcgagtacatgactggtggctgtgtagttgtacttggcaaagttgggaggaatgttgcaactggaatgacgggtggccttgcctatattttagatgaggatgatacactcgtcccaaaggttaacaaggagattgtgaagatgcagagagtgaat

SEQ ID NO: 402437 - DNA, 75 bp, Oryza sativa nipponbare
ccacgcgtccgcccacgcgtccgcccacgcgtccgtaaaaaaaaaaaaataataaaaaaaaaatttttttttttt

SEQ ID NO: 402438 - DNA, 79 bp, Oryza sativa nipponbare
ccacgcgtccgcccacgcgtccgcccacgcgtccgataaaaaaaaaaaaaaaaaaaaaaaaaatttttttttttataat

SEQ ID NO: 402439 - DNA, 470 bp, Oryza sativa nipponbare
gcgtccgcacgatacaacccacacggacacggccacaccacccaccaactgagagctgagtttgctagcgagcggacatggcagcatcgctccaagccgcggccaccctgatgcagccggccaagctcggcggccgggcctcctccgccgcgctgccatcgcgcccgtcttcgcacgtcgccagggcgttcggcgtcgacaccggtgccgccggcaggatcacgtgctccctgcagtccgacatccgggaggtcgccaacaagtgcgccgatgccgccaagctcgccggcttcgccctcgccacctcagctctgctcgtctcgggcgccagcgcggagggcgtgccgaggaggcttaccttcgacgagattcagagtaagacgtacatggaggtgaagggaaccggcacggcgaaccagtgcccgacggtggagggcggcgtcgactccttcgccttcaaggccggcaag

SEQ ID NO: 402440 - DNA, 422 bp, Oryza sativa nipponbare
ccacgcgtccgataaattgcaagcacatgatggttacattctgaagtgtctgttttccccagagttctgtgaccccaacaggtaccttgcaacagcctcatctgaccacactgtgaagatttggaatgttgatggcttcaaattggaaaaaactttagtaggtcaccagcgttgggtttgggactgcgtattctcagtagatggtgcttatttgataactgcttcctctgacactacggcgagattgtggacgatgtcaaccggagaggcaatcagggtttacacgttccatcacataccagttgtctgctgtgctcttcatgacggagctgaatcagcaccatcataagcagccccgtgcctcaggcattttgtacatactccagtttgaaaacatgtgaagctctgaaaaatttcagcac

SEQ ID NO: 402441 - DNA, 394 bp, Oryza sativa nipponbare
ccacgcgtccgcccacgcgtccgcggctatctatccatctatctactcagctttgcgtcctcccgttaattcaccgcagcaatggcgtccctcgtcgccgtccagcctgtcgccgtgaagggcctcgccggcagctccatctccggcaggaagctcgccgtcaggccgtcgccccgggcgctctgccgcaccacccgcaggccgcgcgccgccgtggtggccaagtacggcgagaagagcgtctacttcgacctcgaggacatcggcaacaccaccgggcagtgggacctgtacggctccgacgcgccgtcgccgtacaaccctctccagagcaagttcttcgagacgttcgcggggcccttcaccaagagggggctcctgctcatgttcctgc

SEQ ID NO: 402442 - DNA, 431 bp, Oryza sativa nipponbare
  unsure (1)..(431): unsure at all n locations
ccacgcgtccgcttagcgaatccagcagcagaagcagcagcagcagctcagccgccgccgatggcgtccacgatcatggccccaacctcccgcgtcctcgccgccaagacccccttcctcggccatccccgcccctccaatgcccccgtccgcgacatcgccgccgccgccaccggccgcatcaccatgagcaaggagctgtggtacgggccggatagggtgaagtacctggggccattctcggcgcagacgccgtcgtacctgaggggcgagttcccgggcgactacgggtgggacacggcggggctctccgcggacccggaggcgttcgcgaggaacagggcgctggaggtgatccacggccggtgggcgatgctcggcgcgctgggctgcatcacgcccgaggtgctcgagaagtgngtgcgcgtcga

SEQ ID NO: 402443 - DNA, 462 bp, Oryza sativa nipponbare
ccacgcgtccgcccacgcgtccgcccagagcaagaagctcagctcctcctcctctcgcatggcattcatggccaccaccgcgtccagcctcctcaagacctccttcgctggcgcgcgcctccccgccgccgcccgcaaccccaccgtctccgtcgcgccgcgcaccggcggcgccatctgcaactccatctcgtcgtcgtcgtccactcccccctacgacctcaacgccatcaggttcagccccatcaaggagtccatcgtgtctcgcgagatgacccggcggtacatgaccgacatgatcacctacgccgacaccgacgtcgtcgtcgtcggcgccggctccgcggggctctcctgcgcgtacgagctctccaaggacccctccgtcagcgtcgccgtcatcgagcagtcggtgtcccccggcggcggcgcgtggctcggcgggcagctgttctccgccca

SEQ ID NO: 402444 - DNA, 419 bp, Oryza sativa nipponbare
ccacgcgtccgcgctcatcgccatctctctcagctctcacagctcactgcatcaatggccgcggtcaccatggcgctctcctccccggtgatggcccgcgcggcgccgtcgacctcctccgcgctcttcggcgaggcgcggatcaccatgcgcaagaccgccgcgaagcccaagccggcggcgtcgtcggggagcccgtggtacggcgccgaccgcgtcctctacctcggcccgctctccggcgagccgccgagctacctcaccggcgagttcccgggcgactacgggtgggacaccgcggggctctccgccgacccggagacgttcgccaagaaccgggagctggaggtgatccactcccggtgggcgatgctgggcgcgctcggctgcgtcttcccggagctcctcgcccggaaacg

SEQ ID NO: 402445 - DNA, 458 bp, Oryza sativa nipponbare
ccacgcgtccgcccacgcgtccgcccacgcgtccgcccacgcgtccgcccacgcgtccgccatggcgctcttctccccggtgatggcccgcgcggcgccgtcgacctcctccgcgctcttcggcgaggcgcggatcaccatgcgcaagaccgccgcgaagcccaagccggcggcgtcgtcggggagcccgtggtacggcgccgaccgcgtcctctacctcggcccgctctccggcgagccgccgagctacctcaccggcgagttcccgggcgactacgggtgggacaccgcggggctctccgccgacccggagacgttcgccaagaaccgggagctggaggtgatccactcccggtgggcgatgctgggcgcgctcggctgcgtcttcccggagctcctcgcccggaacggcgtcaagttcggcgaggccctgtggttcaaggcgggctcgcagatct

SEQ ID NO: 402446 - DNA, 309 bp, Oryza sativa nipponbare
gcgggtcgaatcgaaagggaaccatgaccacaactcactcctacttgtttaccagaggttgctggacgcgtcgcaccgtgacctgaggagggcccgggcggcggcgctgaacatcgtgccgacgagcaccggcgccgcgaaggccgtggcgctggtgctcccgcagctgaaggggaagctcaacggcatcgcgctgcgcgtgccgaccccgaacgtgtccgtggtggacctggtgatcaacaccgtgaagaccggcatcaccgtcgacgacgtgaacgccgcgttccgcaaggccgcggcggtgccact

SEQ ID NO: 402447 - DNA, 158 bp, Oryza sativa nipponbare
tacggtccggattccgggtcgacccacgcgtccgcccacgcgtccgcggacgcgtgggtccacttcgagcggcggcgcgcgtgccgttccgatggctatggtcccctcgggctcgggcggtgggccgccggtgattgcggaggtggagatgaacggcg

SEQ ID NO: 402448 - DNA, 492 bp, Oryza sativa nipponbare
  unsure (1)..(492): unsure at all n locations
ccacgcgtccgccaaactgcggccccgaggccgtctggttcaagaccggcgccctcctcctggacggcaacaccctcaactacttcggcaacagcatccccatcaacctcatcgtcgccgtcgccgccgaggtcgtcctcgtcggcggcgccgagtactaccggatcatcaacggcctggatctggaggacaagctccacccaggtggcccattcgacccgctggggctggcgagcgacccggaccaggcggcgctgctgaaggtgaaggagatcaagaacgggcggctggccatgttctccatgctggggttcttcatccaggcctacgtcaccggcgagggccccgtcgagaacctctccaagcacctcagcgaccccttcggcaacaacctgctcaccgtcatctccggcgccgtcgagaggacgcccagcctgtaaacatctcgccgtcggcgacgctggctggcctcaagttaattntaatcttacc

SEQ ID NO: 402449 - DNA, 473 bp, Oryza sativa nipponbare
ccacgcgtccgatgacgcaaacattccatccacctctgccattgataccaccatcacagatcggatctttatggacttcagtgtctgccctagctactttcgctctgaccgcactttaggagctgagcttgctacatgtcctgattctgaacctcttggtcgtgtaatttttggtttgtatggtcgactcctccccctcactactgccaacttcaaagctgcttgcacttctgctgcataccggggaacacttgtccacaagctccttcagggccagttcttcgttgctggccgccaaggtcctcggcgtgacaggggcgaggtccaacctcccaccggacttgtgaggaatgctgagactattgaccctaaagcatttgaactaaagcatgcaaggcctggcaccctctcattgtgccttggacagaacgatgacgatgatgacatcaagctcaatcctaattatcacaatg

SEQ ID NO: 402450 - DNA, 517 bp, Oryza sativa nipponbare
  unsure (1)..(517): unsure at all n locations
ccacgcgtccgcggacgcgtgggctggaccatgtggaagctgcctatgttcggatgcactgatgtcacccaggtgctcaaggagctcgaggaggccaagaaggcatatccagatgcatttgttcgcatcatcggcttcgacaacgtcaggcaggtgcagttgattagcttcatcgcctacaagcccccgggttgcgaggagtccggcggaaactaagctagttggcaagccagcaagctcactcgggagctctatccaaaggagactcgattgatctattcggttntggcagctttgaacgttcgaatcgggccaccttgcattggtttcccctttcccagtttgttgcttcagtttttttttttcatcttgtttgtgtcaacatcagctgtgtatgtatgtacatatgtatgtatcaacataggttgaagagcttgcatatgtgaatgctagcaccaggctaatcatatgcacatacacatcgtaatatatatattgtacaattcgccaaaaacga

SEQ ID NO: 402451 - DNA, 491 bp, Oryza sativa nipponbare
ccacgcgtccgcccacgcgtccggagcaaagaaggagagagcttggtgagctgcagagatggcctctctccgtgatggcgtcgtcggccaccaccggcgctcccttccaggggctcaagtccaccgccggcatgcccgtcgcccgccgctccggcaactccagcttcggcaacgtcagcaatggcggcaggatcaggtgcatgcaggtgtggccgattgagggcatcaagaagttcgagaccctctcctacctgccaccgctcaccgtggaggacctcctgaagcagatcgagtacctgctccgttccaagtgggtgccctgcctcgagttcagcaaggtcggattcgtctaccgtgagaaccacagatcccccggatactacgatggcaggtactggaccatgtggaagctgcccatgttcgggtgcactgacgccacccaggtgctcaaggagctcgaggaggccaagaaggcgtaccctgatgcattc

SEQ ID NO: 402452 - DNA, 534 bp, Oryza sativa nipponbare
  unsure (1)..(534): unsure at all n locations
ccacgcgtccgcagaggccaagctctcatcatcggctgctgttgctgtttctcgtgcggcggcggaggaagtcgacagggactacctatcctacgacgagcccaccacggtgttccccgaggaggcgtgcgacgatctgggcggagagttctgcaaggccacctgatcccattcccatccatggagaattggagtcttctatcatccttcctcctctgctccactaccttaattccatgtagctacagatttatatgttaatcatcatgtaatggtacatatctccttgttaataaggcacgctagtctagctcctcaaaatgatttacaataatataatatttacatacatataatacacttactccatcgaacaatacctctgttatctcatggttacttcccatgatcccatcatcaacaccaacattcatcacactttgctgcgttagagcaggtacaatggcaggctataagccagctacaaacatnatttacgaagatanatcaggagagagaagagccacgggcttc

SEQ ID NO: 402453 - DNA, 523 bp, Oryza sativa nipponbare
ccacgcgtccgcaggacagacaaacagatcaccgatcgatcacgcgtccaccgccgcgccacccgctcggtcaccccaccatggccgccaccacctgccgcctcgccgccgcgccgctcgtcctcgcaccgctgcctcgccgccccaccacggtcgcctttgccgtcgccgccaccggcatcaagtacggtctcagggcgtcgaggggcgtggcgatcagggcggccgacggcaccggcagcgagacggaggtgccggaggtcgtcaaggcagcccaggacgcgtgggccaaagttgaggacaagtacgccgtcaccgccatcggcgtcgccgcgctcgtcggcctctggactgccataggcgccatcaaggccatcgacaggcttccacttttgcccggcgtgcttgagctcgttggaatcgggtataccagggggtttacataccggaacctcattcttcagccagacagggaagctctggtgagcaaaatcaagagcaccctacatgaaatcaccgggag

SEQ ID NO: 402454 - DNA, 361 bp, Oryza sativa nipponbare
  unsure (1)..(361): unsure at all n locations
ctgcagagatggccccctccgtgatggcgtcgtcggccaccaccgtcgctcccttccaggggctcaagtccaccgccggcatgcccgtcgcccgccgctccggcaactccagcttcggcaacgtcagcaatggcggcaggatcaggtgcatgcaggtgtggccgattgagggcatcaagaagttcgagaccctctcctacctgccaccgctcaccgtggaggacctcctgaagcagatcgagtacctgctccgttccaagtgggtgccctgcctcgagttcagcaaggtcggattcgtctaccgtgagaaccacagatccnccggatactacgatggcaggtactggaccatgtggaagct

SEQ ID NO: 402455 - DNA, 311 bp, Oryza sativa nipponbare
gaattcccggtcgacccacgcgtccgctcgagcaaagaaggagagagcttggtgagctgcagagatggccccctccgtgatggcgtcgtcggccaccaccgtcgctcccttccaggggctcaagtccaccgccggcatgcccgtcgcccgccgctccggcaactccagcttcggcaacgtcagcaatggcggcaggatcaggtgcatgcaggtgtggccgattgagggcatcaagaagttcgagaccctctcctacctgccaccgctcaccgtggaggacctcctgaagcagatcgagtacctgctccgtt

SEQ ID NO: 402456 - DNA, 523 bp, Oryza sativa nipponbare
ccacgcgtccgcccacgcgtccgcggacgcgtgggctatcatattcttctcgttctgaggacattcaaaacatcgaatctcttattatggatctaccgacactacggattgccacagataactttgctgaaaacaacaaactaggtgaaggaggatttggtgaagtttacaagggatcctttcccggtggccaaaccatagctgtgaaaaggctctctcagagttctggacaaggcataggagagcttaaaaatgaactggttttaattgccaagctccagcacaagaatctcgtgaggctcgttggagtttgtttggaacaagaagagaagctacttgtctatgaatacatgcctaacaaaagtttagacacatttcttgttgaccctgagaaacgcatacaaatcgattgggcaaagaggttcatgataataaaaggaatcactggaggattgcaatatctgcatgaagattctcaattgaagataattcaccgtgatctaaaagcaagcaactgtctact

SEQ ID NO: 402457 - DNA, 484 bp, Oryza sativa nipponbare
ccacgcgtccgaggagcttgagcttggagagagacaacaatggcggctcaggctcttctctctgttatgcagctgctggggaggccattgcaatcttcagtctccaggtcttcttcctccaggaaggcacccttcatggtcagggcagaggccactccccctgccaagcaaggtgctgacaggcagctgtggttcgcatccaagcagtccctgagctacctggatggcacgcttccgggagacttcgggttcgacccgctggggctatcggacccggaggggaccggtgggttcatcgagccacggtggctggcctacggcgaggtgttcaacggccggacggcgatgatgggcgtcttcggcatggtcgccccggagctcctcggcaagctgagcctcgtccccgtcgagacggcgatcccgtggttccagaccggcgtgatcctccccgcgggcacctacacctactgggccgacccttaca

SEQ ID NO: 402458 - DNA, 429 bp, Oryza sativa nipponbare
  unsure (1)..(429): unsure at all n locations
ccacgcgtccgcggacgcgtgggaagtactcgagcaaagaaggagagagcttggtgagctgcatatatggccccctccgtgatggcgtcgtcggccaccaccgtcgctcccttccaggggctcaagtccaccgccggcatgcccgtcgcccgccgctccggcaactccagcttcggcaacgtcagcaatggcggcaggatcaggtgcatgcaggtgtggccgattgagggcatcaagaagttcgagaccctctcctacctgccaccgctcaccgtggaggacctcctgaagcagatcgagtacctgctccgntccaagtgggtgccctgcctcgagttcagcaaggtcggattcntctaccgggagaaccacagatccctcggatactacgatggcaggtactggaccatgtggaagctgcccatgttc

SEQ ID NO: 402459 - DNA, 493 bp, Oryza sativa nipponbare
ccacgcgtccggacggcggccggcgtgccggggacgacgcaggggcagcaggtgccgtataccatctcgtgctacatccccgcaggcgcggtttcgcggcgagctgacgccgccgtgcgtcggcttgtttggcttggagtgttgctttgcctggtgactttagtccgcaagtagatggctgcgtaggtacactccctccgtccaaaaaaaaagacaaacccgggttgccgtgtctaacgtttgaccgtccgtcttatttgaaaaaattatgaaaaaaattaaaaagacaagtcacgcataaaatattaatcatgttttatcatctaacaacaatgaaaatacgaattataaaaaaatttcatatgagacggacagtcaaagttggacacgaaaattcagggtttgcctatttttctgagacgaagggagtatacgtactaaggacccgatacctgctaagagggaaagacacgtactccacatacttttgtga

SEQ ID NO: 402460 - DNA, 409 bp, Oryza sativa nipponbare
ccacgcgtccgcctttctgaacacagcaccaccccttctgctgcatctcccacctccctctgaattgtgggcctgaggcgatggcggcgctcgccccgtccaagatgctcggcacccggctcaacttcgccggctcctcccgctacgccaccgcggcaccgaccaccggagcgcagaagatcgtctccctcttcagcaagaagcccgccccgaagcccaagcccgccgccgtcacctcctcgagccccgacatcggcgatgagctcgccaagtggtacggccctgacaggaggatcttcttgccggagggtctcctggaccgctcagaggtgccggactacctcaaacgggagggtccccggagactacggctacgacccttttggcctcagcaagaagcccagaggac

SEQ ID NO: 402461 - DNA, 435 bp, Oryza sativa nipponbare
ccacgcgtccgcccacgcgtccgcccacgcgtccgcccacgcgtccgcttgtagattgctaatgcgttctactacaacccttctttgacacttgcaaccctacataaacttggggctgtgactgaaatttttaacatttggtttggtatgttagaacaagtcaaaaagagtggtgtacgagccaattttaagagagagcatgataagaaagtttgttgcttggggttgacctcacttattagccttccagcagatcatattccaggagaagccctgaatcgtattttcaaagcaacacttgatctgcttgttgcctacaaagagcaagtggcagaatctaagaaacaagatgatgctgatggtgatgatattggatggtttgatgctgatgaagatgaagatgattgataggttgaatctgataaggagatggga

SEQ ID NO: 402462 - DNA, 411 bp, Oryza sativa nipponbare
  unsure (1)..(411): unsure at all n locations
ccacgcgtacggacacacgtacgtgcgagcggtccaacgaagaaattggcacagaaatggctatgaggctgagggctagctcagctgccaatgccctcaagatctcatgcagtggagccaccagggctgcacctgcctactcaatctccagatacttctccactggtatagctagcttgagtagtagaattcatatcaaataaattttctgttgccttttgcaacaaagcatgtggttgttacaatgttctggttcctgtacagtcttgcattgtgccatgctatccttgcacccagttataaattgcttgggcttccttttttcttttctttcttttntacattctatatgggtacattgactggtccatgctgtagttatacaccggagacatactaaatgattgaaaa

SEQ ID NO: 402463 - DNA, 486 bp, Oryza sativa nipponbare
ccacgcgtccggggtcacactctgggaagggcacatcctgaaaggtctggatttgaaggcgcatgtactcaggagcctctgaagtttgacaattcgtactttcttgagctactgaagggggaatctgaggggcttctgaagctcccaactgacaaggcattgttggaagatccttcatttagacgctatgtggatctttatgccagggatgaagacaccttcttcaaggactacgctgaatcgcacaagaagctttctgaacttggcttcactccacggagcagcggccctgcatctacgaaatctgatctttcaactggtgctgtactcgcacagagtgctgtcggggaagctgttgctgcagctgtagttatcgtgagctacctatacgaggcttctaagaagagcaagtaagattgctatgttcttcatcagcatggcctcatagtaagtatcagggtcaaataacagaattctagtgatgat

SEQ ID NO: 402464 - DNA, 490 bp, Oryza sativa nipponbare
  unsure (1)..(490): unsure at all n locations
ccacgcgtccgcgtgactctgctctagcacctcaccaagcagaaagctagagagctagcaatggctctccaccgtgatggcctcgtcggccacctccgttgctcccttccaggggctcaaatccaccgccgggctccccgtcagccgccgctccaacagcgccggcctcggcagcgtcagcaacggtggaaggatcagctgtatgcaggtgtggccgattgaaggcatcaagaagtttgagaccctgtcgtacctgccaccgctcacggtcgaggacctcttgaagcagatcgagtacctgctccggtccaaatgggtgccttgcctcgagtttagtaaggtcgggttcgtctaccgtgagaaccacaggtctcctgggtactatgatggcaggtactggaccatgtggaagctgcctatgttcggatgcactgatgccacccaggtgctcaaggagctcgaggaggccaagaaggcatatncagatgca

SEQ ID NO: 402465 - DNA, 385 bp, Oryza sativa nipponbare
ccacgcgtccggtgactacacgcgattagcttgctgcgctctctaagccggggaagctaatccatggcgtacgacaccgcccgcacccaggccgcagccctccgctcgtcagagcggctcaagcctaccttgctagggcaatcctgcacccgactaggccgcgcaccgactaccaggcggaacgttcgggcggaggccaaagaagagtggctccccggcctgccttgtgccacctacctaaacggcagcttgccaggcgataacgggttcgacccgttgggtctggcggaggacccggagaacctgcggtggttcgtgcaggcagagctggtgaacgggcggtgggcgatgcctggggtggccgggatgctgctgcctgaggtgc

SEQ ID NO: 402466 - DNA, 325 bp, Oryza sativa nipponbare
gtgtatatagaccgggggttggtttttacatatcctcacccaacgataattgtagtactcttacaataaaaccggccggagagggagggaagagattattacatatgtgttaagagcagaggccattgatatggtacataaccaaactgttaaataaaaatatttagcatattatatattgatttatcatcaacatagcccaaaacaaagctgcatactattattataggctgcaatctaccagcgcgatgcttgattttagcttagttgccactagacttcttgcaacctggggtcttgtatgtatttgaaagttaatcaactg

SEQ ID NO: 402467 - DNA, 498 bp, Oryza sativa nipponbare
gggaaaccactttatagtcgacgaatcgtcagtataatatctacatgcatctcatcagatgagatcagatcgagtacaacaagatggcgtatgcaggttgcgcatgcatgcatgaaaatcgagataaaaagggattaattaattattaacatatatatatccatcagtagacttccacattccattgctccgacttcttcagctgcttcttgtagtcaagccagtcgatgccgtcttttgcagcgaggtcgatcatgatgtcgtcgatgcctttctccatgcccttgaggccgcacatgtagacgtaggtgttgtccttcttgagcagctcccacagctcgtccttgtactccgccatccgcgtctggatgtacatcttctcccccgccgcgttcgtttgttcccggttaaccgggaagtccagccggaacctttccggcgcgatctcctttatccgctcgaactcctccctgtacagcaacgggctgctggtgggca

SEQ ID NO: 402468 - DNA, 346 bp, Oryza sativa nipponbare
aagaaaggaacactcccaagttacaacagcacaccatccatatatccatgcaggcagcctgtttgtgcccttgtgcagatgcatttcatttatacaagtagaaggcactcaaatcagccaccacatgaacacacacatgttccatcatcgatcgatctacacatgcatcacccggtcatgcacttacaaacaaaagatctacttgaagaagtacgggaggtcgagcacgtagaggaggaagtaggcccagaggacgccggagatgccgccgaagaagaagccgccggtgaacttggcccagccgtcggcggtctgcagcttgtcggccttcttcttgcggccggtg

SEQ ID NO: 402469 - DNA, 509 bp, Oryza sativa nipponbare
ttagcaaatcgatccatgcgaccatgcgtgcaaatcagttggagcacaaatttacatgttacacccacaccctacacccatgcataataatacatcgtatatacgtacgtacatacatacccctctcgatcacacgcaccatcgatcgtacaaagttgcgtacatacatacgtacacacatatacgcatacgcacgtacatacatacataattaaaaactcgtaattaattaaatacgtagttgatggcatctctaatggaacttgaggctggtgaggatgttgttgtggacgggatcagcgaggtgatcaagcaggttctgcacggggccaaccccggtgaagagcgcctggacggagaagccgaggaaggcgagcatggcgagcctgccattcttggtctcttggggctgagctcctttatctccgcctcgctcttggtcccgaagccgagcggtttgaagagcgggccgtcggggtaggccggctcgccggagccggcgaggtact

SEQ ID NO: 402470 - DNA, 522 bp, Oryza sativa nipponbare
ccagcaacagagatgataacttaagaattaagatctccatcacataaaaacatacagtgactgagtactggattacacgattgagttgttcagggttcagataggaaaaacatcttggggactagagatagagggaatcgacagatgcgcagcagtagcgcgcgggaaacaggacatcacgattgcgttgcatgtcgtcggctgcgcagcggcggcgcggggcttaagacctgctcttgaatgggatcgccctgatgatcacctggtggtagatggcagccagggcagcgccaacgaagggaccaacccagaagatccaatggtcattccaggcatggtccttgttgtagatgatggcagcgccaaggctcctggctgggttgatgccagtaccggtgattggggatggggcccagttggaccaggaacaccgcaaaaccaattggcagtggggcaaggataggaacatgtgagtccctggcattcctcttggcatcagtggctgagaagacggtgtaaacc

SEQ ID NO: 402471 - DNA, 381 bp, Oryza sativa nipponbare
tttttaaccaaactgtaaaataaaaatatatagcatattatatattgatatatcatcaacatagcccaaaacaaagctgcatactattattataggcagcaatccaccagcgcgatgcttgatcttagcttagttgccaccagactcctcgcaacctgggggcttgtaggcgatgaagctaatcaactgacctgcctgacgttgtcgaagccgatgatacggacaaaggcatcggggtaggccttcttggcctcctcgagctccttgagcacctgggtggcatcggtgcagccgaacatgggcagcttccacatggtccaatacctgccatcgtagtacccgggagacctgtggttctcacggtagacgaatccaaccttg

SEQ ID NO: 402472 - DNA, 517 bp, Oryza sativa nipponbare
tttagcattgcaacgcaaacagtatgacaaggtaccacgcattgtttaagagctaagacaaagacaaaactgatgcatccaacgtaccaaaaagaaagcgaacagcagcagtcagatagctatgagaagagaactaggagagggataactagaagggacagaatggcatccatgggtccatgacgtttagtcgacctcctccatcttgctctcgccggcgtcgtcctccagcggcggcatgtcggcgtcagcctcggcggactcgtcctcgtcgatgctcaggccgagcttgagcatgcggtggatcctggtgccgaaggtgttggggtcctccaagctgaaaccggaggtcagcagggcagtctcgaagagcagcatcaccaggtccttcacggacttgtcattcttgtccgatcgcacgcttgcggagctcgtccatgatggcattcttcgggttgatctccatggtcttcttgctagacatgtagccggccatgctggagtccctcagagcctg

SEQ ID NO: 402473 - DNA, 380 bp, Oryza sativa nipponbare
gtgtatatagccggagctttgttttcacatatcctcacccaacgataattgtagtactcttacaataaaaccggccggagagggagggaagagattattacatatgtgttaagagcagaggccattgagatggtacataaccaaactgtaaaataaaaatatatagcatattatatattgatatatcatcaacatagcccaaaacaaagctgcatactattattataggcagcaatccaccagcgcgatgcttgatcttagcttagttgccaccagactcctcgcaacctgggggcttgtaggcgatgaagctaatcaactgcacctgcctgacgttgtcgaagccgatgatacggacaaaggcatcggggtaggccttc

SEQ ID NO: 402474 - DNA, 356 bp, Oryza sativa nipponbare
  unsure (1)..(356): unsure at all n locations
aaccaaactgttaaggggggatttttagtatattatatattgatatatcatcaacatagcccaaaacaaagctgcatactattattataggcagcaatccaccagcgcgatgcttgatcttagcttagttgccaccagactcctcgcaacctgggggcttgtaggcgatgaagctaatcaactgacctgcctgacggtgtcgaagcccatgatacggacaaagggcttggggtaggccttnttggcctactcgagctccttgagcacctgggtggcatccgtgcagccgaacatgggcagcttccacatggtccaatacctgccatcgtaatacccgggagacctgaggctctcac

SEQ ID NO: 402475 - DNA, 406 bp, Oryza sativa nipponbare
ttttttttttttttttttgggtttttaaattcacaacaccatatttcattgatcaggttcagaacctgcacagaaatacacactaccggtacagatctcaccctctttccaatactcgtacatccatccacgcggtccacacgaatacgtacatttatacggtacacgtacgtacatttactgcaccgggtacacacacgcacacttttctgcagagacgcgcattgtcgtcaacctagctagcttagctgaaggcgatgcgtcgccatggcagcacgggggcgggggcgcttacttgccggggacgaagttggtggcgtaggcccaggcgttgttgttgacggggtcggcgaggtggtcggcgaggtttttgagggggcccttgccggggaccatgggctggacc

SEQ ID NO: 402476 - DNA, 491 bp, Oryza sativa nipponbare
ggggtatcaagtttggtctgagtatagtattacatataagtatcgtttttgacgatttgtacaatatatttattacgatgtgtatgtgcatatgattagcctggtgctagcattcacatatgcatgctcttcaacctatgttgatacatacatatgtacatacatacacagctgatgttgacacaaacaagatgaaaaaaaaaaactgaagcaacaaactgggaaaggggaaaccaatgcaaggtggcccgattcgaacgttcaaagctgccaaaaccgaatagatcaatcgagtctcctctgtatagagctcacgagtgagcttgctggcttgccaactagcttagtttccgccggacttcttgcaacccgggggcttgtaggcgatgaaactaatcaactgcacctgcctgactttgtcgaagccgatgatgcgaacaaatgcatttggatatgccttcttggcctcctcgagctccttgagcacctgg

SEQ ID NO: 402477 - DNA, 481 bp, Oryza sativa nipponbare
tttttggagcacaaagggtacatgttacacccacaccctacacccatgcataataatacatcgtatatacgtacgtacatacatacccctctcgatcacacgcaccatcgatcgtacaaagttgcgtacatacatacgtacacacatatacgcatacgcacgtacatacatacataattaaaaactcgtaattaattaaatacgtagttgatggcatctctaatggaacttgaggctggtgaggatgttgttgtggacgggatcagcgaggtgatcaagcaggttctgcacggggccaaccccggtgaagagcgcctggacggagaagccgaggaaggcgagcatggcgagcctgccattcttgatctccttgagcttgagcttcttcattttcggcctcgttcttgggtcccgaagccaagcgggttggaaaagcgggcccgccggggtaggccgggcttgccggagcccgggcgaggta

SEQ ID NO: 402478 - DNA, 503 bp, Oryza sativa nipponbare
tttaaccttcggactgactagcaggtcagtcacaaaacacagtgcacatgttatcagaagttcacatatcagtacgagaattcgaacagagactggtccgagatattcttgccaagctaaaatagacgggcgccatctcaggccttggaaaacataaacatgttatgtagcatgcatatatacacacatcgccggataaatacgctagttaaaagctacggtcttcttctctcggcgtatgcgtccacctcgtcattaggaacgtgacaacaacacgtttaggccgacttcgcgaagccaaccctcatcttgccgtagtcgaacacggtatggtaggcacccatgaaaacgtcacccaggatccagagaggaccacggggaggagggatgtccatggcttgtgaatccactgatgcactgggcagcagctccttcaccaaccttcagaatttactcttctggcttcagtgcaaactttttgcctccaatggtgaatgaaatct

SEQ ID NO: 402479 - DNA, 444 bp, Oryza sativa nipponbare
ttttaaaagcttctcatcccgtggaaattgtattctgagagaacaaaatcattgtaaaatgaaaactatgatcacatgcagtagtatcacaaaagttgcatgccaacaactacaaatgctacaaaagaatggaaatttacacatttctaatgtctcaataatacctacaactactcagccaggccttcaacgaagatcgatggcaacgctggatcgataatcaggtccttgccttctgtttatctaggtataacattaagaatccttccaggcacataaattctcttcctgatgcccttcccagtcaaatatttggagagtttctcgtctgaggctgctatttggaatgcatcatcctcagagcactctttgtcgacaagaattgtaccccctggtctttccaattggatttgcacctggaagcaccgagcttttaattttttt

SEQ ID NO: 402480 - DNA, 326 bp, Oryza sativa nipponbare
acacaatcaggtccattggacttttttcatcaaccaaccagataacattgttttacacaatctgaacgaacgaagcaaattttcgggtacccggaaagaggagaacgtcgcgcgttttaccggagcctgcatgaaagcaatggacctcaccgccgttgctcgccggagatccacacttacttgccggggaccaaattggtggcgtaggcccatgcgttgttgttgaccgggtcggcaaggtggtctgccaggtttttcagtggccccttgccggtgacgatggcctggacaaaaaacccgtacattgagaacatgggtagggggcc

SEQ ID NO: 402481 - DNA, 516 bp, Oryza sativa nipponbare
aacaggaacagtaagagtcgtactcaggtttgacaagctgagctatgtgcacatgtggtgtatcatagggacttcacaagaaaaaatgtggaaactccaccaaataggtgcagcatgaaaaccatctacagtttggatgtaaatgattacagcttgtgaaaagtagatggtctgtttgctctcaaactgaccacggagggaaaaagattcaagcactaggaacaacatattgacgaacaaaaaggaagtaaaatctacaggtggccatcagtaaggtgattcatgggtgccagagaaacagactacaagagcaccttttccttcttctcaagtattggagggtcaacctcgattcccatattagcagcagtgcccgctataattcttatggccgagtcaatgcttttggagttaaaatctggcaacttctcttgagctattgtacgtacttgatctgctgttacttttccaaccttctctcgctgcggttcttttgaacctttctcgatacctgct

SEQ ID NO: 402482 - DNA, 393 bp, Oryza sativa nipponbare
atgtaatctatgtatttagtatcaacaattaatctccaaattcaagtatcaagtgtagtatatcatcatcatgcaagtacagtgttacatagattaatcacaatgcagtttgattaagcagtgggcatcatcacatcgcattcagaggaaggctatcttagattacagatgaatatgcagacacccagcttggtgttacatacatagactggatttgggtgaaatttagccggcgagggcgctggtgttgtagacgaggagggcgccgccgccgaggagcccggcgagggtcacggcccagatcagaagcccggtggttccaccaacgtaggtgtcaccggtgggagaccattcctccggcgagtagattgggctgtagccgtcgacgtttgc

SEQ ID NO: 402483 - DNA, 355 bp, Oryza sativa nipponbare
agaaagggaagaaattgttttgaatttcgaagaaacaactgatagtaggtttgatacagtttttgcactacgctgttactgcacatgggagcagaacatattctcgtagagatatacaaacatcacacagaggaagcagcagcaagcactctagagagtcaccccccaaaacttccccggacaaatgcagctgcttaattactccgttccagcgatcttcttcttcaagggctcgatgtcggtcgccaactctttcctgctctccttgaagaggaggtagcggtagacgaaccacccggtgtagccgaggccgacgagctccaggatcttggggagcagcggcacggagttgatg

SEQ ID NO: 402484 - DNA, 477 bp, Oryza sativa nipponbare
gggtggggcattcacagccaccctttttgttaaaacacggtatcctcgggtatgtcatgttacaactttttataaattatacaaagggtacaagtctaaactctagattcagtgagacagaaggatttctcctccttggttgaatgcaggatctgatagatcaaataaatttaccggtcaattccttcaatcttgttttaaacctaagagtagagctccctgagcttttccaagttttcctctgatgtctcccagtagcctttgccactggcttttaggaaggtctgaactagcttcctgaatgaattggggttggggtccatgagccttttcctcatagcctcatcttaaataaatgtggcatttgcctccttataaacccagttgtcaaccttgccaaaatgttgcactcattccaacaagttttgtcagccgttttttaatctttataactccttgggggccactttttattat

SEQ ID NO: 402485 - DNA, 363 bp, Oryza sativa nipponbare
ggggaaacgaataaaattatttttgcaaaaacataaacttttttttcatctttttaggggacacaacaccaacttgatcattattttggggcactaaacccatttttcccaacccaaaaacaacgaacttgttggccacaaattcattcaaccacaattaaccactggtaagctacgggcccccactttacttgccggggaccaagttggtggcgtacccccaggcgttgtttttgaccgggtccgcaagggggtctgcaaggtttttgagggggcccttgccggtgaccatggcctggaccaaaaaacccaacatggataacatggggggggggccgttctttgatttctttaaccttgggc

SEQ ID NO: 402486 - DNA, 493 bp, Oryza sativa nipponbare
tatgatagacctttttactaggcaaaccacacgaatacacgattgattaatttcactgagaatagcacgggtacatcacatcacacaaattcatacgttgatacacgcatagtcgccgaagcgaccagctgcttaattaatcgataacacacgggtttaattcagcaataatcagcacacacacaaaccacactcatatgggtggtttttattgtggactaattaaggtaggtgactcgccggcggcgagtgttcggttgcttcgtgacttcacttgccgcacttgcagtcggtgcaggagcagctggtgccgcacttgcagccgccgttctcctcgccggcggcgacctcctcgaagtggctcttctcggcttcaactatgacgacgccatagctggtacctttctttaacccactgctcttgtcagcacagtcgcagttgccgcacttgtccgacatggtcgaagatttaattagctaagtgagtgatgag

SEQ ID NO: 402487 - DNA, 510 bp, Oryza sativa nipponbare
ttttgaaatggaaaccagaggtatcaagtttggtctgagtatagtattacatataagtatcgtttttgacgatttgtacaatatatttattacgatgtgtatgtgcatatgattagcctggtgctagcattcacatatgcatgctcttcaacctatgttgatacatacatatgtacatacatacacagctgatgttgacacaaacaagatgaaaaaaaaaaactgaagcaacaaactgggaaaggggaaaccaatgcaaggtggcccgattcgaacgttcaaagctgccaaaaccgaatagatcaatcgagtctcctctgtatagagctcacgagtgagcttgctggcttgccaactagcttagtttccgccggactcctcgcaacccgggggcttgtaggcgatgaaactaataaactgcacctgcctgacgttgtcgaagccgatgatgcgaacaaatgcatctggatatgccttcttggccttctcgagctccttgagcacctgggt

SEQ ID NO: 402488 - DNA, 505 bp, Oryza sativa nipponbare
taatctccaaattcaagtgtgaagggtagtatatcatcatcatgcaagtacagtgttacatagattaatcacaatgcagtttgattaagcagtgggcatcatcacatcgcattcagaggaaggctatcttagattacagatgaatatgcagacacccagcttggtgttacatacatagactggatttgggtgaaatttagccggcgagggcgctggtgttgtagacgaggagggcgccgccgccgaggagcccggcgagggtcacggcccagatcagaagcccggtggttccaccaacgtaggtgtcaccggtgggagaccattcctccggcgagtagattgggctgtagccgtcgacgtttgcgccgtacttgtcaacgaatttggacacaccctttcccgtgctttttctgccagatgcatcaatatcgactgacatgccacctccaatcccgtagggcttgtcggtcttgaactttttcccaccggtgcagactatggcgaa

SEQ ID NO: 402489 - DNA, 515 bp, Oryza sativa nipponbare
ttagggatcacttattcatgatagttcttccatgctgctctaccacagcaaaacgtttcagacaccatcaaaccagacttaaggatacacattacaggtaaatagtacacaatgaaacgggacacgaccaaggaccagaccagacaaccatagctccattggggaagacaaataggcagacttgtgaaccctagaacagcagcagctccatggctgaggacttactggccaccacggaggcggagcaccaggtggagtgtggactccttctggatgttgtaatccgcaagggtgcggccatcctcaagctgcttaccagcaaagatcagacgctgctggtccggggggatgccctccttgtcctggatcttcgccttcacgttgtcaatagtgtcggacgacttaacctcaagggtaatggtcttgccagtcagggtcttcacgaagatctgcatcccacccctgagcctgagaaccaggtgaagggtggactccttctggatgttgtagtcagg

SEQ ID NO: 402490 - DNA, 382 bp, Oryza sativa nipponbare
gggaaacgaataaaagcatgattgcaaaaacatcatcttcttcttcatcttcttagtgtacacaacaccaactcgatcatcatctcgtcgcactaaacccatcttccccaacccaaagacaacgaactcgctggccacaaatccatccaaccacaattaaccactgctaagctacggtcccccacttcacttgccggggacgaagttggtggcgtacgcccaggcgttgttgttgacggggtcggcgaggtggtcggcgaggttctcgagggggcccttgccggtgacgatggcctggacgaagaagccgaacatggagaacatggcgaggcggccgttcttgatctccttcaccttgagctccgcgaacgcctcggggtca

SEQ ID NO: 402491 - DNA, 233 bp, Oryza sativa nipponbare
gttttctttttttgggcagaagcaaaattaagctaggtaagcactgattccacgcacaatttacatgatcattacatcgtccatcacacaggcactcatgcatcgattacacataggaggattgattcgtgggactagcttaatgaatttgattagccgatgatctggtccaggacgccgatgttcttgaggccgaggacgacgcctacccccatgatgtggccgacggcgcc

SEQ ID NO: 402492 - DNA, 504 bp, Oryza sativa nipponbare
aaaattaagaggcatgggggaatgatgattaatttaactgttcactgttgtatacatcgaggttcaagattaattaagtaaaagctgcagtaccttcacaaaattatactccttactccttagcatagagctgatcgatggagcgtataaaaatttaactttacatacagagaccaaattatatgcaataggattaatttgccgctgttccgttctgccaaactgcaggcagaaccatcgctgctgagaattgctttccttccttcgttcgttgtgcttcagatcctggacgggatgagcggcgtcgaattcgacaggtacgccgccgccgccgccacgccggagccgagcttcaccgggtagccgatgtccttgagcaccatctccactccactcagggcacccaataaattgcagttcgttgaggtggccgaggtggccgatcctgaacaccttgccggcgaccttgttgaggccgaggccgaggctgaggttgtaccgctt

SEQ ID NO: 402493 - DNA, 511 bp, Oryza sativa nipponbare
  unsure (1)..(511): unsure at all n locations
gacaagcaattaagcgtaggttatccaccataattaagatcgagaccatgagatagctagaacactgctgctaccatgagatagtttatccccctgtagtactgtacatcagaaattcaccactcaactcaccccctcacccatgcatccagatccatgcatgcaggaaacaattaccacaacacacacagtaagtctgaatctcatcacatccatctctctctctctcctccccccaattcattaacatcttatacatgcatactccacaaaaaaaaaaaagaagaaacaagaagagaacatcttccatcgcccaatcatcggtttcaccagcctgaactcatcaagctccttgagatgccctggccctgatgaaatcgatcacacgctcagcctgacagggtttgnatgatggtgttgggccacgggtcagacaggtgctgcagcaggttgtcgaagggccccttctgcgtcacgttgtgctgcaccaggaaccccaagaacgccagca

SEQ ID NO: 402494 - DNA, 389 bp, Oryza sativa nipponbare
tctcaagaatcttaagatggtagatgcacacaagagagaggtacggtatacaagacttagtttttcttaagtacaacagatcttccattcctccatgatcctatcagcttctacacccaaaccacacaaatcaccatgcacgagccctcttcctccactgccaaatcaactggggcttgagtagccaagcatccatgtggtgatcagtagccgatgtcagcgtcgtcgacgactaggttgccggtgatgagctcacggtaggcggcgacgggccagatgaaccccctcgggaggagcttgacggcgagctcgacttcgatgatgatctccctcatggccggcttcttcttgcccgtgatggcaattaggtagcttctgcctacccagcc

SEQ ID NO: 402495 - DNA, 508 bp, Oryza sativa nipponbare
atcaaattacaacagtagcgaacatttattctacagatgccatcgctttctttgcttttttggcaacgcaagtaaaccatttcaccgtcacaccacccaccatatatgccacccaaataaaaatcaagaacccaaacaattcccctttaattaattcccgcttaattaataaacaccagccttaataataaagtaataaattaactaatggctcgttctttccagtcattttgccttagctgtggaggatggccgggctacagtacgggccgttgagccagccgtcagtgatctgcttgtaagctgcctcggtgaggtggatgccgtcccagctaagatgcgacgccgggttggagcacgctgatgcgcctgacatcccacacctcgcgttgttgttggagttgaacttggccgccgcctgacccgcagcacgtttcgaacaccgtgctaaatccgtagttgccggggttgcggaccatgtcgtagacgccggagtagaagtcggcgt

SEQ ID NO: 402496 - DNA, 510 bp, Oryza sativa nipponbare
aaggaaacagtggcattatgtcagttgttgccgcaagcgggaacggcagaaaccatagttattagtcctggagatcttcagtaagaaaaataagactaggatcagctggcgaaccgctgcgccaagctggcacatgttaacaaagcggacagtggttcaaataggtagggaaacgaccgaggttaacgataaatcctagcatgaacggaactccggcattagaaggggctactgtaacatcttcacagcgatgatcagccagaaagatcagcattgcattatgtacatggtgtacagcagccacatataacttgttaccttctatacaaagccttgatatcctggcggatagcattagcctccaaaagttcatcttcagagtcatcaatatcaacttgattcagtttgaagtcttcagtagtgcagagctcactccattcaaaccatagctttgggataacttctttcttgaatgcagtttcatggaacttcacctctggagaatcagca

SEQ ID NO: 402497 - DNA, 445 bp, Oryza sativa nipponbare
agaggtatcaagtttggtctgagtatagtattacatataagtatcgtttttgacgatttgtacaatatatttattacgatgtgtatgtgcatatgattagcctggtgctagcattcacatatgcatgctcttcaacctatgttgatacatacatatgtacatacatacacagctgatgttgacacaaacaagatgaaaaaaaaaaactgaagcaacaaactgggaaaggggaaaccaatgcaaggtggcccgattcgaacgttcaaagctgccaaaaccgaatagatcaatcgagtctcctctgtatagagctcacgagtgagcttgctggcttgccaactagcttagttttcgccggactcctcgcaacccgggggcttgtaggcgatgaaactaataaactgcacctgcctgacgttgttcaagccgatgatcggacgcgtgg

SEQ ID NO: 402498 - DNA, 492 bp, Oryza sativa nipponbare
ggagaaaactacttgacagtacactttattcactatagctgtatgcacatgcgactcgcatgcccccactggacgggtataaatgtaagaactaatgtgtccagaaccaaaaatacgattacataggacacgaatcctgtacaggaatggagaagtttagaagtgtgtcttcactgcctctgcaaatagcaacctagcgtcagcaaaccaatttacaggggggtggttaactagggcgtgcaagtgcaagggcgcaaagaagaatcctccacgatcatgtgaaacttcgtttcaaaagatgccttgggcagagcttccacaaaatcgcagtctttgggggcacttcggtgcttcacaagtatgccagttgttattttgttttccttgaagcgggcccaaggaaaaaataacctggaaagtaccaaagaacaccttcctgttgtctaatctgatcacttgggaattgcagtagatcacttcgccgattgtact

SEQ ID NO: 402499 - DNA, 513 bp, Oryza sativa nipponbare
ttggaaggcaaatgttcgtgaagataggcacatatatgtatcgtacaatgtcctctccgcttgtcgaaatgcaaataacatcatcgggggatatgatcatcagttcacgagaacagaggaagaaacaaaagctaaaaattaaaaccatcaacagcccgatcgagtttgcattactagatacacacattgcagccttccttccctctctccatgtatcgatatatcaacccggccacgcacaaaacatttgttcattccctactcgagctgcgcgtaccacaccccttggatcttgacatccttgggcaccttggcgccgaggtctgtgtccgacggctgcacgctctcgaagacgccaatcacctcgccggtctctggcttgctcttggtgacgctcaacgtgatgttgcccggcgacgacgaggcgttcttgacgttctccttagcgagctcctcctcgtctcctctgcctccggcggggagcgccacagcgttgtcgtagccggtagagcc

SEQ ID NO: 402500 - DNA, 512 bp, Oryza sativa nipponbare
tttttgataataccaaacgggcaaaacttgcatatcaggaatagaagagcactttgttaaaaaccgagacgcttaataaatcatatcaattgtccaccttgcgcatgcacattatttgtcaatcaggtgctacagcaacatgaagccagctgctttggcctcaaggtcctaagagtgctgaaatttttcagagcttcacatgttttcaaactggagtatgtacaaaatgcctgaggcacggggctgcttatgatggtgctgattcagctccgtcatgaagagcacagcagacaactggtttgtgatgcgacgtgtaaaccctgattgcctctccggttgacatcgtccacaatctcgccgtagtgtcagaggaagcagttatcaaataagcaccatctactggggaatcgcagttccaaaacccaacgctggggacctactaaagttttttccaatttgaagccatcaacattccaaatcttcacagtgtggtcagatgaggctgttgcaag

SEQ ID NO: 402501 - DNA, 513 bp, Oryza sativa nipponbare
ggatcctttacaacttatatagccataggaatagtacaattatatcaacatcataaacagggggaattaatccatggcgatccggccatgggggactagcagtacagtacagaggatttgcatggatggatcggatcaagaagaaggtgaggcagagacgaggaatttaatttagatcttgccgcgtgggccgggcgtcggcggcagctgcgggcccttcttgatcggaagcaggtctggcgacgccgacgcgctgacgtaggccaccagcgatccgccgccgagcagcaggaacttgagcaggagccccctcttggtgaagggccccgcgaacgtctcgaagaacttgctctggagagggttgtacggcgacggcgcgtcggagccgtacaggtcccactgccccgggggggttgccgatgtcctcgaggtcgaagtagacgctcttctcgccgtacttggccaccacggcggcgcgcggcctgcgggtggtgcggcagagcgcccggggcg

SEQ ID NO: 402502 - DNA, 380 bp, Oryza sativa nipponbare
ttagcagtaatcaaacactagacgtggtatggatcattacaaagtacacaaatgtacaaattaaaacatcaaaagagttaactaagcttaaagcagcagctgacacataagttgcaaaccccaacttttttcagtttctgaattctggatggatcatatcagattcatcacagcatcgtacaatctgtgcaagcattggtacatcgagcgatggagagagagagtagtctacaatggcggctgggccattcacgagcccggcgtgaacttggtggcgtagacccaggcgttgttggcgacggggtcggcgaggtggtcgagcaggttctccaaggggcccttgccggtgacgattgcctggacgaagaagccgaacatgg

SEQ ID NO: 402503 - DNA, 509 bp, Oryza sativa nipponbare
tatttcctcatcctgtgtagtcattcctcccagagagacggatccatggaagttttcttgccctcatcaggcaagcagagcacacacacacggtggcagtggaagtgctatgaacaagacgctaatcaacatccagagctaaaacaaacaaggggatcaatgcaaatcccgaaaaaaaaacacaggggaaagtccacatcttcttctcgtccccaactcctccgtgtcaccaccacgtcttgcggatttttttttaccctgttctattcgctcaggcgtccacgatctcgccgtcgtccttcgacgccaggatcagctccgggtgcgccgccgccgccgccgccttcttgatcgtgccgtcgatggcgttcggccggccgagcgccttcagcgcccgggggcgccgcttttgggccggagatcatcatggctccgaacgtcgggcccattctcggggcgccgtcgatctcggcgacctccatgccggtgacgatcatgccggggacgac

SEQ ID NO: 402504 - DNA, 498 bp, Oryza sativa nipponbare
atgggaaaggcatcatcttcttcttgatcttcttagtgtacacaacaccaactcgatcatcatctcgtcgcactaaacccatcttccccaacccaaagacaacgaactcgctggccacaaatccatccaaccacaattaaccactgctaagctacggtcccccacttcacttgccggggacgaagttggtggcgtacgcccaggcgttgttgttgacggggtcggcgaggtggtcggcgaggttctcgagggggcccttgccggtgacgatggcctggacgaagaagccgaacatggagaacatggcgaggcggccgttcttgatctccttcaccttgagctccgcgaacgcctcggggtcatcggcgaggccgagcgggttcaaggcgcccgccggggtagagcagggttgacaacctttaccgagcggcccgccggcgatgcgggacccctcgacggtgcccatgagcaccacctgcaccgcccagatggcgagga

SEQ ID NO: 402505 - DNA, 502 bp, Oryza sativa nipponbare
gccacaatataaacagatttagactacatatttacactatacatagccagaaatggttatattttgggatcgagggagtatttgtttccgatctaatagagatgagaaatccgctaatcagaataacaccacggataagtacctagaccattagttgggaaacgaataaaatcattattgcaaaaacatcatcttcttcttcatcttcttagtgtacacaacaccaactcgatcatcatctcgtcgcactaaacccatcttccccaacccaaagacaacgaactcgctggccacaaatccatccaaccacaattaaccactgctaagctacggtcccccacttcacttgccggggacgaagttggtggcgtacgcccaggcgttgttgttgacggggttcgcaaggtggtcggcgaggttctcgagggggcccttgccggtgacgatggcctggacgaagaagccgaacatggagaacatggcgaggcggccgttcttgatc

SEQ ID NO: 402506 - DNA, 487 bp, Oryza sativa nipponbare
aaatcaaagacctggctcatcacttggattaattaatactagtaatatttagagactcttgggcaagcatagaaataattagcaaatgaggatggtgatgcaggaggtgtagaggctaggcagcaagggaggggtggtggtggtcagagttggggatggtctccttgtggagatgaccgtctcccttggggacgatgagaccgaagcctccttccttcctcttgtacaggacgttcatctccccggtcttctcgtctctgaaggcgtagaagttgtggtccacattcactagctgctccatcgccttctccaccgacagcggcggcatctcgaacaccttggtgcgcaccaccttggtgagcaccgtgtccttgttctcggcgccgacgggcttcttcagatccttgagctgggccctgggcgtcgtcgtcgttgttggcgagcaatgatggcgggcagtcggagacggggggcttggtccccttga

SEQ ID NO: 402507 - DNA, 507 bp, Oryza sativa nipponbare
gagaataaacaatggcgttttaatatttgttataatgatcaagtacaactttgaggggaccaagataactacaagattggtgaagaaaacatagtacacctaggataacaaaaaaaggaaaaaaaaaaggggaagcaatgatccatccctccttatcttttcaccattctcatcctaacaaaagaatgaattgaattgacaaaagaatctgaagctttaatctcttctcttttaaaccacaattgtaaaaaaattgtgagttagtagtcactgcagatctcagttcatggatcatcttcttcctccatcaccatcatgtacaaagttgccaaagaaataccccatacctttggttaaattcacaaggagagagaaccctggcttgaaagaataattggtgagtggatattacaacaaatcggtcaatatttcttgggaccttttatatatatctttttttctaatatcttccttaacctcctttgaatggactgactgactttatac

SEQ ID NO: 402508 - DNA, 502 bp, Oryza sativa nipponbare
acgggagagccatccattttttttattgtcgacgaatttatcagatatgctctagatacatatcttgtgtgtatatagccggagctttgttttcacatatcctcacccaacgataattgtagtactcttacaataaaaccggccggagagggagggaagagattattacatatgtgttaagagcagaggccattgagatggtacataaccaaactgtaaaataaaaatatatagcatattatatattgatatatcatcaacatagcccaaaacaaagctgcatactattattataggcagcaatccaccagcgcgatgcttgatcttagcttagttgccaccagactcctcgcaacctgggggcttgtaggcgatgaagctaatcaactggacctgcctgacgttgtcgaagccgatgatacggacaaaggcatcggggtaggccttcttggcctcctcgagctccttgagcacctgggtggcatcggtgcagccgaacatg

SEQ ID NO: 402509 - DNA, 502 bp, Oryza sativa nipponbare
ggctgccggaagtcgaaacctcatgacttcagacttcagaattcggacaaaacagacgcatgtggcacaaacacacagacagaagaaagtaaaacaagactcgaaaagaaaaaaatcctgaagtctgtaccaaagttcagtattacacctcacagaaaatggcccgtgtctgcagctgtgtttcttcttcgacagtcatgcgttcctctgtcgaaggggaacaacgtacgggcagccaatccgagcacagtatatatagtatagcagttctgcccggggacagtcaatgtgtgtgcttcgttacattataggagtatatatttctgcacctacgcgagcccgtacttggacagtggtcttagttttcgtacactttgcactcgtcgggcttccgggttgtccttgcagaagtcctccagtgggtcgccgttgccctgcaccgccgcgccgggccacttgctcgccaccagatgcgccagatcgaccacgcgttggctgtagc

SEQ ID NO: 402510 - DNA, 503 bp, Oryza sativa nipponbare
tttagagaagtttaacttgtgataaaactaaaataatctgtaatatggcaccaagggagtagaacgtaaaataaccacatgtgtgacagtgaaaccatcgtagtgccagttcatgcactactcatatttgatatggaggggaaccaagtttgatctgacacctaccttgatagatacacagcataaaaggggcaagttctacagacctcagaagtttgttctggactgcaatttacaagcaaggggatgacagggacgtcaagcatgaacgatcggagccaatgattcaccgtctagtgacagtaatcagttttgcgattgactctgattatcttgcttagtagggctttgcagtgctgtcactttttgcggctgtcgtcttctcagcggcagaagtgaaagacacaggggaggtgcggttggtcattcactaccaagctcaagacctcaggtcgagcatagtggcccaccacatcaaaatcaaacttggctcgcacgatttc

SEQ ID NO: 402511 - DNA, 496 bp, Oryza sativa nipponbare
actgaggtagcaaatatttctcagccacaaatccaaacacttggtccttcctatcagaagatcagaatgaacaggttttcaaattcatctcccaactcgacgataatttacacgtacatttaacacattcttccacccttctcaaactcctcccttcttcttcccgggtaagattaaaattaacttgaggccagccagcgtcgccggcggcgagatgtttacaggctgggcgtcctctcggcggcgccggagatgacggtgagcaggttgttgccgaaggggtcgctgaggtgcttggagaggttctcgacggggccctcgccggtgacgtaggcctggatgaagaaccccagcatggagaacatggccagccgccccgtcttgatcttccttcaccttcagcagcgccgcctggtccgggtcgctcgccagccccagcgggtcgaatgggccacctgggtggagcttgtcctccagatccaggccgttgatgatc

SEQ ID NO: 402512 - DNA, 523 bp, Oryza sativa nipponbare
gatgtcagttaatactagatggggtatatacagttgacattggagggagaagaataagtgtaggtacacaaaattgcctctgtggttttttatggcagacttggaggggaaagtgatggtttggtcacttttagctctccgcaatcactgatataaacagtttttagcgggcgatcccacaacgctcgagcagtttgagctctttcatcaccaatcaactgggcaaaatcattgaagaagcggatcctttcagctggtttataggtaggaatagttgcaatgctggttataacattcattccttccaatacagttccaaagacaatgttctgtccatcaagctctgggcagggccctggtccagtggtaaccaagaattcaacattgtgataattaggattgaggctggatggaaataatttgtattcgttttgttccaaggcacattgatgaggggtgccaggctctttcttgcttttagttaaaatgccttttaaggtcaataaagtctttagaatttcct

SEQ ID NO: 402513 - DNA, 488 bp, Oryza sativa nipponbare
ggtatcaaggtgggtctgagtatagtattacatataagtatcgtttttgacgatttgtacaatatatttattacgatgtgtatgtgcatatgattagcctggtgctagcattcacatatgcatgctcttcaacctatgttgatacatacatatgtacatacatacacagctgatgttgacacaaacaagatgaaaaaaaaaaactgaagcaacaaactgggaaaggggaaaccaatgcaaggtggcccgattcgaacgttcaaagctgccaaaaccgaatagatcaatcgagtctcctctgtatagagctcacgagtgagcttgctggcttgccaactagcttagtttccgccggactcctcgcaacccgggggcttgtaggcgatgaagctaataactgcacttgcctgacgttgtcgaagccgatgatgcgaacaaatgcatctggatatgccttcttggcctcctcgagctccttgagcacctgg

SEQ ID NO: 402514 - DNA, 508 bp, Oryza sativa nipponbare
taaatatatatagggggaggttccatatatttcattcacatatgcctcacccaacaacatatagtcgtagcagataccactcttacatcaagtcagagagagatcaggtgaaacaaaaacaaaagcagagcacggccggtaaaatcaaaagacgatgaacaaactgggaacacacgaaacaaggtgggagacatcatcgaatcagagatgaacaattaaacaaggctatatatgacgatgacggcttagttgccaccagactcctcgcagcccgggggcttgtaggcgatgaagctgatgagctgcacctgcctgacgttgtcgaagccgatgatacggacgaatgcatcagggtacgccttcttggcctcctcgagctccttgagcacctgggtggggtaagggcacccgaacatgggcagtttccacatggtccagtacctgccatcgtagtatccgggggatctgtgggttttacggtagacgaatccgaccttgctgaactcga

SEQ ID NO: 402515 - DNA, 484 bp, Oryza sativa nipponbare
aattaatataaagggggcggtctttctcacagattagaaaggcaaaaataacgagtctaggaaaaacatttttccccaattctgatttaagcagcaactgaaggctacacatcgtcgctcagcgtgtggaactgaacagagctcggctgacaataccagttgcctcaatgtaacgatcaacacagcgtgatatgcaactgctctcgctcccgctcaagcttgatcctggctttgtcacgcacttggcaaagcacttgtttccaacagtctcaaggaactcctgggcgtaggcctgagcgagctgcgccttgatctggtccatgagcgcctccgtattggggggcgacccggacgacgacgagaaggagtccatgccggcttcccacctttttgattcccaaagcctttgtcggcgaccggttgttgaagagcgctctccagcaacgacgcccacgcgttcgcccacgcgttcgcggacgcgtgg

SEQ ID NO: 402516 - DNA, 500 bp, Oryza sativa nipponbare
  unsure (1)..(500): unsure at all n locations
agccaactactagctccaattcatctatagtcaatctaatagcccattcatacaatagttacatactacactattaatatctagtcccacctgtcatagacacactgcgtcttggagtccgtgctacagctggctacaaatctgtagcccgttgctcttctctctcttgatttatcttcgtaaaatatgtttgtagctggcttatagcctgccattgtacctgctctaacgcagcaaagtgtgatgaatgttggtgttgatgatgggatcatgggaagtaaccatgagataacagaggtattgttcgatggagtaagtgtattatatgtatgtaaatattatattattggaaatcattttgaggagctagactagcgtgccttattaacaaaggagatatgtccccattacatgatgattaacatataaatctgtagctacatggaattaaggtagtggagcanaggaggaaggatgatagaagactccaattctccatg

SEQ ID NO: 402517 - DNA, 496 bp, Oryza sativa nipponbare
gaaactgaagacatatttcattattgttgaattaaaataggtacatgagcagctcatcagcaataatagtattttgtctgctttgagccaggggataagatggaaataatggagggaccagtctcaaaacgttagcaacctcctcttcactggcatggctgccgacagatgcagtcctgctgctctctgatttacagaaatcttctcgaaaatggtatgaaattagctgctgctcccggtgatttcattgtaggtgctcttgattttgctcaccagagcttccctgtctggctggaagatgaggttccggtatgtaaaccaccctgtatacccgattccaacgagctcaagcacgccgggcaaaagtggaagcctgtcgatggccttgatggcgcctattgcagtccagaggccgacgagcgcggcgacgccgatggcggtgacggcgtacttgtcctcaactttggcccacgcgtcctgggctgccttgacgacc

SEQ ID NO: 402518 - DNA, 394 bp, Oryza sativa nipponbare
taaatatatatagcccgagcggggcgatatttcattgacagatccctcacccaacaacatatagtcgtagcagataccactcttacatcaagtcagacagagatcaggcgaaacaaaaacaaaagcagagcacggcccgtaaaatcaaaagacgatgaacaaactgggaacacaccaaacaaggtgggagacatcatcgaatcagagatgaacaattaaacaaggctatatatgacgatgacggcttagttgccaccagacttctagcagcccgggggcttggaggcgatgaagctgatgagctgcacctgcctgacgttgtctaagccgatgatactgacgaatgcatcagggtacgccttcttggcctcctcgagctccttgggcacctggg

SEQ ID NO: 402519 - DNA, 513 bp, Oryza sativa nipponbare
tttttattagaatttggcagtttgatgggaggcaaggccaactggttgagtaagtaaatgacctctgcccagtgtccagtaacagtctgtctgactgacgtgaactttagtatttacagcgtttatcaagactagatagcagacaccgtgatcaattaagcttaggtgaatatgtgacggaggagatctccagaatacgagaacgacttctccgtttcatccaggcaatggtccttctcctcccgggtccagctagaggcgacttcgttaagcttgttgcggacattctgcagcagctgggacagattgccctcccatttgtagaactccagctccttcttgttcagaatattctcagagaccttcttcccaatcattcggcctccagccgtatgagccaaatacacattatagaaatggcagataaaagcttgggagtccttttcagccagctcttccagataggaagcatatgtagtgccgggagcagatggttctggaattgtgtgaccc

SEQ ID NO: 402520 - DNA, 509 bp, Oryza sativa nipponbare
gcataataatacatcgtatgtacgtacgtacatacatacccctctcgatcacacgcaccatcgatcgtacaaagttgcgtacatacatacgtacacacatatacgcatacgcacgtacatacatacataattaaaaactcgtaattaattaaatacgtagttgatggcatctctaatggaacttgaggctggtgaggatgttgttgtggacgggatcagcgaggtgatcaagcaggttctgcacggggccaaccccggtgaagagcgcctggacggagaagccgaggaaggcgagcatggcgagcctgccattcttgatctccttgagcttgagctccttcatctccgcctcgctcttggtcccgaagccgagcgggttgaagagcgggccgccggggtaggcccggctcgccggagccggcgaggtacttttcgaggccgaggaagtactgcttccccatggagcccggcgtgtaccagtcctggaagcggcggtgctcggcgaagcc

SEQ ID NO: 402521 - DNA, 509 bp, Oryza sativa nipponbare
atatatagccggagcttcggtatatttcattcacatatgcctcacccaacaacatatagtcgtagcagataccactcttacatcaagtcagagagagatcaggtgaaacaaaaacaaaagcagagcacggccggtaaaatcaaaagacgatgaacaaactgggaacacacgaaacaaggtgggagacatcatcgaatcagagatgaacaattaaacaaggctatatatgacgatgacggcttagttgccaccagactcctcgcagcccgggggcttgtaggcgatgaagctgatgagctgcacctgcctgacgttgtcgaagccgatgatacggacgaatgcatcagggtacgccttcttggcctcctcgagctccttgagcacctgggtggcgtcagtgcacccgaacatgggcagcttccacatggtccagtacctgccatcgtagtatccgggggatctgtggttctcacggtagacgaatccgaccttgctgaactcgaggcagg

SEQ ID NO: 402522 - DNA, 527 bp, Oryza sativa nipponbare
  unsure (1)..(527): unsure at all n locations
tgcagttcgcgcagaccgccgccttcttggagattcttcatgggcttgtaggtttggtgaggtctccagtctctgcaactcttccacaaattggatcgaggttgtttcttacctggggcatcctgtggagctttccagagacacattcacatatccttgttacttccttggtcataagctggtccatcactgagatcattagatattccttctttggcatgaaggaggcattcggatttgctccttcctggctcttatggctgaggtatagcacctttatggtattgtatcctactggtatcagcagtgaggtcggtttaatctacattgccttgccttacatgaaggcatcagagaaatactgccttaggatgcccaacaaatggaacttctcctttgatttcttctatgcatccatncttttctctcggcatctacgtgcccggatcgcctcacatgttcacctacatgcttgcccaacggaagaaggcattggcaaaggctaaggctgcataatggtgatgctc

SEQ ID NO: 402523 - DNA, 508 bp, Oryza sativa nipponbare
cagccacaaatccaaacacggggtccttcctatcagaagatcagaatgaacaggttttcaaattcatctcccaactcgacgataatttacacgtacatttaacacattcttccacccttctcaaactcctcccttcttcttcccgggtaagattaaaattaacttgaggccagccagcgtcgccggcggcgagatgtttacaggctgggcgtcctctcggcggcgccggagatgacggtgagcaggttgttgccgaaggggtcgctgaggtgcttggagaggttctcgacggggccctcgccggtgacgtaggcctggatgaagaaccccagcatggagaacatggccagccgcccgttcttgatctccttcaccttcagcagcgccgcctggtcccgggtcgttcggcaagcccaagcgggtcgaatgggccacctgggtggagcttgtcctccagatccaggccgttgatgatccggtagtactcggcgccgccgacgaggacgac

SEQ ID NO: 402524 - DNA, 492 bp, Oryza sativa nipponbare
  unsure (1)..(492): unsure at all n locations
atccatgcaggcgggctgtttgtgcccttgtgcagatgcatttcatttatacaagtagaaggcactcaaatcagccaccacatgaacacacacatgttccatcatcgatcgatctacacatgcatcacccggtcatgcacttacaaacaaaagatctacttgaagaagtacgggaggtcgagcacgtagaggaggaagtaggcccagaggacgccggagatgccgccgaagaagaagccgccggtgaacttggcccagccgtcggcggtctgcagcttgtcggcctccttcttgcggccggtgagcgtcagcgtcggcgccgtggacggctcgccctcgccgaaggaggcgacgccgtacatggtgaggcagacgctgaggatggcgacnagggcctgcggcgcccagggcgccggcctggccgtgcaccggcgtgttgcggaagcggccggtgagcgcgaagggcccgacgaggaggtagccgtgggcgag

SEQ ID NO: 402525 - DNA, 364 bp, Oryza sativa nipponbare
tgaacacatggcaaagcctgaagattcagttattaatcgtatacggatacagagcagttgttgcaacagggagaaattaggtcggagtgacaaaatgggaagaaaaaaaacagagaggaagagcctagtgagcgtcttcctcctcgcagtgcttggtgtacttggccgggtccagcagggcgtccagcttcgacgggctgctcggcttcaccttgatcatccacccgtcctcgtacgggcttgagttaatcaggccgggtgtctcagagagcttgtcgttaacctcgacgacctcaccggagatgggggagttgatgtcgctggtggccttcacactctccacgttgccgaatgcacctgcctg

SEQ ID NO: 402526 - DNA, 509 bp, Oryza sativa nipponbare
atgtccaaagggcttttaaatagtgaagctatgtcatctccatataattccccatgaaatattgatagggtatatgtagacatgaaggaagtgttcgtatggctggatcatcactagaattctgttatttgaccctgatacttactatgaggccatgctgatgaagaacatagcaatcttacttgctcttcttagaagcctcgtataggtagctcacgataactacagctgcagcaacagctaccccgacagcactctgtgcgagtacagcaccagttgaaagatcagatttcgtagatgcagggccgctgctccgtggagtgaagccaagttcagaaagcttcttgtgcgattcagcgtagtccttgaagaaagtgtcttcatccctggcataaaagatcaccatacggtctaaatgaaggatcttccaacaatgccttgtcagttgggagctttagaagcccctcagattcccccttcagtagctcaagaaagtacgaattgtcaaa

SEQ ID NO: 402527 - DNA, 503 bp, Oryza sativa nipponbare
atcaaggggggtctgagtatagtattacatataagtatcgtttttgacgatttgtacaatatatttattacgatgtgtatgtgcatatgattagcctggtgctagcattcacatatgcatgctcttcaacctatgttgatacatacatatgtacatacatacacagctgatgttgacacaaacaagatgaaaaaaaaaaaactgaagcaacaaactgggaaaggggaaaccaatgcaaggtggcccgattcgaacgttcaaagctgccaaaaccgaatagatcaatcgagtctcctctgtatagagctcacgagtgagcttgctggcttgccaactagcttagtttccgccggactcctcgcaacccgggggcttgtaggcgatgaagctaaataaactgcacctgcttgactttgtcgaagccgatgatgcgaacaaatgcatctggatatgccttcttggcctcctcgagctccttgagcacctgggtggcatcagtgcat

SEQ ID NO: 402528 - DNA, 498 bp, Oryza sativa nipponbare
ttttgatcagacagcgagcacgctgatgcttcaatgagatattttatccgcctgtatatctgaacataacaaattgaccgctgaaattaaccactaacccatgcatcctaatccatgcatgcaggaaacaatggctgcaccacacactgtacgtacgaatctaattagatcgatatctctatatttaatagcgcgcgctgaatgacaccatactacatgcatactgttcgaatagcacgcgaaagagcttgaatagagcatattccgtcgccgaatcatagattgtaccaggctgaactcatcaagcttcttgggatgccctggccctgatgaaattgatcacacgctcagcctgacagggtatggatgatggtgttgagccacgggtgagacaggtgcttgaacaaggttggcaaagggccctttttgcgtcacgggggggctggaccaggaaccccaagaacgccaggatcgccagccttccggtggcgagctcct

SEQ ID NO: 402529 - DNA, 503 bp, Oryza sativa nipponbare
  unsure (1)..(503): unsure at all n locations
ccacgcgtccggatcctgcaaagccagggcagaagtggcatgtctactatgccacccagcacccggagcaacctgtggtcactcttgagatgtgcatgactgggctggacaagaagaaagcttctgtcttcttcaagacttctgctgatggacacacaacatatgctaaggaaatgaccaagctctcaggtatctctgacatcatcccagagatggaagtctgcgacttcgatttcgagccctgcggctactccatgaatgccatccacggccctgctttctcaaccattcatgtgactcctgaggatggcttcagctatgccagctacgaggtcatgggcttcaaccctgcttcccttgcctatggtgaccttgtcaagagggtgttgagatgctntggcccgttggagttctctgttgcggttaccatctttggtggccgcaaccatgcagggacctgggccaaagggctggatgtcggggcctattcttgcagcaacatg

SEQ ID NO: 402530 - DNA, 289 bp, Oryza sativa nipponbare
ccacgcgtccgcttgatctgatcgtcggacatggcgtcgcccatgctctccgccgccaccgtgccactccagggaggcggcttgtcggagttctccggcctgaggagctcgtcgtcgctgccgctgcggcggaatgccacctccgacgacttcatgaacgcggtctccttcaggacccacgcggttggcacgagcggcggggcgcggcgggcgccgacggaggcgaagctgaaggtggcgatcaacgggttcggccgcatcgggcgcaacttcctgcggtgcctgcacg

SEQ ID NO: 402531 - DNA, 366 bp, Oryza sativa nipponbare
ccacgcgtccgcggacgcgtgggtgacaagctgacaggcgtcaccggtggagaccaagttgctgctgccatgggcatctatggccctcgcactacttacattatcgctctcaaagattgtcctggaactcatgaattccttcttcttgatgaaggaaaatggcagcatgtcaaggacaccacaaccattggagaggggaaaatgttctctcctggtaacctgagggctacatttgataatcctgaatatgacaagctcatcaactactatgtcaaggagaagtacacattgcgttacactggaggaatggttcctgatgtcaaccagatcatagttaaaggagagggcatcttcaccaacgtgacg

SEQ ID NO: 402532 - DNA, 430 bp, Oryza sativa nipponbare
  unsure (1)..(430): unsure at all n locations
ccacgcgtccggtggcggcgggccggaggcggcggtgctgtttgccggtgagcgcaaggcggtgggcgggcttgcgtgcggcgtcctcgcggcctgagccgtcgcgtcctcgtccagccccgtgattgccgccagccagaggttgcctccactgtccacagagccaaacagatgcgagcgtgcttttgtcgggaacacaattggtcaggcaaatggggtgtatgacaagccactcgatctccggttttgcgattacacaaacgagaaaactaatctgaaaggaaaatctctagctgcagccttgatgtccgattcaaagtttgatggggccgacatgtctgaagttgtgatgtccaaagcttatgctgtggnggcatgcttcaaaggaacggatttcacaaatgcagtaatagaccgtgtcaaatttgag

SEQ ID NO: 402533 - DNA, 367 bp, Oryza sativa nipponbare
  unsure (1)..(367): unsure at all n locations
tcgcgcccacgcgtccgcgctcgctcatcgccatctctctcagctctcacagctcactgcatcaatggccgcggccaccatggcgctctcctccccggtgatggcccgcgcggcgccgtcgacctcctccgcgctcttcggcgaggcgcggatcaccatgcgcaagaccgccgcgaagcccaagccggcggcgtcgtcggggagcccgtggtacggcgccgaccgcgttctctacctcggcccgctctccggcgagccgccgagctacctcaccggcgagttcccgggcgactacgggtgggacanccgggggcttttcgccgacccggagacgttcggcaagaaccgggagctggaggtgatccac

SEQ ID NO: 402534 - DNA, 497 bp, Oryza sativa nipponbare
ccacgcgtccggccaccgccgccgccggctgcgtccggggtggacccggacgcgttcgacaaggagatgatgggcctcaccggcggattccccggcggcgaggtcggcctcaaggacttcgtcgccaagaacccgcctccccccaagccggcgcacaggaaaggtctcgccgccgccgccacggtggagcggccgagggcgccggagctgccgctgttcctccccgggatggtggtgctcgtcaagaaccccaacaacgcctaccacatgtactgcggcatcgtgcagcgcgtcaccgacggcaaggtcggggtgctgttcgagggggggatctgggacaggctcatcaccttcgatctcgacgagctcgaggggagggagaagggcccgcccatggtgaaccctaagtccgtgctgctcgagtccctcgccgcggaaatggaggacgatgtggccaaggaggaggagggagaggaggccaagaagaagaaggagga

SEQ ID NO: 402535 - DNA, 476 bp, Oryza sativa nipponbare
ccacgcgtccgcccacgcgtccgcccacgcgtccgcccacgcgtccgagaaagcataagcaacacaagggattaactcatcactcacttagctaattaaatcttcgaccatgtcggacaagtgcggcaactgcgactgtgctgacaagagccagtgcgtgaagaaaggtaccagctatggcgtcgtcatagttgaagccgagaagagccacttcgaggaggtcgccgccggcgaggagaacggcggctgcaagtgcggcaccagctgctcctgcaccgactgcaagtgcggcaagtgaagtcacgaagcaaccgaacactcgccgccggcgagtcacctaccttaattagtccacaataaaaaccacccatatgagtgtggtttgtgtgtgtgctgattattgctgaattaaacccgtgtgttatcgattaattaagcagctggtcgcttcggcgactatgcgtgtatcaacgtat

SEQ ID NO: 402536 - DNA, 523 bp, Oryza sativa nipponbare
ccacgcgtccgtcaagaagtactcgagcaaagaaggagagagcttggtgagctgcagagatggccccctccgtgatggcgtcgtcggccaccaccgtcgctcccttccaggggctcaagtccaccgccggcatgcccgtcgcccgccgctccggcaactccagcttcggcaacgtcagcaatggcggcaggatcaggtgcatgcaggtgtggccgattgagggcatcaagaagttcgagaccctctcctacctgccaccgctcaccgtggaggacctcctgaagcagatcgagtacctgctccgttccaagtgggtgccctgcctcgagttcagcaaggtcggattcgtctaccgtgagaaccacagatcccccggatactacgatggcaggtactggaccatgtggaagctgcccatgttcgggtgcactgacgccacccaggtgctcaaggagctcgaggaggccaagaaggcgtaccctgatgcattcgtccgtatcatcggcttcgacaacgtcaggca

SEQ ID NO: 402537 - DNA, 488 bp, Oryza sativa nipponbare
ccacgcgtccgcggacgcgtgggcggacgcgtgggtgacgaccaagacggaataatggatggtgaaagggtcctcctttgtttaaagcgtgccttaagaattgcaaatgccgctcaacagatggctaatgtaacaaggggaagtagcggatctgtcgcgctatttatcgaaattttgaacaagtatttgtacttcttcgagaaaggaattccagagatcacgaacactgtaatccaggatttgattgaattgattaggacagagaagcaaagtgagaacactgtagctgatccatcgacagaggccttctttgcaagcactttacgttacattgaattccagaagcagaaaggtgggagcataggtgaaaaatatgagcaaataaaaactacctgattgtgcactaagtcaaaacaagaacagcgtcacgacgtgttgtttttgtctcgagtcatatttgcggaagttcagtgaaatacaagccattg

SEQ ID NO: 402538 - DNA, 468 bp, Oryza sativa nipponbare
ccacgcgtccgctgctttcctctcaccccaccgcgccaccggcgagcggcccgcgagggaggaggcgctgccgccgcctctgctgatgctgatgatgctaggggcggcctcccagtggatcctggccgccgccgcggcggcggccgtggcggcgctgctgtggctggccgtgtcgacgctggagtgggcctggtggacgccgcggcggctggagcgcgccctccgggcgcagggcatccggggcaaccggtaccgcctcttcaccggcgacgtgccggagaacgtccggctcaaccgggaggcccggaagaagccgctgccgctcggctgccacgacatcatcccgcgcgtgctgccgatgttcagcaaagccgttgaggagcacgggataccatcattcacttggtttggcccaacgccaagagtgatgatttcagaccctgaatcaataagggagttatgcctaat

SEQ ID NO: 402539 - DNA, 444 bp, Oryza sativa nipponbare
ccacgcgtgcgcaaaaaaccaacccaaccgccgccgcatcgccctcgttagaacgatggccgcgtcggcgctgcaccagaccaccagcttcctcggcaccgcccctcgccgggatgagctcgtccgccgcgtcggcgactccggtggccgcatcaccatgcgccgcaccgtcaagagcgcgccccagagcatctggtatggacctgaccgtcccaagtacctgggcccgttctcggagcagacgccatcgtacctgaccggagagttcccgggagactacgggtgggacacggcggggctatcggccgacccggagacgttcgcgaggaacagggagctggaggtgatccactcgcggtgggcgatgctgggggcgctgggctgcgtctttcccggagatcctgtccaaagaacgggggtgaagttcggggaagggccgtgtgg

SEQ ID NO: 402540 - DNA, 419 bp, Oryza sativa nipponbare
ccacgcgtccgctgcactcacacgcattgcagaggagaggcgacaatggaggggaaggaggaggacgtgcggctgggggcgaacaggtactcggagaggcagccgataggtacggcggcgcagggcgccgtttacgacaaggactacaaggagccgtcgccggcgccgctgttcgagccaggggagctcaagtcgtggtctttctaccgggccggtatcgtcgagttcgttgccaccttcctttccctttacatcaccatcctcaccgtcatgggggtctttaagttcttttccaagtgctccaccgtcggcatccagtgtatcgtctggtccttcggaggcattatctttgcgctcgtttactgcacctccggcatctccggaggacacatcaacccatcagttactttttggctgtt

SEQ ID NO: 402541 - DNA, 501 bp, Oryza sativa nipponbare
ccacgcgtccgagcagatctagcacagataacatttgattacccattcaggatacctccgtactttgctttgattatcagagccattggagtattggagggtatagctttggtgggtgaccctgaatttgccattgtggatgaagcatacccatatattgcgcagagactactaacagatgagtcacctcgtctaaggagcgccttgcgatacacaatatatggcaaaacaggtgtattcgacgcagaaagattcattgatgtcatgcaagctttcgagaattttattcgtgcagcaaagagtggtggtggggagaacttgaaaggcagcatggctgagctggctgagataggaactctaccaagcacaagtttagttcctgcatttccaatggccatatcacagcctgagcaaccagtcaaagctcgggctgctctttcttttctactctctgagaggggcgacttttttagggagttcattcttgatgagattgtcaaa

SEQ ID NO: 402542 - DNA, 415 bp, Oryza sativa nipponbare
ccacgcgtccgcgctggtgcctacgacgatgagcttgtcaagaccgcgaaaaccattgcatcaccaggaaggggtatccttgccatggatgagtcgaacgcgacctgcggtaagaggcttgcgtcaattggccttgagaacaccgaggccaaccgccaggcttaccggaccctccttgtcaccgcaccgggcttgggacagtacatctccggtgctatcctcttcgaggagactctgtaccagtcaactgtagatggcaagaagattgtcgacatcctcactgagcagaaaatcgttccaggtatcaaggtcgacaagggtcttgtgccccttgctggctccaacaacgagtcatggtgccaaggtctcgacggccttgcctcgcgcgaggcggcatactaccagcagggcgctc

SEQ ID NO: 402543 - DNA, 433 bp, Oryza sativa nipponbare
ccacgcgtccggttcgaggagtacaagctcaaggagatcaagaacgggcgattggccatgctggcttttgtgggtttctgcgtccaacagtcggcgtacccgggcaccggcccactggagaacctggccagccacctctcggacccgtggcacaacaacatcggcgacatcatcatcccgagaaccatctacccttgagcttggcacgaaccggtgcgtgcgtccgggcgtacgtgaaggctatgggtggtttttatgtgcgtgcgtactgtgtgtgattggttgattattgcgcgcgcgtgcgcacgcagtggtcggccggcaggcagctgctgggtggccttgtaatgtaaagcttaagtagagggtgctctcttgtgaatccgtccatcttaatttttgtatcaaacacgaaatctaactggtcttagtt

SEQ ID NO: 402544 - DNA, 458 bp, Oryza sativa nipponbare
  unsure (1)..(458): unsure at all n locations
ccacgcgtccgggagaacgtcaagcgtgtgcagctggctgagcagtacttgagcgaggctgctcttggtgacgctaactccgacgccatgaagactggttccttctacggttctgcgccatccagctgaataaaagatctctagctattcgcatcccatcgatgcatcgtaggcggcctgcataggaggaggagggcaaggagcacagcaagcaggtaacctgcctgtgccggaaggttgcaccgaccctgttgccaagaacttcgacccaacggcgaggagcgacgacggcagctgcctttacaccttttaagcaggccggcttgacgcttgctattaattatttctcctttttatgttttctctttgttctgtgtatcagatcgcgcccaagccatagctgggcatgacaagtttttgttaataataatataatataaagatatgggctntcctnt

SEQ ID NO: 402545 - DNA, 509 bp, Oryza sativa nipponbare
  unsure (1)..(509): unsure at all n locations
gtcgacccacgcgtccgattgaaagtttgtatgttattgacaggtgctcaatgaagctaaccttacaaatgctgtgcttgtacggtcagtccttacgcgtagcgatcttggtggagcaatcattgaaggtgcagacttcagtgatgctgttattgacctgacacagaaacaggctttgtgcaaatatgcaaatggaacaaaccctttaacaggggtcagcacacggaaaagccttggatgcggcaacagtcgccgaaatgcatatgggagcccttcctcccctcttttgagtgctccaccacccaaacttctggaccgtgatggtttctgcgatgaagcaactggtatgtgtgacgcataataaaagaagaattatccagcatactgcagaaattgagcactgaatgctgtatatacattggagactgaacanaagacaaagcagatcggtttaggattcagagaaattgttcttgttttgcgaatgttgtagcattgcagagagatca

SEQ ID NO: 402546 - DNA, 505 bp, Oryza sativa nipponbare
ccacgcgtccgcccacgcgtccgcccacgcgtccgcccacgcgtccgcgccgctgccgtacacgccgtacctgaagatcctgagcaaggcggcggtgaagacgagcacgacgtcgaggtggtcgctgagcacggtgacgcaggtggaggagacgaagcagatactcaagatgctgcccgtgctggcggtcacgttcgtgccggcggcgatgatggcgcaggtgaacacgctgttcgtgaagcagggcacgacgctggaccgccgcgtcggcggcgggggcttcgagatcccgccggctagcctgcaggcgttcgtgaccatctcgatgttggtgtccgtcgtgctgtacgaccgcgtgttcatgccgctcatggcgcgggcgaccgggaacccgcggggcatcacgctgctgcagcggatgggcgtggggctcgtcatccacatcgccatcatggggatcgcctccgtgacggagcggcacaagctcgccgtggcgcgggagcac

SEQ ID NO: 402547 - DNA, 450 bp, Oryza sativa nipponbare
ccacgcgtccgggcgaacaagctgcagctcgccatcgcgttcgtcgtcgtcgtcgtcgtcctcggcgccatggcggcatcggcggcggcggcggtggcccccatgctgacgatgcacaacctgtgcccgtacacggtgtggccgatcgtgtcgccggacagtggctcgccgcccatcgccgacgggatacggctggagggccgcggcgtcgggctgaggtcgctcaacctcccggcggggttctggtcggggcgcgtcgtgccgcgcacatggtgcagggacggcgggcggtgcgacaccgggaacgcgccgccggcgacggtggtgaggctgtcgttcaacggcgccggcgggctggctgagtacagcgtcaaccctggggaagggttcaacgtgccgacggtggtgagcccgcacgccatcggcggttggatgtgccctgcgctgggc

SEQ ID NO: 402548 - DNA, 406 bp, Oryza sativa nipponbare
ccacgcgtccggacacgactcaccaatggagctcgtattcgccttctcctccaccaccgccgtcacggcgctccccggcgccgtcaggggctcctccttgctctgctgctccgtcaggagcggcaggctgatgctgaggcaggccgagtcgtcgtccgagcgggcgtccgtcggcgcgcgcgccgcggcgcccgacaggccaatctggatgcccggcaggaccccggcgacgaggctggacgggaggctccccggcgacttcggcttcgaccccctgggtctcggatcggacccggagagcttgccgtggaacttgcaggcggagctgctgcactggctgatggccatgctgggcgcgatggtcatctttatgccggagttcctgaccaagatcgggatccttaac

SEQ ID NO: 402549 - DNA, 465 bp, Oryza sativa nipponbare
ccacgcgtccggaagaagaagaagaaagaagaagaagaagatgcagaccgctgctagcagtgtcgttggattgtcggccgtgttgcccgctgctgtgaaggggcgcagcctgcagattcaggctcctcgccgtgttgcgttgcgcgttcgtgcggcggcggcggcggtggcagtggaggctgcggaggtggactacagctctaacatctcggtgtttccgatggaggcgtgcgacctcatcggcggcgaggcgtgcaacgtgcagatgtacccagaggccaagctctcatcatcggctgctgttgctgtttctcgtgcggcggcggaggaagtcgacagggactacctatcctacgacgagcccaccacggtgttccccgaggaggcgtgcgacgatctgggcggagagttctgcaaggccacctgatcccattcccatccatggagaattggagtcttctatca

SEQ ID NO: 402550 - DNA, 336 bp, Oryza sativa nipponbare
  unsure (1)..(336): unsure at all n locations
ccacgcgtccgcgacgacgctgacatcggctactgatcaccacatggatgcttggctactcaagccccagttgatttggcagtggaggaagagggctcgtgcatggtgatttgtgtggtttgggtgtagaagctgataggatcatggaggaatggaagatctgttgtacttaagaaaaactaagtcttgtataccgtacctctctcttgtgtgtatttaccatcttaagattcttgagaacaattccttcgtgcaattctcgtgctgttgtcgctgcagctgcagagagattttcaatcgtatgtactccagcatanngtnnannananaaatnaa

SEQ ID NO: 402551 - DNA, 476 bp, Oryza sativa nipponbare
ccacgcgtccgctttttttttttttttttttttgagaaacaatgtgccttatctcgcgaccgtaattccgtaccatatgttcattactaggccatacacacgcatacaccttttttttttctttcaagatgacagcacatttattcaaaaatgtttgccttcatccttatgatacatgctgcatagagtttgtgagcgttacacactatttcccgccagcaagaagcagagcagagacttcttcatgacaggttctttactacgagtacgcagggcactgcaacattcttcatgacagaacctctggcactcatgcttcggcagccttctcttcacccttttgtgctagcttcgccttctttgcttcatagtctttcacggcagctttaattgcatcctcagcaagcatgctacaatggagctttactgggtgaagtgacaagtgcttggcaatctcagtgtttttataagcacta

SEQ ID NO: 402552 - DNA, 240 bp, Oryza sativa nipponbare
ttcgatccacgcgtgcgtccacgcgtccgcatagatcaggtagaacagtgagagtgaggtgcataaaaatttgagctgaatctgaggatggcaacatccatgatcacctctcctttggtggcgccggcccgggccaaggaccttccgtccatctcccgccggtgatccttcttcgccatcgtttgcagctgttggaataagatcaagaccgtcaagccctactggattggaggtggcatg

SEQ ID NO: 402553 - DNA, 524 bp, Oryza sativa nipponbare
ccacgcgtccgccacgcgtccgcggacgcgtgggtgcaccggcggcgtctccggcgggcacatcaacccggcggtgacgctgggcctcttcttcgggcggaagctgtcgctcgtccgcaccgtgctgtacgtcgtggcgcagtgcctcggcgccatcgccggcgccggcatcgtcaaggggatcatgaagcgcccctacgacgcgctcggcggcggcgccaacaccgtcagcgacggctactccgccgccggcgccctcggcgccgagatcgtcggcacgttcatcctcgtctacaccgtcttctccgccaccgaccccaagcgcaccgcccgcgactccttcatccccgtactcgtgccgctgccgatcgggttcgcggtgttcgtcgtgcacctggcgacgattccgatcaccggcacgggcatcaacccggcgaggagcctcggcgccgccgtgctgtacaaccagcacgcagcttggaaagaccactggatctttctggtggggccggtgtatcgggcgt

SEQ ID NO: 402554 - DNA, 486 bp, Oryza sativa nipponbare
ccacgcgtccgcggacgcgtgggctcccggtgacttcgggttcgacccgctgggcctcgccaccgtgccggagaacttcgagcggttcaaggagtcggaggtgtaccactgccggtgggccatgctcgctgtgcctggggtgttggtgccggaggcgctggggctgggcaactgggtgcaggcgcaggagtgggcggcggagcccggcggccaggccacgtacctcggcaacccggtgccatggggcacgctgccgacgatcctggtcatcgagttcgtcgccatcgccttcgccgagcaccagcgcaccatggagaaagaccccgagaagaagaagtaccccggcggcgccttcgacccccctcggcttcttcaaggaccgggtcaagttcgaggagtacaagctcaaggagatcaagaacgggcgattggccatgctggcttttgagggtttctgcgttcaacaatcggtgtacccgggccacc

SEQ ID NO: 402555 - DNA, 517 bp, Oryza sativa nipponbare
ccacgcgtccgaagaaagcataagcaacacaagggattaactcatcactcacttagctaattaaatcttcgaccatgtcggacaagtgcggcaactgcgactgtgctgacaagagccagtgcgtgaagaaaggtaccagctatggcgtcgtcatagttgaagccgagaagagccacttcgaggaggtcgccgccggcgaggagaacggcggctgcaagtgcggcaccagctgctcctgcaccgactgcaagtgcggcaagtgaagtcacgaagcaaccgaacactcgccgccggcgagtcacctaccttaattagtccacaataaaaaccacccatatgagtgtggtttgtgtgtgtgctgattattgctgaattaaacccgtgtgttatcgattaattaagcagctggtcgcttcggcgactatgcgtgtatcaacgtatgaatttgtgtgatgtgatgtacccgtgctattctcagtgaaattaatcaatcgtgtattcgtgtggtttgcctagt

SEQ ID NO: 402556 - DNA, 431 bp, Oryza sativa nipponbare
ccacgcgtccgcccacgcgtccggccgccgccaccaccgttgccgttgccgcctccaccacccgccctcgaccacagccatgccgccgaagctcgacccgacccaggtggtggatgtgttcgtccgcgtgaccggcggtgaggtcggcgcggcgtcgtcgctcgcccccaagatcgggccgctcggtctctccccgaagaagatcggagaggacatcgccaaggagaccgccaaggactggaagggcctccgcgtcaccgtgaagctcaccgtccagaaccggcaggccaaggtctccgtcgtcccctccgccgcggcgctcgtcatcaaggcgctcaaggagcccgagagggaccgcaagaaggtgaagaacatcaagcacagcggcaacatcagcctcgacgacgtcatcgagatcgcgagggtcatga

SEQ ID NO: 402557 - DNA, 382 bp, Oryza sativa nipponbare
ccacgcgtccgcccacgcgtccgggccggcatcggcgtcggctacgcgctcatgatcgcgcccgtgtacaccgccgaggtggcgccgacgtcggcgcgcggcttcctcacctcgttcccggaggtgttcaacaacagcggcatcctcctcggctacgtctccaacttcgccttcgcgcgcctccccgtccacctgagctggcgcgccatgttcctcgtcggcgccgtgccgcccatcttcctcggcatcgccgtcctcgccatgccggagtcgccccggtggctcgtcatgcggggccgcatcgaggacgcgcgccgcgtgctcctcaagacctccgactcgcccgacgaggccgaggaccggctcctcgacatcaagaaag

SEQ ID NO: 402558 - DNA, 324 bp, Oryza sativa nipponbare
  unsure (1)..(324): unsure at all n locations
ccacgcgtccgaaaaaattttctcctcctctttctcttctctctgtgtcactgcgtgtgaggagcgtagcttagagtgagaaaataatggcgttggagacgtgcttcagagcctgngcgactctgcacgccccacagccaccgtcctccggcggcagtagggacagactcctcctctccggcgccggcagcaaccagtccaagccaaggttgttcgtcgtctctccgttaccgctccgacctgcctaccgattcgcctgccaaggcagcaacgtcgtcaactaaatggtggtggcggacgagaaaaacttggacagcatggtgc

SEQ ID NO: 402559 - DNA, 431 bp, Oryza sativa nipponbare
  unsure (1)..(431): unsure at all n locations
ccacgcgtccgcggacgcgtgggcggcggtgctatcggccgacccggagacgttcgcgaggaacagggagctggaggtgatccactcgcggtgggcgatgctgggggcgctgggctgcgtcttcccggagatcctgtccaagaacggggtgaagttcggggaggcggtgtggttcaaggccggcgcgcagatcttctccgagggggggctcgactacctggggaaccccaacctggtgcacgcgcagagcattctcgccatctgggcggtccaggtggtgctcatgggattcgtcgagggctaccgcgtcggcggcggcccgctcggtgagggcctcgacaaggtgtacccaggcggcgccttcgacccgcttcggnctcgccgacgaccctgacaccttcgtcgagctcaaggtgaaggagctcaagaac

SEQ ID NO: 402560 - DNA, 434 bp, Oryza sativa nipponbare
ccacgcgtccgcacacattctcgaagaaggagaagaaggagaggagcagccatggcgtcgtcggtggcagcggcggcgagcacgttcctggggacgaggctggcggacccggcgccgcagagcgggaggatcgtggcgaggttcgggttcggcggcgggaagaaggcggcggcgaagaaggcggcgaggccgtcggcgccgacgacggacaggccgctgtggttccccggcgcggtggcgccggactacctggacgggtcgctcgtcggcgactacggcttcgacccgttcggcctcgggaagccggcggagtacctgcagttcgagctggactcgctggaccagaacctggccaagaacaacgccggcgagatcatcggcacccggttcgagaccggcgaggtgaagtccaccccgttccagccctacaccga

SEQ ID NO: 402561 - DNA, 520 bp, Oryza sativa nipponbare
  unsure (1)..(520): unsure at all n locations
ccacgcgtccgctcccatcctctcgcgcatcctcctccgactacctcggttgggttttgggggcggctggagatgtcggactccgaggagcaccacttcgagtcgaaggccgacgccggcgcgtccaagacctacccgcagcaggctggtactattcgcaagaacggtcatattgtcatcaagaaccgcccatgcaaggttgttgaggtctccacctccaagactgggaagcatggacatgcaaaatgccactttgtggccattgacatcttcaatgggaagaagctngaagatattgtgccctcctcccacaactgtgacgtcccccacgtgaaccgtactgattattagctgattgacatttctgaagatggatttgtcagcctcctgactgaaagtggaggcactaaggatgacctgaggctccctagtgatgaggctctgcttactcagatcaaggatggattcgtcgaggggaaggatctgattgttaccgtgatgtctggcatggttgaggagc

SEQ ID NO: 402562 - DNA, 527 bp, Oryza sativa nipponbare
ccacgcgtccgccacgcgtccgcgtgtctacacctgccacaatgtccagtgcccgcatagcgactatggatacgggttccttgaccggaacgcgcgcaacagccaccaatacacttgcaagtacaatgatccactccagcagagcacggagaacaagccatcgccaccggccatcttcccggcaacctacaacacgccgaaccaggctctgaacaatctggatttcggcctgcccatggatggccagaggtcaattacagagctgatgaacatgtacgacaacaacttcgtggccaacaagaaccttagcaacgacaatgccacgatcatggagaggcctaatgcagtcaacccaaggatacagattgaagaaggcttttttggacagggaagtggcatcggcggcagcaacggaggtgtgttcgaagatgtcaatggcatgatgcagcaaccgcagcagaccaccccggcacagcagcagttcttcattcgcgacgatactccattcggtaaccagatgggcgaca

SEQ ID NO: 402563 - DNA, 435 bp, Oryza sativa nipponbare
cccacgcgtccgaaaagagaggccacgaagagagctcagctgctgcctctagcttacttggtgataaggaggaggaggaggaggagggcaccgacatggccgcagccacggcgtacaccgtggcgctcctcggcgccaccggcgcgcgcgtccccgccgctccacgctccgccgtgcttctgccgcgccgcggcggcgtgctccaaccgctgcgccttcaggacgcgccgcgactgttcctgctccgcgtcagggccgcctacgacgacaccttcacctcggccagcggcgacgagctcgtcgtcgacctcaaggcaaagggggaggcgatcgaggacaaggcgacgttccttctctacagcggctgcgccgtcgtctccctttggcttaacaccgtctgctgcggctccatcaactgcgtgccggtgggtccca

SEQ ID NO: 402564 - DNA, 499 bp, Oryza sativa nipponbare
  unsure (1)..(499): unsure at all n locations
acccacgcgtccgccacgcgtccgctcatattgtggttggaacacctggaaggatacttgctctagctagagaaaaggatctttccttgaagaatgtgaggcatttcattcttgatgaatgtgacaagatgctcgattcgcttgatatgcgtagagatgtgcaggagatcttcaaaatgacaccccatgataagcaagtgatgatgttttcagcgacccttagcaaggagatccgcccagtttgcaagaaattcatgcaagatcctatggaaatttatgttgatgatgaggctaaactgacccttcacgggcttgttcagcactatataaaactaagtgaggcggagaagaaccggaaattgaatgatctcttagatgcacttgacttcaatcaagttgtgatatttgttaaaagtgntagtagagctgcaaaactgaacaagctgctttgtgaatgcaactttcctgcgatctccatacattctggaatgacacaaga

SEQ ID NO: 402565 - DNA, 479 bp, Oryza sativa nipponbare
ccacgcgtccggatgaacttgctcaatgatccgagcataaaggagatggcggagcagatcgccaaggacccggcgttcacggagatggcggagcagctgcagaagacggtgcagtcgccgccggcgcggggggcggcgcaggaggctgcggcggcggcggcgccggcgctggacccgagcaagtacgtgtcgacgatgcagcagctgatgcagaacccgcagttcgtggcgatggcggagcggctgggcagcgcgctgatgcaggacccggccatgtcgtccatgcttggcggcctcaccaaccccgcccacaaggagcagctcgaggcccgcatcgcccgcatgaaggacgacccctccctcaagcccatcctcgacgagatcgagaacggcggccccgccgccatgatgaagtattggaacgacccttgagcgctgcagaaagtcgggagggcgatgggcgtcggcccgtccggcga

SEQ ID NO: 402566 - DNA, 373 bp, Oryza sativa nipponbare
ccacgcgtccgctcatcgccatctctctcagctctcacagctcactgcatcaatggccgcggccaccatggcgctctcctccccggtgatggcccgcgcggcgccgtcgacctcctccgcgctcttcggcgaggcgcggatcaccatgcgcaagaccgccgcgaagcccaagccggcggcgtcgtcggggagcccgtggtacggcgccgaccgcgtcctctacctcggcccgctctccggcgagccgccgagctacctcaccggcgagttcccgggcgactacgggtgggacaccgcggggctctccgccgacccggagacgttcgccaagaaccgggagctggagggatccactcccggtgggcgatgctgg

SEQ ID NO: 402567 - DNA, 389 bp, Oryza sativa nipponbare
ccacgcgtccgaatagccgcgcttagcgtaactagacgaacgtactagcagaagaagaagaagaaaatgccggtgagccggatcgcggtgggcgcccccggcgagctgtcccacccggacacggccaaggccgccgtcgccgagttcatctctatgctcatcttcgtcttcgccggatcgggatccggcatggccttcagcaagctgacggacggcggcggcacgacgccgtcggggctgatcgccgtctccctggcgcacgcgctggccctgttcgtggcggtggcagtgggagccaacatctacggcgggcacgtgaacccggcggtgacattcggcgcgttcgtgggggggaacatcagcctggtgaaggcggtggtgtactgggt

SEQ ID NO: 402568 - DNA, 530 bp, Oryza sativa nipponbare
ccacgcgtccggcataagcaacacaagggattaactcatcactcacttagctaattaaatcttcgaccatgtcggacaagtgcggcaactgcgactgtgctgacaagagccagtgcgtgaagaaaggtaccagctatggcgtcgtcatagttgaagccgagaagagccacttcgaggaggtcgccgccggcgaggagaacggcggctgcaagtgcggcaccagctgctcctgcaccgactgcaagtgcggcaagtgaagtcacgaagcaaccgaacactcgccgccggcgagtcacctaccttaattagtccacaataaaaaccacccatatgagtgtggtttgtgtgtgtgctgattattgctgaattaaacccgtgtgttatcgattaattaagcagctggtcgcttcggcgactatgcgtgtatcaacgtatgaatttgtgtgatgtgatgtacccgtgctattctcagtgaaattaatcaatcgtgtattcgtgtggtttgcctagtaaaaaggtctatcatactc

SEQ ID NO: 402569 - DNA, 504 bp, Oryza sativa nipponbare
  unsure (1)..(504): unsure at all n locations
ccacgcgtccgcgctgggccatgctcgccaccctcggcgccctctccgtcgagtggctcaccggcgtcacctggcaagacgccggcaaggtggagctggtggatgggtcgtcgtacctggggcagccgctgccgttctcgatctcgacgctgatctggatcgaggtgctcgtcatcggctacatcgagttccagcgcaacgcggagctggacccggagaagaggctgtacccgggggggtcctacttcgacccgctcgggttggcgtcggacccggagaagaaggagcggctgcagctggcggagatcaagcacgcccgcctcgccatggtcgccttcctcggcttcgccgtgcaagccgccgccaccggcaaggggcccctcaacaactgggccacccacctcagcgacccgctccacaccaccatcttcgacaccttctnctcatcctcttaatntaagctctttcgcgcgcaattcaaacgggatcgatgcgttggtgtgc

SEQ ID NO: 402570 - DNA, 492 bp, Oryza sativa nipponbare
  unsure (1)..(492): unsure at all n locations
ccacgcgtccggcggtggtggccggcgaagaggacaacgaggtggccgggccgggcgggccggcggcgcccaacccgtggaagctctgctcggtgtcgcgcgtggaggaggtgaagatggtggcgaggctgatgccggtgtgggcgacgacgatcctcttctggaccatctacgcgcagatgatcaccttctccgtggagcaggccaccaccatggaccgccgcgtcggcgccggcttcgagatcccggccgcctcgctcaccgtcttcttcgtcggcgccatcatgctcaccctcgccgtctacgaccgcgtcttcatcccgctctgccgcgtactcaccggcaagcaaggcttcaccaacctggagaagatcggcatcggcctcgccctctccatcctcggcatggccgccgccgcgctctgcgagaagaagcgccctcgccgncgcgtcgccgncaccaccgggactccacgccgatcagcgtgttcct

SEQ ID NO: 402571 - DNA, 447 bp, Oryza sativa nipponbare
ccacgcgtccgcccacgcgtccgcccacgcgtccgcccacgcgtccgcaggaaagcataagcaacacaggggattaactcatcactcacttagctaattaaatcttcgaccatgtcggacaagtgcggcaactgcgactgtgctgacaagagccagtgcgtgaagaaaggtaccagctatggcgtcgtcatagttgaagccgagaagagccacttcgaggaggtcgccgccggcgaggagaacggcggttgcaagtgcggcaccagctgctcctgcaccgactgcaagtgcggcaggtgaagtcacgaagcaaccgaacactcgccgccggcgagtcacctaccttaattagtccacaataaaaaccacccatatgagtgtggttggtgtgtgtgctgattattgctgaattaaacccggtgttatcgattaattaagcagctggtc

SEQ ID NO: 402572 - DNA, 431 bp, Oryza sativa nipponbare
ccacgcgtccgctactggacatactctactactactagccagtaagctagctaactaactacgtggctatggcccccaccgtgatggcctcctcggccacctccgtggctccattccaagggctcaagtccaccgccgggctccccgtcagccgccgctccaccaactcgggcttcggcaacgtcagcaatggcggaaggatcaagtgcatgcaggtgtggccaattgagggcatcaagaagttcgagaccctatcgtacctgccaccactcaccgtggaggatcttttgaagcagatcgagtacctgcttcgatccaagtgggtgccttgcctcgagttcagcaagggtggattcgtctaccgtgagaaccacaggtctcccgggtactacgatggcaggtattggaccatgtggaagcttgccatgttc

SEQ ID NO: 402573 - DNA, 265 bp, Oryza sativa nipponbare
ccacgcgtccgctccggcgagccgccgagctacctgaccggcgagttccccggcgactacgggtgggacaccgcggggctctccgccgacccggagacgttcgccaagaaccgggagctggaggtgatccactccaggtgggcgatgctcggcgcgctgggctgcgtgttcccggagctcctcgcccgcaacggcgtcaagttcggcgaggcggtgtggttcaaggcggggtcgcagatcttcaacgagggcgggctcgactacc

SEQ ID NO: 402574 - DNA, 444 bp, Oryza sativa nipponbare
ccacgcgtccgcccgcgcgtccgtactgctataaggagcgcgccgtgcaccgcctctcacaatgtcgaccgccgccgccgccgccgctgcccagagctggtgcttcgccactgtcaccccgcgctcccgcgccacagtcgtcgccagcctcgcctccccatcaccgtcctcctcctcctcctcctccaacagcagcaacctcccggcccccttccgcccccgcctcattcgcaacacccccgtcttcgccgcccccgtcgcccccgccgcgatggacgccgtcgtcgaccgcctcaaggatgggttcgccaagttcaagaccgagttctatgacaagaagccggagctcttcgagccgctcaaggccggccaggcacccaagtacatggtgttctcgtgcgccgactctcgcgtgtgcccgttcgtgaccatgggcctggagcc

SEQ ID NO: 402575 - DNA, 480 bp, Oryza sativa nipponbare
ccacgcgtccggctaattaagcaaaagaagaagaagaagaaagaagaagaagaagatgcagaccgctgctagcagtgtcgttggattgtcggccgtgttgcccgctgctgtgaaggggcgcagcctgcagattcaggctcctcgccgtgttgcgttgcgcgttcgtgcggcggcggcggcggtggcagtggaggctgcggaggtggactacagctctaacatctcggtgtttccgatggaggcgtgcgacctcatcggcggcgaggcgtgcaacgtgcagatgtacccagaggccaagctctcatcatcggctgctgttgctgtttctcgtgcggcggcggaggaagtcgacagggactacctatcctacgacgagcccaccacggtgttccccgaggaggcgtgcgacgatctgggcggagagttctgcaaggccacctgatcccattcccatccatggagaattggagtcttctatca

SEQ ID NO: 402576 - DNA, 451 bp, Oryza sativa nipponbare
  unsure (1)..(451): unsure at all n locations
ccacgcgtccgccgagctaccgagctaatccagccatggcctccaccgcgctctccaccgcctccaaccctactcagctgtgcaggtctcgcgcctcgctgggcaagcccgtcaagggcctgggcttcggccgggagcgcgtgccgaggacggcgacgaccatcacatgccaggccgcgagcagcatcccggccgaccgcgtcccggacatgggcaagcgccagctgatgaacctcctcctgctcggcgccatctcgctccccaccgtcggcatgctcgtcccctacggcgccttcttcatccccgccgggtccgggaacgccggcggcgggcaggtcgccaaggacaagctcggcaacgacgtgctcgccgaggagtggctcaagacacacggncccaacgaccgcaccctcacccaggggctcaagggtgacccgacgtacctcgtcgt

SEQ ID NO: 402577 - DNA, 517 bp, Oryza sativa nipponbare
ccacgcgttcggcaccgccggcagtgaccaacagcaaccaatcagcaaatcagcaatggagagggctctgatgagcctcatgaggcggcgctccctcctccagagcggcggacgagcaccgccggcgatggccgccgccgccggtggctcaccattcttctccaccctgcagcaagcagccgccgcagacccggtccagtcgcctggcatcttgccagggctcaagatcagggactctgcgttacagctgattgggaggacacccatggtttacctgaacaaggtcactgaaggatgtggggcccggattgctgctaagctcgagttcttgcagccgttcttcagcgttaaggacagaccagcaatatcaatgttggaagatgctgaaaagaaggggttgatcaccctaggtaagaccacactgatcgagccgacatcatggaacatgggtattggcctggcattcatggctgctcttaaagggtatgtacttatactcacaatgccttcatacacc

SEQ ID NO: 402578 - DNA, 520 bp, Oryza sativa nipponbare
  unsure (1)..(520): unsure at all n locations
ccacgcgtccgggattcagcatgactggaaacttttggagaaagatctaccagcatctatttatgtccgtgttgctgaagatagaatggaccttcttagggctgctattatcggacctaagggaacaccgtaccacgatgggctcttcttctttgatattcaatttagtaactcttaccctgctaatcctccatcagtatactaccactctggcggactacggattaacccaaacttatacaataatggaaaagtatgccttagtcttcttggtacctgggcaggtagtggttgtgagacgtggaatccatctcagtcgaccatgctacaagtgctcgtctccattcaagctctcattttgaatgagaagccctacttcaatgagccaggatatgcatcctacgccaatagtgtatctggagagcggattgctatggagtataacgacaacacanttctgcactcatgcaggacgatgctctactcacttcggcggcctccagagcacttcgcagacctt

SEQ ID NO: 402579 - DNA, 397 bp, Oryza sativa nipponbare
ccacgcgtccgcggacgcgtgggcgccaccgtgccggagaacttcgagcggttcaaggagtcggaggtgtaccactgccggtgggccacgctgccgacgatcctggtcatcgagttcgtcgccatcgccttcgccgagcaccagcgcaccatggagaaggaccccgagaagaagaagtaccccggcggcgccttcgaccccctcggcttctccaaggaccccgtcaagttcgaggagtacaagctcaaggagatcaagaacgggcgattggccatgctggcttttgtgggtttctgcggtcaacagtcggcgtacccgggcaccggcccactggagaacctggcccgccaccttttggacccgtggacaacaactcggggacatattattcgagaac

SEQ ID NO: 402580 - DNA, 513 bp, Oryza sativa nipponbare
ccacgcgtccgcacatgtggtggtcgagggcaagtaatgagaactgagcagacaccatttggtctgttctcccaggtttcaattagccccacctgtgcaggagagggtgaagtcattacagagtattgcaagaaatgtgctggagaggggcgtgttcgtgttagaaaggagatcaaagtaaaaatccctccaggtgttagcaaaggtagtactcttcgtgtacgtggtgaaggtgatgcgggaccaaaaggaggacctcctggagatctttctgtttgccttgatatagaggagccagcagatattaaaagggatggtatcaacttgtattcaactgtttcagtaagccacattgaagctattctgggcactgttaaaaaggtcagaactgtcgatggaaatagtgaacttacaatacctccaggtacccaacctggtgatgaagtggttctagcaaagcaaggtgttccatcatagtaaaaaccatcttgtcgtggtgatcatttatacact

SEQ ID NO: 402581 - DNA, 512 bp, Oryza sativa nipponbare
  unsure (1)..(512): unsure at all n locations
ccacgcgtccggaaagcataagcaacacaagggattaactcatcactcacttagctaattaaatcttcgaccatgtcggacaagtgcggcaactgcgactgtgctgacaagagccagtgcgtgaagaaaggtaccagctatggcgtcgtcatagttgaagccgagaagagccacttcgaggaggtcgccgccggcgaggagaacggcggctgcaagtgcggcaccagctgctcctgcaccgactgcaagtgcggcaagtgaagtcacgaagcaaccgaacactcgccgccggcgagtcacctaccttaattagtccacaataaaaaccacccatatgagtgtggtttgtgtgtgtgctgattattgctgaattaaacccgtgtgttatcgattaattaagcagctggtcgcttcggcgactatgcgtgtatcaacgtatgnaattgtgtgatgtgatgtacccgtgctattctcagtgaaattaatcaatcgtgtattcgtgtggtttgcct

SEQ ID NO: 402582 - DNA, 506 bp, Oryza sativa nipponbare
ccacgcgtccgcccacgcgtccgcccacgcgtccgcccacgcgtccgaagatatccaagaagcatgacgagggcgtcgtcaccaacaagtacaggcccaaggagccctacgtcggcaagtgcctcctcaacaccaagatcaccgccgacgacgcgcccggcgagacatggcacatggtcttcagcaccgagggtgagatcccctacagagaggggcagtccatcggcgtcatcgccgacggcgtcgacaagaacggcaagccgcacaagctcaggctctactccatcgccagcagcgctctcggcgacttcggcgactccaagaccgtttcactctgcgtcaagaggctcgtttacaccaacgaccagggagagattgtcaaaggagtctgctccaacttcctctgtgacttgaagcctggttctgatgtcaagataaccggaccagttggcaaaaaaatgctcatgcccaaagatcccaatggtaatattataatgcctgcgacc

SEQ ID NO: 402583 - DNA, 416 bp, Oryza sativa nipponbare
ccacgcgtccggtcaaactccggctccctgttgtattgaataaatttttgcaacctataactctttcccctgaagagtttttccctcagtggaaagcattgaatgttcaaaatctaaaagttcaagaagtggttaaaggtgtgaaaccattacctcttcctgagatagctagtcttttcatgagccttcacttggcggttgctcctggacttgataataacccgaacaatctggttgcatgcactacattcttttctgaaacaacccgtgccatgctttgtctggtcagaatcgaaactgatccacaagatagaacgcaactccggctcacagtggcatcaggagatcagtatttgacattcgagttgaaagagtacatcaaggaaccattaattgatatcccaagggtacaaaca

SEQ ID NO: 402584 - DNA, 377 bp, Oryza sativa nipponbare
ccacgcgtccggcattatgccacaaagctaatggctttggaattaggagcatatggcattagagtgaactcaatagcacctggaatcttcaagtcagagataaccgctcctctattgcaaaagaaatggttgagcactgttgtttcaaagatagtgccacttaagactcatggcactactgatccagcattgacgtcgctggttcgttttctgatccatgaaacatcatcatatgtgactggcaacatcttcattgtagattctggtgccaccttacctggtgttccaatattctcttctctgtaatattcatcattagaatttgctttcaaaaagtcatcggatctattgatttggcatcaaataaaaatcgaaac

SEQ ID NO: 402585 - DNA, 341 bp, Oryza sativa nipponbare
  unsure (1)..(341): unsure at all n locations
ccacgcgtccgcggctatctatccatctatctactcagctntgcgtcctcccgcgaattcaccgcagcaatggcgtccctcgtcgccgtccagcctgtcgccgtgaagggcctcgccggcagctccatctccggcaggaagctcgccgtcaggccgtcgccccgggcgctctgccgcaccacccgcaggccgcgcgccgccgtggtggccaagtacggcgagaagagcgtctacttcgacctcgaggacatcggcaacaccaccgggcagtgggacctgtacggctccgacgcgccgtcgccgtacaaccctctccagagcaagttcttcgagacgttcgc

SEQ ID NO: 402586 - DNA, 524 bp, Oryza sativa nipponbare
  unsure (1)..(524): unsure at all n locations
ccacgcgggcgtacgcccacgcgtacgncactctctctcctctcctctccgngactccctccacccccgcgcgcgcgcgttttttttttttcgtaagggtttttggagggcggcgcggggatggcggacgcggggcacgacgagagcgggagcccgccgaggagcggcggggtgagggagcaggacaggttcctgcccatcgccaacatcagccgcatcatgaagaaggccgtcccggcgaacggcaagatcgccaaggacgccaaggagaccctgcaggagtgcgtctcggagttcatctccttcgtcaccagcgaggcgagcgacaaatgtcagaaggagaagcgcaagaccatcaacggggaagatctcctctttgcgatgggtacgcttggctttgaggagtacgttgatccgttgaagatctatttacacaagtacagagagatggagggtgatagtaagctgtcctcaaaggctggtgatggtcagtaaagaaggatacaattggtccgcacagtggc

SEQ ID NO: 402587 - DNA, 403 bp, Oryza sativa nipponbare
ccacgcgtccgcccacgcgtccgcccacgcgtccgccacgcgtccggccatctctctcagctctcacagctcactgcatcaatggccgcggccaccatggcgctctcctccccggtgatggcccgcgcggcgccgtcgacctcctccgcgctcttcggcgaggcgcggatcaccatgcgcaagaccgccgcgaagcccaagccggcggcgtcgtcggggagcccgtggtacggcgccgaccgcgtcctctacctcggcccgctctccggcgagccgccgagctacctcaccggcgagttcccgggcgactacgggtgggacaccgcggggctctccgccgacccggaacgttcgccaagaaccgggagcctgagggatccactcccggtgggcgatgctgggc

SEQ ID NO: 402588 - DNA, 359 bp, Oryza sativa nipponbare
ccacgcgtccgaacgtcagcaatggcggcaggatcaggtgcatgcaggtgtggccgattgagggcatcaagaagttcgagaccctctcctacctgccaccgctcaccgtggaggacctcctgaagcagatcgagtacctgctccgttccaagtgggtgccctgcctcgagttcagcaaggtcggattcgtctaccgtgagaaccacagatcccccggatactacgatggcaggtactggaccatgtggaagctgcccatgttcgggtgcactgacgccacccaggtgctcaaggagctcgaggaggccaagaaggcgtaccctgatgcattcgtccgtatcatcggcttcgacaacgtc

SEQ ID NO: 402589 - DNA, 636 bp, Oryza sativa nipponbare
tattataaaatgacttgtattatattcccaacattaaagtttgatattcggatacattttgctcactgtggcagacaaagcagaccacctagagcccttttattcagaatatatgcaagataataaagaacattggtcatagcatatactagtactatatgaatagtctggctggctgcttcacaaagtaacagagtgatcgctactggagttttgagtattctttaatcttcagtgcgcttccctcatcagcagctcctcatcttcttaccctctgtgccatctatctcctcgacagcatcgtcttcccagtagagagcctccattttaccagctttctccgtgttttcatcagcaaagcaatgcagaacagatcgtggcgacccggtggcgatttcagcagtagcagtggagcttttgttaaatgagcaaacccccagaaggcagctcctgctcaaccatgttgctgcaagaataggccccgacatccagccccttggcccaggtccctgcatggttgcggccaccaaagatggtaaccgcaacagagaactccaacgggccaaagcatctcaacaccctcttgacaaggtcaccataggcaagggaagcagggttgaagcccatgacctcgta

SEQ ID NO: 402590 - DNA, 544 bp, Oryza sativa nipponbare
gggaaaaaaacgggtaccttgcaaaaaggagtataactttgcagtttcaagtcccacttcaactacaacccaatctgcattacaggatgggagtctaaaacgactgcagtttcagcgtttttgaggcctgcagagacactgggctcgcgttgcagcaaaagattaggcggcggcgcccacggtggcgccggcggtgagcctcgacgagccgtagagagtctcctcgaaccggatgatctcgttcttggaaccgtaggccacttgagtccgctcgtcgaggttgttgatcaccttgtccagcaccgactgtttgccgtcgctgctgtacccgccggctttctctatcaagaaacccaacggcgccacctcgaacaggagcctcagcttggccttggcttggcgaagacgttacgttggtgaaaatgcccttctccttaactatgatctggttgacatcaggaaccattcctccagtgtaacgcaatgtgtacttctccttgacatagtagttgatgagcttgtcatattcaggattatcaaatgt

SEQ ID NO: 402591 - DNA, 515 bp, Oryza sativa nipponbare
tttgttcaagggaagagagggttaggaacaggattaattaaggcataagtacaccacattccacgtcactaccactccactccactccaccaccctcaaaacacaccacgtacacacatgtacggatgcaatcttcaagctcaagctctcagtctgaccgcatgcggtttagctggttcaacgccggctgcaggatgttgtagagaacccaggcgatcgccggcgccaccacgaacagcagcagcaggccgcggttgtcgccgccctccgccgccgccgcctccgccgccagcctcgccacctcctgcgccgccgacgcctcgggcgggaacgcgagcccggcacccgccgccgcgcccaggccgagcccggcgacgagcacctgcttcgaccggatgccggttaacttggttaaacgcccgctggaggatgttgtaaagcacccacgcgatggccggcgcgatcggcagcagcaacgccagcccgcggttgtcgttggcacccgccgccgccgc

SEQ ID NO: 402592 - DNA, 360 bp, Oryza sativa nipponbare
agccaactactagctccaattcatctatagtcaatctaatagcccattcatacaatagttacatactacactattaatatctagtcccacctgtcatagacacactgcgttttggagtccgtgctacagctggctacaaatttgtagcccggtgctcttctctctcttgatttatcttcgaaaaatatgtttgtagctggcttatagcctgccattgtacctgctttaacgcaacaaagtgtgatgaatgttggtgttgatgatgggatcatgggaagtaaccatgagataacagaggttttgttcgatggagtaagtgtattatatgtatgtaaatattatattattggaaatcatttt

SEQ ID NO: 402593 - DNA, 549 bp, Oryza sativa nipponbare
  unsure (1)..(549): unsure at all n locations
tttttgcaaaagcgtcatgtggcttcttcatcttcttagtgtacacaacaccaactcgatcatcatctcgtcgcactaaacccatcttccccaacccaaagacaacgaactcgctggccacaaatccatccaaccacaattaaccactgctaagctacggtcccccacttcacttgccggggacgaagttggtggcgtacgcccaggcgttgttgttgacggggtcggcgaggtggtcggcgaggttctcgagggggcccttgccggtgacgatggcctggacgaagaagccgaacatggagaacatggcgaggcggccgttcttgatctccttcaccttgagctccgcgaacgcctcggggtcatcggcgaggccgagcgggtcgaaggcgccgcccgggtaaagggggttcgacaacctcgccgagcggcccgccggcgatgcggtacccctcgacggcgcccatgagcaccacctgcaccgcccagatggcgaggatgctctgcgcgtggatcangctcgggttgccgaggtagtcgagcccgccc

SEQ ID NO: 402594 - DNA, 393 bp, Oryza sativa nipponbare
tttagattgaatcatacgtaagtgcttgctgatacaatatcaacatggagggtacattgccggttccatatgaacaaacataaaaacaccgaaaccccatatggccattatgccgatcctagcctagcttggcgaggacatcgccaagagcagatttggtcaacgtgtagtacttctccgcctcttcggggctcttgatcttggctgcatggtcaagcccgtcaatggtggcgaagagcttgccggtgaggtccttgaggcccttcttctcgtccttgggcttggagttgatgacggttttgaggtcgtagcgcaggtaggaggccctgaggcggaggtcgtccctgacgaacggccactgcttcttctcgatgagcggcttgaggttgatga

SEQ ID NO: 402595 - DNA, 586 bp, Oryza sativa nipponbare
atctccgaatcggttgtttgatagtgccaattcacactaagattccaactgtacatatagcaattaacaacaacacatttactcacttcgaaattactcatcgaatagataatatatatatatatacccctttcacttccatcatctaagaaaatatagatagctgtatacatacaagaagaagcagaagcagcaatggtggtcaagccgcggcggcggtgccttcctcctccttcttcttcttggcctcctctccctcctcctccttggccacatcgtcctccatctccgcggcgagggactcgagcagcacggacttagggttcaccatgggcgggcccttctccctcccctcgagctcgtcgagatcgaaggtgatgagcctgtcccagatcccccccttgaacaaggaacccgactttgccttgggggacgcgctgcacgatgccgcagtacatgtggtaggcgttgttggggttcttgacgagcaccaccatcccggggaggaacagcggcagctccggcgccctcggccgctccaccgtggcggcggcggcgagacctttcctgtgcgccggcttggggg

SEQ ID NO: 402596 - DNA, 559 bp, Oryza sativa nipponbare
tttttactaggcaaaccacacgaatacacgattgattaatttcactgagaatagcacgggtacatcacatcacacaaattcatacgttgatacacgcatagtcgccgaagcgaccagctgcttaattaatcgataacacacgggtttaattcagcaataatcagcacacacacaaaccacactcatatgggtggtttttattgtggactaattaaggtaggtgactcgccggcggcgagtgttcggttgcttcgtgacttcacttgccgcacttgcagtcggtgcaggagcagctggtgccgcacttgcagccgccgttctcctcgccggcggcgacctcctcgaagtggctcttctcggcttcaactatgacgacgccatagctggtacctttcttcacgcactggctttttggaacacacagtcaagttgcccgcatttgtccgacatggtcgaagatttaattagctaagtgagtgatgagttaatcccttgtgttgcttatgctttctcggacgcgtgggcggacgcgtgggcggacgcgtgggcggacgcgtgg

SEQ ID NO: 402597 - DNA, 384 bp, Oryza sativa nipponbare
ggagccggagcttccatatatttcattcacatatgcctcacccaacaacatatagtcgtagcagataccactcttacatcaagtcagagagagatcaggtgaaacaaaaacaaaagcagagcacggccggtaaaatcaaaagacgatgaacaaactgggaacacacgaaacaaggtgggagacatcatcgaatcagagatgaacaattaaacaaggctatatatgacgatgacggcttagttgccaccagactcctcgcagcccgggggcttgtaggcgatgaagctgatgagctgcacctgcctgacgttgtcgaagccgatgatacggacgaatgcatcagggtacgccttcttggcctcctcgagctccttgagcacctgg

SEQ ID NO: 402598 - DNA, 627 bp, Oryza sativa nipponbare
aagcaaaaggtccagccagataaatagaaatatgtacctccaaagttaaaaaagttagaaccctaaaattgttctttgacaaaaaaagaaaagaaagaaaaaggatatacaacaatgatactctggtacacaagttgcgctgtacagatctgagcttcccaagggtaaagcttattgccacctgactaacccaaacatgtcacaaaatggaggggaggccccgctttgagcgtaagatgcacaaataacaacagatgcaaagatcctttaggccagaggcagctgagaccaatggcttgtatttcactgaacttccgcaaatatgactcgagacaaaaacaacacgtcgtgacgctgttcttgttttgacttagtgcacaatcaggtaggttttatttgctcattatttttaacctatgctcccacctttctgcttctggaattcaatgtaacgtaaagtgcttgcaaagaaggcctctgtcgatggatcagctacagtgttctcactttgcttctctgtcctaatcaattcaatcaaatcctggattacagtgttcgtgatctctggaattcctttctcgaagaagtacaaatacttgttcaaaatttcgataaatagcgcgacag

SEQ ID NO: 402599 - DNA, 539 bp, Oryza sativa nipponbare
ttggttttttttattaaaaactcggaagattatttcactcaccatgtttttatctgcataaaagctagtatatcaataagtaaaatctttctagttcgaatacgaaacctgtagactacctctgtttacaaaagagaaagatatataacttatcaaactgacttgtttctccttgaccaatccgagcaagtgagcagcatggttagattttcttcagcttaatttgtgcaccatgctgtgggtggagagttatcacagtgaatggtgcgtggatgtacgatggtgaaagctcaaaggagaaccgctgaaggattgtacagatagccatcttggcttccaatagtgcaaagttctggccgatgcagattcggggaccccatccaaatggaaagaaagaggtcttgatctttgttggcgttggagatgcccatagcaaacctccctggattgaattcacctgcatcttttccccaaatatcgggatcatggtgaataaataaaatgggcaacataagggtcacttcagcgggatatttgat

SEQ ID NO: 402600 - DNA, 387 bp, Oryza sativa nipponbare
ggaaccggtaataacgatacatcattaattcgatcatcccttggatgcggcctgcggcttacattaaatctcgatccaaagaagcaaagatgatgacagacagaaattaattaagctagaaatctcctcgatcgatcacacacacacacacaattaagggacatacatacatgcactgctgcaactgcaactgcagggtcggtgcgtggctactacaagtgtacacatggtacgttggttggcaccatctcgatcgtgtcgttgtgctcacttgccggggacgaagttggtggcgtatgcccaggcgttgttggcgacggggtcggcgacgtggtcgaagaggttctcgatggggcccttgccggtgacgatggcctggaccaaaaa

SEQ ID NO: 402601 - DNA, 350 bp, Oryza sativa nipponbare
gggaagaaattgttttgaatttcgaagaaacaactgatagtaggtttgatacagtttttgcactacgctgttactgcacatgggagcagaacatattttcgtggggattttcaaacatcacacagggggagcagcagcaagcacttttgagagtcaccccccaaaacttccccggacaaatgcagctgtttaattactccgttccagcgattttttttttaaagggcttgatgtcggtcgccaactctttcctgctctccttgaaaaggaggtagcggtagaccaaccaaccggtgtagccgaggccgacgagctccaggatcttggggagcaacggcacggagtttatg

SEQ ID NO: 402602 - DNA, 590 bp, Oryza sativa nipponbare
aagatctccatcgcataaaaacatacagtgactgagtactggattacacgattgagttgttcagggttcagataggaaaaacatcttggggactagagatagagggaatcgacagatgcgcagcagtagcgcgcgggaaacaggacatcacgattgcgttgcatgtcgtcggctgcgcagcggcggcgcggggcttaagacctgctcttgaatgggatcgccctgatgatcacctggtggtagatggcagccagggcagcgccaacgaagggaccaacccagaagatccaatggtcattccaggcatggtccttgttgtagatgatggcagcgccaaggctcctggctgggttgatgccagtaccggtgatggggatggtggccaggtggaccaggaacaccggaaaaaccaatgggcatggggggcaaggataggaacatgtgagtccctggcattcctcttggcatcagtggctgagaagacggtgtagaccaggatgaaggtgccaacaatctcagcaccaagaccgtcacccttggtgtagccactggcaactacattggcaccaccgccattgcccatgtacaga

SEQ ID NO: 402603 - DNA, 586 bp, Oryza sativa nipponbare
taaccagaataattccagagtcacaagcatgtatatatacgcaaaactttgcagtaaccaaatcgattcacaggccacacatacaggtagtatacagattcgtctacacacaaggttattgcagaggcaaaacacgaggtatgtatatcaaacgctctagaaaagattcatgtgatgaaatacatgatgaaccacgtatgttctcaaggtaaaattaattaatgcagtatagttttaactttgtccatcgatctcaacctgtaactgtgacgacacactggctacagtgccctcgaggtactagcagtatagcagtagctgtagtacgtagcagcagcagcagcaggttcactgtcttgattggattggatcggattagtagacgtagttcttgacgaacatgcccttcttgggcctcggcggcctcgccgtcgctggtgtacttgccgagctgcgccagcgagttggccttggcgcggaggagcagcgcgtcctgcgccgccttcacgttctccggctgcccgccccacgtcttgaggcacgtgttctgcagcgccctcgcgtacgagaacgacacgtgccacgg

SEQ ID NO: 402604 - DNA, 433 bp, Oryza sativa nipponbare
aactaagaccagtttgattgcgtgtttgatacaaaaattaagatggacggattcacaagagagcaccctctacttaagctttacattacaaggccaaccagcagctgcctgccggccgaccactgcgtgcgcacgcgcgcgcaataatcaaccaatcacacacagtacgcacgcacataaaaaccacccatagccttcacgtacgcccggacgcacgcaccggttcgtgccaagctcaagggtagatggttctcgggatgatgatgtcgccgatgttgttgtgccacgggtccgagaggtggctggccaggttctccagtgggccggtgcccgggtacgccgactgttggacgcagaaacccacaaaagccagcatggccaatcgcccgttcttgatcctcttgagcctgtactcctcgaaccggacgcgtgg

SEQ ID NO: 402605 - DNA, 349 bp, Oryza sativa nipponbare
aaaaggaaagcccatatctttatattatattattattaacaaaaacttgtcatgcccagctatggcttgggcgcgatctggttcccagaacaaagagaaaacataaaagggggaaattattaattgcaagcgtcaagccggcctgcttaaaaggtgtaaaggcagctgccgtcgtcgctcctcgccgttgggtcgaagtttttggcaacagggtcggtgcaacctttcggcacaggcaggttacctgcttgctgggctccttgccctcctcctcctatgcaggccgcctacgatgcattgatgggatgcgaatagctagagatcttttattcagctggatggcgcaaaa

SEQ ID NO: 402606 - DNA, 394 bp, Oryza sativa nipponbare
gaaaataagctgaagccgctgttgttagcatttctgaaggtgatattaatttcatggtatatttgatcatcgatcgatacattttctatagatttgtgtccaccatggccacctccttgggcctgagcacctcgccgccttcgccgccgcctctgccgccgacgtcgacgacgcgggacacctcggcgttgtagacgtagaggcggcagacgaggaagaagaagacgaggttgacgcagttgaggacggcgaagaaggcgtagtagtggtcgagccgcgacgcgttgaggttgttctggatccacccgccgccgccgccatggcggcgcgtgacgtgcgccaccgtcgacagcagcaggctgctgaggaagttgccgacgccgaggctggtcat

SEQ ID NO: 402607 - DNA, 379 bp, Oryza sativa nipponbare
aaaagagtatcaacttgttttttacatcggttacatcatagtacaggtacacaatcaacaaggcatgcagtgctccatccacaattacatcccaatacaccaccaccattcacagcctactccgatcccaaaaaagagaggtaagtcgcgtcgacgaacagtcttttcatcttcctccattggcagccattgctaacactccaacacctgaagaactcctcatttgggggtgaaggcctggaagatggtggcgtggccggggtcggcgagatgggcgaagaggttgtcgatggggccggtgccggtgtactctgcctggaaccaagctcccatgacggcgagcatggcgagccgcccgttcttgatctccttggtgcgc

SEQ ID NO: 402608 - DNA, 624 bp, Oryza sativa nipponbare
  unsure (1)..(624): unsure at all n locations
gtatgtaaatattatattattgtaaatcattttgaggagctagactagcgtgccttattaacaaggagatatgtaccattacatgatgattaacatataaatctgtagctacatggaattaaggtagtggagcagaggaggaaggatgatagaagactccaattctccatggatgggaatgggatcaggtggccttgcagaactctccgcccagatcgtcgcacgcctcctcggggaacaccgtggtgggctcgtcgtaggataggtagtccctgtcgacttcctccgccgccgcacgagaaacagcaacagcagccgatgatgagagcttggcctctgggtacatctgcacgttgcacgcctcgccgccgatgaggtcgcacgcctccatcggaaacaccgagatggtaaaacttgaggtcaacctccgaagcctccactgccaccgccgccgncgccgcacgaacgcgcaacgcaacacggcgaggagcctgaatctgcaggctgcgccccttcacagcagcgggcaacacggccgacaatccaacgacactgctagcagcggnctgcatcttcttcttcttctttcttcttcttcttccggacgcgtgggtcgaccccggg

SEQ ID NO: 402609 - DNA, 320 bp, Oryza sativa nipponbare
actggatgctggagtacatacgattgaaaatctctctgcagctgcagcgacaacagcacgagaattgcacgaaggaattgttctcaagaatcttaagatggtaaatacacacaagagagaggtgcggtatacaagacttagtttttcttaagtacaacagatcttccattcctccatgatcctatcagcttctacacccaaaccacacaaatcaccatgcacgagccctcttcctccactgccaaatcaactggggcttgagtagccaagcatccatgtggtgatcagtagccgatgtcagcgtcgtcgcggacgcgtgg

SEQ ID NO: 402610 - DNA, 632 bp, Oryza sativa nipponbare
tccggtggccgtgggcggggcgaaggcgtaccacgagcgggtggtggaccactacgagaacccgcggaacgtggggtcgttcgagaacgacgaccccagcgtcgggacggggctggtgggggcgccggcctgcggcgacgtgatgaagctgcagatccgcgtcgacgagagctccggcaagatcgtcgacgcatgcttcaagacctttgggtgcggatccgccatcgcgtcctcctccgtcgctactgaatgggtaaagggcaagcaaatggaggaagtagtgactataaaaaacactgagattgccaagcacttgtcacttccaccagtaaagctccattgtagcatgcttgctgaggatgcaattaaagctgccgtgaaagactatgaagcaaagaaggcgaagctagcacacaaaggttaaagagaaggttgcccaaacatgattgccagaggttcttgcatgaagaatgttgcagtgccctgcgtactcgtagtaaagaacctgtcatgaagaagtctctgctctgcttcttgctggcgggaaatagtgtgtaacgctcacaaactctatgcaagatgtatcataaggatgaaggcaaacatttttgaataaatgtgctgtcatcttg

SEQ ID NO: 402611 - DNA, 632 bp, Oryza sativa nipponbare
tcaagtatcaagtgtagtatatcatcatcatgcaagtacagtgttacatagattaatcacaatgcagtttgattaagcagtgggcatcatcacatcgcattcagaggaaggctatcttagattacagatgaatatgcagacacccagcttggtgttacatacatagactggatttgggtgaaatttagccggcgagggcgctggtgttgtagacgaggagggcgccgccgccgaggagcccggcgagggtcacggcccagatcagaagcccggtggttccaccaacgtaggtgtcaccggtgggagaccattcctccggcgagtagattgggctgtagccgtcgacgtttgcgccgtacttgtcaacgaattggtacacacccttccccgggctcttcctggcagatgccttaattttggatggacttgccacctccaatcccgtagggctggtcggtcttgatcttcttcccaccgctgcagacgatggcgaaggaggatccccggcgggagatggacggaaggcccttggcccgggccggcgccaccagcggcgaggtgatcatggatgttgccatcctcagcttcagctcaaatttttctgcacctcactctcactgttctacctgatc

SEQ ID NO: 402612 - DNA, 568 bp, Oryza sativa nipponbare
  unsure (1)..(568): unsure at all n locations
gctacgtaacaaagcatcatgcataaacacgcgtaccgtgccgtgcatgcatacagatacatacaggcactccacttattttacaaccattcacactatcacactgaaagtcccaaataaaactgacaacagacgcatgcatcgatcatatcatatgcatgatcgtccatagtcgtagattgtaaattgaacaacgaaatcaagaacaattaatcaagcagctgatcgatctctcgtatcaaatgaacatcgtcgtcttcctcacgccgtcacgctggtgctcctgaacgagctgagcgccttggcggcctcgccgcgcagcaccagcttgtggtacgccgccgccaagaacgccccgatcaccggccccacccagaagatccagtggtctttccaagcttgcgtggctggtggtacagcacgggcggcgccgaggctcctcgccgggttgatgcccgtgccggtgatcggaatcgtcgccaggtgcacgacgaacaccgngaacccgatcggcagcggcacgagtacggggatgaaggagtcgcgggcggtgcgcttggngtcggtg

SEQ ID NO: 402613 - DNA, 595 bp, Oryza sativa nipponbare
taactaagaccagtttgatgtcgtgtttgatacaaaaattaagatggacggattcacaagagagcaccctctacttaagctttacattacaaggccaaccagcagctgcctgccggccgaccactgcgtgcgcacgcgcgcgcaataatcaaccaatcacacacagtacgcacgcacataaaaaccacccatagccttcacgtacgcccggacgcacgcaccggttcgtgccaagctcaagggtagatggttctcgggatgatgatgtcgccgatgttgttgtgccacgggtccgagaggtggctggccaggttctccagtgggccggtgcccgggtacgccgactgttggacgcagaaacccacaaaagccagcatggccaatcgcccgttcttgatcttctctgggctggacctcttcgaacttgacggggtccttggagaagccgagggggtcgaaggcgccgccggggtacttcttcttctcggggtccttctccatggtgcgctggtgctcggcgaaggcgatggcgactaactcgatgaccaggatcgtcggcagcgtgccccatggcaccgggttgccgaggtacgtg

SEQ ID NO: 402614 - DNA, 519 bp, Oryza sativa nipponbare
tactaggcaaaccacacgaatacacgattgattaatttcactgagaatagcacgggtacatcacatcacacaaattcatacgttgatacacgcatagtcgccgaagcgaccagctgcttaattaatcgataacacacgggtttaattcagcaataatcagcacacacacaaaccacactcatatgggtggtttttattgtggactaattaaggtaggtgactcgccggcggcgagtgttcggttgcttcgtgacttcacttgccgcacttgcagtcggtgcaggagcagctggtgccgcacttgcagccgccgttctcctcgccggcggcgacctcctcgaagtggctcttctcggcttcaactatgacgacgccatagctggtacctttcttcacgcactggctttttgtaagaaccagtccaattgccgaacttgtccgacatggtcgaagatttaattagctaagtgagtgatgagttaatcccttgtgttgcttatgctttcttcggacgcgtgg

SEQ ID NO: 402615 - DNA, 617 bp, Oryza sativa nipponbare
tatcgcaaagaaaactcaatattataaatctagctgcattaacaacattgatttcgcaaggtaaacaatatagcatggcaaaaaaagtctcacatggtaccactttaagcatgacaaaagtttacttcttgagcaagagcagaacaagaacagatcaagcttccattctctgcactgcaccaggaaccatctaggtagaaaaactacttcagcagcctcacataacaaccaccccaatgccaaacctgcttaagctgaggggatctcgacctcgccgtcggagatctcctgctgcaggtccttggggtccttgccgtccacggtgcagccgacgctgacgcaggtgccgaggatctccttgacggtgccggccatctccttggccatggacctgggccttatgacccttgcgaactcaatgacttcgtcgaggctgatgttgccgctgtgcttgatgttcttcaccttcttgcggtccctctcgggctccttgagcgccttgatgacgagcgccgcggcggaggggacgacggagaccttggcctgccggttctggacggtgagcttcacggtgacgcggaggcccttccagtccttggcggtctccttggcgatgt

SEQ ID NO: 402616 - DNA, 583 bp, Oryza sativa nipponbare
acattaaatctcgatccaaagaagcaaagatgatgacagacagaaattaattaagctagaaatctcctcgatcgatcacacacacacacacaattaaggtacatacatacatgcactgctgcaactgcaactgcagggtcggtgcgtggctactacaagtgtacacatggtacgttggttggcaccatctcgatcgtgtcgttgtgctcacttgccggggacgaagttggtggcgtatgcccaggcgttgttggcgacggggtcggcgacgtggtcgaagaggttctcgatggggcccttgccggtgacgatggcctggacgaagaagccgaacatggagaacatggcgaggcggccgttcttgagctccttcaccttgagctcggcgaaggtgtcaaggtcgtccgccaaggccaaccggtcgaagcgccgcctgggtacaccttgtcgaggccctcgccgagcgggccgccgccgacgcggtagccctcgacgaatcccatgagcaccacctggaccgcccagatggcgaggatgctctgcgcgtgcaccaggttggggttccccaggtagtcgagccccc

SEQ ID NO: 402617 - DNA, 616 bp, Oryza sativa nipponbare
agtcaaataccaagatcgatcgatcgatgtacaagtggatgcattaattcatcatcttgggtgttcttatattacaaatcaccaccatgcaagtcgccattaaccaccaacccagctttcctaatttaagtagtaatcaacaaaaggatgacctctcctctctccataccctcccagctcgctcgtcatcacaaaactaaacagcgcgcgcgaacgcacaccaacgcatcgatcccgtttgaattgcgcgcgaaagagcttaaattaagaggatgaggagaaggtgtcgaagatggtggtgtggagcgggtcgctgaggtgggtggcccagttgttgaggggccccttgccggtggcggcggcctgcacggcgaagccgaggaaggcgaccattgcgaggcgggcctgcctggacttccgccagttgcagccgttctttttttccgggtccgacgccaacccgagcgggtcgaagtaggacccccccgggtacagcctcttctccgggtccagctccgcgttgcgctggaactcgatgtagccgatgacgagcacctcgatccagatcagcgtcgagatcgagaacggcagcggctgccccaggtacgacgaccca

SEQ ID NO: 402618 - DNA, 642 bp, Oryza sativa nipponbare
acaagaaattttgcatatagcccaaagaacattgtatataaataaccataaagactgtaaaactactggttcaaaatagcattacatatagcaaaggtacatccaaatcattcggtataaaccgcaagatggaacaacggcccatatgtcttcttaacttacgctcaaatcaaaagtttatatataatctcaagaccagctccaaacttaaagcgaccagacaggtagccaaacacggtaacaaggtattctagttcttggggccaatatccttcagagcgcagatctgctcctcacccatggcagacatcacggtaacaatcagatccttcccctcggcgaatccatccttgatctgagtaagcagagcctcatcactagggagcctcaagtcatccttagtggcttcactttcaagccaggaggctgacaaatccatcttcagaaatgtcaatcagctgataatcagtacggttcacgtgggggacgtcacagttgtgggaggagggcacaatatcttcaagcttcttcccattgaagatgtcaatggccacaaagtggcattttgcatgtccatgcttcccagtcttggaggtggagacctcaacaaccttgcatgggcggttcttgatgacaatatga

SEQ ID NO: 402619 - DNA, 531 bp, Oryza sativa nipponbare
  unsure (1)..(531): unsure at all n locations
tgaagaaattggggtgaatgtcgaagaaacaactgatagtaggtttgatacagtttttgcactacgctgttactgcacatgggagcagaacatattctcgtagagatatacaaacatcacacagaggaagcagcagcaagcactctagagagtcaccccccaaaacttccccggacaaatgcagctgcttaattactccgttccagcgatcttcttcttcaaggtctcgatgtcggtcgccaactctttcctgctctccttgaagaggaggtagcggtagacgaaccagccggtgtagccgaggccgacgagctccaggatcttggggagcagcggcacggagttgatggcgccgacgacgacggtggtgagccagagggcgacgacggcgcctccgctgtaaaggaaggaccgtcggcttgccctcgatcgcctccaactttgccttgaggtcggcgacgagctcgtcgccgctggccgaggtggaggtgtcntctgaggcggtcctgacgcggagcagggacagtcgcg

SEQ ID NO: 402620 - DNA, 369 bp, Oryza sativa nipponbare
caaataagaagaggagctgggctgaatttttgttcaagggaagagaggattaggaacaggattaattaaggcataagtacaccacattccacgtcactaccactccactccactccaccaccctcaaaacacaccacgtacacacatgtacggatgcaatcttcaagctcaagctctcagtctgaccgcatgcggtttagctggttcaacgccggctgcaggatgttgtagagaacccaggcgatcgccggcgccaccacgaacagcagcagcaggccgcggttgttgccgccctccgccgacggcgcctccgccgtcagccttgccacctcctgcgccggcgacgccttgggcgggaacgcgagcccg

SEQ ID NO: 402621 - DNA, 389 bp, Oryza sativa nipponbare
taaacactgaaatgaaatttacttttcttccttattcattaaacaaaactctggaaggatgaatagaatagcaatccaatctcaccttaaccttgctcccaagtgaaataaaaaataatctagtgcactcttcgatacatacagaagcatacaggtactcatttgcggatgaacaggagcatatgcagagcagaaatgcagcatttgtctctgaattgagagagaggagtgtggctggcctggcctggcctggcctcgattgtttcattctatacgaaggcgtgcttctcgagcagcttgaggacttcctcctggttgttgagtttcgccacgtcgatggccgtcttcccgtccaggttctgcaccgtcacggcggcgccgtggtcgag

SEQ ID NO: 402622 - DNA, 585 bp, Oryza sativa nipponbare
gggaaacgaataaaatcattattgcaaaaacatcatcttcttcttcatcttcttagtgtacacaacaccaactcgatcatcatctcgtcgcactaaacccatcttccccaacccaaagacaacgaactcgctggccacaaatccatccaaccacaattaaccactgctaagctacggtcccccacttcacttgccggggacgaagttggtggcgtacgcccaggcgttgttgttgacggggtcggcgaggtggtcggcgaggttctcgagggggcccttgccggtgacgatggcctggacgaagaagccgaacatggagaacatggcgaggcggccgttcttgatctccttcaccttgagctccgcgaacgcctcggggtcatcggcgaggcccagcgggtccaaaggcccggccggggtagagcgggtcgacgacctcgccgagcggcccgccggcgatgcggtacccctcgacggcgcccatgagcaccacctgcaccgcccagatggcgaggatgctctgcgcgtggatcaggctcgggttgccgaggtagtcgagcccgccctcgctgaagatctgcgagc

SEQ ID NO: 402623 - DNA, 387 bp, Oryza sativa nipponbare
tggaattaaaggagatttacgtaatttgtttgtacagaagaagagagtagtaattgattgggggtggaagacgacacaggtagcagctgcatggagtaattaatattctagctatatatggatcgagacgggggacgaattcgattattgagactgggagcagacgatatgatatgatatgatcagtagtcggcggtgggcagctggtcgtgcgggcgctggccgatgaagatgatgtcgtagatgagcgcggcgatggcggcgcccacgaaggggccgagccagtagacccagtggttgtcccagactccggtgacgacggcggggccgaaggagacggcggggttcatggaggcgccgtcgaaggcgccgccggcgaggatgttt

SEQ ID NO: 402624 - DNA, 531 bp, Oryza sativa nipponbare
tgagtatgatagaccttttgactaggcaaaccacacgaatacacgattgattaatttcactgagaatagcacgggtacatcacatcacacaaattcatacgttgatacacgcatagtcgccgaagcgaccagctgcttaattaatcgataacacacgggtttaattcagcaataatcagcacacacacaaaccacactcatatgggtggtttttattgtggactaattaaggtaggtgactcgccggcggcgagtgttcggttgcttcgtgacttcacttgccgcacttgcagtcggtgcaggagcagctggtgccgcacttgcagccgccgttctcctcgccggcggcgacctcctcgaagtggctcttctcggcttcaactatgacgacgccatagctggtacctttctttacgcactggctcttgtcagcacagtcgcagttgccgcacttgtccgacatggtcgaagatttaattagctaagtgagtgatgagttaatcccttgtgttgcttatgccggacgcgtgg

SEQ ID NO: 402625 - DNA, 608 bp, Oryza sativa nipponbare
agattaatcacaatgcagtttgattaagcagtgggcatcatcacatcgcattcagaggaaggctatcttagattacagatgaatatgcagacacccagcttggtgttacatacatagactggatttgggtgaaatttagccggcgagggcgctggtgttgtagacgaggagggcgccgccgccgaggagcccggcgagggtcacggcccagatcagaagcccggtggttccaccaacgtaggtgtcaccggtgggagaccattcctccggcgagtagattgggctgtagccgtcgacgtttgcgccgtacttgtcaacgaattggtacacacccttccccgtgctcttcctgccagatgcatcaatatcgactgacatgccacctccaatcccgtaaggcttggcggtcttgagacttcttcccaccgttgcagacgatggcgaaggaggatccccggcgggagatggacggaaggcccttggcccgggccggcgccaccagcggcgaggtgatcatggatgttgccatcctcagcttcagctcaaatttttctgcacctcactctcactgttctacctgatctctgatggatggatggatgcaaagc

SEQ ID NO: 402626 - DNA, 593 bp, Oryza sativa nipponbare
tgatgtacaagtggatgcagtaattcatcatcttgggtgttcttatattacaaatcaccaccatgcaagtcgccattaaccaccaacccagctttcctaatttaagtagtaatcaacaaaaggatgacctctcctctctccataccctcccagctcgctcgtcatcacaaaactaaacagcgcgcgcgaacgcacaccaacgcatcgatcccgtttgaattgcgcgcgaaagagcttaaattaagaggatgaggagaaggtgtcgaagatggtggtgtggagcgggtcgctgaggtgggtggcccagttgttgaggggccccttgccggtggcggcggcctgcacggcgaagccgaggaaggcgaccatggcgaggcgggcgtgcttgatcttcgccaggtggaagcggttcttttttttccgggtccgacgccaacccgagcgggtcgaagtaggacccccccgggtacagcctcttctccgggtccagctccgcgttgcgctggaactcgatgtagccgatgaccagcacctcgatccagatcagcgtcgagatcgagaacggcagcggctgccccaggtacgacgaccca

SEQ ID NO: 402627 - DNA, 518 bp, Oryza sativa nipponbare
gattaatttcactgagaatagcacgggtacatcacatcacacaaattcatacgttgatacacgcatagtcgccgaagcgaccagctgcttaattaatcgataacacacgggtttaattcagcaataatcagcacacacacaaaccacactcatatgggtggtttttattgtggactaattaaggtaggtgactcgccggcggcgagtgttcggttgcttcgtgacttcacttgccgcacttgcagtcggtgcaggagcagctggtgccgcacttgcagccgccgttctcctcgccggcggcgacctcctcgaagtggctcttctcggcttcaactatgacgacgccatagctggtacctttcttcacgcactggctcttgtcagcacagtcgcagttgccgcacttggcccgacttggccgaagatttaattagctaagtgagtgatgagttaatcccttgtgttgcttatgctttcttgcggacgcgtgggcggacgcttgggcggacgcgtgggcg

SEQ ID NO: 402628 - DNA, 341 bp, Oryza sativa nipponbare
aaaaataaaaatatatagcatattatatattggtatatcatcaacatagcccaaaacaaagctgcatacttttattataggcagcaatccaccagcgcgatgcttgatcttagcttagttgccaccagactccttgcaacctgggggcttgtaggcgatgaaactaatcaactgcacctgcctgacgttgtcgaagccgatgatacggacaaaggcatcggggtgggcctttttggcctcctcgagctccttgagcacctgggtggcatcggtgcagccgaacatgggcaggttccacatggtccaatacctgccatcgtagtacccgggagacctgtggt

SEQ ID NO: 402629 - DNA, 622 bp, Oryza sativa nipponbare
  unsure (1)..(622): unsure at all n locations
ttaattcacaacaccatatttcattgatcaggttcagaacctgcacagaaatacacactaccggtacagatctcaccctctctccaatactcgtacatccatccacgcggtccacacgaatacgtacatctatacggtacacgtacgtacatctactgcaccgngtacacacacgcacactctcctgcagagacgcgcatcgtcgtcaacctagctagcttagctgaaggcgatgcgtcgccatggcagcacggcggcggcggcgctcacttgccggggacgaagttggtggcgtaggcccaggcgttgttgttgacggggtcggcgaggtggtcggcgaggttctcgagggggcccttgccggtgacgatggcctggacgaagaagccgaacatggagaacatggcgaggccggcggtcctggatctccttcaccttgagctccgcgaaggcctccgggtcgtcggcgaggccgagcgggtcgaagctgccgccggggtagagcgggtcgacgacctcgccgagcggcccgccggcgatgcggtacccctcgacggcgcccatgagcaccacctggaccgcccagatggcgaggatgctctgcgcgtggatcangctcggg

SEQ ID NO: 402630 - DNA, 505 bp, Oryza sativa nipponbare
aaaaaggtaaactgttcatagtgaatattattaagacattatagctgatgtcttttgatcacactgcgatcaaattatgcatcataggcagtacaactccgcgtcaggaaaaagtagaggagatatatttcttgttattacttaatacagcattcacatatatcgaaccatccggtacgtacgtagtagtactccacgcgttcacatcgatgatcggggacgatatcctcaggtagtacttatgcaaaagcgttggcgtaaactgacgaactgaacggacggacggtcggatttagggctcccataagtccaagttgccggagacgaagtcgtagtggccgccgacgagcttgagggtgccgttggcgatcccctccttgacgaacgggtagggcttgggggtcttccagggatgggttcacggcctccttctccaagatggcgcattggtcatcgaaaggcagcgaggcgtgctcggtctgaaccttcttcttggcggggaaac

SEQ ID NO: 402631 - DNA, 603 bp, Oryza sativa nipponbare
aaagcagagcacggccggtgaaatcaaaagacgatgaacaaactgggaacacacgaaacaaggtgggagacatcatcgaatcagagatgaacaattaaacaaggctatatatgacgatgacggcttagttgccaccagactcctcgcagcccgggggcttgtaggcgatgaagctgatgagctgcacctgcctgacgttgtcgaagccgatgatacggacgaatgcatcagggtacgccttcttggcctcctcgagctccttgagcacctgggtggcgtcagtgcacccgaacatgggcagcttccacatggtccagtacctgccatcgtagtatccgggggatctgtggttctcacggtagacgaatccgaccttgctgaactcgaggcagggcacccacttggaacgggagcagtactcgatctgcttcaggaggtcctccacggtgagcggtggcaggtaggagagggtctcgaacttcttgatgccctcaatcggccacacctgcatgcacctgatcctgccgccattgctgacgttgccgaagctggagttgccggagcggcgggcgacgggcatgccggcggtggacttgagcccct

SEQ ID NO: 402632 - DNA, 373 bp, Oryza sativa nipponbare
aagtgtattatatgtatgtaaatattatattattgtaaatcattttgaggagctagactagcgtgccttattaacaaggagatatgtaccattacatgatgattaacatataaatctgtagctacatggaattaaggtagtggagcagaggaggaaggatgatagaagactccaattctccatggatgggaatgggatcaggtggccttgcagaactctccgcccagatcgtcgcacgcctcctcggggaacaccgtggtgggctcgtcgtaggataggtagtccctgtcgacttcctccgccgccgcacgagaaacagcaacagcagccgatgatgagagcttggcctctgggtacatctgcacgttgcacg

SEQ ID NO: 402633 - DNA, 562 bp, Oryza sativa nipponbare
tatgattgggagaagataacatgatgcaaattattactgaaggctaatgatcagcactattatggactgttcaagttttcaaccatctgcacatgcacgcagaattatctccagggtttttattgaagttatgtttgactatctacatataccatgttccatgtacatgccatctttcagatctgtagcagctgtctgcactttgtggtgttctaagggatcatgcttcagactttcagtacagagctttgtagattcctcagcttcggcttgagcttgtgttatttatatacaccttgtatgcaaactatgtaagattgacagaacattgtcagatatgcgcgcgtgtagctgtgtatccgtggaagggcattgatttagtgtcatgaatggatagatcttctgatgggactcttcaaaaataataagtaatcggcttcgatgtggctggtctccaagacatagtccctcatgagctttgtgttggcctcatcaaccatcttgaaagataaccttttcagattatcccactcgaaatcatgcttgacataagcagatcgga

SEQ ID NO: 402634 - DNA, 530 bp, Oryza sativa nipponbare
gccctgaattcttcagtctgtcagtttcagagtgtagtgcagatgcagaaatgcccatattcaggaagacatctaaggtatgatctgctataaaagagtatccatctcacagattcataaccctcaaaaagggttacttatgcagtgaaaagggttttatgctctttcatacagtgtgacagtgtgtgtacatataatttggaaaaacaaagtgaagatggatttacagcagcgtttctcagatacagcggacttatagctacaagctgatcacacaagtgaactttgctgctgatgatgatatggatcatgttgttatagcttacgcccaccacgggttgtcgccggtcctgaagtcggtctccacccacggcacgaagagaaccttgccgtcgtcgacgtcggggtgcaccaattgcaagcgacaggggagcaggtccacggacgaccctgccctggttgttgtactgcgagccgtggcaggggcagatgaacttgttctcggcggcgttccacggcacgacgcaccc

SEQ ID NO: 402635 - DNA, 267 bp, Oryza sativa nipponbare
gtgtatatagccagagctttgttttgcatatcctcacccaacgataattgtagtactcttacaataaaaccggccggagagggagggaagagattattacatatgtgttaagagcagaggccattgagatggtacataaccaaactgtaaaataaaaatatatagcatattatatattgatatatcatcaacatagcccaaaacaaagctgcatactattattataggcagcaatccaccaacgcgatgacacataggagtggacct

SEQ ID NO: 402636 - DNA, 550 bp, Oryza sativa nipponbare
ggaaaaagaaaggagagggagatcataggttattctgataaatgtggaattacatagagagagtccatctatatagttcagtgacagcacaatctgaagatacataatttgtaatggggaattaaagtacaaattgaaaatttatttagagtatagcaatttcgttcatcaaatactcaatgcctaggttgattatccaagttagtccactggcactggctgcatggcctcagcctccgctctcaattcctcaaacaatgcagatgacaggtatctctcccctaaactcggaagaacagtcacaatgagcttccctttgttttctggcttctttgctagttcaagagcagcaactgtgttagctcctgatgatattccaaccagaagacccttctttaatggccaattttcgagccatcttaacagcatcctcacctttcacctcaataaccttttccattatatccatattcaaaatttccggcttaaatcccactccatttccagtgatgaggtgaggacctggtttgccaccattcaaaacatttgc

SEQ ID NO: 402637 - DNA, 513 bp, Oryza sativa nipponbare
taggcaaaccacacgaatacacgattgattaatttcactgagaatagcacgggtacatcacatcacacaaattcatacgttgatacacgcatagtcgccgaagcgaccagctgcttaattaatcgataacacacgggtttaattcagcaataatcagcacacacacaaaccacactcatatgggtggtttttattgtggactaattaaggtaggtgactcgccggcggcgagtgttcggttgcttcgtgacttcacttgccgcacttgcagtcggtgcaggagcagctggtgccgcacttgcagccgccgttctcctcgccggcggcgacctcctcgaagtggctcttctcggcttcaactatgacgacgccatagctggtacctttcttcacgcactggcttttgtgagcacagtcgcagttgccgcacttgtccgacatggtcgaagatttaattagctaagtgagtgatgagttaatcccttgtgttgcttatgctttccggacgcgtgg

SEQ ID NO: 402638 - DNA, 593 bp, Oryza sativa nipponbare
aaagagcaaaggatttagcactgtaagtactcgcattccacaacaaccgaagggcaacaataagactcagagcatccaagtttttaaccgaatagaaataaacgagttttaaacgactaacatagtgcacattgcgagcagatattaacggtccatgcaacgagtgccatggccgtgggcaaaacttaacgaacgctaagatatctcaaatgcagccagcataaccaccacttcaacgatgctcatttcttcttggcggcagccttggtcaccttggcaccggttgggtccttcttctccacgttcttgatgacgccaacagccaccgtttgcctcatgtcacgcacggcaaaacgaccaagaggagggtactcagagaaggtctccacaaccatgggcttggtggggattcatcttaaccataccagcatcaccgttcttgaggaacttgggctccttctccagctccttgccggatcgtctgtcgatcttggtcaccagctcagcaaacttgacggcaatgtgtgaggtgtggcagtccagcactggggcgtagccattgccgatctgcccagggtggttcatgatgatca

SEQ ID NO: 402639 - DNA, 591 bp, Oryza sativa nipponbare
ttttatatatacgcctatcgaacattatagagtgatcacaggcacagatgtgcacacagatacaaatggaagaaaaaaaagaaacagatgtgaggaaaattggaagaattagtagacttccacgttccattgctcgcccttcttcagttgcttcttgtaatcagcccagtcgattccatcttttgcagccaatgacaccataatgtcatcaatacccttctccatgcctttcagtccacacatgtacacataggtgtggtccttcttcaggagctcccacagctcttccttgtactctgccatcctggtctgaatgtacatcttctctccttgagcattggtctgctccctgctcacagcataatcgacccggaagttctctggcgctttcgccttcattttgtcaaacttcttcttggaaaagtaaagaactgctagttgggactcccaagaagagccaagccagaccattgaacttgtagtcatcatacttctcaaaaaacattttccacaagaatgagcggaacggggcaataccagtaccggtcgcaagcattataatattagcattgggatctttgggcatgagca

SEQ ID NO: 402640 - DNA, 383 bp, Oryza sativa nipponbare
tttgcagcatcgaattggatcctttacaacttatatagccataggaatagtacaattatatcaacatcataaacagggggaattaatccatggcgatccggccatgggggactagcagtacagtacagaggatttgcatggatggatcggatcaagaagaaggtgaggcagagacgaggaatttaatttagatcttgccgcgtgggccgggcgtcggcggcagctgcgggcccttcttgatcggaagcaggtctggcgacgccgacgcgctgacgtaggccaccagcgatccgccgccgagcagcaggaacttgagcaggagccccctcttggtgaagggccccgcgaacgtctcgaagaacttgctctggagagggttgtac

SEQ ID NO: 402641 - DNA, 354 bp, Oryza sativa nipponbare
cgaccatcccttggatgcggcctgcggcttacattaaatttcgatccaaagaagcaaagatgatgacagacagaaattaattaagctagaaatctcctcgatcgatcacacacccccacccaattaagggccatacatacatgcactggtgcaactgcaactgcagggtcggggcggggctactacaagggtacacatggtacgttggttggcaccatctcgatcgggtcgttgggctcacttgccggggacaaagttggtggcgtatgcccaggcgttgttggcgacggggtcggcaacttggtcaaagaggttctcgatggggcccttgccggtgacaatggcctggaccaa

SEQ ID NO: 402642 - DNA, 582 bp, Oryza sativa nipponbare
tatatgttaaccagcattattcaatgctagggtacttgcaatagatttgtgccacctgatacatgtatgggaatgcaaaagattgcagaactaccaatatgtgaaaattgctctgaatatacaggcaaaaacaagcattaaaccacttatgaagcaatttacatctgtgaagcaatcgccacagccaactgttaacaccctttctaaaccaacacccttcaagtgctttagtcttctactaataaatatggccctaatgtgggttcttccttaacagatggataataactcacagaggacaccagttactgaaaattttcactgtcctcatctttaggtgtccccattatgatactgaggttgcatataacccatcccttgggtgtaagccccaaccatcccttgggcacttgaactactagcgccactgtgcggaccaattgtatccttctttactgaaccatcaccagcctttgaggacagcttactatcaccctccatctctctgtacttgtgtaaatagatcttcaacggatcaacgtactcctcaaagccaagcgtacccatcgcaaagaggagatc

SEQ ID NO: 402643 - DNA, 618 bp, Oryza sativa nipponbare
  unsure (1)..(618): unsure at all n locations
attgcaaaaacatcatcttgttcttcatcttcttagtgtacacaacaccaactcgatcatcatctcgtcgcactaaacccatcttccccaacccaaagacaacgaactcgctggccacaaatccatccaaccacaattaaccactgctaagctacggtcccccacttcacttgccggggacgaagttggtggcgtacgcccaggcgttgttgttgacggggtcggcgaggtggtcggcgaggttctcgagggggcccttgccggtgacgatggcctggacgaagaagccgaacatggagaacatggcgaggcggccgttcttgatctccttcaccttgagctccgcgaacgcctcggggtcatcggcgaggccgagcgggtcgaaggcgccgccggggtagaagcggtcgaccaacttngccaagcggcccgccggcgatgcggtacccctcgacggcgcccatgagcaccacctgcaccgcccagatggcgaggatgctctgcgcgtggatcaggctcgggttgccgaggtagtcgagcccgccctcgctgaagatctgcgagcccgccttgaaccacacggcctcgccgaacttgacgccgttccgggcgaggagc

SEQ ID NO: 402644 - DNA, 587 bp, Oryza sativa nipponbare
gaatcatacgtaagtgcttgctgatacaatatcaacatggagggtacattgccggttccatatgaacaaacataaaaacaccgaaaccccatatggccattatgccgatcctagcctagcttggcgaggacatcgccaagagcagatttggtcaacgtgtagtacttctccgcctcttcggggctcttgatcttggctgcatggtcaagcccgtcaatggtggcgaagagcttgccggtgaggtccttgaggcccttcttctcgtccttgggcttggagttgatgacggttttgaggtcgtagcgcaggtaggaggccctgaggcggaggtcgtccctgacgaacggccactgcttcttctcgatgagcggcttgaggttgatgatgtcctgggccgacttctttgccctcggcggcgccttcggcggggggaagcggctgcaggtagaacctttccctcagcggcaggtccgtgtccctcgcctggtccgagttcagcgtcccagggagtccaccggagggcggtggcggggggcccagcttgatgggcttggcggcctcggcgagcgcctcctgcgcgagggcgc

SEQ ID NO: 402645 - DNA, 376 bp, Oryza sativa nipponbare
ttagcacaagacaagaggcaagctagcctctgtttattattattaccgttgatctcatgaagcggaaatgttcccaagtagtgccttacaaattaacaacagattatttaatgtacaacatagctgcgagcttctcgagttgaccgtgagttcacaacagcttgaaagcttcagccggaacagctcagaccttggatggtggaggatcctgaataccgcagagcaaattcgcgggcacggctacatcgatcatctttggataggccaagttcaagttgtccataattttcttgaatgtttccttatcctttgttagtcgagcattatacgcaacctcctctttaacagtacttactgtgaaacctttgtagtcatg

SEQ ID NO: 402646 - DNA, 396 bp, Oryza sativa nipponbare
gtcaacaacaactgaggattgaatcatacgtaagtgcttgctgatacaatatcaacatggagggtacattgccggttccatatgaacaaacataaaaacaccgaaaccccatatggccattatgccgatcctagcctagcttggcgaggacatcgccaagagcagatttggtcaacgtgtagtacttctccgcctcttcggggctcttgatcttggctgcatggtcaagcccgtcaatggtggcgaagagcttgccggtgaggtccttgaggcccttcttctcgtccttgggcttggagttgatgacggttttgaggtcgtagcgcaggtaggaggccctgaggcggaggtcgtccctgacgaacggccactgcttcttctcgatgagcggcttga

SEQ ID NO: 402647 - DNA, 354 bp, Oryza sativa nipponbare
ttagttacaacagcacaccatccatggatccatgcaggcagcctgtttgtgcccttgtgcagatgcatttcatttatacaagtagaaggcactcaaatcagccaccacatgaacacacacatgttccatcatcgatcgatctacacatgcatcacccggtcatgcacttacaaacaaaagatctacttgaagaagtacgggaggtcgagcacgtagaggaggaagtaggcccagaggacgccggagatgccgccgaagaaaaagccgccggtgaacttggcccagccgtcggcggtctgcagcttgtcggcctccttcttgcggccggtgagcgtcagcgtcggcgccgtggac

SEQ ID NO: 402648 - DNA, 515 bp, Oryza sativa nipponbare
ataattaattcacaacaccgtatttcattgatcaggttcagaacctgcacagaaatacacactaccggtacagatctcaccctctctccaatactcgtacatccatccacgcggtccacacgaatacgtacatctatacggtacacgtacgtacatctactgcaccgggtacacacacgcacactctcctgcagagacgcgcatcgtcgtcaacctagctagcttagctgaaggcgatgcgtcgccatggcagcacggcggcggcggcgctcacttgccggggacgaagttggtggcgtaggcccaggcgttgttgttgacggggtcggcgaggtggtcggcgaggttctcgagggggcccttgccggtgacgatggcctggacgaagaagccgaacatggagaacatggcgaggccgccggtcttgatctccttcaccttgagctccgcgaaggcctccgggtcgtcggcgaggccgagcgggtcgaagctgccgccggggtagagcgggtcga

SEQ ID NO: 402649 - DNA, 389 bp, Oryza sativa nipponbare
gagagagagaatacatctatggttcagatattattccaatgtgtttctggacaagtagcctaaactccgatcagtctcgagaagcctgcccgtgtgtgcaaaatccagaaatcacccaggacaaatttacatgatcccaaccgtatttgaggccattaacattgattaaagtcaaactatggccgttccgactccgaaggcgctatcatagttcctcaccatgttcttcgtcgagggcataccagcaacaacatcttcttcgatgccacattcgtttgtgccccttatgatcttgaagtacccatcatcgccccatcctctgttccactggtttgcaagcagccagtaatcctcgccagcatccgtggttgcccatccaatcaacttga

SEQ ID NO: 402650 - DNA, 360 bp, Oryza sativa nipponbare
ggatcagaggattatttctcagactgcatcattcaatttatacacatcaggtagatcatacatccatgtctgttcttcttttttcttcagaaagaagcaaccaaagaggtttgtccgtgtactagctactatatatcataaaaccatacatgtttggtttcagcttatgaaatatacaggctaatctccgtgatctgaagagtgatctacatacactcttcatgcagatttagcgaacccgatcctgtctttgccgaagtcgaaaaccgtatgataagcacccatgaagacatctccaagaatccaaagaggaccgcgtggtggaggtatgtcgaacgccatgaacccgctgatgcagac

SEQ ID NO: 402651 - DNA, 400 bp, Oryza sativa nipponbare
actaggcaaaccacacgaatacacgattgattaatttcactgagaatagcacgggtacatcacatcacacaaattcatacgttgatacacgcatagtcgccgaagcgaccagctgcttaattaatcgataacacacgggtttaattcagcaataatcagcacacacacaaaccacactcatatgggtggtttttattgtggactaattaaggtaggtgactcgccggcggcgagtgttcggttgcttcgtgacttcacttgccgcacttgcagtcggtgcaggagcagctggtgccgcacttgcagccgccgttctcctcgccggcggcgacctcctcgaagtggctcttctcggcttcaactatgacgacgccatagctggtacctttcttcacgcact

SEQ ID NO: 402652 - DNA, 492 bp, Oryza sativa nipponbare
ggctggaaaatttgatgatttatttcccacttatatcatcatatacaaatactaacacatgcgaaaattatcaagcagaaaagttccatacaaattcatccagacaaacaagtgtaaaaaaccttttttttcccatttcccccttgaactatccgtaaataccaccattccaccaaactcccctttgtcttttacgacaaataatcttttcaacccagtaacttataattaattacagagagattagcaaacatataatggtaagaatcagttgtcgtaggtgcggcactcgtcggtctccgggttgtccttgcagtaggcctcgagcgggtcggaggtctccttgagcttgtcgcgcgcgtgggttgccgccccgctcaatttcttcaacttggtccaacgccgccgggcacttgccgttggccgtgtcctccgcgcacgcctccttcgccttgtcgatgctctccgacatcttgtccgagatgtccgggg

SEQ ID NO: 402653 - DNA, 356 bp, Oryza sativa nipponbare
ccaccgaaggggttcatcacttgcatcattcgataacattgcacaggcagggttagcaataggcgtaaaactttttgcatatacacaacaatcgtgtgcctgtgaaaggaatttagatacctgatctcacaagttaacgatccaatgagaaaacgcaatccgaggctagtcgaattgctcccagtcggtgtttatttgtgtggaagaaacccggggggggggtgcattcaagctgcccatgccattgtcgaacgtctcccactgcgttgtcactgaaacagatttgttttgatcgctgaagggattggcatttcttgccttcagcttatccaacgtctccacaagaccttggacac

SEQ ID NO: 402654 - DNA, 556 bp, Oryza sativa nipponbare
  unsure (1)..(556): unsure at all n locations
gcgaatttacctttatatgcaactgtttacaccaaaaggggaaaaaaacgggtaccttgcaaaaaggagtataactttgcagtttcaagtcccacttcaactacaacccaatctgcattacaggatgggagtctaaaacgactgcagtttcagcgtttttgaggcctgcagagacactgggctcgcgttgcagcaaaagattaggcggcggcgcccacggtggcgccggcggtgagcctcgacgagccgtagagagtctcctcgaaccggatgatctcgttcttggaaccgtaggccacttgagtccgctcgtcgaggttgttgatcaccttgtccagcaccgactgtttgccgtcgctgctgtacccgccggctttctctatcaagaaacccaacggcgccaccttgaacaggaaccttaatttgggccttggttgtcggagacgtcacgttggtgaagatgcccttctccttaactatgatctggttgacatcaggaaccattcctncagtgtaacgcaatgtgtacttctccttgacatagtagttgatgagc

SEQ ID NO: 402655 - DNA, 532 bp, Oryza sativa nipponbare
atccaacaaacacaaaatgctgggaagttattcaaacgatttccagcatctctataaaacattggtctcttacatttcgagtggttgaagaggtgcgagaaaggagtagaatatagcaagtttagaatggtacatgaagaagatgcaacaaaatgaaacttagcctcatacggccacagtgacagcttcatcaagtgcaatgactccaggaagttcctttccttccaacagctccaagctagcaccacctcccgttgaaatgtggctcataacatctgcaactcccaccttctcaacagcggcaacagaatcacctcctccaataatggttgtaacacccttgccgctaaggtctgccaacttctttgcaatagcctcagttcctactgcaaacttggcaaatttcaaagacacccataggtccattccaaatgactgtctgtgttgtttccagggtagagctgaatgacgcgactgaatctggaccaatatccagacccatccaaccatcaggaatagcagatgctggaac

SEQ ID NO: 402656 - DNA, 579 bp, Oryza sativa nipponbare
agggagggaagagattattacatatgtgttaagagcagaggccattgagatggtacataaccaaactgtaaaataaaaatatatagcatattatatattgatatatcatcaacatagcccaaaacaaagctgcatactattattataggcagcaatccaccagcgcgatgcttgatcttagcttagttgccaccagactcctcgcaacctgggggcttgtaggcgatgaagctaatcaactgcacctgcctgacgttgtcgaagccgatgatacggacaaaggcatcggggtaggccttcttggcctcctcgagctccttgagcacctgggtggcatcggtgcagccgaacatgggcagcttccacatggtccaatacctgccatcgtagtacccgggagaactggtggttttacggtagacgaatccaaccttgctgaactcgaggcaaggcacccacttggatcgaagcaagtactcgatctgcttcaaaagatcctccacggtgagtggtggcaggtacgatagggtctcgaacttcttgatgccctcaattggccacacctgcatgcacttgatc

SEQ ID NO: 402657 - DNA, 602 bp, Oryza sativa nipponbare
  unsure (1)..(602): unsure at all n locations
ggcatcgttttagctggcttcgttggagatcctataataacgatacatcattaattcgatcatcccttggatgcggcctgcggcttacattaaatctcgatccaaagaagcaaagatgatgacagacagaaattaattaagctagaaatctcctcgatcgatcacacacacacacacaattaaggtacatacatacatgcactgctgcaactgcaactgcagggtcggtgcgtggctactacaagtgtacacatggtacgttggttggcaccatctcgatcgtgtcgttgtgctcacttgccggggacgaagttggtggcgtatgcccaggcgttgttggcgacggggtcggcgacgtggtcgaagaggttctcgatggggcccttgccggtgacgatggcccggacaaaaaaacccaaccttggagaacatggcgaggcggccgttcttgagctccttcaccttgagctcggcgaaggtgtcagggtcgtcggcgaggccgagcgggtcgaaggcgccgcctgggtacaccttgtcgaggccctcgccgagcgggccgccgncgacgcgggagccctcgacgaatcccatgagcaccacct

SEQ ID NO: 402658 - DNA, 524 bp, Oryza sativa nipponbare
ttgcatatgtgcattcacagtcacactcacttagtcaaataccaagatcgatcgatcgatgtacaagtggatgcattaattcatcatcttgggtgttcttatattacaaatcaccaccatgcaagtcgccattaaccaccaacccagctttcctaatttaagtagtaatcaacaaaaggatgacctctcctctctccataccctcccagctcgctcgtcatcacaaaactaaacagcgcgcgcgaacgcacaccaacgcatcgatcccgtttgaattgcgcgcgaaagagcttaaattaagaggatgaggagaaggtgtcgaagatggtggtgtggagcgggtcgctgaggtgggtggcccagttgttgaggggccccttgccggtggcggcgggctgcacggggaaacccaaggaaggcgaccatggcgaggcgggcgtgcttgatctccgccagctgcagccgctccttcttctccgggtccgacgccaacccgagcgggtcgaagtaggacccccccgggt

SEQ ID NO: 402659 - DNA, 500 bp, Oryza sativa nipponbare
gctataaaagagtatccatctcacagattcataaccctcaaaaagggttacttatgcagtgaaaagggttttatgctctttcatacagtgtgacagtgtgtgtacatataatttggaaaaacaaagtgaagatggatttacagcagcgtttctcagatacagcggacttatagctacaagctgatcacacaagtgaactttgctgctgatgatgatatggatcatgttgttatagcttacgcccaccacgggttgtcgccggtcctgaagtcggtctccacccacggcacgaagagaaccttgccgtcgtcgacgtcggcgtgcaccaatgccagcgacaggggagcaggtccacggacgaccctgccctggttgttgtactgcgagccgtggcaggggcagatgaactttgttctcggggcgttccacggcacgacgcacccaaggtgcgtgcacacggcgttgatcccgtacgtggcggacgcgtggcggacgcgtgg

SEQ ID NO: 402660 - DNA, 384 bp, Oryza sativa nipponbare
agcaataatcaaacactaggtctcgtatggatcattacaaagtacacaaatgtacaaattaaaacatcaaaagagttaactaagcttaaagcagcagctgacacataagttgcaaaccccaacttttttcagtttctgaattctggatggatcatatcagattcatcacagcatcgtacaatctgtgcaagcattggtacatcgagcgatggagagagagagtagtctacaatggcggctgggccattcacgagcccggcgtgaacttggtggcgtagacccaggcgttgttggcgacggggtcggcgaggtggtcgagcaggttctccaaggggcccttgccggtgacgatggcctggacgaagaagccgaacatggagaaca

SEQ ID NO: 402661 - DNA, 345 bp, Oryza sativa nipponbare
gaccaatatagtttgctgccaattaccatataccacgaccgtcaaaacaagaagctgaagcatccagcacagtaaaacacggttcaacaacatccagggagataacaacggaagcataaaagtctaatatgacgattgatttaaccagtccatgaacccggcgagtgacgctctagttcttgatcttcttcttgggcctcagctggttgctgtgaccacacttcttcttgcggcagttgacagccctagggtgcaggcgcgcatagcatttgcggcagatcatcttgtcctggttgtacttgcgggcaagcgcctgaagcgacggctcgatgatcggacgcgtgg

SEQ ID NO: 402662 - DNA, 543 bp, Oryza sativa nipponbare
tttttttttttttggtttggtttttttttttttagccggcaacaacaactcaagattgaatcatacgtaagggcttgctgatacaatatcaacatgggggggacattgccggttccatttgaacaaacataaaaaccccgaaaccccatatggccattatgccgatcctagcctagcttggggaggacattgccaagagcagatttggtcaacgggtagtacttttccgccttttcggggctcttgatcttggctgcatgggcaagctgcacaaatcacaaagggggatttttgtcaacaactcagctgagcaacagtaatactttttccggttcatttcatattataaattggttggctattttcttaatcaaaggttttagctttgactaagtttatagaaaaaaataaggacctttggggatttaaattaattttattaaatttaacattgaatatattttaataatatgtttattttggattgaaaatattagtatatttttaaaaaaacttgataaaacttgaagaagtttggccaag

SEQ ID NO: 402663 - DNA, 552 bp, Oryza sativa nipponbare
gggcctggagtgaagactaaagacgttaaatatcgattcagttttaacagttgtagcactgagaaaaagaaggaaaaaaaatcgggagccaaagaaattaatctagtggcggatagtctattggttgttctccatcatgatgaataaactctcagacatagatgctgactcggactcccaaggatctgatttaaccagttccttccaacagttttcgacaaaaggggtgaatgaaaaaagcatcacaattcgctggatcgcggaaggctataggtgatggttaagcgatcttcccgtaaacaatccagcttggctcaagcggtcagttcgacgccactcgatttaaacgtggcttcaccggtgtcttagaagggctcaccctgacaggcagtgtaccccaaattcttccaattgcaattcagagccatgatggcacactcggcatggacaaactcaacaaaagcaatccttgtagaatgtacattatcccctagaagtctcaaacgagagacctcaccacaaagttcttcaaagaaattctttacatctaat

SEQ ID NO: 402664 - DNA, 406 bp, Oryza sativa nipponbare
tttttcgaagaacgacatatcaaataaatattaatgcaatttaccaggagataaaactaaagcttcaacatgaggccttctgtctatgtttcatttactgaactgtaacaaccaaaattacccaacaagatgatacaacaacattttacacagctgccttagttgcccacaatgccttctgctgctgctggtcctctgttctgccaatatttgagagcatagtaaacggaagagacgacaagggctcccaggacgatgtaggtgattattgtagttgcgccaatttgagtggggctcttcttctgcttgctttgtgccagcagtgcctttggcttgaccttggccatggtgcacttcttaatccgtagctcgcgcttcaccggagttgctcgccggcgactggggg

SEQ ID NO: 402665 - DNA, 525 bp, Oryza sativa nipponbare
tagctagaacactgctgctaccatgagatagtttatccccctgtagtactgtacatcagaaattcaccactcaactcaccccctcacccatgcatccagatccatgcatgcaggaaacaattaccacaacacacacagtaagtctgaatctcatcacatccatctctctctctctcctccccccaattcattaacatcttatacatgcatactccacaaaaaaaaaaagaagaaacaagaagagaacatcttccatcgcccaatcatcggtttcaccagcctgaactcatcaagctccttgagatgccctggccctgatgaaatcgatcacacgctcagcctgacagcgtctggatgatggtgttgtgccacgggtcagacaggtgctgcagcaagttgtcgaagggccccttcttgcttacgttgtgctgcaccaggaaccccaagaacgccagcatcgccagcctcccgttggcgagctccttctccttggcctcgagggtgggctcgaagttgagggggttg

SEQ ID NO: 402666 - DNA, 546 bp, Oryza sativa nipponbare
aaatatatatagccggagcttccatatatttcattcacatatgcctcacccaacaacatatagtcgtagcagataccactcttacatcaagtcagagagagatcaggtgaaacaaaaacaaaagcagagcacggccggtaaaatcaaaagacgatgaacaaactgggaacacacgaaacaaggtgggagacatcatcgaatcagagatgaacaattaaacaaggctatatatgacgatgacggcttagttgccaccagactcctcgcagcccgggggcttgtaggcgatgaagctgatgagctgcacctgcctgacgttgtcgaagccgatgatacggacgaatgcatcagggtacgccttcttggcctcctcgagctccttgagcacctgggtggcgtcagtgcacccgaacatgggcagcttccacatggtccagtacctgccatcgtagtatccgggggatctgtggttctcacggtagacgaatccgaccttgctgaactcgaggcagggcacccacttgggacggagcaggtactcgatct

SEQ ID NO: 402667 - DNA, 603 bp, Oryza sativa nipponbare
aaataaatatccgagttagttggaagtgcacaaaaagcttggtttttctgtttctgttacagatataggaattaggaaagcattgcaaaagggattctcacatcacattatgccaatttgaagtaacatccttggtaaaaagatcagaaagtattctccagctattctatgtgaactagatatggcattaggtacaaataatcatgttgactttgcttcctccggctgcaattcttgcactgggatcctatggaagcaagcaagaaactctttgttcccttccgcgccctttatcggagattcaatccagcccttgttgcagaatccaaactgctctacgcctgaaattatcctatctagcacctctttatgaaccagagggtcccgaacaatcccaccaccttctacctgagatcgaccagccttaaattgaggtttgataagtgtaatcaatgtcgagtctgtcttcattactttgactacagcaggcataaccaagagaattgagatgaatgacagatccagggtcaccaagtcaaccagctgtggcagttcagtaagatatcttaaatttgtacgttcaattactgaaacacgttcatg

SEQ ID NO: 402668 - DNA, 588 bp, Oryza sativa nipponbare
ttgggaaacgaataaaatgattattgcaaaaacatcatcttcttcttcatcttcttagtgtacacaacaccaactcgatcatcatctcgtcgcactaaacccatcttccccaacccaaagacaacgaactcgctggccacaaatccatccaaccacaattaaccactgctaagctacggtcccccacttcacttgccggggacgaagttggtggcgtacgcccaggcgttgttgttgacggggtcggcgaggtggtcggcgaggttctcgagggggcccttgccggtgacgatggcctggacgaagaagccgaacatggagaacatggcgaggcggccgttcttgatctccttcaccttgagctccgcgaacgcctcggggtcatcggcgaggccgagcgggtcgaaaggcgccgccggggtaaagcgggtcgacgacctcgccgagcggcccgccggcgatgcggtacccctcgacggcgcccatgagcaccacctgcaccgcccagatggcgaggatgctctgcgcgtggatcaggctcgggttgccgaggtagtccagcccgccctcgctgaagatctgcgagcc

SEQ ID NO: 402669 - DNA, 468 bp, Oryza sativa nipponbare
agctaaaagattgcgacgtcaaccacagcttttatacaaaaccaggaggattaaacgtacgccacaacacaaagtaaaagagctaagtagaacatcatcatccacgaaaatgtcgtcacatgcatacatctaaaacaccatttttctgctgccataagcgccccactcttacttattcagttcaggacttcaggcgaaggctacctctcaccttcaggcgcggtgacctcacctactgggtcttcgccgactcgctcttcgacggctgggcctccggcgataactcgccgaaaaccttggcgatgcgctcggtggggatggcggggaggtactgtgctccggtgtaacccttgtcggccgcggcggcgatcaccttgttgtacttctcggcccagtaggcggcggtgggcacggggatctgcgccacctgcgggaacagcggcaggttgttgagcgagcgccaggtgg
